United States Patent Application Publication US 2010/0064393 A1 - sequence listing, part 2

SEQ ID NO: 1 - DNA, 4345159 bp, Bacillus licheniformis (residues 1,448,388-2,896,774 of 4,345,159)
aggcgcttttatcagctatcccgattcccgatccggatgtggaagacaagcggagacgaatcatactgaaaggcgagctgccaagtccgatcgatccgccgagcggctgcgttttcagaacgaggtgtcctgccgcgatggacatttgcgccgccaaaaagccgatgttaaaagaagccgacgacggtcattttgtcgcctgccatctgtatgacggagacgcaaggaaagaggaggccggcttgaaggtgacgctgcaggcgaggtgattatagaaaaaaggagccctatttacagggctcctcagcgtgccggcagcttttccacatttgttaagtcgccgattcgaaatggaataaggatcaggcgccgcctttgtaacattcagtggaagtacgctcaatcggcagagtacagcatctgaatgatccgcctgattttatgatctcggataagtcgatttcgatgaccgtatagcccctttttctgagctcctgattcacgtggcggttaacaggcaggctgatcacggttttattgccgatggacagaacgtttgtaccgagttggaactgttcatcatccgtaatttcgatcatctcatagcgctttttcaagacgtcgtattcactttctcctaaggcttttggatagacaagcgcttctgtcggcgaaagaatgttgaagacgcaatccagatgaaggaacgtttcttcaaacggaaccggtatgacttcataagagggaagcctgcgcttcagctcttggacggccgagaacgtcgttctgtggctgatgccggcatatatggtattttggtcgacgaggatgtcgccgccttcgatttgatagccttcattaaatgcggtccaggagatttgttcttttgccagccattcctgcaggacattttcttcgccctggcggatgtcggctgaaagctgcgcggaaaacacagtgcctccgatcgtaaacccgatatcgcgcgtgaaaacctgttccggaaattggcttaaagcaggcagaatcacgacttcaataccccggctctccaattcttttatcaatgtattatgctggcggacggccagcgttttatcgatattatccttttgaaaatacttctgtgtttcattgatcacttctgcgatctccatatactccggtctgcataacacgactttttttaagacgtcgtattcgcttgtacagcccgccccgcggttttttttcgataatgctgagtccattttgattcccccgtcctctctttagtcatttcattattccctacccgcagcgggaaataaaccttttagccagaaaatctgacagtcagccggataaaaaagtttagacaaatgaattctaatagtgtttaatatagaaaaaatccactttacaaacgcatcttagtagacatcaaaggagtaatggatgatgaatggacctgaaaagagatactgcaaagaatcaaaagttgtcaaaacaagcagggtatttccgcttgatacgaacaatcacaacaccttgttcggcggcaagctgatgagctatatcgacgatatcgcttcgatttcggcagcgagacactcgaggtgtgaaaccgtgacagcttcaatggattccgtcgattttctcgaaccgatccgccaggaggattcagtctgccttgaatcttatgtgacatgggtcggcagaacgtcaatggaggtattcgtcaaagtcattaaagagcatttgctgacaggcgaacgaaagcttgcggcgacatcctttttaacctttgtggcgcttgatcaggacggcaatcctcaggccgttccccaagttgtaccgcagtctgaagaagaaatcatgctgcacgagaccgcccggcagcgcgccgaagaacggaaaaaccatcgcaaacacagcaaagcgctggcccaggcgctggctgttgacaaaccttggtaaacatacgaacaaaaccccggctcaagcatcagtttgccggggttttgctgtgcaatgaatacactacccaatatttgttcaaaataaattacaaaaaacggaaagaagttttgggtgaaatgcttgaatttgtatggacttttttagccaagcctgctttagtgttctctatagcttatattcttttccgaatcgcagggaagaaagccgtttcgcaaatgacgaacttcgaccttttgctgacatttgcgattggaacgatcatcagcgaaccgattcttacttctaaaatttcaatgtccatttattacgcgcttacctttctgatcttctatttgttgattgaaaagctgtcattacacaataaatggcgatggtttcttgtcgtcagtccgaccgtgctgatccgaaacggcaatattgataaaggaggattaaaaagagagcggctgactgtcaatgaactgctcggcaaattgcgcgaaaaaggctatgccgacccaaaagatatcgacctcgccctgattgaagaatcgggccagatcagcgtgattcccaaatcggaagcaaggcctgtacagccgcgggacctcaacttggagacgaagcggaatttcgtgccgattccgctcattttagacggcgaaattatcgaacacaatttaaaatacttgaaaaaaacgaaagaatggctgtttcaaaaattagaggataaagggattgagcaagcgatgctgccaaccattacgctcggcaccttgaacgaaaaaaatgaaattataattgatacggaagatcccggcagcccgttaacccatgacccgtatctctataaaccggggcaagaccattaattttcgccgaataggcgatttttttatttcctgctatttcagaaaaatattaagagtctgtttttttattcgttgataaaaatgaacagggcatttgtcataaaatttgaaaatggtgtcacaaaaaataggaggaaaatatgttgttttctgtatttttatagcatatattagtttttgtgaaaaaattttgatggtaggtgcaattgatgaaaaggttttttagtgtaataattttaggcgccctgctgctgctcgggacatctgcgccaatcgaagcggcagactacggacgcgacgtcctcggctcaaaagacggctggggcgcttatggaaaaggaacgaccggaggcgctgacgcttcttctgatcaggtatatacggtcaaaaaccgcaagcagcttgttgaggcattagggggagacaataaaaagaacagcgaaaatgatacgccgaagatcatctatgtgaagggaacaatcaatcttagtgttgatgatgacaacaatcctttaggctatgaagattataaagaccccgaatattcgatcgaagcgtatctcaaagcttatgatccgaagaaatgggggaaaaaggagccgacaggaaagcttgaagaggcaaggctccgctcgaaagataatcaaaaggaacgggtcttgatcagagtcggttcgaacacaacgattatcgggctcggagatgatgcgaaaatcgtcggcggaggcctttatgtcaaaaacgcggaaaacgtcattatccgcaatatcgaattcgaaaacgcgtacgatttcttccctggctgggatccgacggatgggagcagcggtaactggaattcagaatatgacaacctgctgatcgaaatgtccaaaaatatttggatcgaccactgctcattcaatgacggagatcagcctgatgagctgactgaaacgcatttcgggcgcgaattccagcatcacgacggactgcttgatatcaaaaagcagtcggatttcattacggtgtcatacagcatattttcaggacattctaaaaacacgattatcggatcaagcgacagctacaaagcagacaacgggcatttaagggtgacattccaccacaatctctacgaaaatataaaagagcgggcaccgcgcgtccgctacggaaaagtgcacatttacaacaactattttaaaagcacgaaagacagctacaattattcatggggcgtaggctattcttcaaaaatttatgctgaggacaactactttgacctgccggaaggaacgaagcctcaaaaactgatgaaggtctttaaaggtgacgctttatatgaaaaagatacgatcgtaaacaaccaaaaaagcgtcgcaaaaattgatgttgtcagcacatacaacaaagcaaacaatgcgtctattaaaaaatcggccggctggaagccgacgctgtttgaaaaaatcgacgacgcagaagatgtgccggcaatcgttgaagcgcacgcaggcgcaggaaaactgaagtaatcaagcaaagcggacatgcagatgatgtccgcttttttgttcaggtatcttgcaatgcaaaatagtgtatgttatcattcgtgtatcttgtattgcaagataaagaggtggcttatgagttcaacgcaaatgctgaaagggattttagaaggatgtctgcttgccgttatatcagaaggggagatatacggctatgaaatgacaaaggtgcttgcgggatacggtttttcggatatcagcgaaggaagcatctatccgattctcctccgcatgcaaaaggaaaaatgggtggagaccgaactaaaacggtcggcgagcggcccgaagagaaaatattacagacttacaccccttggagaagcggagcttcaatcgttcatcgaccgttggaaagcattatccgggaacgtcaatgcactgctcgaaaaaaaactgaaggagaagtgaaactgtgctatcaaaggacatgcaaaacgtattggacgagatgagaatctacttaatgtcttcaggaaaaagcgacaaagaaatcgaaggaatcatgaatgagctaaccgttcatgcctgggaaggagaaaaggacggaaaaaccgtccggcaaatttttggggattctcccaagtcatatgttcaagcgctgtcaaaagagctttcatcaaggccaggggagatcgccaagttgttctttgccattttaatcggcgcaatatcctattttatattcagcgacgccgtgaacgacagcctcgattattctgtctatacgctggcaggctatccgctttatattttgctggcagcggctatgttgccgcttttgggccggattacagcatttaaagggaagaatacggccttcatgtatacgatggtgtacgccgctttgacgttttttccgattttggccattatttttattgaccggcaattcgggacaccggttttttcgtttgatgggggaagccgctggctgattatggccctgtcgtttcttgtgatcgtatgtttgtctttcaggttgaaagccggagccttgtccatattgccgctgcttttagccggaacgcattttttgtttcagtatatgaactgggattcagcaggagccatgatggcagaaacttatattccctatatcgggctgcttctcgtcatgtttattgaaacaaagcgtgccagaaatacggctcaatatgaatgaaatacagaagagcattatattttttaaggtgaagactcttgccttttggcgatcacaacgtttatgatcagagcatgaaaggtggccgatatatggatatgatgtggggctatgtactcgtctttattttggctgcgattccgtggtttgaagtgatcggtgtcgtgccgctagcgatcattgccgggcttaaacctgttccgtccgctattatcgcgctattaggaaatctattaaccgtactgctgcttatttttttaattgacaaagtgaaggtatggctagaaagaagacgcggggagcggagagcggagacggataagttctcaaaaaggaaaagcagggcgaaaaaaatatggctgacctacggcattccgggcctttctttcgtcgggcctttctttatcggctcccacttaaccgcgtttatgtgcatgggctttggggccaagcgcagacaaacggcgctgtggatgacggggagtctcgcagtatggacaacggcgtcggctgtcgctgcctactatggtttcagtttcctcgctcctgaaaatgaagggctgctgaaaaatatctttaaacaggaggagtgaagatatgccgtttttgaaagatttatctccagatgaagagatggcgccgacagtcgggctgcttttttcggcggtcaatgaaaacatcgaacggctgaaatcaatcgtctccggcatcagccgggaagagctggaatataagggtgagcatggcgacaaaaacagcatcgcccagctgatctatcatttaatcaatgtcgatgtccgctgggtttacaggctgaaggaaagcgaaattccaagagagctggaagagaaatacggaccgatgacggatgaaaacggacgtttgccggaggtgacaggcgtccctttgaccgtgttaatcgagtggcatgaagaggtgctggagatgttgaaacacaccgctaaaggcttttcggaaaaagacttgctgaagaaggttccgtatgagggagggttttcgacgatccgctgggggatctggcatatgtctgatcataaccgctatcaccaggcgcatattcaggcttgcttaaaagagttccgcatgcaaaacagttgattttttcgtatgatttggtatgatgctaattagcaaacttcataacgttaaagttttctagggttccgcacattcgtatgtggcctggtccgagagaaaacacatatgatttgttcatatgcacacggagggataaaagcccgggagtatcgtttccatcgatagcccgggttttttcttttgctgaaaatgaaattggagggattgtgatgagatggggcagtgtcatacttgcagccttgtttgaaattggctgggtcatggggctgaaacacgccgattcggcacttgaatggatctgcacggcggccgccgtcgtgatgagcttctatatactggtgaaagcgggggagaagctgccggtcggaaccgtgtatgccgtatttaccggtctcgggacggcgggaacggtcgtctgcgaaatcgccttgttcaatgagccggcaaatatcgccaagcttgctctgatcggtgttttgctatgcggcgtgatcggtttgaagcttgtaacaaatgaagagaaaggggaggcgtcataatggaatggatctgcctaatcgctgccggcctgctggagatgctcggcgtgacgatgatgaaccagtttcataaagacaagcgggtgagatggatctttttgttgatcatcgggtttgccgcttcttttttcttgctttcccttgcgatggagacgctgccgatgggaaccgcgtacgcagtgtggacagggatcggcacggtcggaggtgcgcttgtcggcatcctgttttacggagagccgaaagacggaaaacgcatctttttcatcgcgctcattttgggatctgccgtcgggctgaaacttattagctagagtcgggttgatgcaaataggcgttcgtaaattgatttttcaataaactccagtataatgaaaagatagtttacgaattacaagcaaagagggtttttacgaaaatgaacgcatatatgaaacagcagttatcgcaatatcaggaaatcaataacgataaggcccgccttctggtcagctgtccggatcagcctggaatcgtcgccgccgtttcttcatttttatttgagaacggtgcgaatattattgaatcgaaccagtatacgacagaccctgaaggaggccggttctttctgcggattgagtttgaagttcaaggcatccgcgaaaagatcgaacagatgaaagcggcattcgcctctgtggcggagtccttccaaatgacgtggagcatgaatttggcgagcgaactgaaacgcgtcgctatcttcgtttcaaaagagcttcactgcctgcatgaactgctatgggaatggcagagcggcaatttgatggcggagattgcagcggttatcagcaatcatgaagatgcaagagaaactgttgaatccctgaatattccgttcctttacatgaaagcgaacaaagacattcgtcaggaagtggaaaaacagcagctgaaatggcttgaagagtatcgtgcggatgtcatcgttctcgcccgatatatgcagattttaacgcctgattttgtctcggctcatccgaacaaaatcattaatattcaccactccttcctgccggcttttatcggggcgaatccgtataaacgggcatatgaaagaggcgttaaactgatcggagcaacatcgcattatgtgacaaacgaattggatgaagggccgatcatcgaacaggatatcgaacgggtcgaccacagagacaatgtggaagcattgaaaaacatcggccgcacgattgagagaagcgttttggcaagagcggtcaaatggcacttggaagaccggattatcgtgcatggaaacaagacgatcgtctttaattaaattgtttgatctgcctcttgacagaggcgtttttcctaggcataataataaaaaatcacgagcgttgaagagggccagtaagcagttctttctgtgaaagagagtgaaatggcatgctgaaacatttcaccacatgaaacctgccgaacctgcctcggagtcccagggggaaaacctgggcgcataccctggcgttaaaggggaaagaggagtgcgctttattttctcgcgcattcaatgaaggtggtaccgcggaaagctcttttcgtccttttttacttggacgaaaagggctttttttattggccttctgccagatcatctcggagggaaaaaacgtgaaaaaacaacggattgtcattaaaatcggaagcagttcattaaccaactcgaagggcagcatcgatgaggagaagatcaatgaccatgttcgggcgatagctgctctgaaaaaagaaggccatgaagtcatcttcatttcgtcgggggctgtcgctgcgggatttttacagctcggctatcccgcaaggcctgtgacgctaaagggaaaacaggctgcagcggccgtcggccagagcttgttaatgcaaacatacatcgagcattttgcagaccacgatatcaagcctgcgcagatcttattgacgagaaacgattttgccaaacgggagcgctatcgaaatgcatatgcgaccattatggaactgattgaacgggggcttgtcccgattattaatgaaaatgattcggtatctgttgaagaattgacgtttggggacaacgacatgctttccgcccttgtaagcggactgattcatgccgacaaactcatcattttaacggatattaacggcctctatgactcgaatccggctgaacatcccgatgcccgccgttttgattacattcccgaaattacggacgaacttttgggctgcgccgcttccgccggatcaaaagtcgggacgggcgggatgaagtcgaagcttttggcggcaaaaaccgctctttcactcggcgtcaatgttttcataggcgccggagagggagatgataagctgatccagattttaaaaggaaacggggacggcacctatatcggccaatccgacctgtcttccgtcaacaatcataggcagtggatcgcctttcattcacctgtttcagggaagattaccgttgatgaaggggctgagctggcgattaccgaaaacggcgggagcctgctgccggccggcgtaacagcgatatccggagattttccgaaaggggcggttgtcgaagtttacggaccgaacggcctggccgggaaaggccaaacgctgtactccgccgcagagcttgaagaggtaaaagggaagcgaagcgatgagttccatcatgaagaagggatagaagtcatccatcgaaatgattgggtaagcattaaagaataaggggatgaaagaatgagcgaagtgattgaaaaagcaaaaaaggccaaagtcgcaaaggaagaactggttcatcagccgactgaaaggaaaaatgaggcgctttcctttatcgccgaggccatccgctttaagcaggatgagatattggcagaaaacgagaaagatatcgtccgcggcaaagaaaaaggcttttcgcctgcgctgcttgaccgccttgccttaacgccggagaggctgaatgatatagcagacgccgtcatgctgctcacaaagcttgaagaccctgtgggggaaacgcttgaaacgatccgcaaagacaacgggcttttcattgaaaatgtcagggtcccgctcggagtcgtcggaatgatctatgaggctcgtccgaatgtaacggtcgacgccgcaaccctttgtttgaaaacgggaaatgccgtcatcctgcggggcagttcgtcagccatcaacagcaataaagcgctcgtccgcgtgatcagggaagcgctcgtccgctcggcgcttccagaggatgccgttcagctcattgaagatacaagcaaagaaacggcaaaacagctgttcactttaaacgacggcttggatgtgctcatcccgagaggagggaaaaacctcatcgatatggtggtgcgggaatccacagtgcctgtgcttgaaacaggcgcggggaactgccacatattcattgatgaatcggctcagccagacatggctgagcaggttgtaatcaatgccaaaacgcagcgcccttctgtctgcaatgcgattgaaacggtgctcatccataaaggctgggcggaagagcatacgaaagcgcttcttcaaaagcttgaagaagcgggcgttgaaatcaggggagacgaagccgtatgcacgatgctgccttctgcggttccagctcgcgagaccgactggggaaccgagtttcttgcgccggttgtcagcatcaaaaccgttgccggaatcgatgaagccatccggcacatcagacagtacggcacacgtcattcggaagcgattctgactgaaaatcaggaaaacgcccggtatttcttaacgtctgttgacgctgcagctgtttaccacaatgcttcaacacgttttacagacggctttgaattcggctacggcgccgaaatcggcatcagcacgcaaaagcttcacgcacgggggccgatgggccttaaagcgctgacttcttctaaatatatcattaaaggaaacggacaaatccggatatgaaagtgtggcatcctgtctcgaatgaagacaggatgttttttgttgtgttatcacttttaattttataaaattaaattgttcacaatataaattaaaggagacgataaatcatgaaaccgctatttacctcgcaagccactgccaatggtggcagagacggacaagtcacctcatctgaccgcgtccttgagctggagctggccatgccgggaacgccaaaagccaaggaaaacgaaaatgccaccaacccggagcagctgtttgccgccggatacgcggcatgctttgacagcgcattgcaattgaccgcccaaaaggcgcgtcttcgaatggagacagaggtgacggcgaacgtcagccttctgaaagatgaagcagatggaggctataagctcagtgtcacactgcaagtaaaaggaaccggcgttgaacagagggagctcgaaaaactcgtccatcatgctcataccgtttgcccgtattcaaaagcaatttccggaaatgttgatgtcaaccttgaagtgatttcttaaaaaagaggcgccttcagcgtgtcgccaaaccctcgcattcgttgtcaggcctgcgcttcggtgctcacgaacaggagaaggatcggcggctaatgcccccaggcgtcctgcctgaacgccgccgtcatcacatcctgtgaaagtcagctccgatgctcggccttcctagactgcaagggttgcgggtcacgctgaaaggacgacaaaaacccaaaactgttttttgttttgggtttttgtcaacaatctgaaggcgcctttttgctgtctttacagcacatctgtttttttcgtcaatgaagcaagaagggattcaagcgtttgcttcaagtttttcagttcgccagccgacagatcggtctgggcgatcatgtgctgcggaatgctgcttgctttttcttggagtgcctggccgcctgctgtcagtctgacaattacagaccgttcatcttcaggtgaccgctctcttgttaaaagcccgtgctgctccattctcttcagcatcggcgtcagtgtgccggaatcgagataaaggagcttgcccattgttttgacgcttaattccccgtgttcccataataaaaggagcgcgaggtactgcggatacgtaatattgagttcatcaagcagaggcttgtaaagcttcgtcatttcacgcgagcttgcataaaggagaaagcaaagctgtctgtcaagcctcatatgttcaaattcgtttgccatcgtttcaccaactcttttttatgttcctttttattgtataagattttgcgttcttttcccattgatcggctgaaaacccgaaaaaacaaaaacggatgtttaaaaaactcattttgtgaaatataaagagtagaggaaaaaacgtaaggaggaatcaggatgactgcattgtttacagcaaaagtcacggcaaaaggcggaagatccggacatgtcaaatcagatgacggggttttggaccataacattgttatgccaaatgaaaaaaaagaaggcgaatcagggacaaatcctgaacagctctttgcggcgggatacgcggcgtgcttcggcggcgcattggaacatgtcgcaaaacaaaaaggcattgacatcgattctgaggtcgaaggccatgtgagcttgctgaaggatgagagtgacggcggttttaaaatcggcgtcaagctgatcgtcacagcaggcggggtagaaaaagaaaaagcgaaagagctggtcgaagccgctcatgacttttgcccttattcaaaagcgacgagaggaaatatcgacgtcaatcttgaagtaaaataaataaacgggaaagatgaaaacgagaaagcaaacaaagcttgtttgctttcttttttagaaaggaacagcatatggcatatcttaaaaaagcgcttgtgttctccgtgctttctctcgctattgtccttgcaggatgcggaaccggagcggcggagaagaacaacggcaatcaatccccggctgatacggccaagcagaaagcacctgatttgaaaacatattcccttgacaaaaatatccggtctgaagaagattttgatttgataggcaagtatgttcatgctgaagatgaccaaatcacgctcgaaataaaggataaggaactgattgttccgaaaagcagccgctttcacagcgaagaagaccatgatgacttaatcgggaagcttgtgaaggtagaggtggatggaaaaacgcaagaagcggaagaagccgagcttatgccgcagtcaaaagccgaccaaaatggcgtatatgaggaggagaaagacggcagccgaaaaatcatcgccacgtttgtcagcgagtcggagcaaaacattacaatcaaaacaaaagcaggggaaaaaacttatcagaaaacagccgattttgagagggatgtcgccgaagcacctgaaaaactgaaagggaaaattgtcaggcttgaaattgaaaaggatggaaaagcagaaagccttgatttggaatcggaagatcaaaagcttgaatggtatgagccgtctgcttcaaaataaaaaaagcttcctgatgaaggaagctttttttaatattccactttttgatcggtcttttcccatgtgagaaaaggttcaagctttgcttgaaggtccattttataaaaaggaattttccgttcgcttttcgttttggtgatttcttcataaataaaagagtcgtcaaaaccggccgatgcggcatccgaatgctgagcggcgaagtaaacttccttcggtctcgcccagtagatggctcccaggcacatggggcacggttcacagcttgtataaagaatgcagtcgttcagctgataatcgccaagtgcttcacaggcgagccgaatagccgttacttccgcgtgcgcggttggatcattgcttgttgtgacattgttttttccctcggcgataatttggccgtctttgactatcacagcgccaaaaggtccgcctgtgccgcttttcacgctctccaccgcaaggtcgatggcgcgctgcaaaaatgcttcatgattcatttctgtatcctccttggttgtcttgccttcttattatagctgatggacccggcaaaataaacacatgtcagaatattcagcatatttgatttcaaaccgcacatcgcatacaatgaatgctagaataatgaacgggggatgatgttttgcttacattgtatattgcaagacacggtcagacggaatggaatattgaaaaaagaatgcaaggctgggaagactccaatttaacggctttgggactggcaaacgcaaatgccctcggcgaacggctgaaagatgttcaattccaagccgcatattccagtccaagcggccgggccgttgattctgcgcgggctatgctgcagaaccgcagcattccctttataacagacgacagattaaaagaaatctcgatcggccgctgggaagggaaaacgtatgatgagatcaaacaaagtgatcctgacttgctggaagcgtattttaatacgcctgaaacatatatgcccgatgaaagcgagagcttttacgattttgaaaggcgggtcagtcaggcgtatcaattcattctccgccgccatcgggaaggcaatgtcctcattgtcagccattccgtgtttatattgatgctcttgaatcttataaaaaagaggccggtcggtgaactatggaactcaagctatgttcatgacacagctcttgcggttgtaacggtttccgaggatggaagcgccgcgattgaaagagaaggagacggtgaacatagagtagaagcaaagaatgccacctggtaggcatgccaaaaagcctgatgttggaatcaggctccgaggctcctagccggaatatattttggcactgaagctgtgaagcgtgtcggcggtaatcgttttgttttttgaaagacaaacggttttgacatctgccgcatctgcttccgctttttttccgaaaagtaagactgtaagagaaagcgggccttttgcgatttgctgatatgccagaatgcaaaggttgtcggcgattgtgcggctgatcatgcggcgcgccgaccacagctgctgctgtccctcttcatcaaactgaatatatgctgcggctcgtttttttgtaatgagtcctgacagaccgttttgtttgatctgcttcatgagagcgagcggttcagacagcggcggtgcggtcagtttatagctgtcaggggaacatttggctgcagccaaagaagacatgatcggcaggtagccggccaaatgcccgccgctgtgaaagagcttctccgcaagcatctgatcggtctttttcatgcggatttctgtaaagtgcaggagatgctgcaaatcatcgagcgtgtgtaaaaatcctttgagttcatgttccatttcggattgcgcctgatcgatgccgcatgttcttgctgttttcacgctggagaaaagaacatgaaaatgacggttcaaaaggcgtattaaatcgctgattcgctggtgggaatagcgaaattggcgggcgagggcgtgcagatcattgatgttcagccggatcgtcatatcagctcctcggctttcagctgaagccgttcaatttcttcgtccgcctgctctttaatggtcctcagcttgtcatacacgcgcgattccgcccggtcgagatcgtccaaaagcgcgtcatacatttcgcgcgcctgtccgcgccatccgttgatatacgtttggtgtgcttttaaaatagaagaactttcctgcctcagctcatcaatggcggcattcacatcttttacgtatagctgaagagagtgaatgtcttcctgatatatttttcgcttgatttttcgttctaacgctattccatcgtcaatcaatacatattttccttcccttcatcatctactacaaatatgttaaaagaaaaggatacggaaggaaatcgtacgaatgaatcaaaagtcttaatgttttttgggcggacataccttgtataacggttcttttggcctaaaaagggctggagccatgaaaagagccgcccgtgtgaacaggcggcgtttgtagtggattttttgtgaaattaaacagtttgagccagtttgcctcttgcttgtttggctgcttcaaccatattcttaagcgctgcgatcgtttcctctggctgtctcgtttttaacccgcagtcagggtttacccagaagcgatcagccgggcagactttcagcgcgtcttctatgatcgtgagcatttcatcgctggaagggacgcgagggctgtgaatatcatatacgccaagaccaagccctttcaggtaagggtgctgttccagataatcaagaaatccgccgtggcttctgctgtgctcgatcgtaatgacgtctgcgtcaagatcttcgatcgcgtctacgatatcttcaaagttgctgtagcacatatgcgtatggatttgcgtcgtatcttccacagatgaagtggacagtctgaacgcttctgcagcccatttgagatactcgtcccaatcccgttctttaagcggcaggccttctctcaaggcaggttcatcgacctgaatgatttgaattcctgctttttcaagcgcttcaacctctttgcggagggcgcaggcgatttggaaggcgatctcttttctcggcaggtcatagcgggcaaaggaccagtttaaaatggtaacaggccctgtcagcatgcccttgactttcttcgaggtcaaggattgggcgtaaaccgtttcttttaccgtcatcggctctttaaactcgacatctccgtagatgaccggcggccggacgcagcgggaaccgtatgactgaacccaggcgtatttagtaaaggcgaatcctccgagcttttcgccgaaatactcaaccatgtctgtccgttcgaattctccgtgaacgagaacgtcaagtccgagatcttcctgaatatcaatccatttctttgtttcttcctgaataaatgcttcatactgatcgtcggaccattcttttttccgccatttttgccgcgcgctccgcacatccgccgtctgcgggaagctgccgatcgttgttgtcggcaataggggaagtccgagagagtcattttgaatccgcagcctttcttcaaaagctgtcgggcgtttaaagtcttcctcggtcagcttgcctctttcttcggcaaaggccgaatttgtcgctgcaccgtactgtttgagatcttgaaggtgtccgtgcgcttcatcgatttccgcttggatggccgcttttccggaaacaagtccgttcttcagcagtgtaagctccagaagtttctcttttgcgaaagataaaccgttcaagagatcgtcggcaagatgttcgcccgggtgttttgcgacagggacatgaagcaggctgtttgaaggctgaatccagacttcgtcaacacccgctctctggatcagttcaagcgtcaggtcgaggcgctcttcgagattggctttccaaatgttgcgtccgtctaaaatgccggcggcaaggactttgtctttaggaaaaccgtgcgctttcaggtgttcgaagtttttccctttatcatgaacaaaatcaagaccaattcctgcgacaggaaacgatatcagctcttcataagcatcaaccgagtcaaagtaggtttgcagaaggatgttcagttcagagacttcttctgtaatcgtctgatagatttctttgacagcagccgcttcttcaggtgaagccgtcacaagagcaggctcgtcaatttgcacccatttgacgccttcctgctcaagctctttcaaaacctggatataaagaggtgtcatttggttataaatatctttaatatcctgttgttcatagccttttgcaagggctacgaaagtgtaaaggccgagtatgacgggcttcgtttctgttcccaatgctgcttttgctctttggtaatcttgaagcggtttgtttctcgtcacgcggtattgtgcacctttttcatattcaggcacaatataatggtagtttgtattaaaccattttgtcatttcactcgatacagcatctttcgtgcctctcgccattgcgaaataagtatctaacggatcgtttatatccttgaatcgatctggaatccagttgaacatcaccgccgtgtcaagaacatggtcgtacattgtaaagtcggaaaccggtatgatatcgatttgctgatcaagctgagtctggagcgctgctaaaaattgttcatccatttctttcaaaaaggtctcgcggtccgtgtttcctttccaataagcctcaagcgattttttccattctctgttcaagccgattcttggaaagcccaagctgctcgtttttacattagtcatgtctggtctcctccttttagtgttcaataaaaaaagacactcacacttcggacaatgagaaggtgaatgcctgaaaacagcatgttgcgaacgagaaataaacgtagcgattgttacgtcaactcgaacacctcctatcgaccgtaggtttatggtgcgtcagaacaggcaggtctcctggctcatgaatcgacggttatttcccccttcccatatagaaacagtgggttttatgaaataacctcctcattcacagtggcgggaccgcgttggattttcaccaaacttcccttttaaatctaacctcgttagattaccatgttcccggcgatgaaattgtttagtagattatataccgtcacgatcttttagtcaaaataatttttgaattcttgcaattaaaaaagattcagctttatacatggccatgaaaaaggccgccgacattgtcggcagcctcctttagactgttaaagggaaagaagttttgcttcgccggctttttccgccagtacctccggcgctgacaaatataagaatccgttgccgatcagcgcttttgagtaatcaagaggaagggtgcggcggattaactgagcatacagttcgggttctgtcagtttccgtttaaacgcctcttcttcagctgacttgatgagagcgagcgcgccgctgacgtgcggtgtagccatcgatgttcccgtcagctttccgtattgatggtcgggcaatgtagagaggatttcttctccaggtgcaacaaggtcaatttctttgttcgcatttgaaaattcggaagactcacgcgtcaatgacacggatccgacggcgatgacttcgttgtatgcagcagggtatgagtactcctctgtacggtcattgccgtcgccttcgtttcctgcggcgcagacgacgagcactccgctcttcacggcgtttgtcaccgcttccttcaactccggaacgtcggcaggaccgccgagcgacattgaaataatgtcggctttttgctcaacggcgtagttgatcccgttgatgatccattcataatccccgctgccgtcttcaccgccgagcaccttgacgattaataggttcgcttcgggtgctacgccggaaatgcctccgttttgatcgtttgcggcaatcgtacccgccacatgggtgccatgtccattataatcatgaaactgatcttcttttccgttgtcatcatcagtgaagtttctgcctccgatgattcggtctgccaaatctggatgggttgcgtcacagcctgtatcaagcactgcgacagtgatatcttttcctttaaaaccttgtgaccacagctccggtgccttaatcgcatcgattccttccggcagttcattcacgtccatcagctttgtgtcagtgacataaggaattaatcgcatttgcatttcaaagccctccctgttatatgctgctttagatgggttacaaggtgcgtgattctattgtaaaacattcactttagtaaaaaaaaaggttcatttgtatgaattttatgaaaagttaaaaaatatagataatagaggatataagtcgaataattgcgaacaatgctggaattgtaagcgaaaagacctgtgaaatcggtggaagggcgagagagtcactagatatatgagatttcgcttcaacatattatcccggcaaaaggatatcctattaaaaaaaggagtggatacagggtgaaagaacaagaagacgaaaaaagagacgaattatcaatcgagcaggcggagtttgtgccgcatccaaaatatgaaggagaatacgcgcttttactgcacgaaaactatcacctgctgtcaaaggacgaccttgagcaggaaagcgaaaaataagaacggagctcggcacctgggcgaaagagctggtttaattttgacgaaaacgggaatcaacacataatagagagcatgaaagttgcttttcttattgacagttatcctttttttctgtaatctcattgtgtccggtaaatacagctcttcgttaggtgaggctcctgtatggagatacgctgctgcccaaaaatgtccaaagacgccaatgggtcaacagaaatcatcgatctaaggtgatttttaatgcagctggcatgctgcctatgccatacagtgctaaagctctacgatggaaggcgttagggttttattttgtatggcttttaacaccttcatttcgatgaataggtgtttttttattttttgaggaaaatgaactttacgtattaatcaaggaggtggtagtatggattctccccattcgaggcggtttaaacatacgagaaatattttgcagcatcacacattgattgatgaggagatccttatacttcaccccttttgctatggtgatataaggatctcctgaaaagggagggacagattgccatggtaaaaaacatgacatatgatgaactgattttacgcattattattttgctgagagacggaaaacgaaaagagttccaaagcgttttagaagaactgcagccttatgatatggcgattctgtttaaggaaatgcccgaaaagcaccgcggccggtatctgtcttttttaacggtagaagacattaccgatctcatgggcgaacttgacagagaagagcagctagtcgttctgaacaaggtcggcaaagaaaaggcgatccatgtgatgaataaaatggacaacgacgaccttgccgcgctcttcgaggaaatggaccctgagctgaaagaccagcttctatccagcatggaagcggaagaatccgaagcggtccgcgttttgatgaactacccgcctgaaacagcgggaagaattatgacaaaccgctatgtctggattccgcagcattacacggtaaaagaagcggtcgtcaagctgaaaagctttgcggaaatcgcggagtccatcaactatttatacgtcatcaacgaacaaaaacagcttgtcggggttatctcataccgtgatctcattttggcagaacccgatgagaaggttcaggaattaatgtttacaagggtcatatcggcggacgctcttcaagatcaggaagaagtcgcaaggctcatcgagcggtacgactttctggcgattcccgttgtagaaaaaaatcatgagcttgtcgggatcgtaacggttgatgacattatcgacatcgtcatccaggaagcgaatgaagactatgaaaaattcgcagcatcaggtaaggcgatcacgtttgatacaaaatcgtatgtcgccgcataccgccgtctgccgtggctgatcttgcttttgttcatcggtttgatctctggcagcatcatgagctattttgaagacacgctgcagcaggttgtcgcattggccttttttatgccgatgatcgcgggaatgacgggtaacactggaacacagtccctcgctgtcgtcatcagagggctgtcaaaagaagagctcaataaaaaaacgattttccgcttgattttccgggagcttagagccgggattattattggcgtcgtgtgtgcgatcgtgattacgggaatcgcgatagtatggcaggggaatctgctgctcggatttgtggtagggacttcgctttttgccactctgatcatcggaacgatggcgggaacgatcgtcccgatcatccttcacaagtgcaatgtcgaccctgcgattgcatcgggtccgctgattacaacattaaatgacattttgtcgctgttgatctacttcggtattgcaactgcattcattcattcgctgtaagcagaaaagccctccttatccggagggttttttgcttgccagaattcgtaaaagcctttatattttaggcagagatcagggggggattggtatgagaaggattgcagctgtgctgatttgtttagccgttgcattgattgttgccggctgtcagaatgaagatgaaggaaaagacaggcggctcgtcgcagttgaggatatgcttgaggcgatattggacgatgatttatcaaagatgaagcgcttgtacgtggagggcgcaaacccttctccggaaacaatcttgaaagacaagcagaaatggggaatttccgggcttcatgctgatgatttcaaatttctgaagcgagcatccatgtgtttcatgccgcttacaagatggaaaataccggtcagcccggaacgattgcgtttcggatacgcaatgatcccgataaaggcgttatgattgatttcattggatacataaaggaagcgaaaaagcaggaaacaggtgacgaatcatccggagggaatgattcgtttttttaacggtttttgtatttaaaatgagcgttaagctggccttcgagcattttctttctgagctgctggtcgttttttagcctttgttcttttttgcgcatatctttgaggatttctgcggtctgaacaccgtcttcccgcttgtttgcgatttccatcagccgttcgacgtcagcaaaggaatatttgcgcgtgcctcttgtagagcgctgcggatagatcagcttgcgttcttcgtaatagcggatctgcctgaccgacagacccgtcagctcgctgacaatgccaattgaaatcacttttttatctttataagaaagatcttcgactgtcattttcccacccctaagatgactttttttgtattatataagaaaacgcgcgaaaaaacctgacatctgtcagaaaatctaacattgttgaaaaaatttttaaaaaatcacggaagaaaagtttacaggaaccatgcaaggggtaaaagtgttttgtatgctgtaggtacagacttttgaggggggaatcgttggatgaaggaacacaaagcagtcttactcgccaaagaaatcgttgccttagacaataagagagacgaattgctcgagacattgatgaaccttgccggcaaggatgcgtttccgctgctgagggcggtgcagaacggcttttatcaaaagtcctcttaaattccggaaggggagtaaaagcgaactttacacggccttaaagcttggttaataaataaggtctattcttatagtatacaatacgcgaaaatgagaggagaagatcatgagcagattgttaaaaaacgctttggaaaaggaaagaaaccattacttgaaaaaactgatctcactcggtgagcataatcgggaagttttgcagaggatgacgattacggagctcagaaatgaatatttttattttttccggaaaaataaagcccgtgttcaaaatcggccattttgaaaaacgggcttctttttgatatactaaaaaaaataagcaggagttttctttcggataacgaaaatatatacatatagaatatgggaaaagcatgaccctttctttttctacatttgtaagggttttcatttcccgggttcattttaagaaaatagtataagaggtagatgatatgagactttcgtttaatgaggaagaagttcaccgtgctatgtcgctgtacaaggtttttgccagggcttttaaaagcgtttcagaacatagtattcgggacagcaaggaacacggctttaatcctacagaatttgctgtattggagcttttgtatacgaggggagcccaaaagctgcagcaaatcggctcgaggctgctccttgtaagcgggaacgtaacctatgtgatcgacaaactggaaaaaaacggtttcatcaaacgagagcaggacccgaaagataaacggtctgtctatgcgaatttgacggagaagggaaaggcatatctcgatgagatttatccgatccactccctgagaattgcgagggctttttcaggcttgacaaaggaggaacaggagcagctgatggtccttctgaaaaaagccggaatccacagccagcacctattgtttcgctgaaaaagtcagttttccgaacggttgttttcttttaagtgatcgagaatagctttgatctgtttgtcctggggctgtctgaagaagctttcgaaagggcatccgagttcctttgtgcgtttgacgacagcctccatcgtaaaatttaagggtgacaagtctgaatggacttcatcccaaaacagcggtgcggccactgtgccaagctcattgcctcttgtggaatacgggcagatgatcgtttttcccggggcatgctgcacatagtcaatatagagctttccgcccctgtttttgatcaggcgttcggttgtgaacagatcgggaaaaagcgagacgcaataagaagccgcaaagcttgtgaaaaggcgggtttcttcataagtaaaggcgttttttgaaatcggaatatagatttgtatccctttatttcccgacagctttggaaaagataagaggccgagctgatcaaataaacggtgcagctctttcgcggctctgacggccaacggaaactccgactttgaaggcggatcaagatcgaaaacgatttcggtcggatgggccgtatccaccgtttgaaaagggatatggaactccaacgcaagctgattggcaagccacagcagaaccgaataatcgctgcagatgatatgctcgtgctcgtcatcccgaatggacgtgataaattcgggtgcgtagtcgggcttgtttttttgaaaaaaagactctccgccggaaccgtgcggataacggataacggtaagcgcccgattgtcgagaaacggaagcagaaaatcgccgatttcattaaggtatccgatgtaatccgcttttgttttatcgcttttaggaaagatgactttatcaaggcttgtcagctgcaaatcgggatggacgtttcttgaatgaagcagcaggcggttgtaagtgcaattttcccatgccatgtcaaattcaaatgaaacaaacgacacctcgcgcaatgtcccgtaatgaatcgttaagtaatggaccgtcatgcaaatcgacggatcaatggtatattcaccgggttttgtttcggttccgtattgcttgacgatcgaaagaatggcgtttctttcctgttctccgagtccgtgggaaaccgaaccgacttccttgatttgaccgcggtcatagacggcgattgtcaaataacggtttgccatgttgtagcctgtcataaatacagcagcttttttgtagtttttgagtttgagccattcggccgtttttttattttcagcccagcggctgtcttttttcttcgcgacaattccctcgccgtcaaaccttttaacagccttccaaaggtcgtggaaatcagaagtgtcagggatgtattgaattcgagcgtgagccatcggatcgggagccatcggcaggccgagctctttcatcaggtcgaaaagcatgcgttttcgttcggtataggggagcgaggttaaactttctccgttaaaaaccagtaaatcaaaagccaagtactggcacggtttctttgcggctgcttgtgcaatcaactcggcctttttgctcaaaccccttttttggacatattcaaatcgggaacgaaaacggtttgtcaacgacacaatttccccgtcaatcgtgatcggcaagtgttctttgagagtttcgatcatgctttttgcaaattccgaaatttccggaaatgtgttttcgagcggctgtgagtttctgctgatgagcgaaacttcgccggtcgcagcaatctttaaaagaccccgatacccgtcatatttgacttcataccgccaattgccgcctgagggagctgatgtagtcaatacaggctgcatcgtaattcccattttttattttgcctctgaagcttttttgcgcgacgtttttttctttttctcagctgttccttttgctgcaggcgctttcgccgcttcccggtcaggcccttttgtccgttcgatgctggcttggagagcgctcacgagatcgattacatcctcgcgcggagcggcggccccggcatttggcgtgacaccttcattatggtcgattttctctttgattttatccatcagcgcgattctgtacgtatcttcatattgttcaggcgcaaatgtcgttgtcagctcgtctattaatgaaatcgcggtttgcagctctttttcgttgactgcggtttcttccggaacaccgggtacgtgggctgcgtttcggacctcatcagggtagtggatggactccattaaaatgcagttttcgtagacgcgaagaatggcgagctgtttttttgagcggatggtcatatgggcgatcccgatcttttctgtttttctgagcgcttcgcgcaaaagtgagtacgcttttacaccgttatctcccggtccgacgaaatatgaacggttgaaatagatgggatcgatttcctttagctgcacaaaatcaacaatttcgacggccttgtcttcctgctcttctttgagctgcttcagctcatcgtccgataagacgacgtatttgcctttaacatattcgtagcccttgacgatgtcgtcgggcgcgatttcctgatggcagtttgtgcactttttttcatactgaatcggggcgcggcattctttatgaagcgaccttaatttaatatccttatcctctgtcgctgcaaacagtttaatggggatattgacaaggccaaagctgatagagcctttccacatcgtatgcatcggttcggttcaactccttttcttttattgatgcctctctgcagattgtttcatgaatagcaacttatggatgacagaggaaaaaagcatccgggctgaagcccggatgcttgaggcggtacaagtttggagccgttcttcttgaaggaagccttagttcagctcgatttccttctggaaagacggtctgttctttctggcgagggaagacgagaagtaccgatatctgcttacgctcttgtgctttgcggcgtacatagccatgtcggcttttctcatcagctcatcgccgtctgttccatcgtccggagaaacggcgattccgatgctgacggatgttttgaggcgatgctctttaatgcgaaaaggcgtttcaaactgactgatcaattgcctggtcagctgatcgatcccttgtaaaggagcgacaatgataaattcatcgccgcccagccgggcgataaagccttcattgggcacacagtgcgccaaacgctgtgcagcagccaccagcagcaggtccccgacgtcgtggcctagggcgtcattaaacactttgaaacggtttaaatccaaaaacaacacggccgtccctgtctcctgccgctttagaacatttgccagacggtcgactgcataccttctgtttggcaaatccgtcaacgcgtcatagtgggccattctatggattttgcgttctgcttcacgctggtttgtcatatctttgcatatgacataaatgctgtcaagctgctttctgacatacaccggtatcagcgtcacatttaaatcaaagcgcttttcagctatcgcgattgccgtatcgcggttgatggcctgtttttcattttggacttgaaggaaccagccgagcagcctgtcatgatcctcctgccgaaaaacggaagacaggcgctcgggttcaattcccattttttcaagaaggctgtatcccgatgaattggcggaaagcagcttgccttcaagcgaaaaaacatagatcggatcaatgttgtggttgatcaaggactggaaccgctcctcgttatctttgactttttcgatatgaagcagcaggcgtttgtcattgaaggcgccgaaaatcaagaagcattgaagcatcaggctgacaagcacgatcataatgcccagttcaacagtatcgattccttcatagcctgtgtcaacgctgtcagccatgaaaagcgtagctgctgccattcctgtatagtgcatgccggaaatcgctccgcccattaaaagcgcgcttccgattttaatgaacaatatccgaaaagaaccggtttttttggcgaatacaactgacagttttaaggcagcgaaggaggcaaaaatggcgattgcaaaagaggcggcataaagaacgggatgatagacgattgtcatattttccattgcttccatcccgataaaatgcatggaggcaattgcgcatcccattgcaagtgacccggccgccagtcttccattcgtcggttttttttcattcaccacataaaatgagatgagcgagcctgcgaaagcggcaacaatcgacaacaagacgaatttcaaatcgtatttcatttcttctgctgtctgaaatgacaccatcccgataaagtgcatagaccagatgccaagccccatcgtgagggaaccggccaaaagccatccgatatttttcctgccttttgtatgtacgacccgttcagataaatcaagggctgtataagctgccaaaactgcagtgaaataggataataggacgagccatccattatattcaccaagaacttctgtcacttttttctccgcctttttgtacttatgatgaaaagtctaaataactatactgtattgtgaaaggctagactgccgtactcttaaccgttgacataaaaaagcggcaatagcgctaattccggtataattcgtgaattatactatatataatgaaattcgccaataaaaaatgatatcctcctgttctttttaaggaggacttcccattttgctcttcaattttctcgaattgtgttaaaatcatttttgtacgttctttagaacttgaaattatcaatcgtcaaaggttgtggtcgatatcgaagagtttattttatcaatggctgaggcatttaaaagcctctcgtatttaggcattttcctggcgctgtgcatcgaattcgtgccggctgagatcgttctgccgcttgccggatactgggtgtatcaaggagatatgtcgatgttcggggtcgttgcagcaggttcactgggaggtgtcgcaggccctctgacgctttactggctcgggaggtacggggggcggccgtttttggaacgctacggcaaatacttctttatcaagcctgaagcgcttgaaaaatcggacaggttttttgaaaagcacggcgggtttgtcgcattcagcggccgttttatacctggaatcagaacgctcatttccattccgtgcggactcgcgaaaatgaatgtgtgggtattttgtatttatacattcctcgcgatcacgccgattacgttcgtctatgtctatttaggcttttacctcggcgaaaactggagcaaggtcggcagcctattggacggataccttcttccggtcggcatcgggttcatcgttttgttcgttctttacctttggttgaagggcaggcggaacaaaatcaaatcgcaaagcgtttcagcctttataaataaaaataaggattgacagccgtgcgcatatgaggttaatattatcttataattcaatattttcttttatcccaaaggggagtagcgtccggatgtttaaccggaaacaaagtcgtcagttcatggatcttcatccatcggctttgttggcatgttttaattaatgataaccatgtctagcaagacctttgcctaatgttggcagaggtcttttttgttttctgaaaataccctgccgcattagcgggaataagagaaagagacaatcacttaggaggaattacaaaatggatgcagcattattacttgaatatggttgggttcttctcatcctagtcgggctggaaggcattttggccgcggacaatgccctcgtcatggcggtcatggttaaacacttgcctgaaaaagacagaaaaaaagcgctcttctacgggttggccggcgcgtttgtgatgaggttcggcgctttgtttgcgatctctttccttgtcaatgtctggcagttgcaggcgatcggcgccgtttatctgctttacatttccgtccatcatattttgaaaacccacgttttcaaaaaggacgaaaaagtgaaggagacgaagcaaagcggtttttggccgacggttatcaaagttgaactggcagacatcgcttttgccgtcgactcgattttagctgcggtggcgctggctgtcacacttccggcgacaaacctgccgcaaatcggcgggcttgacggcggacagttcatggtaattttagccggcgggatcatcggattgattattatgcgctttgctgcaagtcaatttgtgaacttgttaaagaaacgtccgagcctggaaacggctgcttttctgattgtcggctgggttggtgtgaaactgacgctctatacgctcgcacacccgcaaatcaatatcgtctctgaacattttattcattcaggtacttggaagttcatcttctgggcggtgctgatcgccattgcgctcgggggatggtttatgacaaatccgaacaaacacgagaataaagctgctgaggagtaaacagcttttcccagactgccggtctttcaccggcggtctttttttgcccgcacgaggaagagccggggaagatggccctagatcaatcgaaataagatttcattttattaacagccatgttacaaaaacggcgggaaaacccccttaatcgtcaaacagatcacgaattgttctaggagatcaaacaaatgactgtcacaattgaaaaattagaaatgaataccgcgttttctcctttgcgaatccctatcaaattagctatcattaatgagtagtatagggaggaactgaggtgaaaccagtgcttagccttttgtttaagacaggaaaaaggaaacaatcattagaagagtctgtaataagcatacaaaaaggaaatcagcagttgcaaaacgagcttatcgatcaatataagccttttgtggctaaaacggtttcatccgtgtgcaaacgatatatagatgaaaaagatgatgaattcagcatcggcttgattgcattcaatgaagccattgaaaaatattcttcagataaaggaaattctctgcttgcatttgcagagctgatcattaagcgcaaagtcattgattatatcagaaaagaagcgagaaatgcccagaacatcaatatggacatgcaagaaggagaagaacaggaatcctcccaaagcatgattgaagcggagctttccattcatgaattcaaccgcatgctcgaacaggagcaaaggcgggaggagattctccattttaaagaaaggcttaaaagttttggcctgtctttttccgatttgctggagcattccccgaaacatacggatgcaaggcaaaacgccatcaaagtggcatatacgcttgtcgaacatgaagaattaaaaaagatcttgtttgaaaagaagcagcttcccgtcaaacagcttgaaaagcttgtggctgtcagcagaaaaaccgtagagagaaaccgcaaatatatcatcgctatggcgatcattataacgggcgattatgtttaccttaaagattatctaaaaggggtgctcaattcatgagaagaggaattattgtagaaaaaaataaaaaattcgtcacattgctaacccctgacggacaatttttaaaagcaaagagcacagaggaagattatgaaatcggtcaggaaattgcttttcccgcggagacgagaatgtcgagaaggcgtgcgggcttttttgatctgctttcgctccgtccgctgaaagccggcgttttttcaatcgccgcgatcatgctgctcgctttcatgatcatccctgatgttttaaacaataaagcatacgcctacatgacgatcgatatcaacccaagctttgaattgacgctcaacaaaaactgtgaagttatcgatttggtgccgctgaacgaggatgggaaggccttaatggatagtataaaaaattgggaaaagtctgactttaaagaagtgatcagtgaaattgtcgaagacagcgataagagcggttatgtcaccgaatcaaaagaagtgcttatcgccacagtatacgaaaacaatgaagatgacacgtataaggcgacggtaaaaagcgaaatcgatgatgtagcgaaaaaatacgagcagcagaattataagatggaagcggtggaatcagaccttgatacgcgtgcaaaagcccaaaaagaaggcatctcaacaggccgttatatccgttcccacaaagatgaattagaagacaaaaacaaagatgatgacaatgaaaataaaaaagatgatcaaaatcaggaagaaaacacaggagaaaaggagaaagctgtgaaagaagaagatcagccggaacagcatacggatgataaagaagcagatacggaagatcatccggacggcgaaaaaccttcagatgaagatcagtctcaacctgatcaagaaatggaaaaagaaaaggagtcaaattcccctaataccaaaaaccctcaggaacataaccataatgacaaagacggtcagcagacggaggaaggaacgccaaaaagcggttccggttcaaatcaagagagctctaaatcacctccttaccaaaaggagaaaaagccttctgaccaaacgaataaacaagaatatccgccgagcgggcccggcgaataatccatagggtatttatttgtcattatgcccattcaattgagcttgtgcctgctgtacaagtcgttttgtcatttccccgcctacagatccgtttgagcgagcgaccgagtccgagccgagctggacgccgaactcttgggcgatttcgtatttgaactggtctaaaacctgctctgccccgggaacgaggagcttattcgttcttgccatgcattctcaactcctttttcaattggtactgcttgtttagtttgatttggactgaggctttttatgctggcaattgttgaagggcaaaaaaacgcctggctattggcaagccaggcgcgccggtcggcgattatttcatttcatattttaagaagacgctgtcaataatggaatgtgcggtcgcctgaatgtgcgaagcgatgacggacagcacagtgactgcggtgatgtctctcgctttgttccattcgggatcggccagatctttataaaaatcgcggagctgtccagtctgctcaatgacgattttttcaagcgccgatttattgagcgtatagtctttgatctggtacacatgatcaaggacccgcgcatacccttcataaaagcgcagcggactcactacatcatcggagcggtctgtaatcgtattaaaaatcgttgttaagatcggacggatcgtttcgaagtcataaaccgattttaagtctcgtacaatgagaaggatgacggcttggtcgatggaatattttttgccgagttccggatgccccatcaaatcttttatatcgcgtttgatccagttttggatggctgtcgattttaaggatgtcagttcgcacaaatttccaagttcaacaatttcatttgtggaaagtccgtgttccgttttttgttttttccgttcgtaccgggcaatgaattcggggatgtctaaattgtcttccggctcatcgggcgccaaatcggccgatctcaaaagaatcgctagcggactgacatccagctgcccttttaaagcgtacatcagtttggccatttccaggcgagtcagtttaaaaggtttcatcattccacctcattatgtattaaaatgaaatagcaaacaatataaacattatcttacgtcttatcacttgcattttcaattctatgccgtataattttattatacgagttcatttgatcttattataacatggaggtaatcatgggaaaaagaatctttctctttcttttatcgaacatcttagtcattacgacgatcggtatcgtgctttcgattatcggttcgctgacaggggtaggcacgtatttcacggctaacggcggcatcgatattgttgcgcttctcgtatttagtgcagttgtcggttttgtcggctcctttatgtcgctcttgatgtcaagatggatggcgaaaatggcgatgggcgttcaggtgctgaatcctgataagcaaacgctcagctatgaagaacagcagctcgttgaccgggtatataagctgtcccgcgctgccggactgacaaagatgcctgaagtcggcatctacaattcacgcgaagtgaatgcctttgcgaccgggccgtctaaaaaccgctcgcttgtcgctgtatcgacgggccttcttcaggaaatggatgacgacgcagtggaaggcgtacttgcccacgaagtggcgcatattgcaaacggcgatatggtgacgatgacgctccttcaaggaatcgtcaatacgttcgttgttttcttcgcaaggattgcggcatgggctgtttcacgcgttgtccgtgaagagctggcgccgatcgttcactttatcgcggtcatcgtattccaaattgtgttctctattctcggaagccttgtcgtgtttgcgtactcccgccaccgcgaatatcatgcggatagaggaggagcagaccttgcaggcaaggataagatgattcacgcgctccgctcgcttgagcagtacacttcaagagtcaaagaagaacaggcatctgttgcaactttaaaaatcaacgggaaaaagcatacatcgcttttctcaacacaccctgatttaagcgacagaatccgccgtctggaagcaaaataataaagatgcaaaccccctttttcaagggggtttgctttttaaatttaaaaatcgaaaagcggctgtacataatagcatgtttcctttaaaatggaacacgttatacacaagaagcaacttttgaatattgaaaagaaggaacgattatgaaggttttattgagaaaactactgcgcgtgctgtctcctgtacagctgatcgcgctctattattttttagcggtgacagtttcggttgttttattgagtctgcccgttgcacacaaaaataatgttgaatggtcttttatcgacgccctttttaccgcggtgagcgcagtgagtgtaaccggtttgacggttgttgatacagccgatacattcagcacggccggaatttggattttggcgtttgttctgcaatttggcgggatcggcgtgatggctttgggtacattcgtctggctgattttcggcaagcggatcggtttgaaagagcgccgtctgattatgaccgatcaaaatcaatccaacttatcgggcctcgtcaagctgatgaagcacgtgctcggcttaatcctgctgatcgagctgtttggcgggctgattctcggcacttatttcttaaagtactttgagacacctggagaagcctttatgcacggattttttacaagcatcagtgcaacgaccaacggaggtttcgacattacaggcaactcgctgattccgtttcagcatgattatttcgttcagtttatcgtgatgatgctgatcattcttggagcgatcggttttccggtcctcatcgaggtaaaggattttctgctcagcaaagagcgtaaattctctttcagcctgtttactaaattgacatcagtaacttttttccttttagtaattggaggtgcgatcggcatatttgccatggaagcgcgctttgctttttcagggaaatcgtggcacgaggtatttttcttttctctgtttcagtcgacgacgaccaggagcggcggactcgcgacgatcgatatcagccaattcacgcatacgaccattttgtttatgtgtatgcttatgtttatcggcgcttcgccaagctctgtcggagggggcatccggacaacgacctttgccttaaacctgttggccctgttccacttcgcgaggggaaataaatcggtgaaggttttcaaaagggaactgcaccaagcggacttgatgaaatcattgattgtaacgctgatggcggttattcttgttttcgtctcgacactcattttgacagtgacagaaaagcattctttgcttgaactgctgtttgaagtgtgttcggccttcggtacgacgggcttgtcgatgggcatcaccccagatttgagcacgattggcaaaagcgtcatcatccttctgatgttcattggccgaatcggcattgtcacgctgctttatttattcggcagaaaagaaatcgaagcgaattaccattacccgaaggaaaggatcattatcggataagaaagacagtttagtcaaactgtctttttttatgatcataaagtcggtcgctgtatttatttgtatgatataatgcttaaatggcggacttgaaaaaaagggggaaacaacgatgaaaaagagagtcatccatttgtttatagccgccggatttctattgctcgccggagcctgttctaacgagccgacagcaaaagaaagcatggaccaatatgtagacaaatggaacgagcaaaaatttgaagaaatgtatgaacagctgtcggctgaagcgcaaaaatcgatttcaaaagacgatttcatcaagcgtaatcaatctatttatgaacagattggagtttccgatttgaaggtttcaaccgtcgacaacgatgaagatgaaaaaaataaagagaaaaatgattcggtgacgataccgtataaagtcagcatgaagacattggccggtccggtttcttttcaaggcaaggcaaagcttgtcaaagaaaaaaaagacggagacacttcatggaaggtcaactggaaccaatcctttattttttcacagctgaagaaaggggagaccatccggattaccgccaaggagccaactagaggcatcatttatgacagaaacggaaaggcgctcgctacgaatgcgacagtgcctgaaatcggcgtcgttccggggcagctcggagatgataaagacggtgtcatcaaaaagctcgcgaacatgcttgatatggaaaaagaagacatagaaaaacagctgtccgcaagctgggtgacggacgattcattcgttcccctgaaaaaagtgaagcctggcagcaccgagcttctcaaaaaagcgacctctctccccggggttttgaagcaggatacgcagtcaagatactatccttacggtgaaaaagccgcacatcttaccggttacatacggccgattaccgaagaggaattaaaacagaataaagaaggctacagcgagcattcactgctcggaatcgtcggtctcgaacatatttatgaaaaagagctcagaggagaaatcggctggacgatttcgatccctgaatcaggcgcgacggttgcgtcaaaggatgcaaaagacggaaaagacatccacaccacgatcgacattaagaaacaggaagaactgtacagccagttaaaagatgactccggcgctgccgttgctttagaaccgcagactggagaaacgctggcgcttgtcagcgcgccttcatatgatccgaacgggtttttgttcggctggaaaaaaggagaatgggaaaagctcaacaaagatgcgtctgcgccattcacctctaaatttaataaaacttatgctccgggttcaacgatcaaaccgatcaccgcttcaatcggtctgaaaaatgatgcgatcaaagcggatgaacctaagaagatcgaagggaaggaatggcagaaagattcgtcatggggcggatataaagtcacacgggtttccgatcgactaagcgacgtcaacttggaaaacgcgctgatcacatccgacaacatttatttcgcccagactgcccttgatacaggcaaggatcaatttgtcgaaggcctgaaatcattcggctttgaggaaaagcttgattatgaattcccgacgaagtcttcctccatatcaaacgaaggaatcgactcggatattctccttgccgattcaggatacggacaggggcaaatgctgatgtcgccgatacaccttgcggcaagctatacgcctttcttgaatgacggtaatctgatcaagccgcacctgatcaaaaaggacggcgaagagaaagaaatatggcataaaaacgtactgcccacaggcggagcagaagcgattacaaaagggttaaaaggcgttgtagaagacccgcgcggctcggcttacaagccggttgtcaaagggcttacgatcgcagggaaaacgggaacggccgaactgaaaacgaaaaaagacgaaaaaggcaaagaaaacggctggttcaccgcctatgattacaaaaacaaaaaccttttaatcacgatgatgatcgaggatgtttcagaccgcggcggcagctcatacgtcgttaataaagtgaaaaaagtgtttaaataagcacccttcagggtgcttatttttttgccgaaaactggatgtgtggaatgtgccgaaacggaaaggatatggatgaaacgactaaagaaaggaatgtcattatgaaaagaaaagttgccaggaatgaagcggctcttaacaataaaacgcctgctgaaagcatgcatgatcatcaatacatgacccaatatgacgccgaaaacggagacaggggagccaaccgcaactcgaaacacgggaagcagggagaatcgcaccaatgaaaaaacaccaaaaaagcaaggatatgcaaaaccataaaaaaccgatgaatcccgatgtgcttcaggaggaattttcgaacgaactgggcgatgtcaacgcctttaaatttatcgatgtgatcgagaacaataaaaagaagaacaaaaaggcggacggacagaagcgggataaagataaagaatgaaactgcagagcaaacgagaaaggtccaaatcggaaacgatttggaccttcatttattttaaataagggttatatccgttgtcttttttcaacagccttattaaattcgtcatttttaattcgatgaacggctgggcgaccgttttcacaaatccgcttgataagcagaaggttaaaattgccgtggcgatgaacaatagcgtcagactctgataatcggcaagccattcttccgcgcccgtctttctgaacgacttgatgataaagccgtgcagcaggtagacatagaatgtgcgcgttccccagagggtaaagaaataccgcctttcaggcaccagcgccatgaacgcgaaggttgaggcaaatgttataacgagaagcgccacccggtttaacccgctttttatcccgacatcgccgaattccgaataaggcttggaaccgaacagccaggagtaatcgaagtctgcaaaaaagtagaaaacgaacgttgctgataaaacggctagagccgcttgctttcctttccagcctttcagcattttaaaatggtctttttgcaaataatagcccgccaaaaagaccggaaagaaaacaaacgtgcgggacaggctgagcgtgttgctgatcatgtcgatatacccgacaagaacggcaatcgcaaagcttgcggcaaacgcccatttcgccggcagttttgtgaacggaaacaacaggagattccaaaaaaacaagctcagcaaaaaccaaagcgaccattgcggttcaaacggatttgcggcagttaagctttgatcatcgataaaggaataaaacagcgtatagattccctggaaaatcaaatagggaacgatcagcttccaggcgatttttttgacatatccgggccgattgaacccttttgcaaaatagcctgatatgagaataaaagcaggcatatgaaacgtgtaaataaatttataaatatgaagcagtgcatcattgtcatgaatataggacctgattatatgtccgaagacgacgagaaaaatcaataggaattttgcgttgtcgaaatagctgtcgcgtgaattcgccataacatcaccctttcgcaaacaatttcaggaggcgccggtgcgggaagcgtctgaacccggctacattctttccggaatgacgtcttcaaccagtcttgcctcattttaaaattttaaaatagaaagcatgtgttttcctatgcattaagtcttattgttaggacgatgtaattgaacagtaaggaacttttatatcgtcatcttcatgtaaaataggcggaaaggttgtaaaagtttgaaacaaatgaaggaagattttccggtttgtagaataattggaggacaggttttcaagaaggagtgtaataaatggaggaaactcttgatttgaatgaatccttaaatctgcaaaaccagctgaacagactgaagaaagaaaacgccaagctgaaagcggatttgtatcagtatgagctgctgtttaacgggacgctggacgctatttttatattggataaacagatgaacatcattaaggcgaatgatgccgcctgcaagatcctgcaaagccaaaaaaagaatttgctgaaccggtcggcgctcgacttcctgcacgccgttccgccggatgaactaaaccagaacattcaccgcttcttggagcggggatatgcgaaaaaagaagtggccatcaggcttgacaacggatctgtcaaatatatcgaatttaccgcaagcaaaggaatcggtgaggactgcttttttgtcgtcatgagagacatttcgtctaaaaaaatattggagcgggagcgcaccatcaatgaaaagctgtttaaagatttgtttcaccgcgcggttgaaggaatcgtcatctttgataaacaaggctgtttcatcgatgcaaaccattcgttttgccagagcttcgaaattgaaaaatcagagctctcaaaactgaagctgtctcaattcgtatcgcctgaaaacaaggggcggctcgataaaatctggaacgctcttttcagaagagggaaggcaaaaggggagcttcctgtccgcctcagatcaggagaagacaggctgtttgagctgacgataacctcgaatattttaaatggcttttacatgtcgattatgagggatattaccgaaaagcgctcaatggaaaaacagctgtttaagagcgaagaacgctttagggaagtctttgaaaatgcgatggatgccatcattctgatgaataacgacggccgcatcgtcaaagcgaaccagtcggcctgcaaaatcttcgaactgccgatggaccagctgctcaacaagaagatgactgattttatagatcgaaccgatcagcggtatcatgccattcaaaagcagtacgatcaaaaaggggaaatccgggcggaactgctgtttcgtatggcaaacggacaatataaggagcttgagttcacatcaaaacggattatgttcgacagccaggacttaaccattttgagaaatgtcagcgacagaaaacgaatggaacaagaattgcgggaaagcgaattgaagttcagaaaagtattcaacggatcaatggacggaatcgttcttttcaacaaccagtacgatattatcgatgcgaacccccttgccggaaaaattctcagcatccctcttgaacagctgaaaacgtccaatcttcttgatgtcatctccggctatcacatcgaaaacgcggcttctcccgctaaaacgatttcctttgaagaaatggacaatgatatcccattcctgctgagcgaccaaaaacggatacttgaattttcatttaagcgaaacatcattcaaaatatgaatctggcgatgctcagagacgtgacggaacgaaaagagcttgaagagcggctccgcaagtctaataccctccatgtcgtcggagaactcgcagccggaattgctcatgaaatccgcaacccgatgacggcattaaaaggatttatccagctgctgaaaggcagcatccaaaatgaggatcacgcgctttactttaatgtcatcacatcagagctcaaaaggattgaatccattattacggagtttctcatccttgcaaaaccgcaggcgattatgtatgaagaaaaaaacatcgtcaaaatcatgcaggacacaatggatctgctgcatgcgcaggcaaaccttgacaacgtccagatgcatctgaagtgcgaagacggcattccgctgatctactgcgagccgaatcagctgaagcaggtatttatcaacattttgaaaaatgcgatcgaagtaatgcccgacggaggcaatgtatatgtgtcgatcaaaccgaaaggagacgaccatatcattgtctcgcttgctgacgaaggaatcggcatgacagaagacaaattgaagaggctcggcgaacctttttacacgacaaaagaacggggcactggactcgggctgatggtcagttataaaattattgaagaacataaaggaaaaatcgaagttgaaagtgaagaagggagaggcacgacattccacctgactctcccgatcagacagcagcatgaggaggaggcttaatcgcatcgtgggcttttatattgaaatgacctcgccttttggacaagcctacatcgtcgaggaaaataaccatattacacatttgctatttgaaaaagaagaactaaaacagcttcaacaagacggcctggagcttcgcccggccgaaacggaattgttgaaggaggcaaagcgccagctcgaagaatatttccagggggagcggaaaacgttcacccttcctctccgccaggatggaaccccgtttcagaaaaaggtgtgggaggcgctgcagtcgatcccgtacggtgaatcacggagctatttagacatcgcatgcgccgtcgggaatccgaaagcggtgcgcgcaatcggccaagccaataaaagaaatgcgctgccgattttgatcccgtgccaccgtgtcatcggcaaaaatcgttcattgacggggtattccggaaatgaaacggataaaaaagcggtgctgctcgacatcgaaaatattgcgtataaaggaaaataatatacgagcacgccgtttctttttttcgtccgcgacatataattttatcaagttaaaaatgttggccttggtaaaaaaggaggacgaataagtgaaaacaaaccgcccgaaaaaaatagcaggatacgcggaattgttcgtcaagctgcacgttttgaccgaagagcaaaagaaagacatcatcaaatcgattaaaatccgctaaagcggcctaagtaagggcttcagcggaaaacagcgcttcgatttcttcttcaaatctatctgtgataatccctttttccgtgatgattccagagattaaatcgtgcggcgtgatatcaaaagcaggattgaacacaggcacctcttgcggcgctatttgcgttccgtttatccgtctgacttcatccggatcgcgttcttcaatcggaatgtcgtcgccgcatgaaatcgagacatcaaaagttgacaggggagcagcgataaaaaacgggatttgaaaggctttggcgaggattgccaagccgaacgttccgattttattggctgtatctccgtttcttgcgatcctgtccgctccgacaatgacggctgaaatgttcttttccttcatcgtatgggcagccatgctgtctgtaatcagcgtcacgtcaatccccccctgcataagctcccacgccgtcaggcgcgccccctgaagaacaggccttgtttcacaggcgtaaatatgaaggtcgagatcctttgttttggcaaggtaaaacggggaaagggccgttccgtacctgcttgtcgcgatcgagccggcgttgcagatggtcatgatgctgtcgcccgatttgaacaaatgcagagcattctgtccgatctgccggcatgtttcttcgtcttcaacctggatctgaatcgcttcgtggacgaggtttgtttttgcctcattgaccgattttgcgccctctgcgctttttaacagccgattgagggcccaggataaattgacggctgtcggccttgcctgattgagttcatctttgattttgcggagctcccgcagaaaagcggaaacatcaaatgtatcgatgctttgtgcgcaaagggcgagtccgaaggcggctgttatgccgatggcaggcgctcccctcacttttagcgtttggatcgcatcatagatgtcttctttagttgtgagatgcaggtactccgtcttttcgggaagcttttgctggttcaggatttttaccgatgtttcttcccattcgacagaacggggcaccgcaaattgttccggcatgtcattcactccttaagcgcgtttcgaaacgcttcaatcatgtcttttggcgtccggaaaccgctgcgtttttctatgaatgctgcgcctattttaagggcgagctttttttggctgattctccgggaaaatggaacgattgtatcaaggtccgcaacatgggcgaggccgatcgtccggcggatcatttcgcagccggcgaagcctgctgcgtcttcaaacgcctgtctcaggactgactcaaggcgcccattctcatgtttgcaagtctcaacagcatcgttttcccatgcttcgctgaatgtccggctgaacgtattccagacggtctcgacatggcggtataaaggagcccgcctgttttcttcgcgagaaagcgcgtttaacagcaggttggcgataaactgtccgatgtcaaacccgatcgggccgaaaaacgcaaactcagggtcgatgattttcgtttcgccatcttcgccggcgaaaatgctgcctgtatgcaggtctccgtggatcagcgtttcctccgctgataaaaagcgctgcttcagttttgccgcttcaatttttagcgcttcattgccccaaagaacttctgcttcatcgcgaagctcttcttcgaaattgttcgtctcatggtcaaagaaagggtctgtgaacacaaggctttctgtaatatcgcacagatccggattcgtaaactgcttcacaagccgctctttaaccgttgggtcaagcgcatattctgatgagtaaaaatgcgtttttccaaggaattctccgatatcttccgacagatgcgggtaatccttcccgtcaatcagtccgtttctggcgatttccaagtgagaaaggtcttccaatacggtgacggcaagctcggtgtcagaatagtacactttcggaacaaggtgcggaacgtgctcagcctggcggatcagcgcactgctttcgattcttgccctgtcaagcgtcagcggccagctttcgccgacgacttttgcataaggcaccgcctgcttgatgaccaatcctctttgctgctctttgtcataaacgcggaagaccagattcaggtttccgtccccgatctctcggcatgtcagggtgcttttgcttggaaaaagcccgagacggacggcaagcgcggccgcggagctttcagtcaaagtttcgtatgctgcggtttttgttacggtcatgtgtgattccccctaaaatgtcgttaacaaataaaaaaacctctttctcgtcgagagaaagaggctgatttgtcgcgtacgcctctcttatctctcagaattcaaagtctgatggaattagcaccgtgccctagcggcgcagagattcgcgccccatttcacaatggtattacggtcggttgctgttgggatcattaggccagtccttcacccaactctcgataagagaaatcaatataaaattttgaaatttcagttcggtcagttgctgaacatgttaccagcatctccgttttcttgtcaacatttttttaatataaatctttgcgaatgtcctcaaaaaccggaatttgcccccgcgctttttcaatgtcccttaggtcgatttcggccctgatgaccgcttctccgcgtcctgcttcagcaagggtgcagccgagcggatcaatgactgtgctgtggcccgcaaattcgtttgccgggtcttttcccgaacgattgcaggctgcgacaaagcactgattttcaatcgctctggcttttaaaaggctttgccagtgatcgaggcgggcgagcggccactccgccgatacaaagatgatgcccgcaccttcgctcgtatgttttctgatccattccgggaaacggatgtcgtagcagatgaaccccgcagccggcatcccttcaagctcgaagcgcccgtcgcctgagcccgctgacaaatagaggtgttcgtccatcagctgaaaaaggtgagctttgctgtattctttgatcaaatgtccgtttttgtctgcgatgtacatgatattgtacacaccgctttttttcttgactgcgactgagccgcatacgatatggatgcggtttgcttttgccgtttcctgcagccatctcttcgtttgcctgccttcttcatccgcgatggagccgagattttttaaatcataacccgtcgtccacagctcaggaaggagaaggatatccgccttccggctttcctgctcgatcagctgctccgcttttttgaaattttcagaaggtttgccgtacgcgatatcgaattgcaggcatgaaattgtcagcttcactctggatcacctcatttttttctttacattttacatttaacaatatatgatgatggactatcatttcaagaatttttcaaaagcgggtgaatcgtatgaaatttgagcattcagatgtactgaagcagctgccggagcagtttttcgcttccttggtcaaaaaggtgaatgaaaaaattgccgccggccatgatgtcatcaatctcggtcaggggaatccggatcagccgacaccggaacatatcgttgatacaatggcgcaagccgtccgcaaccctgaaaaccaccggtattcttcctttcgcggcagccgttcactcaaggaggcggcggccgcgttctatcaaagggaatacggcgtagagctcgatcctgaacgcgaagtcgctgtattgttcggcggaaaagccggtcttgtcgaacttccgcaatgtttgttaaatccgggggatacagtgctcgttcccgatcccggctatcccgactactggtcgggcgttgaactggcaagagcgaacatggaaacgatgccgcttacagcggacaatcagtttctgcctgactacagccggattccgaaggaagtgaaagaaaaagcgaagctcatgtatttaaattatccgaacaacccgaccggtgcccaagccacatctgcttttttcgaagagaccgtccggtttgccaagtcgaacggaatttgcgtcgtccatgattttgcctacggcgcgatcggctacgactgcaagaggcctgtcagctttctcgaaacggcgggagcaaaagacgcaggaatcgaaatttacacgctttccaaaacgtataatatggctggatggcgggtcgggtttgcagttggcaacgcctctgtgatcgaagcgctgaacctttaccaggaccatatgtatgtcagcctctttaaagcaatccaagacgccgcggcggccgcgctcctatcagatcaagcgtgtgtccaggagcaaaatgagcgctacgaaaaaaggcggaatgtatggatccgcgcggtcagcgatatcggctggcatgcggatgctccgcaaggatcttttttcgcctggatgcctgttcccgacggctatacatctgaggctttttccgatctgcttctcgaaaaagcgaatgtcgtcaccgcgcccggcatcggcttcggcaaacacggggaaggctatgtgagagtcggcctcttgacaagcgaagagcggctccgggaagcggcttcgcgtattgccgagctgaatatattcaaaaagaccggccacagtcattgacaaccgggagaaacgatgggataattcaaaataattcataaaatcaatattcttatcaagagcaggcagagggacaagcccgatgaagcccggcaaccgactttttaagcacggtgctaattcttgcagctgacgctgagagataaggattcgaacctgaaaagcgaaacctcttttagctaaagcagcaaaagaggttttttatatgcatgaagcaggaaggagctacagaatgagtgaacttttggcaacatatatcttggccgatccaggctgtgacgcagaaaagcgggccgagcaaatcgcgatcgggctgacggtcggatcgtggacagatctgccgctcttaaagcaggagcagctgaaaaagcataaaggacgcgtcgtcaacgtcgaagaaacagaaagcgagctgggggaaaaacaggcaacggtcaccatcgcctatccggaagccaattttacaaacgacattcccgctgtgctgacgaccgtttttggaaagctgtctctcgacggaaaaatcaaattggcggatttggagttttcgcggtcttttaagcaatctttgccgggtccaaaattcggcgtatacgggatccggaaaaaaatcggcgaatttgaaaggccgctgttgatgagcatttttaaaggcgtcatcggccgcgatatggaagacttgaaggaacagctgaggcagcaggctcttggcggagtggatttgatcaaggacgatgaaatcctattcgaaacaggcagtgccccctttgaaaaacgaatcacggaaggaaaaaaagtgcttgaggaagcctttgaagaaacagggcgcaaaacgctgtatgccgtcaacctgacgggcaggacaatggagctgaaagcgaaagcgagaaaagcagccgagctcggagctgatgttttgctgcttaatgtgtttgcctacgggctcgatgttttgcaaagccttgcagaagacgatgacatcccgctgccgatcatggcgcacccggcagtaagcggcgcacttacttcatcgccgcattacggtttttcccattcgctcttgctcggcaaactgaaccggtatgcgggtgccgatttcagcctgttcccttctccgtacggaagcgtcgctctgccgaagcgagatgcgcttgccatatacgatgaatgcacgaaggaagacgtctttaaaccgacattcgcggtgccgtcggccggcattcaccccggcatggtcccgctcttgatgaaagactttggcattgaccacatcatcaatgcaggcggggggattcacggccatccaaacggggcggcaggcggaggaagagcgtttcgggcggtcattgatgccgtcttagaagcggagcctgtcgaagagaaagcaaagcgctctcccgatttgaagctcgcccttgaaaaatggggaagggttgaggtctctgtatgagaaatccgcttatcatttgcgattttgacggaacgatcacaacaaacgacaacatcatcagcattatgaaacaatttgctccagaagaatggaccgctctaaaagacggggttctgtccaaggacatatcgattcgggacggagtcggcagaatgtttaatttgcttccggccagcctgaaagaagacattacggcatatgtactgaaacaagccgagacccgccccggatttaaagaatttgtttctttcctggatgagaagggtcttccgttttacgttgtgagcggagggatggattttttcgtctatcctctgcttgaaggaattgtcggaaaggaccgcatttattgcaacgaggccgctttcaccggccgcaatattgagatccgctggccgtatccgtgtgacggcggctgcggaaatgaatgcggctgctgcaagccttccatcatccgccggctgaaaggccgggacgatttcgttgtcatgatcggggactctgttacagatgttgaagctgccaaatgttccgatttatgcatcgcgcgcgactatttgctgcgggaatgtgaagagctcggcttgaagcatgcggcattcggcgatttccacgatgtaaggcgaatactcgaagagaccgcggaggtgaaagaatggatgtctgagcaaaaacggcaggaactagccgaggtaaaaaaagagcttgcggaaagggattggttcccggcgacaagcggtaatctgtcaatcaaagtatcagaagacccgctgcggtttctcatcacagcaagcggaaaagataaaagaaaagagaccgaggaggattttctcctggcggacgaagaggggaggccggcggagaccggacacgcgctgaagccgtcggcggagacgctgctgcacacctatgtctatcaacacacaaacgccggctgctgtcttcacgtccacacggttgacaacaatgtcatctcagagctttatgcaaaagaaaagcaagtgacattcaggggccaggaaatcataaaggcgctcggactttgggaggagcacgcggaggtcacggtcccgattatcgaaaacagcgctcatattcctgatttggcggcggattttgccgggcacctttcaggcgattcaggcgcagtgctgattcgcagccacggcattactgtctggggaaaaacggcatttgaggcaaagcggatgcttgaagcatatgaattcttgttcagctggcatttaaagctgaaaactttgcaggcttatcacgtttaactaaaaaagggggagaaagcatggcgacaattcggatccatgatgaacaaaacacgagcattgaaaaccaggaagaagtagaacaatttctaaagcggcaggaggtcatttatgaaaagtgggatatcacaaaactgccggccggtttaaaggaaaaatacgatttgaccgatgaagagaaacaggagattttagacgtctttgccgctgaaatcaaagacatttcagaacgccgcggctataaagcgagcgatgtcatctcgctttccgaccaaaatccgaaactcgatgagcttttgaaaaacttcaaacaggagcatcatcatacagacgatgaagtcaggtttatcgtcagcggccacggcatctttgcgatagaaggaaaagacggcacattttttgatgtccttttaaatccgggggatttgatctctgttcctgaaaacacccgccattatttcacgcttcaggaagaccggaaagtcgtggctgtcagaatctttgtgacgacagagggctgggtgccgatttatgaaaaagagagtgtgaaccagtcataaaaaaagcgtccccggggacgctttttatttgtttctgtcataaagagccttgatgtggccttcatgaaatgaaagatgcggtttttcattttgatagtattgaagacggtcaaatacagagcctgtgtgaagctcgaacttatggccgtctggatctgagaaataaattgaatctctgtctccttcattccgttttctgcccttcagcacattaacgcctaaatcgtgtaatttcttttcccagaacggcaaatcttcctgttggatcgaaaacgcgatatgggtgtaagagtcgtggatttcctgtcttttaatgtctttctcttcgtttaatgcgagccagatgccgttcaggtcaaaataagcggttttctcggcttttacgagccacttggcatcaaacaccttttcatagaatgaaatagagacggacaggtcagagaccgaaaacaagagatgattgatgccgaggattttattgttttccattgtaatttactctccctgttagatgtgtttcaaacccgtccagctctttggtgatttgcctgaagagaaaagcgagcacagccgcatcatcaagccagccgacgcctgcgagaacatcggggatcaaatcgatcggtgacagcacatagataaatgccagcgcggccagcaaaattgtttttttcgggaataaggggtagtctccctttctccaggctctaaatgccctgaaaaacaataagaggcctgaatatgcttctttcacggcaaagacggttcggagctttgaaactggttttttcatcatttggcgcatcattggacctccttctatccgtatgaactcttttaaaggtggtttaccatatttcatagatggggtataacacccattaattccacaaatctattatactcgatttcaaaaatatttttttcggaaataggtttacaaaataagtataatctgtaataatgctcaagtaagcaaaatctggatggttttaagaaacgatatgttggtaaggggtgaagcgtatgcaaaggtatattgaaaaagaagcattgctcgtttccatcagcaagaagcggcaaatgatggttgaagccgctgaaatctatggatatacaggggatgaaacgatcaggcggagccaggagctggatcaattaatttatgaatatcaaaaattgtctatgaatgaaaacgcgccagacaatctgctgcaagattttttaggctgcatcgactgtctgcccgttgaaaaatatacggcatagcggatgaacgaaaaagaactgccgtaaggaaggcaggctcttttacaggaacggggaaacctcagtcgtcctgttcctttgaagtcggcagcgtaatcgttacagtcgttcctttatgccgttcgctttcgatatgaatggttcccccgtacatggaaatgatgcgcttgcacacgacaaggccgagtccggttcctttttcttttgatgtaacaaaaggctggaaaatactttccatcatttcttgtggaatgccttctccgatatccttcacaataatttgcgccttctcttgatcatgttcgatttgaatgaccagctttccgccgtttttcatcgattcaagagcatttttggcgacgttcaagacaacctgcttaatatgatcctttttacaatacacataagccggatcttctccgcagtcttgaaattccacttccacattatataaatttgcctcagaatgaataatcggcatgatctcgtcaatcatttcattcatggagttgagctgccactgctctgccgtcggctttccgagcacgagaaactcgctgacaatctggttgatcctccggatttcctggtcgatgattgagaaatacatttgatcttcttttgattgatattttttttgaaggagctggataaagccgctgatgcctgtcagcgggtttctgatttcatgagcggtgctcgccgccaaggtgccgattaattcgagcttctgcgcttcattttgggcgcgctcctgcttggtccgccgcttcagcaggacatactggagcaggaggaacataatattcagcagaatgaaaatactcaaaaatgacagcagaagactgtgaacgatttcatcaagctggaccggttccggatagacttcaagcttccagtcgatctggtccaaaaaagcgtcgacggtaccgccgtccggcttctcaggaggagaatggcctgccgtaaagacgatctgattcttctgattgagaattttgatataaagctcagggctcaagacgttcatgatatttttcagataatcgacgcggatcgaagcgagcagaaaatttgttgttctcccttcgctgtcaaagaccggagtaaaaatattcagctccagcccgtccgacactgtatgtatatcgtctgtgatcacggatttctttgatttttccgctttttgcagaatgctcttgtaagaaagcgcctttttttctttggcgggagacgtgctcaccatgacatcgccgtcttcatttaaaaggtataaagccgaaaaacgcggttcttttttatacgtttccgtcaggattcgtttgatatgctgctcattaacagggtggttgagggccgtggcaagggagctgagccttgcttctgtttcgccgatcaggtaattgatttggttgcggtgaatattgagcatgagagtcgcagtctgacggtgcttttcagtgatattttctcgttcttgttcgtatacaaaaaagcttataatgaaggcggggatcatcaccaagatcaaataaagcctgattttcttccatatacttttcaaattgcgcatgtttttactctctcccaatcgatacaggaatagaggtattatatcactagtgagagccgatttatagaaaagataaccaataccgtgaaaataggacacaatgccggggaatttccggatatatctatttgctgttcaattcctactcatcataacatggtttgaatgttaacagttgacattttcctcatagtttattaatgttttcctgtagttgtttctttggagatgagtgatatgagtaatagagaacaggaacagtccttgaagttatttattgtattatctcgagcgtacagatccattaatgatcatatgaataaacatattcatcatcatggtctgaatccaaccgagtttgccgttttagaactcctctatcataaaggggatcagccccttcagcaaataggggataagattcttctggcgagcgggagtattacatatgtggttgacaagcttgagcaaaagcagctgatcacgagaagagcctgtacgacagaccgcagggtgacctatgcgcaaattacagataaaggcaccgagctcctcgagaagatttttccgggtcatgcagaagagctgcacaacatgatcagcgtattaagcgatgaggagaaagaagcctgcatcgaaatgctgaaaaaagtcggactgaatgcaagaaatatttataagggcaaagagtaaggaagctgccaaaagacagcttccttattcttttttattcagattttcctggccgatcggcaggataaggatttcaacgcgtctgttttttcttcttccttcttcggtgtcatttgaagcgatcggtttaaattccccgtagcctttcgcgctgaagatcttggcgtcaagctttggattttcgattaaaagccccatgaaattgacagcccgcatcacgcttaaatgccaatttgatttaaattgagaatttcgaatcggcacattgtccgtatgcccgctgattacgatattgcggggcgggttcaatacgagaaggtcggatacttccttggccagcggaatgtcctgctggcggatctccgcttttccggaatcgaaaaagatattatcctcgatggaaaggaggaggccctcgtctgtcagcttcgtattgacctgtttttgaagattcttctctttaataaaccggttgacctgctcctgaatttttttcagcgactgcttgtctttttctttttgagcttcggagagatcttttgcctggtcagggctttttccatcttcggttgtgctcgttttcggctcggtgaagctggaataatccatcattcctgttccgccggtaaatacggcattaaatgattttgacagcatatcgaacttcttggcgtcgatcgagctcatggcaaacagtacgatgaacagggccaaaagcagtgtcagcaagtctgcatatgggatgagccaagactcatccacgtgttcttcatggtcttttttgtgcttcttttttctagccattgctgctgtcccctttgtctccatctgggatgacgatgctggagcgttcgcttggagaaacgtacatcaaaagcttttgttcaatgacttttggagcctggccttccaagatcgaaaggatgccttcaatcataacttcgcggactttgacttcctgtttggatttccgctttaatttattggcaaaaggatgccatagtacatatccggtgaagatcccgagaagggtggcgacaaaggcggcgctgatcgcatgtccaagcgcttctgtgtcgctcatatccgcaagtgcggcgatcagtccgacaacagcgcccaaaacgccgagtgtcggcgcatatgtgcctgcctgggtaaaaatacccgctccgacttgatgcctttcttccattgcttcaacttcttcagttaaaacgtccctgataaaatcggcactttgaccgtcaaccgccatgctcatgccgtttttcaaaaattcatcatcgatctcattcaaatttgcttccaaagcgagaagtccttcgcgtcttgcgatttgcgcccactcggaaaacatcgggatcagttcgttgatttcgatcatcttcttctctttgaacaagatgccgaagagtttgggaacctttttgagctcgcggattggaaaagcgatcacaactgctgcgattgtcccgacaaggatgatcagccatgccgcgggattgacgagaacggaagggctgacacctttcatgaccatgccgacacctactccgatgatagctaagatgattccaattaacgatgttttgtccattttttcaccaattcctttaactaacttttctatcgttaatatcggtgttgcgtgataggaactttaggctgtttcttaaattgttgcaaaatcatggtgaaaagggactttaggttatttaatgttaaaaaatagaacttttgtgattcttatgttgtatgtaaaacgacctccgcgatcggaggccgttgtgtgtgttatctggttgttttcacccggatttcatcgttttcaacgataaccgcaaaacctttgatgtgttcttcttcaagcagcagatcggtcatttgatcttcgaccgctgtttgaatggttcttcttaatgggcgggcgccaaaggccggatggtatccgatttcagcgattttttcttttgcctcatctgaaacttcgagcgtcatgttttgctcttttaacgtttcttcaagctctttcagcaagagggcggcgatcttgaccagatcttctttttcgagcggctggaattcgatgatgctgtcaaatctgttcaggaattccggcttaaagtagccgcttaatgaatcgatcattgattgttcgcccattacttgctcttcccggttaaaaccgacggttgtccgcttttcagatacaccggcattgcttgtcataataatgacggtatctttaaagctgaccgtccgcccttggctgtctgtcagacgtccgtcttccatgatttgcaggaacatgtgctggacatcgggatgggctttttcgatttcatcgagcaaaacgatgctgtacgggttcctccggactttttcggtaagctgtccggcttcttcgtggccgacatatccaggaggtgaaccgatcagctttgatacggcgtgtttttccatgtattcgctcatatcgaggcggatgatggcatccttcgtgccgaacagttcttccgcaagccttttagaaagttctgttttaccgacacctgtcgggccgacgaacaggaatgaaccgacaggcctgttttttgatttcaggccggcgcggcttcttctgacggcttttgccacttttttcaccgcttctttttgaccgatcacgcggcttgaaaggtttgcttcaagctctttcattttcttctgatcgtcgtgctgaagcttgccgaccggaatgccggttttttgttcgatgatcgcttgaatgtcttccgcttcaactgttgcccgtttttcttcctcatggctttccatttttttatgcagcgcttcttcttcgtcgcggagttttgctgcaagctcgtagttttcttcttgaagcgctttggctttttccgcttcgatttcttgcaggcgttgggaagcttgttcaccgctgaccgtgtcgattttcaagttcgcttttgaaccggcttcatccaaaaggtcaatcgccttatcgggaagatggcggtcctgaatatagcggcttgacagaatgacgcaggctttgatcgcttcatccgagtaagtcacatcgtgatatgcttcgtatttttccttgagaccgtttaaaatcgctgcggcctgctcaattgtcggttcgtgcaccatgatcggctggaagcgccgctctaacgccgcatctttttcaatttggcgatattccttcaacgtcgtagcgccgataacttgcagctcgcctctggcaagtgcaggttttaaaatgttgcccgcatccatggagccttctgcagagccggccccgacaagaaggtgaatttcgtcaataaacaagattgcgtttttgcgttctttcagctctttcatcagctgtttcattctttcttcaaattgccctctgatgccggtgtttgccacgagggaagcgacatcaagcaggtagagctctttgtttttcaatttatttggaacatcgccttcggcgattttgagagcaagtccttcagcgacggctgttttaccgacgcccggttcaccgattaagaccggattgtttttatttctgcggtttaagatctcgatcacacgggctacttcatcatcgcggccgatcaccggatcgatcaagccggtctttgctgcatttgttaaattgacggcaagttcatcgagcaagccttttttggcagcggtttgcgtctgcgcttgtgatggctggctgaagaaagaacctccgccgccaaaaaagtgatttcctgaaaacatagaaggctgagtcagctctttatagcagtcttcacataaatccatttgtttttttgtaaagttgatttgcatgtttaggcgaatcgtcgcctcatttttttgacaatgttgacaacgcatttgccaaaaccccctttattgaatttgaccttttttgaccaattgacttagaaaaaatggtctgcagtttgaccatttctgactattagtatacattgaccttctttgactttcaagttctatgctttttcctttttgttcctggatgagaagttgtccttctttttgaaggacatggatcatatggtgtagaaagggaattcgcttacggaggagtcgtatgagtcaatcacaaggatcagcctttcagctggcatttgtttatgtaggaacggttgtcggagccggatttgcaactggaagagaaatcgtcgagttttttttaagattcggctggccgggattggccggaattttgatcagcggactgatgtttacgtttctcggtgcaaaaatgatgctgattgcggtcagaatcaatgccaagtcttatcaggagctgaataaatatttattcggccatacgcttgggaaatttgtcaatgtcttcatgctcgtggttttgctcggcgtgacgtccgtcatgctgtccggagcgggggcgatatttgaagaacagctcggcttttcaaaccaagcggggatgattgcgacgattgccttgagtctgtttgtcatgatgaagggcgttaaagggatattcggcgtcaatgtcattgtcgttccgctgctgcttctgttcacagttgtcgtcctgtttgactcgtttattttcagagggccggagatacacaatttggcggcattttcggcaaaccccgattggattttatccgctgtctcgtacggcgcttttaatttgtcgctcgcacaggctgttctcgtgccgatcgcttctgaactgaaatccgaacgcctgattataaaaggagcattaatcggaggggttctgcttacccttgtgttggtcgcaagctttctgtctctttcaacattgcctgatgcccttttatatgaagtcccgatggcacaggtcgtattcatagtccagcattctgtccatatcatctatctgtttatcattttcggggaagtcttcacatcagtcatcggcaatttatacggtcttgaaaagcagattaatgaatatattcatataaaaagcctgtatgtgtttatcttcatcctgctgacaatctacttgacgggacaaatcggctacggaaagctgatatcgaccatttatcctttgttcggccagctgagcctcgtctttattttctttctgatcgtcaaaagggtgcctgagcgatgactggcaggcattgcacttggcgaaacgtgcgatttgtgataagatggcgaaggaaaattgaaataaaatccgcttgaaactgcgggagaggttctagcaaaaccctctataaaaaactaaggaaagctgtatccttggggtatggccttttttatttgtttttttgctagagcacctttctcacagagaaaggtgttttttcgtttagatatcattgaatctcttcttttatgaaatggtgacgaaaagcggagaaggaggaactatgaaacaggaaaaagcgatcgtcgtattcagcggcggtcaggacagtacgacttgcctattgtgggcgcttcggcaatttcaggaggtggaggcggtcacgtttcaatataatcagcggcacaagcaggaaatcgaagtcgcgaaaaagatcgctgcaaagcttggcgtcaagcatcaccttcttgatatggaactgttaaatcagctcgcgccgaatgctttgacaagggatgatatcgagattgaggcgaaagaaggcgagcttccgtccacttttgttccgggacgcaacctcgtgtttttatcgttcgcttcgatcctggcctaccaggtcggcgcgcggcacatcattacaggcgtatgcgagacagacttcagcgggtatccggattgccgtgatgagttcgtcaaatcctgcaatgtcactgtcaacttggcgatggagcgcccgtttgtcatccatacgccgcttatgtggctgaacaaggcggaaacgtgggagctcgccgatgagcttgatgcgcttgatttcgtgaaaaacgagacgctgacgtgctacaacggaatcattgccgacggctgcggcgaatgcccggcctgcaagcttcgcgcaaacggctacaatgaatatatgaaaatgaaaaaggagcgagcttaacagtgcttacacaaatttatccgcaaccaagccatccttactcttttgaattaaataaagatatgcaaatgtcagctgcacattttattccgagagaggatgcaggcgcatgcagcagagtccatgggcatacgtatacaatcaatattacgattgccggggatgagttgaatgcatcaggtttccttgtcaacttcagcaccattaaaaaattgatccacggagaatacgatcatacgcttttaaatgatcatcaggaattttcaggtgaaagcgcggatcggatcccttcgacagaagtcgtggccaaaacgatttacgataaagtagaggcttatttgaaagatctcaacaaccgtccgcattgcgtccaggtgtttgtcagggaaacgccgacaagctatgtcgtgtaccgtccgaaaccgggtgttcagcatggctaagccgattcccgtacttgaaattttcggtccgacggttcagggagaggggatggtcatcggccaaaagacgatgtttgtcagaacagccggctgtgactattcgtgcagctggtgcgattcagcttttacctgggacggttcggcgaaaaaagacatcaaatggatgaccgcggaagaagtgtacgaatctcttaaagacatcggcggaaacgcattctcgcacgttacgatttcaggaggcaacccggcgcttttaaaacagctggacggactgatttcccttttaaaagaaaacggtatacggacagcgcttgagacgcaaggaacgttttatcaagactggtttaccggaatcgatgatttaacaatttcgccaaagccgccgagctccaatatgaaaaccgattttaacaggcttgatcatattgttgacaggctgaaggaacacggccgggcggctgcggcaagtttgaaggtcgtcattttcacggcggacgaccttcaatttgcaaaacaagttcaccagcgttatcccgatatcccgttttttcttcaggtcggaaatgatgacgttcatacagaagaccaagagcggctcgtcgaacggctgctccaaaaatatgaacagctggtagaagcggtcacgcgcgaccctgaattgaaccgcgtccgcgttctcccgcagctccacaccctgatctggggaaacaaacggggtgtttgatttaagaaaggaagatgaatgatgacgacaagaaaagattcagaactggaaggcgtaacccttcttggaaatcaaggcaccaattatttgtttgactattctccggaagtgcttgagtctttcccgaataaacacgaaaacagggactatttcgtgaaattcaactgccctgaattcacatcgctgtgcccgaaaaccggacagcccgattttgccacgatctacatcagctacatccctgataaaaaaatggtagaaagcaagtctttgaaactgtatctcttcagtttccgaaaccacggcgattttcacgaagactgcatgaacatcatcatgaacgatttaattgagctgatggacccgcgctacatcgaagtctggggcaaattcacgccgaggggcggaatctcgatcgacccgtacaccaactacggcaagcccggcacaaagtatgaaaaaatggccgagtatcggatgatgaaccatgatctgtatccggagacgattgataatcggtgatgatgcgggcagatgaagcgaaggtttgtgatcgatgtgtgaccggtcacagtaaaagtgtgactcgggtgtgacccgaaaatagcgaagtgtgacccgtgaaaatacggtattttgtatagaaataatggtcgaggggatagaaatgtttgtgacctagacgtgcaattacgcacgtctatttttttttcatgtagaacgttcctacggtatttatctcgcgcatacgcggtatttaaaaggcgtatatgattccggaacactcgaagaaatcggcctatagttgcggtacgtcaaacgttcattgcaacgaaacgaaagcatattcggaatctggccggctattataacggcgtgcttgatcggatattagatcgcctatatgaaacgcgttttaattcgttaatcgaagaatgaaagggatatcttcgccattcgcctcgttaacgtcttcgttcgctagttcgtcgccaacttcgcgatctctttcgttcgggtttcgttaattatagacagtcgatcgtcttatttcgttcgtttattcgtgaaaaacatagctttatcctcgttttaaaagagttatttttcggtttttacttgaagtgactaaataattcagttattctgacaatgaggaggggatgagatgtatatgcgggggagacgaagaccggcgattaaacatagtgagaaaaatacatacgaaagtaagactctgtctgatgtgtgtaaacaaatttgtaacgtaaaaatgtctgaaggacttacgaaagaaacaattgatcgctatcgccgggtttgtgagagtgtggaagaattcgcggaaattaaaggactgtccaccagtgttgaatctatagatgtcgagtttgcgaggcagtacatgacctatatactgcacgagaagaaaacgtttaagggacaccgttataaaccggaaagtgtgaaaactccagggtgttctccgaaatatgcaaatgaccacctgaaaactatgagagcagtttttactttctgtataaaggaaaatatgatttcggaaaatccatttcaaaaaataaataaagtcaagcagccggaacctgtaattcaaatattatctgtagaggagatgaagcagcttttaaaaacaccgaataagcgaaagttctctgagtttagagattacgtggttatgatgtgtttaattaactctatgtgtagaatcggagaaatcgtcactttagagatcgaaaatataaattttgagttgagctacattattcttgaagctcaaaaaacaaaaacgagaaaaggccgtatgattccattagataaaaatacaatgcggctgcttaaaaagttattgttaagaaatacgcgatttaagcctagcaagtatgtcttcattacggaggaagggacaagactaacgaccgacaattttagaaaacggcttgcggattacgctcatcaggcaggaataaataaaagagtccatccgcatttatttagacacactgcggcgagcatgtttttgcaggcaggaggggatcttaggcacctccagacgatcatcggccataaagatttacgtatggtattacgatatactcatctgtcgttagaatccctcgcaaggcaacagagtgaatattcgctaataaaccaagtggtagatgggttaaataagccaaggaagacaaaaagaaaatacggaaggtaggaaatatcgtgactcaaaagaaaaaaattttctcggtagaagaaagtcttcctgatctctctggaatgtttaataatatctcggcatcgccaaacccaaagcaaattacaattgaaaaagcacttacaattattctccgacagatggaagtaagcgggaatagggtgcggacaattagcgattaccatcttcatgtatcacattttaaggaatcagaagaattaacatatctacatgaaattacatataagtcgattcattcatggcttggaaacatggatgtcagtgcacaaacaaggctcacgcgtttgaaatgtctcaaagcatttttatcgcgttgtttcgataatggatggttcgaatcgaagttttggaagaacgtaaaggtgaaggtcgacaataacgttaaagagggggcgacggatcaggaaatcaaaatcttactttcgttattagatttaaccgactttgtacagctacgtgatgcgacagcattgcttcttatgtataaaacaggtatgcgtgtagggacgctcgcaaacttaaaagaagaacatgtcgattttaatggagaattacttcggttaagtggtgaaatcgttaaaaatcgagaacctttactactgccctttgatgagactctcgctcaacttctctctgtactggtgaataaaaacgccgaaatccgccgagcatataagaaggacaataaatttgtttttttaacaaagtacggcaatcaaatagcaacagggccgtcgaataacaatattcaaaaacggttgaacaggtatgcgcgcgagtacggattaaagaatataaatccgcacgcattaagaaggggctttgcgaaatccttgcttgaaaaaggcgcaaatttaactgacatttcaagagcgctgggacatagtgatctttcggtaacgactaaatatttatatttagataagaatgaagtggccgagaatttgcggaggtttttgtgaagaaaggtcggtggcgagccggaacgatatacgttcaatcctaacgtgttttatcggcagtccaagacgccggataagacattgcatgcgatgtttaatgttaagaagccgtagatggacgaaaaagggcgccttagactggcgccttcatcttgtcttaaatccattcacaaaactttctccatccttatctgtcgcaataagctgctgggcgctttgactgattcgctgagcgagcgcctcttgcgcttttccttcaaagctgtagagaagcgatgaataaacgctgttcatttctttttgtatatcgtctattttaaacttcggtcttagtgtcgttttaatgccttcaagcttagttgcggccgttactctcatgcccgttttcagcatttgaagctgattgcgccgtatgaggagcgtatcttcttgatcaccgtttaagttgttgagtgaggcgagtttattgaaattttccattatgtcatctcctaaagcttaagccagtttgccagcattttatctttcgatttaaaatcttttgcgatctgcgcaaggtacccgctgatgtcttctaaatctgaaatcgtattttttaatgaggcgatgtacgctttttcggcatgaacatcgtaaaagagcggattgccttttttgtcaaacgactgcgccaggtttttcagcgtattgtttacatcctcgagtgtcagcttgtcgtataaaccgtggccgacttgacggtaggtatcgtgcttcaggtcgttgatctcggcgtcgtgttcctgataagcgttttcggcttcccgtttcatcgtccgcagatcgttgataatcgcatttactttttgcgcgagctgcttagcgacttcgggtgttactttaattgcgccacttccggatgcaacttccggtgggagcatcgcttttaaatttttgtcataaacgagttcatcgccctctatattttgaacgtttccgtttttgtcgaaggtgaaattattactcccgacccaatgcgtatcaggcattcctaagattgcggtctgaaagaaatacccagcgttttgcccgatttgttggaatacatcgccctgcattctcgcctcgcgcaccgcatttgataattcagggtccttcgtataaattgttgttccgttgtgccggtcatattcgttccaccagccggccccgaccatgtcatccggattgataatcgattttatggatcggtcatactcgccgttattaattttcttttgttgctcctcagaatgcagcttaacaattgaggggctgttaaatgcgacggcatagacattattgttgaccgcactatattcagcctcagcgccgccaagcgagtgtccggttgttgaaataactgtcgaggtacctttatacttttgtttaacttcccgcacaagttgatcggcttgatcgatttgcgatgttttcgtaaccaatttataatcgccggtgctaagccttgcgtcttgtgaaggagttccgttatattttccgagtgttttagaagtatctttcgcatctttttcgactatgtagtgttccttctttttcgggtcaattcccattacaacgttcccgccgtcagcgtcaataacatcttgaaaaaactgttctttaggatttgttccagcgaaggctacgacaacgtttttggggctattagatttgacccacttgccgtcttttgttttttgaccctgagaaaaaacaacggcatcaagtcccgtatcagagtctcttttaattttttcgacataccaataagttttttggtctgtctgtatcggttttcccgttttcaatttatcatctaatctttcgcggttgtaagattcctgacttagcgtataataagttttatctgttatttttggaacttttatcttatcactcatatacatcgcctctttatttttgtaaaataagataggaaagggttgatttccgattgaaaaagaaaaagtacataattatccttattttaataattatagcagttggaggactttttatgaagcatcagcacgatcaaaaggaaaaagagattgctttattcgaagaagcacagaatcatatggaaaaatttttaacaactaactataaagatgtgaaagatatccatttttctgaggattactatattaatccaatgggtggtattactgtgaagggttatactaacggagaaaaagagtttgaaggtctatatgatccagccaataaagaaatattgtcatatacggttgatgccgaacccaaagaagaatgtaaagataagctttgtacaagataaattagcccgctcaaccgagtcgggccttatttgttttatatgctcttcttcataccgcatctgcggcactcacgtaggaaaatgccgtccttcaccgaacttttaaacagcgtataatcgcagttatcgcagcgcccgtaatgaacgtccgggtactccttataatcgtatacaatcgtcgtatcatatccttttgtttcgtaatccattcgtctcaacctccgactattagaatacgacaatagtgtgatcaattcaacgccattcatgaaacgacggaagccgcagcaggccgtttttcgtcttgaaccggtgcttgccagctgccttacgaacgatacgctttctgaccgttcctttcttgaccgcgttcacatcgccaagcaagcgagataatccgtaaagaaagccgcgtgttttattgatcgacattgttcatcgtctcctttaaacgattttcccacgaaattaaagcgtaggagccgccggaaagtattgcgggtatcttaggtatcggcggccgcttaacgcctgatttcgtgtgttattcgataaccttaatcgccttaaatccgctgccatttttgtattgatccttcgtaaaagtcacgctaatccgatcgcccggctttgcgtctgtggcttgcggatcgaaagagaagccgccgtcgtccgctgataccgcgtagtctttgccttcgacaatatattcgcgctcgatcgtttcctgggcgtcctcagcttccgcagccatgtcgtcagccacgcgataagcaacgtcaacatcttcgtttagtttggcggtataaaggccgagagccgcgttgcctgcgattgataggccgagtacgaccgttaaaagtttcgttttattcatcgtcattacctccgtatttgtttgcgattaaatagccgagacacgtaagcgccgtattaaagccgatctgatacgctttgcctgcgtctttaaatgacgtaacagggcgctgatatagatcgagaagctgatcggcctgctgcggcttcagcggcggtgtgtcggaccacaagcgttttatataaagcgtcattaccgattcctcctcgatttaaagaatagaagcgcgataaaaacgacagccgagccgagaccgacgcagtccaggacggaaagccggccgaagttcatatccgcaatccaggcgagcaagacgacgattaacaaaatttccgtggtatcaattcgtttcattcgtgttataattgattgacaaggggcgcaatgcctctcgtagcttatgttcggcgacggtgcttcttggtcggaggccgtcgctctttactttcggattcctttcgcatcttccggatttctaagacgatttttagaattccgagccaagttgcgatgattgccgaaagcttcattacggtgtcaatcaattacgttcacctcctttcgttacctcaattatacgatatcgcataacgaatgtcaatcgtatttgcgaaaatttattcgttatcgtataatcgaattatcaaaacgaggtgagtacggatgaaaataacggtaagaccgcgactgtcggaagtaatgaacgcgaaaggatggaggcaaattccgttgtctgaagcgtcaggagttccgcaaggcagcattagccggttcgataaaaacgaaaggcatctcgattggcacgtatttgcccttgcgagaacactcggagtgaatgtcgaagagttattcgaggtgaagatcgaagacgctgacgaatgattggcgtctttttagtgtggcgaaaacagaacaaatcggccttttagtgtggcgaaaacagaacacgcaaaaagtggcttcggccttagagcgccaacggatacagccgttttttggcggttgtcgaaaggagtcggggtgggagctgccttgtaaaggaagctgtaattatctctttttaaatccacgtttcaattaaaaaacagttgtttatataaaaaagacgccggttaggcgtctagtataaaaaacacttacattatgtctagtcttttagaaataaaggatacaaaatcaccatcttttatatctcccggccaatcagtatccagttctaatagaaattgtcctactttcactgtttcgagttgcttgtcgattaattgtcctgtgaatctatattcaaaatgtccatctaacttctcgatgataaaggattttttgtccatcttaacaagttcagcaacatcaaagcagtaaatcggaccttctaacctactatctacattataatttaatgggtgggcgaaacaaattatttcagactcaccatcagttactactacttccgcctctaaagcttctttcgatagccaatcaatttttttaattttcattgctttcacccttactttttctttgttttgagacctaaactaggcgctttttttgctagttctttaacagttttgacatggaatgtagtaatatgtcctgtatttctattaagtcccacaaagccgtactttgcgctcccttttccgccaattagttttacatagccatttaactcaggaacatatttcccgtttttaataacgtagttagcatcttcgagataattttttaagttatattgttttttacccatagcatccttgacttcttgggcgtgtttttcgaagtgccgtatatcttcgtcacccttaaatttaattagcttagaatttttagcaccttgctcaactttttcaacatccttagctgcttttgtgcttttatctaccttcgcaactttctttcccacttcttcacctttaaataacttgaagccgcgctttccgtatttaaatgcctttccgaaaggtgtgacactcaatccggccatcaaacggtcaccattacctttaacgattttgcctgtcgcaaggtcgtatccaaacgctactcttactgcatcatacacacctgtaaattccatcgctgtatcgaaatattcagcaaagtcgcttttttccacattctctggaagggtgtaggcgggttctatcttgacgattgtatcaccatctatgtatgcccggtaaagcgtatcgttaaataccctataatcttttttcagtttattcaattcctcttgagtgtactcttttttggaaaccttttgtgtcgccaatttttttaatcgatctggatcggcgagagtgtttacgtcagcatcttctttgtctccgacttttttcagcatggcacccatcgctgtttcttgatttccactcaaggtatccatctcatccggctttagaatcgcgcctttttgataaccggtgatttcaattttggggccggtatacattttttcgagccttgcgatgtatctctgcatcgtctcaaggtcgttttcagccattgtgagcgcgtttgtttgctcgcggtcaaatgcatgcagcttttcaagtgtcgtgctgatttcctttaatgctttgtgatactgttcatgaaaaccgctgtcgttcaaatccggtaagtcgacgatatggctgacttttgcgatcgtggcgttggttttagaaaccaaatgtttcgttgtgcgatcagcggcatttaagccgttctcgagttggtgttcgagaaaggactgggaaataaatccgttctggtttggttccagggaattcagcgcgcttttcattttcttcagcgcggaactgtattcctctatgaaagtatcatagaactgtagaaaaggggtgtgacattcctcgtaaaaggcgcggatcgcgtcgccgccttttccttttaaagcatcatcaagtgatgtgatcccctcaatggcttttttgaccttggcgaattcgtctgattgatgttttaattgttccagcgtttgatcaattgcattgtgcaacgactgaacatccagagttttcataacattctcctcatactactaaagtgacatatcagtaaagattttaccactttattgaaaagaattggcggataaatcctgaacatccatgaaaatgaatctaaaagtataggcccaaaaacctaaatatagacctatttaaattaagaggagcttcaatttttactttcactatttatttcgttggttattcggaagtgcaatcaatgcgttcaaattggacggcctcttcgatctggcaattcaagtattcgcatatttgcgcgttcaccttaagggaacaaactctccgacagcccatctccacttttattttccttcatctatttcctcaacataaaataagtcctctataggcacgtttaatcctctactaataataaataatgttgtgatgtcatatctggtatttgttttaaatctgcttatcgtggcctctgtagtacccaccaactcagccaattccttttgactttgaattcctttttctttcataacctcatttaacctagatcgaactattagctttttcaattattaacacacccttaagacaagtctaattaatttcatcttacacatttgtaatttttttcgcaatatgtattgacttacgaattacacaagtgtaatattatcatcaagatattacagattacgcatgtgtaaggagtgtttatatgaaagctttaaaagatcaaattatcaaaaaccgtcattttgaattactaatcgtggattacgtcctgtacgatccgaaaacgggggccgtcgattatcgagagcctaccgaagtattgcatctgggagacgatatcgcgcttgaagtgaacgaagcgcatctcacgctttataggatgcgcggcaaagagggcgaatgggaaatcggtgaaaagtgcgaagtcctgtacgatctgccgctcgaatttcctgtcgggtttaatttcggtttaacaaccgaagagatcgcgaaaatgtctgtactcgatttcatgttattcttggcgcagaaaaaggaggagacgttatgagcaaattaacgtgggttgacgcaggggagcagccgaagaaaatgtccgtggatttcgttgtcatatattcggacaccggtgaagaaagccgcgaacgggtagaggtgttaaatgtaggtcgcgactatgtactttatatagacgaggagtggcttaatctttatcgactatatcacggtcctcacggtttagaaatcggtcagcgtgcggaattgatttacgatctaccgtacgtctctgactcggagatggatctcgaaactattgcgaatatgaacacgatcgagcttttagcgcatcttggcggacaattaaaggaggtagtcggagtatgaacgtttactatagaaagactgttgttggttggtggaatgtctatcccgcaggctcagacgaatatataaacttaaacccggaagaattcactgcactcttgccgcaagtgtcccggagagcattcgcaggctgcgccgaaatcagcgtcacggcagcgcgagaactattcggtgaggaggtgcagtcggcatgatggatacatttcaaccgcaagcagtaaagctgcattatcacggggaaacgttcgatacaaaacaggaaatacacgaaatctctgacgcctggttaattgcggccgatgttattggaacatgctcggatgacgggctggtgttttacgatactgaccgattagaaaaaaggagcgacggataccatctttatgaaaacaactatcctcggttttttatggtagacacgtcaaaagtcgacgcagacctccgcaaaatcgatgtttctgaactcgcaaacatgtcgtttactgatttcgttcgaattggatttaaattagggaggtcttcatatgagtcgtattgaacacttgttccgaaaagaagaggataaccggtctttggccgagattcatttcgagcgtctaaccgcagttgccgccgacatagagcgcgattttgatagattgcgaggggcacagtcggaaattgatcgagaactgtccgacaagtaccacgagatcgaaaagggtaacttcgatgtggttcgcggttattatctggcaaaagggcttcagaacatactacagcgtcgcagaacgataaagggcgagctttgccggcttaattcacttaaagattcgctagagcttgatcgagtaggtgagcgattacaggcgaaaataaaacaagacgaacggttgcgggaacaactcaattcgtctttaagattatcggatattatttgaacaattgacgggctgacaggtccgtcttttttattataactgatagaacataagttcgtaaatgtttttgttcaataacgttgccaatccgaaagccgattcgcagttactatcgagagcattttttcttcgatagggtgtcttgatccggaagttatctcgcggttattctcgaaatgctgtccgatccggaaagtttatacgcaactaatagtgaaggcggaaaaattttcgtatctagtgttgcaaaaacgaatactacctacgtgttataaagtgtaaggaggttttcgaaaaaatttctgaagttaatgtcgcaaaaataggtggtgtttgcacgttataaaagtgaagaaggaaaaattttaggttaagatgtccattttcagaagtctatacgcagatataagtgaaggcgaaaaaaaatttcgaaaagatgtttcaaaaatgacggtgacctacccattttataagtgcatggaggcggtttttacagaggcggccgaattgtgcgatagtaggattcgggagtagcaggacaagacagcgctaaagccaatagcgccgtcggtcctcgaaatgatctttatattggtctctattatttcgaaaagactttataaacattagaaaaatcagatcaagcaacttctcaacgatccaagctacaacgatatttattatgaacaatttaactcctcccccttaaaagatattgagatcggactaaaatgtccgctctatctataagtggcattcgtatgacagggggataaagaagctacgtacttaatagtgcacatcagtattgattttttaggaagttaggattttttgtgcgacttagaaaagtcgcgggtattatttcgtgaaggatatttctaaagatttttgtagactttcgttgtttttcaattaaaggaggtgataaatggtgtacatttctaaagaattatttgtgattatacgcatctataaagggatgactcaggagcagttttctaagtttttgggaatcagcaagcaaacagtaagtgcaattgagagaggagaaaggccggtttcaaaaagaacgcaccgtatggttattgaaaaggttgaaatcacagatgagtttttaaggttcaaagaaaaacacgaaaagttaattaaaatttaagccctaaatcaggatcggaggtcagaaacattatcaactatattacctaaaaaaccataaaatcacccaattataatatacgatgaaaatggaggagatgcaatggggtcagcgacaaatagaccggaccaacaccgacgctatgatgcggaatataaactaaatgatgcagaaggtattcgcaccttattgcgggattatgacaagctttttcaaaggcggtttgaaggtgatactgcggcgtctgacatcttactagacttagaggatgctatcgatgctgccgagctaacagcgcttcagaacgaggctatacgccttatttatatggaagatttaacgcaacaaatggcggctgaacgcttggggatcgagagaagtgtggtgtcaaagcatttaacagccggcgttaacaaaatcgtgaaaatttatgcttattgggcgaatcgaggcgaggggtactgcgccagttaaaaaaaaacgggagtgtatcgccgcacttaacgaaaataaaacaattcaaaaacagggggaattccattatgaaaaagtttactgagcttgagcgcaatctaattacggttatcttagacggacgtcgcagcgattttaaaaaggaacaggatttcgaaagggtctttggaagaaacgcgaacattgatctcgtagagggccgcaactacttattagaggaggcattgtttggggaagtcgcagaggttccggatattatcggtgatcttctctacgaaacagaagctggaaacattcactatgacgtcatgattgacgctctcgaagccgcggtaaacggagattgggccaatgttccgagcgaagaaggagcgattgagatgtccgaaggtttaaagaagtaaggaatctaaaaatcgaggaagtacacgaagatggaagagaataacggtgtaggagtttcgctgacaagggaaggtaaaacgctgatgatttcgaataacccgtactactataaccaaatgatcgaattaaaagcggacggcccaacaaaacaggccgttcccctcccgcgttttatgcgatacctggtcgatatatttggctatgacgcaatcaaaaaagctgtcgatgagtttccgcaagaaatccgatataagactacgctcgaaaggatgaacgatgagggacgagatccagactattgatgcgggtaataggtgccgcagttcgaattttaaacgggaggtatgttgtgtgaatcgtttattctactgctactcaacaacgctcatacactttttgaaagcgaatgggcgccgctataaatttacgaggctccatccgcgaactaataaccggatgtgggtatttgatagagatgctggattaagcgctctgctggacgaatatgacgaaagaaaagcgaatatgaaggcgcggtaagtagcgcgattagttaacgaaaggaagtcgatagtcaatgggaaagcaattcgagaagcttgctgaagaagcgctacaacgaaaaaagtatgcgatggaaaaagataacggactttccggtaacgcgcccataccgcatgatttatggcggcgcctggttcccatcgcgagagaatacgagaagggtaacggatccatggcgcaattgtatacgtaccttctggcgcatgtgaacggacatcctgacaacgatcgatatatgagcgcttttccctccacggataagatcgctgaagagacggggatagggcggaatagaattgcgcgattagcaaacgtattggaggcggtgggtttgctgaagactgcgtatgattatacgttgagtaggcgaaataaactctactttccccaatattacagcgatttgagcgacgaggaaataaggcggaggctcgatgagttgtacagtcaatcaccgtagagtgactgacgtcaatcactgtagagtgatttacctaaatcaccgtagagtgacggtaataataacaaacgcaataataacgaactaataataacaaacaaataatagcgcctctattcgctaacgcttatagacacgcggatattatagaatcttagatccttaatcattaataccttatcgcgataaagaacttaataaatatatctgcggtcacgaaggagcgaaagcgacggagtgggcgctattcttttttatacgaaaggattgcgttaatacgcacaataaatacggatagttatctatgtattttgaggaggatacgcacaaaaaccttcgatatgctgtcttacgttatgagaccggtatgcacaacttttgcctttagctggctatacgttatgagaggaacagtgattataaagaagggacgccacttcggaataaactaccgaggcagttgccgtaaataatggcgcctttctttatggccgctatacggaatgggcaccggctagctacggtaggcacaccgcatatacgcaccgcctgttgcatacggcatgggctacgctatacatataggaaggtaaacggtgagggacaggcgagagggacaacgtcttgttacccgaacatcagcgagaccgtgccgggggataagcccttccgaaactcacggggtcggccgaccagcaccaccgacatactgccgatatgcagtatcttatacataccggcccgcaccacgcacctgaaccatcgttgatctgacgctgtttctcgaatgcataaagtaagttcgattgattgcgaaggataacatacgatagacatagtcatgtcaacgtttcgttcgattgttcaatgtaacaaaaagtgtttgtgttacattcgatatgcaaaacgatgaatgttttattcaacggaattttttgcgacgccccccccaggccaccccgaacaaccccggacgactgctgttcagaacttgcgcacaatttttcgaactcggggcgtaactcaaacggaggtgattacgatacttattccgacatatgaactaacggatgacgagaagaaaactttgcgccaacgattcgcagaaatgctcgaggaggatggcgaaatattgatcgaggttaacagatatgatcgctcgactaccagcggagccttagcggtggaacttattacccgtttagaactacgcagccataagcccattgttgagagaaacgcggaagactaacggaggatgatcgcgaatgaactacgaagaagaactccggaattcaaacggcaccgcctcagcgttagcagacgacatacatccgttaaggaaatcgtttttattagcgacagcaaagattgactccgttttaattgcggtaggcaagtggattgacgaataaattaacgcaaaggaggcggaatcgtggcggtacaatgcgacgagtgtttaaaagatttcgaagtccagccgaaggaacgtccgctgaataattccggagtagaggagacgtatttcgaatgtccgcactgttcgaagcactatacggtaatcataacggaccgtgagacgcggaaattaattcgcaaggtcaagcggctacgtcaaacggatgattccgtgaaagaagcggatgaggttcagcggcagataacagcgaaggttgacgcgcttaaagaggaataccgaaaataaaacgtaaaggaggcggtagtatggcgaaattgaccgaagaagagaaagcgtatctacgggaattgttcgaaaagctaatcgaacaggattgcgtaaatttctccgttaatattggcgtaggtgggctattcggtgaacgggatacaacgctaactcttcgatctaaaggagaataacgattttcacgcacaaatcacacgaaattagacgtttcagtctccgacgagggtattcggtagggtgacggttagaaacgctaatttcgcgtaattttatacgtaccgggcgcgtacctccttacacgggtcattgaaaaccgcgcgaaataagaggcgagcgttcggagcgcttaatactccgataaggcgtgtaacctgacaagagcaacagaaacggcctcacggaaggattataaccggtcttgccttccgaaaaactacgctgcccaaccttgaggcggcgggtgttaatattcaatacgttcatatcttggcagaatgagcacgtatcaagtgtggctgggtttccgtctttactgtacgttccgcagtcaggacacgtaggtcttgcggatacaaggattgaaagcagcattctctggcacctccttaccggcggtttaccggattcgcgggtccggtagaagtccgcctgcccaaaatatatgcgagtgtagtttgggcaggcggacttcgcctctttcgccctcatattttctaaaatatttgccactcgcgcttttaaatctttcgaaaatagcgaacagatggtataatattccctgagagggtatatactagcacaagctgtattcaaatcaggaggtgctgggtatatgagaaaagagggggagaaagatatgaacgcattagcttcaaagaattccttcaagcctttggataaaaagaaaaaagcgttattaaagaaattcgtcggtagctcatcatcaaaattagatttgaacaaggtcagagattcctggaaatatgataaagattgattttaatcggaattttcgagggttttccaataaagagaaaatcttgttagacacaggcattatactcgctctggcaaatgagtatgatgcttggcacaacacagtcaataacctctttgaaactcacattttatctgatgaagacgatgaaaacagtaaagcgatttttctttttgttaatccattaattattaacgaggtaacccatctagcaggtcgtcctcttgagtcttaccgaagaaagaaacctaaggaagacttttcgaacatcaaccctgaaaaagtggtcgatgaaactatcagcaacatagaagagttaatagataatgaggtttttctagtaattgacggaaacagagaggcggttatggagcagttcaagctctacaaagacttaggatcagctgacgccgcgaacgttgcgatagcaaatcagcatagcctaaactttttaaccgtagatagtagactagcagaaaacatatatcttaaaagaaatcagttaacgaatattcataaggtatacactacatcaggtaagtacaggacttattaagtccaacgcaatcagaacgagggcgatccgaatatgggtcgctctttttgtgcttgcgttttcagcgcagcaataacgaaaaaggagacgatgtgaatggcggaatcaaagcgcgaatcaatcgatcgagttgtaggcggcatttattattctggaacaaacgactttacaagcgctgtaatcgaggtgtttaaatccgacggaagtgttaatgtaattcatcgctcgtggatcacgaagaggtgtttaacttgcgaagatctgacgtttggtaaagagagtgaatttacgaagagtggtgagctggaagtagtcgattccgacttcgttcattatttaccggttgtggattggtttgttgagcagtcgcaaaagtacgatatcgaatcgattggaattgatccttttggcgggcgggttgttgctgagtgtttagagagccgtgattttgagacggtgaacatacgtcaaggagcgttaactttaaacaacccattccgtaatttaatggcacttgaaaacgatcgtaagctcgaaaaaggagcgatgttggattggtatttcggcaatgtcgagatatgcacggatcataacggaaatcaaataccgaccagtcagagcagggcgtacagtattgcgggatttagagctttgttaaacgcacatgctgcatcaacaatgtcgaattcgtcaaacggcaatcttttcgtaaaggttaacgttgatgtttccgaagctattaccggcctaaaagcgctacagcgcgaagcgaaggcggcgactaaggcgctggctgaatttcaggatctagctgaacggctcggtgagaagccgttagctgacggttgggagactgctagagtattgcgagaagtatttaaaaaagcaccgaaggcttaaacctcgatgctttcgtaagcttccgaaatttcttccgcagtgatcccgatgtactttgccgtatcgcgctcgctcgaatggttaagaatcaccatgattcgcgaaagcggcacgccggactgataaagccggtatccgaaagtcttgcgcagcgtatgcgtaccgatgccgccgatcttatcgtaaatgccggctcgtttagctgcgtcgcttagaatgcggtaagcctggacgcggctgatcggctcgccacctttgcggctggcaaagtacgtaatcgtcgtcatcaccttcgagttgggaaacgattttgagaacggaagagctgaacgtaatcacacgttttttcttgcgtttcttctcccataaggtaatcgacttctggcctcgaagctgtccgattttaagaagccgcaagtcgctgatgcgcaggccgaatgcggtgcctagttgcgccagccattgatcgcggcccggcttgagcgcctttatgaacttgttataatcgcgttttgactttatcggaaaaacttcgtttgccatgtcgattcacctctacgtaacttataaatatttttgttacattcatattaacgaaaaagataacgaaagtcaacacgaaattaaaacgaaaggaggccaccagtttggcatacgttgacggaaaatggcttgaccgcgaagaaagacaggaacggatcgatttaatgaccgagcgtgtccgtaaattggtggcgctcattaaggccgggaaagctacggaatatcacattgacacctttcggaaagataaagcggaattgacgaagctgaagcgggtacacaaggccgaagtcgatatcgcgtatttcacatacgagtacttgagcgacggttcgaatccggataatgaggacaacgttgttcgaaatgcggatgacggaacgccacatgacggaatcgagaatatcgcgaagatccatgaagagtttttcgatctttgtaactatgtaaataacgaaaaaaggaacgctagacttgcgattgcggcggcacgggggcattcgaagtccggtatgttttcgaatgcccttccgttacatcaagcggcctttcgaaagcgcaagtatatcctgattatttccgaaaccgactcactttcgaaaaaacttatcggatgggtcaacaaacagatgaaatacaatcagaagttgcgcgaagacttcggtccgatgatgcacgaatccgcaagtcgtaacgaaaaagataacgaagaagcattcatcacaacaacgaatatcctgattgaatcgtcttcgtccgggaagcagctccgggggaaacggcacggagccgtccgtcccgatctcgttatcattgacgatccttcgtcaagtaacaacgaaggcacgaaggaagctcgcgaaaagctcgttcactggtttaactccgttgtcgtaccgatcggatctaaagcaacagcaatcatacttgtcggaacgatggtttcggcgacaggtctattaaaccacgttctgaagcggaaggactttaaatcgagttttcatggcgccatcatcagtgagccgtcgaatccgcagctttgggaaaagtattgcgaaatctatgcccgatctgagtcgatggaggaagtcgatgagttctacgagcaaaacaaagaggtgctggaggagggcgtagagcttgcgtggccttggcgttggacatatcgggagctcatgcacgaaaaggtgaacatgggaacgcgggcttacaattcggaattccgtaaccttgcgttcagtgaagacgaacagttcttcttcccagaaaactacgcttattaccattactaccacgaaaacggcgttgcttatgtcgtttataacgaattgaaaataccgatcagggatctcacgatcagcggcgcctgggatattgcacaaggaaagaatgcgcggtcttgctacaattcggttattacgctagggaaacatgagccgaccggctatattttcgtacttgacgaatatgcgtcgaaagagccggcgcacgtttacatcgacatcatcgttaagaagatcaagcagtaccgtcaccggatatttaacgttgaaacgatcaacgctcagcacgagttttaccggcaattgcaagaagcggtcagaaaagaaggcctttatacgtgccgcgtcaacgatgttaagtcgcacaggtcatcgaaagatgagcgtattcaatcgttggagccgatgctgcacaacaaaacgcttattttaaacgaccgccacacgatgctcttagatcagatggcgcaatacccatttggggattacgtggattcactcgatgcgctacagcaagctatcgaaggagttttccgacctaaaactaggcttgtagcaaaaccgaattggatttaaaggggaggcgaaataatgtcacgattgaaagaattagaggcaaaattaacgttacaacaacgaaaggccgcgcttttgctcgtggaaaacgagttgatggccgaagcaaggaagacgcaggaggagctcgccaaggaaatcggagccgaccgcgttacggtttaccgatggcggacgcagaataaagcattcatcgaatatatgaatctactcgcggacgatatgctttccggacaccgagccgaagtgtatgcgcagctaatgaagcttatccgaagctctcaaccgtcagtaaaagcaatcgacttgtttctcaaacgtcatggtttgcttactgatcgtcaggtcacggcaacggaaaacgaaagcgggacggccagcaacgaagatatcgcgaaagaaatcgaagatattgacgaattgcttaacgatgggaacgagtagctatgaatttatttaaccgtaaacacgacgaggcagacgaattcacatacgtaaaaacctacggaattatccgtaagggcgctcaatttccgccacaagattcgatcgaaagactcgcgaaatataaacgggctaaaaaatggttcgacggaaagcagcgagacgtatacgaaagggcaacggctattttaaaagattcgccattctcgtcgcagctcgaaaaactctatatcgcgatcaacctggcggatatcctcgttaccaagcctgcggatctacttgtcggagagccggtccgttttgagagcggaaaagccgacgacagcgaagagcagagggcgctaaacaggtacgttgaggagaatgacgttaatcaattgattcacgaaagtgctacggcgaatggttatcgcggcgacgcgtggtttaaagttcgctatggctaccgtcaggattattctgagcttaaaaagatgggactaatcgagggagatgcgcccgaaggtgtcgaaatggaaccgattattgagcatgttaacgcaagttgggtttttccggagacgtccgccggcaatgttaagcaaacgaaggcgatcaatattgcgcaagtcgagtgggttgaaaccgagaaaacggagataccatttctgaacgttgagcgtcacataccgggttatattatgtattcgcgacatcgcctacatggcaacggcgttgatacttcgacagggacgccggtccaattgtttaccatcggagaacaagttccgacaggtcgagaggaagacgtagaagtaacgaatctgccgcatattccggttttccacattccgtataaatcggtagatgactcgtacttcggaatcggactcatcgaaaagctcgaaactgtgttagctgcgatcaatgatcgacttgttcagatcgactatattctctggaagcacagcgatcctactgcatatggtccagacctggaaacgaccaatggagctgtacagtttggcggtaagtacattcctgttaacaaagacgatccgacgccgggatatatggtgtggcaagcgcaactagatgcggcgtttaaagaattagatgtccttttcagtaacgtctttcagatggcagagacgccgcaatggcttttcggaacgacggtgtccggagacaattcgggcggtactgggacgtctcatacggacggagtagcaattagagcgagatttatgccaatcctttcgaaagtgaaacgcatccgggcgcattacgataaggcgatccgggacgcgctatggacgtgtatgctcttcgaaaaagaattcggggacttatccgtatctgatccggtatatcccaaagcgatatggaacgacgggattccgcgtaacgagaaagaagcggcagagattgcgagtattagaactggcggcaaacctacgcttgacgttcgatctgctattaaagagctcgacgaagtagatgacgataaagccgaagagactatacgaagaattgaagaagatgaaaaaagcgtcagtggctttgttgatggatcggtatttaacgagaccgaagtaaaagaagaggtcgtcgaagaggatgacgagtaatgcgagttccggagccaaagtatagctatcaaaccgatcaactcgcaacgtattacaaggacgccgttcaagacattttgatcgaattggaccgagttgatatcgacaattttcgccgggcaaacgccaatgcgacactggcctctatttcggaaatcctttcggagctagacgataagtcgaaagcttgggtcgaaaagaacatacctaaagcggctagagacggcgtaataaacacgatcgtctctcttggagttgccgaaacgattgacaaagcgtcacagatcgcttccttttcacgcttgaacaaagaaatggttgcggctgcggttgccgatacccaggccgacctattagcggtcacgcagaatatcgaccggaagacgaaagtggctgtccggaaagctgtctccgattctatgcgttatcacatgacacgaggtacaaatggacgacgtactattgcgtccgacattcgaaatacacttcagcagtcagtgaaaaccggaatcattgacgcagcgggcaggcggtggcggccggaagtttatgcggacatggcgacgcgtacaaaaatgatggagacctatcgggaagcaacgacgaatgaggcgcttagaaggaacgtgtattatgcgaagatctcttcacacggagcgaaggacgcatgtcgtttctacgaaggaaggatcatgaaattgacggaagacgcgcccggtaattatccgacgtacgatcagttgaaggcgtcgggcgagatttttcatccgaattgtaaacacgtgtattcaccgatcagaaatccagagggggctttattttgaacgtaaataataaaatgcgcgttggtatctcgaatgattcacgcggcattagcaaagttgttgacgaatcacttgacggtacaaaggcgatcccggtcgtgttcgttcagaagactgcggagggtagtttctcatacagatcagatccggaggaaggtactgcgcttgataacgaaatgagttatccggtcgaaactgatccggctggatctgccgaagttgttgacgaagacgtcgacggattgaaggccgtaccaatcgttcctgttacgaagaacgctgaaggtaaattcgtttatgcgagtatcggaggcggtgataaagctgttgattggtcggaaattcagaacaagccggaaaatttcccaccttcgtcacatacgcatccaatttcgcaaattaccaacttgcaaacaacgctcaattcgaagctgactgcgaaacaggcggctgcacaagcggatagtaccgcagaggatatcgcaggcttagtcgcggattttaatgcgctgctttctgctcttcgcgctgcaaaaataatggcggaataacagtggacgtcgaatacggcgtcttttattttgtccaaattcggttatgacattaaactatccgataaattcgtcgcgttggacgttaaaaacgtaataggaggaaacaaggttatggaactatcaaaatctttattgtcgttagatttacagcattttgcggaagaaactaaagaccaggcggaaccaccggctgcggagccgaaaaacaccgatacaccagaaccgccaaaagacgaagtaaaaacaattccttacgacagattcaagcaggttaacgacgatttaaaagcctttaagtctacctttgaagagctaggcatcgacggagttgattcacttaaaacactcgtcgaagactacaatgcaaagaaaactgccgaagaggaacgtaagcgtagcgaaatgacggagctcgaacgacttcaaaacgatttgaaagcgaaagaagaggctgagaaaactctcgctcagcaactcgaagaagagaagaaagcccgtgaacgcgagaaaatccgcaatgaatttattaaggttgctacgagcaatgatatcgcctacattgacgacgccattgcgttggccgacctgtccgcggtaaaggttgaagacggaaaggttgtcggagtggaggacgttgtcaaaacgctcgttgacaataaaccattcttggtcaagaagaaggcgccaaagcctatcggacagagctcgaatggaaatgcgacccttgcttcggagaaaacagcggaacaactattgaaagaagccgcagagaaagcgagacaaagcgtccgtccagaagacaagatggcatacgcaaaattaaaaagagaattatcgaagtaaatcagcgcctataaagggcgcttttttaatgcaaaaaacaagggggaaatttaatgtctaagattttatcaggcgaattagtgggtaagcgagaatccgtagtagatgaaattctactattgaatgaacaccagacaccgttattgaatttattagggtttagcgatccggtcactcaggtagagcaccagtggtttgaagatgagatgttcgctgacaagtcaaccactactgtagctaaaactgcagaggacacaaagattacagttgaggacattgaaccatttatggctaaccaggtgattgaaattggagaagagctaatcaaagttgtttccatttataacaaaacgcttactgtagaacggggatatgcgggaactacccctgctgaaattcctgctggtgctgtcgtagaagttcaatttgtagaagggcaggaaggtgcagatgctcgcgatgcgagatataagccaagaaaacgcgtatcgaacatcacacaaattttcgatgaaacaatctcaattaccgggactgctgcagttgtaagcaactacggaatcgatgatctttatgagtatgagaagcagaagagacagctcgaacttgcactgcagctcgaaaaagctgcaattaatggcataaaatacgaatcaactgacgggattgttcgccaaatggaaggtatgcgccaattcattcagacaaatgttattgacgcgcaaaatggggcgctaactgacgagaaaatcaacgatgctatgcaaaaaatttatgaaagaggtggatttacaaccggaggtattttcaaaatcatggttggcgctaaacaaaaacgtgccatttcaaacttcgacaagtctaaaattaatctgactcgcgctgataatggccgtggacaggttgtagatcacttcgtttctgactttggtcaagcagaaattgttttgaataacaacttaaaaggggatgagttgttcatctttgatgctaaccgaacaaaaatcaaacctcttaaagaccgtggtttcttccacgaatatctcggtaggaaaggtgatcgctttgagggccagatcgttggtgagtacacacttgagtttttacaagaaaaagcacacgcgcgaatcaaaggattagcgtaatccacggcccgcaaatcgcgggtctatttattttgacagaggtgttgcgaaatgatggcggaattcaaatcgaaatatcccgaactcgggttttatgtgggcgacgtatttaagtcgttcaaaaatggcgtatttaaaacagaggatgaggacgaaatcaaagtcctgtccgatctggcagacgtaactcggatcgacaaaccaacggaggaagacgcgcctaagccggcagcgaagaaacaaacgcgtaaatcctccgcaaaataacaggaggtggcgatatgacagtaagcgtcgagggtgctgacgaatatatcaacagttttacggtagataacgaagattggaacgattctgatcacgaaaggaggcaacggattttaaacgttgctgatgacgttctcgtacgtaaatttcctgactataaaataccggctgacgcagtatacgaattcgcaaacgtgctggcgattgcctataacgacacgaaccgtctgaacaaaacaaaggaattgcgtcgttctctttgaccggtgtggcgtcgttttaactttaaaagatacgatgaaagtcgatgatgaatcgttaattccgaaaaagacgcttgatctgatcggagaagaaaacggtgtgaagctcggcggacgtcgtattcaatggacggtgttgtagatggctatcgttcctatgaggcagaccattacggtggagcgtgacagttccggagagttcgattcgtggggcaatccaataaaaatcgaaccgttcgcagtcaagtgccgtgtcgacgagggctctcgaatcagtttatcgcgatcgtctggcgtcattaaaagcgaagagtccgtcgccactgcgagaattctagtcgataaactggcagatattcggtactcagatacgatcttatttacgaatgaactcggggagacaattgcgagaaagccgaaagagatcaacgtaagaaggcacgtatccggaaagccaattctgacggaggtgatcgtttgagttttgatttcgacgcaagcgatttccttaatcgactgaaccgaactgaacacggcgcagagcaggcggcagtccgagcgatggaggacaataccgatgatctcgctcgtatcgcccaaaatatcgcacctatcgataaggcgacacttcgtagagggatgcagaagaaggtaaaactgtcgcgggatcggttaatcggcgaagtatccttccgagctgtagaaaacgggtttaactacgcaatttggacgcacgaggccgactacaatctcggtcctacctccgcacaagccggcggaacggacggatatacggtcggtaacaagtaccttgagcgtccgttaaaaggagaggccgaaaagtatatacggaacgtcgcagaggccgtaagagaggagttgaggtagacgttgaagatactcgaattaatatcgttcattaaatcgcgggttcctggcgtttactttccgaacagattccctcgcgaggcacccgacgaatgtatttccgtaaagctgaccggtgggtttcctacgtcacagtggaccgggaaaaagcagccatcgtttcagatacttgtaagagggcgcgcagcgggcgaacaggattgcgaagataaagcttacgagctttttaattcgctcaccaatttgaaagaggtaatgatcggcgagaattcagttgttattattcgcgctactacctcagacccgttgtttattggatatgacgacaataatcgtcctcaatactctttgaattttgattgtgtaatacgcccctaatcaggggctttttattttgaatataagggggaaattgcatggcggcaggaattagaggtattaacgtaccgatcggcccagcaattgttgagtatggcgaaggcgacgatatggttacctacgacatcactaagggcggaatccagtttaaggttcaaacatcaaagcaagacaccacggtcgatcaatacggagacacaatcgttaagtctacgatgaaggggaggaccgcagaagtcacgatccctttcgctctacatgacctcgatagacttgcggtagccattccgaacagtcggttggtgaccgatggtaccgattcgacaaagaaaaagctagtcgttagcggtaaggcgggattcgacatgctcgcagccgcaaagaaactcgttattaagccgactgcgccttcgacaacgccgaacgattatatcacaattccgttagcaggcgcagtagctgatccggagtacacttacgattcagacaacgaacggattgcgaatctgacctttgtcgcatatccggatacggataacgatggagacttgttcattatgggagacgaatccgcagcagaataaccgagaggcatcgcttaaccgcggtgtcttttttatttaagagaaaggagatgttttatgaaactgttcaccaaaaaagatcctgagcaactttatttcggtgattatccggtcgagattccgaagctcacaccgaagaagtggaagcaattattcggggccgtcgataagctgcccggaattatcgttcaagttctaagcgcgcctccgcaagacttttactcgtatgtagtcaccgggctcgaagtaggactcgatgagatcgtcggaattgtctcggcactgagcgatgttgacgcggattacatttcagaaaacgttggggcagacgagatgttcgaatacctcgccttaacggttaagaaaaatcggttgtcttcgatggcaaaaaacgtgaaaagccttcttccgaacctcggcaagtaggcgaagaagagggcgtctcatatacgatcgacgactacttaatagatgcggctattattctcggagttactcagcgcgagattgaaaacgattattacatggttgatattccgaagcttattcgcgctaagtcaaagcaaaacgcaattagatgtcttgaagaagtccgtataactctcgctacgaataatcgatcaagtgaggacgaagatttcaagtcgctaatgaacgggcttacgagaacagcaggaatcgaaaatgctaatcacttcgatagagaaaaattcgaacaattacgcatgatgcaagcagcttttcggaaaggaggtaactagatggccggagcaacagtcggagaaatacgcgcccgtttgattcttgatatggccgattggtctaaaaaatccgatcaagcaaagagcgacatgtcggagatggggaaatcgtctaaaaatctatcgaaagatatgggccagatacaaaaggcgtcactggccgttggtggtgcggtagtcgccggcatcggagcgtccgttaagactgctgcagatttcgaagcggccatgtcgaatgttaaggcgatcagtggcgcgaccggtcaggaattcgaagatttaaagaacatcgcgtctaagatgggcgctgaaacgaaattcacagcggtagaggcggcggaggggctccaatttttggcaatggcgggattcagcgtaaaggaacaagttggatcgctgccagccgtcctaaacttagcgtctgcgtctaacgaaagcctcggacgatctgccgatatcgtatcgaatatcatgacaggcttcggaatcaaagcggaagagtccgggcgagcggtcgacgtgcttgttaaaacgatgactacagcgaatacggatcttggacaattaggtgacgcaatgaaattcgttgcccctgttgcgacctctctcggatattcgatcgaagacacggcgacagcagtggcgaaaatgtcagacgcgggtattcagggatcgatggcaggtacggcgctacgtgcgtcgttattgcacttggcgaatccggtcggacagtccgcaaaagcgatcaaaaattataacctcgaaatacaagacgcgaacggtaacctgaagccgttgccggaactcattggacatatcgcggaaagatttgacggcatgacgtcgtcacagaaaacggctgctgccgcacaacttgtcggaactgaagcggcttccggatttgttacgttgctcagcgttggtgaaaaagagctgcgtaaatattcaagtacgttaaaagaagccggcggcacggctgatcgtgtagctaaaacgcaaatggataacttgaacggctccttcgaaaaattcagaagtgcgctcgatgggctcggcatcaagatcggtaacgagtttttgcctactttccgaaaaattgtagacgagggaacgaaaatactcgatttccttaacaagttgaatccgggaattatcacgacaggactcgaaatggcggggacagcggcggcgattgcgctcgtagctgcctcagccgttaagctcggaatcgcgttaaaaggccttttcgtatcgatggggcctgccggttgggtcatagctggactatcgattcttggcggcttgttggtcggtgtcgcagaggggtacgacgcgatgaatactgttagcttagaggcggctgagaccaaacaaaaagagatcgaatcgattgaaagtctagcagtagagttcgacaaacttaaaaacaagacaaaattgactgcggatgaatttgctcgctatcttgacataaatgatcaattaaagacagagacagacccggatgttattaagcgacttaaagatgagcaagcggacctcaagaaaaattccggtttaaccaataacgaatttgatcggtttttaaagctgaacgatgaagtaattaaaaagtcaccggatacagaggcggcaatcagctctcagggaaatgcagtcgctaagaacaccaatgcgcttaaagcattgaacgcggaaaaagctgaagagctccgattagagcttgagaagcagaaaaacctagcagagaaaaactatgataagaacttagagaagcagaagaacatccaaaaagaaattaacgatctcgcaaaagaacggcagaaaatcgaggctgatgtccaggcccaattggatatcgtagagtctactgagaagaagatcgcccaggctaagttagatggtaataagaaagaagcagaatctcaggagaccgttcttgatgttcaaaaagggactttagcaacccttcgcgggcagttagatacgatttatggaaaaatcagcgctaagaatactgagttaaacaaagttaacgaagagcttggaaagctggataccattaaacaaaagatggtcgacctcgaactccgtcaggtcggtttgaatgcgaaaaaaggagaaggtgtcaacgttctcaagaaagaaatcgctaatctcaaagacgcgaaagcaaatctcgaaaacaacacgacggcagcggacaagaagacgaaggaatatcgtgatgccgttaaagcaatcgataaagaaatcgcgcagcttcagtcggccaaatcgaaggttcaggagattacaaacgaagccgaaaacatgaacgaaaagctggcgcgaaggatcaataaaaagatccacgtcacttacagcatggacggatcggaaatcgaagagagcgcggagacattcaagaagacgcacggtaaaggcggacaagaggtgcctttccacgtcggaggtatcgtcggacgcggtcagatcaacaagctccacaccggaggccttgcgtctaagttcgaaaatgctccgatgagccacgaagtcgacatccgggcactgcggaacgaaatggtcctgacggaagcacaacaggcgaatttaatgcggatgattgacgcaggccatacggcggcagttggaagccaggtcggagcctcaccggaagtattggcggctctcacgtctatcgaaagggccatccgcaacagtgacggccaagtgatcgtgatgaatgacgaggttgtcggacgcttggtggagccgtatgtgagccgtcagcaagccgaagaaataggcgtcttgagcgcgtttaataattaatggcgggaggtggttgcgtggaaaaaattccgataacagacagcaattttaagatcgtttacgataacgggtccaccgtcgatatggcgagggacctttctgttttagttcgaagctttgttccgggtgcgccgtctcctaacatttattacgaaaaaatcgaagggacaaacggcagcatcaggacgggaaaagatttcggaatacggtcgatcaaagcagaatgccgcctgtttgccgaagatactgacgactttttcctgttgctaaacaaaatagtagcagctctttacaagcagtcgcaattctacatcatcactgaatcggagccttacaagcgatggaaggtcgaagtaagctcgtcttttgacgttgaccgtatcggaacaaccggagactttaatattcagtttgactgtgcggacggattcgcggaatctctcggcacgacactcgatccgttcacgtttgacgcggataggtggcttttgggagaggggctcaccgataccgtcccgtcatatacacacaagaccgcgtcgttctcaatctataacgcaggagatatcccggtagatccgatcgagatgccactgatcatagcgtataaaggcggatcttccaatttagctatcacgaatcagacaacgggggatgtgtggaaatacagtgggacgacgtcatcgggagatacaatcgtcctcaatcgggttcgatctactaaaaacaatattagtatattcgggaacacgaatcggaaattaataacacttgctccggggtggaatcacttcaagttgagcggaacgtccggtagcttcgaagtgtcttttaattttcgtttttactatgcatcgtgaggtggtttttttgaaagaattatatgttcgtagcattcttgggcaagaggaagcgctcactaagtataccgtgacaagaaagtgtggtctaaacagtgaaaagtatattgatgttaccgtcattaagcatgagacaaatgaacattcatttcctttggttcagccggagaattatttgatatacgaaggagaagagtatgtcatccgcccgatcaacgcttccgttcggtctgtgaaagtgaaaggcattcatcgaatgtttatcgatcttgctgacgtctatatttacgaagtcgaggagaaagaaaaggaatatacgatcgaagaagctctaaatatcgcactgaaagggaccggatacaattacaaagttgataagaccggattgccttctacaatcaaagtttcgaattttggcgacaacttttcgattgatcttttgaagacgatcgcctcggagtttggcgcggagtttgattgtaccggcagaacgatttatattgcgaagcagattgcgagatacacagatcatcagatacggcacagacttaacgcagccaatccatcgaaagagatcgatacaagccaacttaaaacgtttatcaaaggattcggtaaaaaagacgaaaaaactggaacttacgcggttacagcggaatatacgagtccgctagcgagcatttacgggattcgccacgctacgccagttcgcgacgataaatatacggaaaagaacaaggatcagttgattgcgcaaatgaagaaagaacttcatgaccagattgatatttcaattacgctaacatatgtcgaactttctgaactcggagttcaagatatacggctaggagattacgtctggtgcatcctagatccgttagatattgacgtacagatacgcgtcgtagaagtcgaggattattctgatccgttaaaatctccgaaattcacattcggaagtattgtccggaatgccccgagtatagtcgcgtcctttaaaaagacgcagaagacgctttctaaaattgtcgatcctcagaccggtaagatacgagagggatcaatcaaaattggcagcggcacctcattcgatcctgggtacgatccgacgctgataaacattccgcagtacggactggcgtcggcgaattcggatgggttaatgagttcggctgatttcgtaaaactggcgaacattctagtcggtccagacggtcaggtagtggtcgcgttagcttcggatactaatgacgggttaatgagtgcggcagacttcgcaaagttgaaacggattaagacgccggtgtctggcgacgtcgatatgcagtcgattttagatcgattagcagctcttgaacaggaagttgtaggacaaggataaaggaggagacagatgccgaattacccttacaaaaaagcgggcaatgctttagaccgagattttagaaacagctataatgacaatttagaatacatcgcagacgatataagtggatcatacgctaaactaaattctcatattaaaggtcgggcagcccacatgtctacgcaaatatcccatagtagcggattaactgttgctcaagaaatcgaagtggagaaatcgcgaataagaaacctagtacttaatgctgatgggaccaatataaaagaggttgtagatgcgcgtgtagataatgatggttttgtgtacccagtattgaaagaaagattagatgcagataagggagaaattactgcccaactagaagaagcgtacaggacggttgaattaataactaactcacaagacgccttaagctatttaaataacgtcgaggcgatgactacgtttaaagctcgggaagaagctttattctggccgcaatctgcaaatattaatgaacgaacaaatgaagtctatgttgcttcgcaagaaaatgaaggaacagaactgagaattgaaattcgcgatcttgatacaggtgattttaaagaaagaaaatcgattccaatagaatcaggcgcgtacactgagggtttgtcgtttttttataatgaaaaagatgaattatgttttatcgtcaaagccacgaaaacgcccggatataatattttcaattatgataatggagaactctcaggactaatcgcagctaatgtaagtagcaaatatgcagctaatggatactactttgtttcagtaaccgtaaatcaagatagcatccatgcttatgtgtacacctgggagtcgataaaggcgggcagccctgtcttatacactgaattccccgtagactatatgcctaacatagagaagatacaaggtgtagccctaaacaatggatacttgttcatgtcacatggtaaaagctacggaagaccggctatatctgtgtacaatctagtgggcgaacttttgaattactatatttacacaaaagattcactcgctagtgcgatcaataaaaagttccctgactttatcccgaatattcacaactatcactttgaaaatgaatcgtgctgcgtgtataaaggtgatttagttgcggttcaggtagtgaataacgcagatgttgttcttgtacggcataatagaatgctagggtacccattgactgtaaacgcaaaccaatctcgtaaagatacaggttggatgtccgtggagctattaaacggggcaaatacctatgttccagaccgccctccacgaatcaggagaataggcaacaaaatacgtttagaagctgaactaaaaggtataacgacaatggacacggagtatataagttatcatcctgattggtctcctagtagagtattagctttttcgaccccgacatcgggaggatacaacgctacttgccaaattcaaccgaacggaaaagttaaaatattatctacacgacaccctagtccggatgaaaactcttggtatccgataaactttgaatggtatttgaattaatccgtgcgataactattttaaaggagggatgtctccgtatgatttataaagataccgatattcatttcagtataaattcgcaaattaaacgaagtattgccgcaaatattcaatttagtacgcaggacatcgatacggcaaaactaacgttcagcttaacgaaagatggcattccgctgccgatcagtcaagcgactcacgggaagttgttcatgcgatttgcagacggaagcaagttctacgttaatacggaagttcaagacgcgctagggggcgttattttttatgtcttgaaaccggatcaagttacgcattatggaacggtgcaggcggagctttacgttaattacgacaacggccagaagctgagcgttcataaattttcgttcgaaatcgatcgggcgctcgttgatcaggacattgtgccagtggccgagtattatatagaagatttcgaggaccttaaagctgtcatcgtagagatgtcggatgaagcagaactaatgctcactgagctccaaaagaaatttgagacgttggacaatatcgagacgaaagagggagcgcaggaaaaggcggacgccgcagaagctgatgcaaaggcttatacggatgaacacgcagctaagacggacaatccgcacaaggtaacgaaagctcaggtcgggttagcgaacgtcgataacgtcaagcaagcatcgaaaacagagtttgatagccacgtcaatgacacgagtaacccgcacgatgtgacaaaagcgcaagttggtttatcgaatgtagatgacgtgcagcaggcgagtaagatagaatttgatgcgcatgacgacgatactacacggcatatcacggctgatgagcgcattgcctggaacgctaaagaaacaacgaatggcgcgcaagaaaaagcggataaggcactggccgacgccaagacgtacgtatctaacttttcgtgggttgttgcgactatgcagaacggttggtcccattataacgatggtgaggatgttatgttcggaatcgatgcgacgaaaacggtatatgtgcgaggcgaagcaaaaggtggagctgtcggtacaactgttttcacacttccggccaacatgcggccgccgagatctatggggtgcattcaaatagcatcagggtcggcacaggtcgctcggattgcgttcaaatccactggggaagtcattgtagaaagcgtgtctagcaacacgagctacattaaatttgatttctcatttaaagcattgtagaggagctgttatcaaatgaaacaaatatacaaatacgacagcaaaatgaattatgtgctgtctgaaaatatgattatcaatgacggcgaggagattccggaaggttacacagatatccctcctgttaatcccgacggcgccggcatgtataaaccggtgttcgataaagacaaatcagagtggcgagaaacggccacgcaagagtatatcgatagtctccaaccgcctgatcccggaccgtcagaaatggaagttctccggaaacaagtggcggatttatactacttaatcgcgttaggaggttcgtaaatgccaatcgattggtacacgtatattaaagggttctatgaagacggtctttggacgaaaaagcaagtgcatgacgttgtggctgccggacggatcacgccggaacaatacgaggaaattaccggagatccttacgatcctgattcgccaccaaacgaagacgaaaacgtaactaatagcgaacaggaggcgtagtcattgggcgaaccgtcgaacaacgaattgcacggtaagattgccgatattcgcgaatggcttgtacgaatcgatacgaaggtcgactatttcaacgaagtaaaacatacggcagatcgagcgcatgaaaaggcggatgaggcgttggcactcgcgaaagaaagtcgggcggatatctccgacatgaaagcaaatacgaaatggttatggggcgtaattctcacggtcgtcgggttagcgatctcgggaattgcgctatttttatgagcccgttcggcgagagtccggcgggctttttatatacgcaaaattaacgaaaagggagacgattagatggcgatttcagtcaagaaaaacctcgtcgcatcaagcaaatatcacgttaagtgtccgtattcaatggatgcgaagtacattacgtttcacaatacggcgaacgacgcttcagcagcgaatgaaattgcgtacatgatccgcaataacaaccaagtatcgtatcactttgcggtagacgataaagaggtcgttcaggggattccgacaaaccgtaacgcatggcattgcggagacggcaacggaccaggcaaccgttcatctatcggcgtcgaggtttgctattcgaaatcaggcggcgctaagtataaagcggccgaaaaacttgcgattaaattcatcgctcagcttttaaaagagcgcggttggggcgttgatcgcgttaaaaaacaccaggattggagcggaaaatactgcccgcaccgtgtactcgatgaggggcgttgggatgcggtgaaagcggccatcgctacggaattgaaagctctcggcggtcaagcgtctaaaccatccggcacgacttataccgttaagaaaggcgatacgctttccgctattgctaaagcgaatggagtaagcgtggcgaaccttcagagctggaacaacattaaagatccgaataaaatttccgttggtcaggtgctgaagattacagggacgtctaaaccggctgcggctccgaaaccatccggatcttctaaaaagacgttcacactgccgggcggagtccttaaagtaacgaacccactgacgaaagggacgaaggtaacgcaagttcagaccgcgcttgctgccgtttacttctacccggacaaaggtgcaaagaacaacggaatcgacggctattacggttcgaaaacggcgaacgcggtcaaacggttccaatcgatgcacggattgagccaggacgggatttacggacctaatacgaaagctaaactcgctgctgcgctgaaaaaagccggctattccgtaaactaatcgaaaagggagacgatattatgaacgtaaagacaatcgaaaatattagcgcgggcacagtcgcccggttcgtactacttgcgctagcactcgtgaaccaggcgcttacgatgacggggcacagtccgattccggtcgatgaagaaggcgtgcagcaatttatttcgctcgcgttcatgggcgtaacttcgctgtgggcgtactggaaaaataacgacgtgacgaagaaagcgcggacaaaaggcgaatagatagcggaacttttggcgggcgcctgcgtataaattcgtaggtgctcttatacataatctgtcaaacggaggaaatgttagtatggaacgtaagtttagtctggtattatttgttctcggctggatcgtaattgtggccggtatattgacgaacatcgaaggtaccctgtatcttaacgcgaatcaattcgttgctgacggagaaacaccgaagccggttagaatgatggagattgtttccgatatcattcatccgttatatcaaggcagcatactgatcgcactgtcgtatctattaacctacgtcaaaggctccggaaaaactgaatagatcgtctagccctgtcctccgtcggatggggcgcttttttgtttttaggtgatcgttttttcctttgttccgaagagtgcatcacctaactttccactatctttaccgcctctcgatcaatccaggatataatccttgcaactaatgtgaaacttaagctcgagcgtttcttcaagctttacaaagttacaactgtagtatcatggataaagttaataaactacactaattaggatgaaagtataacttactaacaagagatcataatgatataatggaagaaggtcacagactattatcttctcaccttagacgaggtggagagattgacgtctattaaaaaggataaaaggacaggaaaatattattttgtatattcgggtggattccaccctgtaaccggaaaaaggatacagaagaaaagaaaaggaattcatagcttaaaagaagcgaaagaggaattaaaacgagtaataattgaagtagaacaagagaaaaattcatataaggcagataaaagctcattcggtaactttgctgaaaaatggttcgaatcaaaaaaggttagacttcgatcaagtacaatcgtcaattaccgtgagcagcttgattacaacatacttccatatctaggaacgtttaaaattaaagacatcactgaggaagtcttgcagcattatattaaccgacttcacaatgaacggaaattagcgccggcaaccattcggaccgcttatggaattgtggcggaaattttaaagaaggcttcccgtaaaggggcgttcgacctcgcaatccttgacgatataaaccttccgcctgaaaatcgtgtatccaaagtgtggaccgagaagaacgttcaaacgtttttagctactcggaattgcatcgtttctttaacgcgatattttatcggaatggtattatccgttattacaggtatgagaatgggagaggtgcttggattgcggtggtccgatattgacttcgaaaagggactcctaacaattcgacaaactctcgcgaagatagacgatgagggtaattacggattagtgcccgaggtcaaaactacggcgggcttcaggaccgtccatttaccgaaattctttatcgaatacttaatcgaacacaagaaaatggtcaagcgcgaaaaagaaattctcggggaagactatattgactatgatctcgttgtgtgtacgaaacgcggtaagtgggtgcatccgaataactatcgacgggcatttactcggttaattgcgcagcttgaattgccgaaaattcctccgaagaatttgcgacatactcacgcgacatacttaatcagcatcgggatcagtccgaagattgttcaggagcgtttgggccatgcgcatatcaaaacgacgctcggaacgtacagccatgttttaccttcgatgcaggcggaattagtcggaaaattggacgatctaatcgagaaagtgtgaccgcagtgtgaccgttttgtgtgaacgggtgtgtgaccgtttacacatcagcgttttgaatacggattccaccacgaagactgcatgaacatcatcatgaacgatttaattgagctgatggacccgcgctacatcgaagtctggtgcaaattcacgccgaggggcggaatctcgatcgacccgtacaccaactacggcaagcccggcacaaagtatgaaaaaatggccgagtatcggatgatgaaccatgatctgtatccggagacgattgataatcggtgatgatgcgggcagatgaagcgaaggtttgtgatcgatgtgtgaccgagacgcgtactgttacgcgtcttttttgttcgaaatttccacgaacaattaccaagcgtattggtcgaatgctagtccgggtatatgaaatacgattcgaattgttaattgaaaggtaaagaggaggaaacttcgtcttcactcgcctcgttaacgtctccgcttgacagttcgtcgttaactgcgaatgctctagcgttcggtatttagatggtttccgtctgtttttagtcttgtttgttcatttattcgtgaaaaaatgtagctttgtcctcatgttacaaaggatgttttctgttttttctttaaacataaaaatctagttattctgactttgaggaggggatgggaggtatatagcagagacgaagacatagtgccaagagcatgtcttattcgtatacacacaaatatgtaacgcgaagatgttggagggcttacgaaagaaacaatcgatcgttatagacgggaggagcgttgaagaatttgtggaggcttttaaaggaaggttggcactgagtcggaatggtatacgttaatcttaccgacagctgataagaagttaatcacgatgtttaacgttaagaaaccgtagaaataaaaagcgccccacatttgcggcgtttcttacgtttgcttacgggtagcgatttgatatacgccgtcagactggtcggttgctgaaacaacgctaatacccatcgttaataacgcggcggctaaaatgggaataacgagctttttaatactcatagagacactccccttttttaatttttgtttgcccatacatcattttttgaaggaactcgattgagtttctatggtcttttctttcaaggtattggttagagacttcaagcgaaagctcttctatgtatgcaaatattttattctcctccaagtatttaaatacctctaaaatctcttctttattcacagaatagatatataacgcctcaagatattcaaatagagaagtgaatagggtatcgttgaattttcgagctgtttgtctaaccaataagaaatatctcgattgcgcgctcgtagtttttctgcttaaaaagaagttgagtaaagtaatataatgattgtggtaggttgttatattcttcttttagattaatctctacggctttttcagcatattcaactgctgcatcaatgtctcccatacattcatgacagtcggctatattaaaataggcagaactaatgagccttttattgtcgatctctatcgctaattcaagtgcattttccaggtggggtaaggctttgtcatggcgcattaaatcgtcatagttacccgcgataacaaataaacattggattttacggactgtgtagagttcatgattattgtatattttaaaggcccttaatatatgatacatgtgtctgtttcatgatgtagtatgcttcagccattttaaagtgaaactcggcttgttctataacatcgtaatgagagccaactgtttttctgcgtttcgataagactctattgctttgatgtactgttttttctcaaattcatacatgcccctaaagaaaaatgagtagtaactaaggaggccatttaaatctcttcgaggctcctcgatttgggccaacaatttgtttattgattgtccttgttttcttttgttagtaggttctaaatattctaacattaattgatgtctaaaacacatcaactgatagtaaaggagtaagtcctgatcttcttccatttgattaatttccttctctacttcttcttttaaagcctctgcatccggtacgctaaactctcttatcattttataccattcgtggattttcactccgacttttgacgagggtattaactgtttcacttccgtctatacctttttatttcatttttgtaaatatattactataattcgggtgataataggttgaaaagtgaaaaaattttcggtatgccgcaataaaatcagcaacaaaaagacgcctgctaagacgcctgaatctctatatgctctttttcaagccgcacctgcagtattctcgaagggaaatttcgtccaccgcgatcttgaagggtttactatttgaaggaatttgcggataaaccctgtgcatccatgaaaatgaaacttggcctaataaagaagtaattcgatttgtgaatgatcaacttaaagaaaatattgatcttttattgatgcctgcaacagcttccacagctcctcgaaacccttttaaaataaagagttataaaaattgaccagcatccactctagtggaatctttccccttcacctgttttaacgtggctacgattagaaagctgacaatcactaataagagccatgaactcactttccctacatgaacgagactccacgtactggtttggtttggatatgtccaggccccaaaaaacgttgcgatattttcggctatccatataaaaaatccgatgagcacaaaagaaagtgcgagcggcatacggtaacgaatcccattaacctcgtatatgacccatgatttccaaaagacaattatcacaagtccagataaccaaaagcggacgtcaatccaaaaatgatggaggaaaaaatttaaataaatcgcagcggccagcggtacaacgacgtaaaacggcggccacttaaccagttcaaccttgagcctcctccaagcctggcaaagataactggctacacttgcgtacataaagccgctatacaaaggcaccccaaagattttggagtaaccttcctccggataagaccaggagcccatttgcaccttgaaaagctcaagagcaagtccaataatgtggaacaatgtgattacttttaattcatcccgtgtttcaagaccggaacgcaccatccaccattgcatgagaacacagatgatgagcagcaagtcataccgcggcaggaagggaagaggtatgatttgtgtaacagccaaagaggcaaaaataacgacaggaaatacacatgacaaggactgctcccaaccaaaacgaacgagttgttttagtgctctcatgatgtgtgcctccgaagtttttttctgaatatatgcgaggccagcttagtatagcagctaaaccggcttacaggtatgcgcataggatcaccgccaaaaaaatggtttctttccatattaaatacttttttaatcctgggtgtcttcatcacttcggtattccaaaatatctccgggctgacattctaacgccttacaaattgcctctaaagttgataatcgaatggcctttgcctttccatttttcaatatagaaagattcgccattgtgattccaaccttctcagaaagttctgttacactcattttccttttagccagcatcacatcgatattgattataattgccattgttatcacctcagactgttaaatcattttctgattttatatcaatcgcttcttgcaatagcctttggagaacagcggcaaagactgcgataaccattgaagcaaaaataaggaccaacccgatcagtatgatccctggagcgtcgtccatctctgcgataagatagaagagcggcatgcctgccgcaaataaaatactgatggtgattgcacagtattttatattctttaaagcccgtacagataattctgagaaagctttattctggtcaatatagcttaaaagtttaaaggcttgatacagagcaaaataaaaaggtatcgccgctgcatacaaatcggcatatacgagatatttcaaataagaaatacccggatacaattcggctgcaaaattcgctattatcggcacaaaaaatatgcacaaagcaagaactgggattccaataagaataacagctatctttaaaaagagagttgatccccgtttcattaaaagcacctcacttatttttgtcgatttgaatttaacacattatttatcgttttacaataaaaatatattgaaattgatgattttattattgttatggactgatcttttgatttttagacaagatggcgttacttgcggaaacaaagccgacacgtctgcagagtacacacacatcttgcagacctctacggcttcagcttatatgcaaataaaagccctaaatatgttaagcgcgtactgaatcctacagatcgtcgaggagtgaaaaagaatcgatttttcccaaacatattttgaatttataatagaatagctttaaaggaatatgtatcaacaagtcgtctagcatatgttgtgttataaaataaaacagctggcgattggcgtgtctttccttttaacgtgaatagtcgaggagttatttgaggtgaagcagaagacgctgacgcatgatcgacgtctttttattgtggtaaacacagagcagagagtcttgttagattaaattaaaataagacgccaattaaggcgccttcatcttgtcttaaatccattcacaaaactttctccatccttctctgtcgcaataagctgctgggcgctttgactgattcgctgagcaagcgcctgctgcgcttttccttcgaagctgtagagaagcgatgaataaacgctgttcatttctttttgtatatcgtctattttaaacttcggtcttagcgtcgttttaatgccttcaagcttagttgcggctgttactctcatgcccgttttcagcatttgaagctgattgcgccgtatgaagagggtatcttcttgatctcagtttaagttgttgagtgaagccagtttgttgaaattttccattgtttcatctcctaaagtttaagccaatttgccagcattttatctttcgatttaaaatcttttgcaatctgcgccaggtatccgctgatgtcttctaaatctgaaatcgtgtcctttaatgaggcgatcccgtttcatcgtccgcagatcgttgataatcgcatttactttttgcgcgagctgcttggcaacttcgggcgttactttaattgcgccacttccggatgcaacttccggtggaagcatcgcttttaaatttttgtcataaacgagttcatcgccctctatattttgaacgttgccgttttcgtcgaaggtaaagttgcctttgttgaggccgtgtgtatccggcattcccattgctgtggtagcaatgtagtctacagcgacattaaacactgtgccaaatataccgccgttatacttcggatctagtcgtatttgtcgttccacacgcgaagtagaggggtctttggtatatattgttctgcctgcgtgtcgttcgtactcattccaccagccggaaccagtcatatcatccggattgacaatcgcttttacagacgagtcatatttgccgcttcggatctccttttgcttttcttcagaatgcaatttaacgacggaaggattgttgaatgcgactgcgtatatatcattgttcacagcgctgtattcagcctctgcgccgccaagagagtgtccggtggttgaaataaccgtcgagatgcctttatacttttgtttaacttcccgtaccagatcatcagcttgcccgatttgggacgttttcgtaattaatttgtatttaccggtgctaagcatcgcgtcttgtgagggggttgcgttgtattttcctattgtttttgatgtatccttcgcatctttttagattatgtattgcgatttctttttcggatcaagacccataacaacgttaccgccgtctgcatcaataacatcttgaaaaaactgttctttaggatttgttccagcgaaggccacgacgacgttttgtttaacccatttaccgtcctttttctttgcttgaacaaaaacatacgcatcaagtccagtgtcagagtcccttttaattttatcaacaaaaaaagccttatttgatttactctctataggtgttctttccttgaatgcttctttcattttatcggtactatatgtgttttggctaagaaaataatactctttatctgttaatttaggaatatcccgcaaactatgtaaaatgtaacgtggaaaggatggttttatgaaaaaatacataattatccttcttgctctggtcattataacatctggaggaatatttatgaagcaacaaaataataacagagaaaaagaagagctttataatttagctaaggaaagaatgacagactttattaaaacgaattataaggacattaagtcaattgattattatgatgactacgaagtgaatccaatgggcggaattgatattaaagggtatctaaatgatgataagaaaaagaaaatatggggtatttacgataaggcaaatgacgaagttgggtccttcacagtcgatgctgaaagaaagcccgaatataaagataaaatttgcgattattaataaaaggcccgactcgattgagcgggcttttttctattttcatctctcgtttgtttaactaatcggtttttattaccccttttaggcctcctcaacataaaatagttcttcagtaggcacgtttaatcctctaaaatggataaattgcagttttgggcatttttaagatgggaagataacttgcatgcggaaataggataagctgtaaaacaacgaaatttttgatttataataatttgttacatacttatagtgtgatgtgtaataaacgaaaggtgaatccattttcagattatatggcttaagctttaatatgcatagttggttatcgggaaattgccttcaaaaccgtccaagttcataataataaaaagatattcgtattgagcaggcgtgcatcgttgcacgcctattccttttaagggcatttttttcacctagaacgaaagaacttaatgatgcgaattttattagttctattgtcctgttttatatattgagtaccaaaaatgcactccatatgttttataatgaagcgggcctaacaatcagcaaacatggagcggaatgcaataaaatcgtataagggcatgcagtatgaactggaggatacatttttgaaatataaaaaagcagcagcacttggaattggtttacttttatttataggcggatgtcagaagagcggggaagctgaaatcagcgtccaagattacacaggacaggattttcatattcatagtagaggttatcagaaggaaaccgctgagatcgcagaagcgcatcgagatgaagttgaaaaaacggtaaaagattattttttggatcaatatagaacgaaggtaaaagtccataacattgtcggagggcatgggtttgttactgtgtatgccgaatcagtcggaaacttgcatttctacacaagcgcaaaaattgaaattgatttggacaagaaaagaggtgcaggctgacgcgatcagctcatcggagtgggacgtaaaagactcgattacaagcgcgatatatgcgttggcttttgaagacgaatttgccgctctagattactatttagagaagctggcagaagaagagccggttgtaggtaaaacgcaggcagccgttgataacacaagcggtatgggatatcagacgccttattatgctgtttctttaaatgctgattggaaggatgacctttattcagcctatttagaaaacccaaaaagaagcaaaaaagactggcaagagaaattggaagatgaagaaatcaccccaaaatcatgtgatatcaatatacggttatatatgaaaaaaccaaatacaagaccggacgagcgcatttataatcaagttgtccaggatatcgaggacatggaagagctggccccggggacttacaccatttacttgagtgacaatagaatcaacaaaaacctaggatataattcaagaaaaagcacgcttggccgataaggtcttcctaaccgataaagagattggaaaccgatcaattttctgtatggatatgagcgggaaagaaaaagtggagatttcatcatctattttgaaaaataatgtcctggggaaccgttcgggtgtttcatttcgcacagtcgccgttttttcagctgtccaatcaaaaatcgattaaggcgctgtgcgatgcttcaaaagacatcctgaacatatcaaacttcttcgggatgatgcaggggacagaggaaaaaaccgccggaccaaggtggcaggcggttttccttttgtagaaaaacttgtggaaataaagcttcgtggaaatcctgaattttttgctgtgaagggcggctgattaatgcagggagtctttaataattttatagtttttatgattgacgacggttaaggagtccagttccaagtctctgtagttttccataatcgtgacatcgacgatcacagagttttcgtttactttttctacgattccggtgagtccgtttttaaattcgatgacattcccgacttttgcaattttcaagtgacttcctctcctttaaagtaaattaacctattgaaagtattttgcaatattttcttggagaagtaaagcgatttgggaagcggcatcactattgttgtacccggtgtgacttaatgatatagttaattagttaaagatgatgagagaaaaggggagagaaaagttgacagagcaaaatgccatcgatcagatcgagcaattaaggtcagggagcattcatgagctccgtgtgaaaaaagaggattttctttctttcagagccatcttaacaaagcaggaagattttaagcattttcgcggcattgcccagcatggcggagatattatatttcaatatatgaaagaggcaagaagctgaaaaaagctttctcagacaggctgagaaagctttttttatttgtgtgaagccatatgtttctggagattttggtgttttttgcatgaaatccgccggctgtctgcaataatgtgacagccgaacggtttgatggaagtcatgccaacattttggcaatgaaatcggcgaatcgtcttgttactgtaaaacatatgtttttttcgatgaagatttgacaaggaggaaggaaatgaaatcgaaatttgctgctctagctgcgtttttaatctgcatgctgccggcggcaagaatcgagcatgctcaagctgtcatgttgttctcgaaaaaagataaacaggaaatggaacggctgatggaaagccttaaacaagaagaaaatcctgctttttcccaattgacagatgagaaaagcttcattgaagccgcgcatctgtcagctgaagaggaggaggaaatagaagaagctgaagaagagacgactgatcttacacataaagaaaaagatcttttatcaaggcttgtacacgccgaagcgaaaggcgagtcatttgaaggaaaagtggctgtcgccaatgtcgtcctgaatcgggtgaaagacagccgatttcctgacagcgtaaaaagcgtgatctatcaaagaaacgcttttgagcccgttctaaacggcagcatcgagaaaaaagcagaccgcgaatcagtggaagctgtggaagaagcggtagatcaaaataaaaaagaaacagaagctttatttttctataatcccgacatcgcttctgatgactggattaaaacgagaaaagtcgtgaagcgcatcggcaatcatgtctttgcgatctagaaagcagtcagggccattcgccttggctgctttttttgtgcgattctttcttacgcattatcatctttcacagatactttatgaaaatcaattttcaattaaaaagaaaataatttttagacttgtctcatatgatgggataaacccgtgagacaaggagagacctcatgaaccgttttgtaaaaggaatcgttcttctttcgctagctgctttttttgcagaatgtcttgaattcgtcatcaacatgattcttgcacgggagcttggcgagcatggcatggggctctacatgagtgttttgccttccatttttttagtcgtggtgattgcgagccttgagctgcccgtatcaatatcgaagtttatcgccgagtccaacccgaagctgcacgaaagcatgctgaaacatgcattgcggatgactgcggtctgcacggttttctccacggcagccgcagtgatcattcttccatttattccggtttttgattcttaccaccctctaatcagaggacttgtgatcgggatgattcctacggttgcattcacatcgatcgcgagaggctacttcatgggcgttcagcaaatgggtaaaatcgcaacggcgaatgccttgaaaaaaatctttcagctcatcggcttgtttttattttttcaatggtattcctttgaattggatacttctcttctcatttcattgtttgtcctcgttgcaagtgaagtggtcgtgtttgtttatttgttttcgcagtttgttttggtcaggcgtgccgctcaaaaagggcagcagatccacttgcggagaaacgatgttttaaaacgcctgctcactgtttcgatcccgacgacggggctgcgcgtgtttcatgctgtgacaaatgccgtcgaaccttttttggtgaaggggacgctgcttgccgctggcgtatcaagaacatcggccatcgaccagttcggcatgctttcgggagttgcgatgacaatcggcttttttccggcttttatcgcccattcactgatggtcgtcatgatcccgagcatttctgaaagctacgcttacgggcaatacgaaagagtgatcaaacggattaaacaggcgatctttattacgctgttttacggcataccgtccgtcatggtgatgtatcactttgcagagccgctgacccatttatttttcgattcggtcaaggcgtcgttttaccttaaaatgttgtggccgtattttttattccacttttttgcgatgccttttcaggcctgtttaatcggaatggggttggccaaagatgctttttatcataacgtttgggccagtgtcttatcgtttttgatgatgtatgttctcgggtccatgcagactttgcagatgacggggatcattcttgcgatgaataccggtatgattttgctgacggcgctgcattatgtgacgatttgcaaggagctgggcgtcacgctttttttgacaaacaaatcccgatctccgagaattgaaagccgctgatggatcctcttcatagttttagcttttgcggggaagctaatattaaaaaagaaggggagttcccatgcgaagaatcagtctcatttacccgctcatcctgctgttttttaccgggttattcgtatttcagccgcaggcatctgcaaaacaagcttcgccggcagtcatgcagatgaacacggtcgaaggtcagcgcgtcgtcattcccgccgaaggccagaagacgatcgttcatttttggacgacctggtgcccgccatgccgtgaagagcttccgcgattccaatcctactatgaaagcaagcaatccggcgtcaagctcgtgaccgttaatttactgaatgccgaaaagaacgaacagaaggtaaaacagtttattaaagcaaacaagctgacatttccgatcgtttttgacaaaaagggtgagatgatgaaagcatataaagtcatgacaattcctacgacttttttctttaatgaaaaaggagagctggagaaaacgtttgtcggccccattactgtagaacagatgaaggaatgggcaggaaaaagctgagccgggagttcagctttttttaaaatgtaaatgataattaatatcataaagaaattataataattattatttgaaaacgtaggatgtcgtgctataatgagaaatagaaaagggtgtgtccaatggacaagtagcagtcataccctttatataaataaaatacttaatgtttatgctgccgatgaggcggcaatttgttttttaagaaggaaattgacgatgaattacattctcaattagggaggatattggagatgcaattagagatcgggaagcaatcgcagcaaaaccgtcacacgttgcaatttgaaaattggaggcagcacggggaattgatagctgcgcttttgtcgggtttgttgattcttgcaggctggctgttgtccggcaatgaaacattgtccgttgttctgttttatttagctttttgtatcggcggctttgctaaagcgaaagaaggtatacaagaaacgctgtcggaaaaaacgctgaatgttgaactcttgatgatttttgcggcggtcgggtctgcgctgatcggctactgggctgaaggggccgtgttaatttttatcttttctctcagcggagcgcttgaaacgtatacattaaataaaagcaaacgcgatttgacttcactgatgaaattggagccggaggaagccgttttgcttgaaaaagaaggaacaagaaccgtggcggcagccgatcttcaggcgggcgacctcattcttgtgaagcctggagaacgcattgcggcagacggagaaatcgaaaccggaaaaacgagtatcgacgaatcggctctaacgggcgaatccatcccagccgaaaaaacactcggagacgcggtttttgcgggtacggtcaatttgagcggatcgctcacggtccgtgtcacaaaggcaaatgaagattcgttgttcaaaaagatcattcggctcgttgagtctgcgcaaaacagcgtttcaccgtcgcaggcgttcattgagcgatttgaaaatatttacgttaaaggggttttgcttgctgtcggactgctgctctttctgccgcattttttgcttggctggagctggagcgagacattttacagagcgatggtgttcatggtcgtcgcttcgccgtgcgcccttgtcgcttcaatcatgcctgccgcgctgtcgctgatatcaaatggcgcaagaaacggcctgcttgtcaaaggcagcgtctttcttgaaaagcttggcaacagcaaaatcgttgcattggataaaacgggaacgattacgaacggaaagcccggggtggaggatatgcttttagctgctgatatcgaggagcgcgaatgcttggaggctgctgctgcgattgagaagcagtcaggccatccgcttgccaaagcgattgtcgagtatgcagaagcaaaaggcatcaagccggccgcgaatgtgtcgatcgaggagacgtcagggtttggcgttcaggctcgatacaatggagagacatggctgatcggcaaagccggatttgtcggggaagaggcagccgggcaatttctcacggcggctgttcaggagcttgccaagcagggaaaaacaattgtgttcatgaaaaaaggcgaaaaaatcgcggggtgttttgcattaaaagaccaaatcagaccggaagcaaaagcggtggtcgaagagctgaacgcgcttggcgttcagacggcgatgctgacaggggatcagcctgaaaccgcagcggctatcgcacgagaagcgggcttgaaaatcgtcgtttcagaatgccttcctgacagaaaagtagaggaagcgaaaaagctgaaaaaaacatacggaacaatcgttatggtgggagacggaatcaatgatgcaccggccctagccgccgctgatgtgggaatcgctatggggggaggcacagatgtcgcactggaaacggctgacgtcgttttaatgaaaaacgaattgacaggactgaccaaaatgattcggctctcccggaaaatgaatacgatcattaaacaaaacgtcattttctcgcttgctgtgatctgtcttttaatctgcagcaactttcttcaaattcttgatctgccgctcggtgtcatcgggcatgaaggcagcacgctgcttgtgattttaaacggtctcagactgctgaaatcctaagcaaagaaacggctgcatgctaacggcagccgtttttcacatcagagggcagtttgaggaagagtcggcaataatagaagcgggcggcacccccacaatacataagcggtgagcaagagacggaaaaaactgatacaatggatgtgatgcttttacattttacatgtatggtacggaaactgtctcaaggagtgaacagagcatggaaagaattgaacaaatctcttcctggctgaaagaaaaaaacatatcttcggcttttattcattcaaaagaaaacgtattttatcttaccggcttttatacagaaccgcatgaacggctgatgggcgtttttatttttcaagatgaagagccgttttttgtttgtccgcaaatggaggccggtcaggcgagagcagccggctgggcgtatgagatcatcggatacggggatcatcaaaacccttgggaactcatatcctcagcgcttcaaaagcgaaacggccaatgtttaaaagtggcggttgaaaaagaaacgcttgctctttcgcgcgccgaaatgctgcaggcggtcacaaacggtgcggagcttgtctctgcagaagaaaggctgaaccaaatccgcgtcatcaaagacgaaaaagaaatcagcatcctccgcgaagcggccaagcttgccgattacggggtcgaagcaggagccgccgcattaaaagaggggatagcggaaatcgatgtcgtcgctaaaatcgagtatgagctgaagaaaaaaggagtccaggggatgtcgttttccacaatggtcctttttggagaaaaatcgggacagccgcacggaaaccccggcagccggacgctcaagccgggcgatttcgtcctctttgatttaggtgtaatcattgacggatactgctctgatattacaaggacgctcgtgtatcaaaatgtgagcgaaaaacaaaaagaaatatataatacggtgcttcaagccgaaacggaggcgcttaagatgagcaaacccggtgtgagaatcggtgatcttgatttaaaagcgcgcggcatcatcgaaaaagcgggctacggcgattactttccgcaccgcctcgggcacgggctcgggatttcgcctcatgaatacccgtccatgagtcataataatgacgaacttttgaaacaaggcatggtatacacgattgaacccggcatctatgtgccggaaatcggaggcgttcgcatcgaggatgatgtacttgttacagccgatggagcagaagcgctgacaaagtatccaaaagagctgactgtcatttcataataaaatggaacccgccgtgcgcgggttctattttattacggaagtgaatcttttcatctcaccgtcaatcctttgaaatgaagaaatcgtcaaaggaacggaatggtttgatttcgtgtttttctttgaggggtttcatcgctgcttttgaagacagcacgataacgatacataataggatcagaatgaagatgcccattttccttctcctttctggaatgtaaacgtgttcagcaccggtgctgtcttcattctaaattatgaaacgctttccatatcaagccctaaatcaataaaagaaacttctgatgccaaagggttctggaatattttgaccatcgcttgagtttattggggctgcatgctgccaaaaaagtcctgtgatgatcgtttgatgaatgaatctatgacgcctttttgcttttgttttggtgatttattttgatcaaaagataatcggattgcatcattattctcatgtgaaaaatttgtatacttagctcagaagaaaggggggattacacgggaaaaacactgataaattactgttttagacaaaatcttttcatctcgcatccagatatttcagtctccgcaacgattgcggaatcacccataaaacaaataagcattaaggatttttctaatgatttgaagccatccattacctctgaaaggaagctagaaagagtgaaaaaattagggtttgtactgtttatgtcgatgtttgcttttgtcagtgtagtatcggcagctgaggcgaaagtcattgatcatgacaaagtgcaaggcttcagcgaagtgacccctgtgacggtttcccaaaaagcggccaaacgttttcagccttatttgaaggttgcgagcggctgcgtgccttttccggcagttgacgcacaaggcaacacaagcggaggtctggagcctaccggagcgcccgaaggccactgcagcaaaagcgtgggacaagtgtactcacgatccgcatggtataatggagtttgggcgattatgtatgcatggtattttcctaaagattcacctctgcctttaaaagcattcggccatcgacatgattgggaaggtatcgtcgtatggatcgacaatccggcaaatcaaaatccaaaagtgctttccatcgcttattctcaacacggtaaatttcaaaaaacagcgccaaacaacaatattatggaaggcgatcatccgaagatccgctatgatgctcctcaaccgccgatcaaccacagcctatatgtggacagtgcaaagggcggcacccagcctctcatcgggtgggaagatttgacgcctgccgcaagaaacgcattgaacacaacggatttcggaagcgcaaacgttcctttcaatgatcacaatttcacgaataacctaggaaaagcatggtttagataaaaaatatttcgagtatccggctgattgtgaaatattttcatatcagccgatttttttcgccgccttgtacctcctccgaaatcttcttcgctgttttcttcatatcaatagaatcccgaaaaaatggccaaaaggatcaaaatctatggctcaaagcgatataatttctttatgatgaaatgatccggatgtgcgaaaagatttgaatgaaagaagggaaacgaatggcaaatatcagggaaatagctgaagcggcaggggtttccatcacgactgtttcgagggttctcaacggccacccgtatgtcaaagaagaaaagcgtcaaaaagttcttgagacgattgaacgcctcgaatatgcaaggaatatgcatgccgttcatttatccaaaggcttttccaacatgataggcgttgtgctgccgaccatcagccttccttatttcggcgagctgctggaaggaatcgctgaagaagctgcgaaggaaggcgttcacttttcgctttaccaaacaaattatcaattggaaaaagaaatttttgcattggagcagctgaaacaaagacaggtggacggcctgattttctgttcaaaagcgatgtccgatgaagcgcttttggactggcgtgaaaccggcccgttcatcctgtgccaggactcaggcgagcagcactttgcaacggtcagcattccgcataaagaagcattcagacttggattggattttttaattgaaaaagggcacacaaaaatcgcgattggtttggcaaggaaaaacggcatgaacagccattttcgcctcaaggcatacaaggaagctttggccgcgatcggggagccttaccgggaagagtgggtatttgagcggtcgctgacaattaccgacgggcaaaaactgttctccgaatggaaagggatggaggagaagccgacggctgtttttgtcgcaaacgaccaagtatcagccggtatttttcttgaagcgcagcggcatcaagtggatattcccggaagcctcgctattttaagctgtgacaaccagccgatcagcgaagtgctcggcatttcaacaattgaaatcaatataaaggaaatggggaagcgcgcgtttcgccttctgcaaaaaagaatcggcggcgccgggccggaaaaactgactgttccttacaagctgatcaaaagggcgactgtgtaatcaaaacatcaatctttttccagacagtgatcaaaattcgacatttttcatcaaaaacgtcaaaataaattgacgcgctttcatgagttttgtacgatatgagagattgatgacaaaaaggagctgaggatcgtgaacagatcctttaccgttgaaaaggtactcaacaacaacgttttaatcgctctccatgatgattacagagaagttgtcttgattggcaaaggaatcggttttggtaaaaagcgcggagatcttatcgaacatgagaactacgaaaaaatgtttatcctggaaaatgataaggaacaatcgcagtataagaagctcctcacttatgtcgatgaaaaaatggttgatatcgccaatgatgtcatctaccatatcgcgcaaaaaatcggccagccgctgaacgaacacattcatgtcgccctgacggaccatatcgcatttgcagttaagcgtctagaaaagggatttgatatgaaaaatccgtttttgcttgagacggaatcgctttatccgaaggaatacgaagtcgccaaggaagccgtcgatatgattaatgaaaaatccgacattcagctgcctgaaggtgaaatcgggttcatcgcgcttcatatccacagtgcgatgacaaaccgcccgctttctgaagtcaatcagcattcacaactgatctccaggcttgtccaggtcatcgaagattcattccagatgcaagtcaacagggaaagcgtgaactatttgcggctgatcaggcacttgcgctttacgattgacaggataaaacgggacgagccgattcaggaaccggaaaaattaatgttgttgttgaaaacggaatatccgctgtgttacaatactgcttggaagatgatcaagatcttgcagcaagcgctcaagaaaccggttcatgaggcagaagccgtttatttgacattgcatttgtaccgtttgactaataaaatttcataacgcctttataacgtgttactgattcgatcaggcatgagtgaaaaaagggagaaatgaagacgctgtcttttgtttcttagtgtacccgctttcaccatgccttttttgtcgttctaaaggcgaaatgtaaacggtttatttagatgaaaaagcagtcttttgaacgaagttgtcatgaatttttgctgtaaggtcaaactattcttagagggggttaaaaaatgtttaaatcgctatttggcgttctgcaaaaaattggacgagcgctgatgcttcctgttgccatcctgccggctgcagggattctgctcgcgcttggtaatgccatgcaaaatccgcagatgacaaaagtcgcaccattcttaacgaacagcaccgttcagcttgttgcgaaagtgatggaaagttcaggtgacgttgtgttcaccaacttggcgctccttttcgctgtcggggttgccatcggtttggctaacggcgacggcgttgccggaatcgctgctattatcggatatcttgttatgaatgtcacgatgagtgcagtgctccttcaaaacggttcaattccaagcgatgcagttgaaagagcacagttctttactcaaaaccatccggaatacacgacaatgctcgggataccgacattggcaacgggagtattcgggggtattattgtcggtgtcctggccgcagccatgtacaatcgattctacacaatcgagcttccgcaatatttaggattctttgccggaaagcgctttgttccgattattacatctatttgtgcattgctgctgggacttgttatgctgtttatctggccgccaattcaaggcgcactgaacagcttttcaacgaacctgcttgcagccaatgaagcggtcgcagctctcatcttcggaatgattgagcgggctctgattccgttcggtctgcaccatattttctactcgccgttctggtatgagttcttcagctatacgaaccaggcgggagaaattgtccgcggtgaccaaagaattttcatggcgcaaatcaaagacggcgtcgaattgacagcgggtacatttatgaccggtaagtatccgttcatgatgttcggtcttcctgcggcagcgcttgccatttatcatgaagcaaaaccgcagaacaaaaagcttgttgccggtattatggggtcagcagccttaacatcattcttaacagggatcactgagccgatcgaattctcattcctgttcgtcgcaccgattctgtttgcgattcactgtgtgtttgccggcctgtcattcatgatgatggacatcttgaatgttaagatcgggatgacgttctccggcggtttgatcgactacttcctgttcggaattctgccgaaccgtacagcttggtggcttgtcattcctgtcggtttagtcctggctgtcatctactacttcggattcagatttgccatccgcaagttcaacttgaaaacgcctggacgcgaagatgcagctgcagaacccgctgatgaaggcaaagaagcagcaggagatcttccttatcaaattcttgaagcgatgggtgaccaggaaaatatcaagcaccttgacgcttgtatcacaagacttcgcgtaacagtcaacgatcagaagaaagttgacaaagagcgcttgaaaaaactcggcgcttccggcgtgctggaagtcggcaataacatccaagcgatattcggaccaagatccgacaatttaaaatcacaaatgcaagacattatgtcaggccggacgcctcgtcctgaaaaagcgccgaacgctgccgaggaagtggagcagcaaatcgaagaagctatggttgagcctcttcaaaacgaatcaggtgaagaagtattcgtttcaccgcttgcgggtgaacttcatccgattgcagatgttccggaccaagtattctccggaaaaatgatgggtgacggatttgcgattcttcctgcagaaggcacagttgtgtcacctgtaagagggaaagtgctgaacgtgttcccgacaaagcatgcgatcggtctgcagtctgacggcggcagagaaattctgatccactttggaatcgacacagtcagtctgaaaggagaaggcttcacttcatttgtttctgaaggtgacagggttgagcctggccagaaactgcttgaagtcgacattgaaaaagtgaaggacaatgtaccttccctgatgacgccgatcgtgttcacgaaccttcaagaaggagaaagcgtgagcttgcaggcagaaggcaatgtcagcctgacacaggacgacatcgtccgcatcgaaaaataaattcacaaaatggccgtacttgtcagatgacatgtacggctgtatgatataatattgtgaatgtactcaaagctttaaattaaaaggagattgataaaaaatggcacaaaaaacgtttaaagtaactgcagattctggaatccacgctcgtccagcgactgttcttgtacaaacagcaagcaaatatgatgcagatattaatttggaatataacggaaaaacagtaaaccttaaatctattatgggcgttatgtcactaggtattgccaaaggtgctgaaatcacgatttctgcttccggcgctgatgaaaatgatgctctttccgaatttgaagaaacaatgaaaagcgaaggtttaggcgaataatgcttgaattaaaaggaataggcgcttcagccggtattgcgattgcaaaagcatatcggcttgaggagcctgatctaacggttgaaaagaaaaacatctctgattctgatgcggaagtaaatcgttttgaagacgccatcgagcgttctaagaaagagcttgaaaccattaaaaaccatgctttgaaagagcttggcgaagataaagcggaaatcttttctgcacatttgttagtattaagcgatcctgaactgttaaacccgattaaagacaaaatcaaatctgattcagtcaatgcggaattcgctttaaaagaaacggccgacatgttcgtcaccatgttcgagtcgatggacaatgaatatatgaaagaacgcgccgcggacatccgcgatgtcaccaagcgtgtcacagggcatcttctcggcgttgagattccgaatccgagcctgatttccgaagaagtcatcatcgtggccgaagacttgacaccgtctgatacagcgcaattaaaccgcaactttgtaaaagggtttacaacagatatcggcggacggacgtcccactctgccatcatggcgcgctcgcttgaaattccggccgttgtcggcacaaaagcggcaacgaaaggcatccaaaacggcgtaacagttatcgttgacggcatcaatggcgatgtcatcgttgatccttcccaggaaacaatcagcgaatacgaagaaaagcatcaagccttcctggcgcaaaaagccgaatgggcaaagcttgtcaacgaaccgactgtaacgagcgacggccatcacgtggaacttgccgctaatatcggtacacctgatgatgtaaaaggcgttttggaaaatggaggagaagcagtcggcctttaccgaactgagttcctttacatgggcagagaccagcttccgacagaagaggagcaatttgatgcctataaaaccgttcttgagcgtatggaaggcaaatccgttgtcgttcgtactcttgatatcggcggagacaaagagcttccatatttagaactgccaaaagaaatgaatcctttcttaggatacagagcgatccgtctttgccttgatgagcaagagattttcagaacgcagcttcgtgcgctgcttcgggcaagtacatatggaaacttaaaaattatgttccctatgatcgcgactgtaaacgaatttaaagcagcgaaagcgattcttttagaagaaaaagaaaagctgaaagctgaaggccaacaagtttccgacgacattgaagtcggtatgatggttgaaatcccttcaacagcggtcatcgctgatcaatttgctaaagaagtcgatttcttcagcatcggaacgaatgacctgattcaatacacgatggctgctgaccggatgaatgagcgggtatcttatctttaccagccatacaatcctgcgattctccgcctgatcacgcttgtcattgaagcggctcataaagaaggaaaatgggtcggcatgtgcggcgaaatggcgggagatgaaattgcgatcccgatcctgctgggtcttggattggacgagttctcaatgagtgcgacgtcaatcctgccggcaagaacgcaaatcagcaagctttctaaaaaagagacagaatcgttcaaagagcaaattctgtctatgagcacaacagaagaggttgtacaattcgtaaaagaaaccttcaacctggcataagcaattgaaaatccggaccggcatcaccaatgcccgtccgggttttttgtttatctgaatgatcccggctgcggcggagataatacatgtgaccaattgttagaaagggggattctgatatgcctaggcagccattcaaactgggagatgaggtgtatgtcatttaccggaatccgcatgcagcgaatgtggcgcatataaaggaagctgaagtcgttgatcatccgcttcacgaaggcgaactggcattgtttatgtatgatacatatcacgcctttgccgaagatgatgccgttttttcttcatatgaagaggcggaacggctttaccgtgaattatttgacgggatatgaagacattaccggtatatcacatcctctaaatgcaaaaagtaatggaaatatgcaaaggatgtgtctgtttccaatggtaaaaccgtttgttccccaactcgtctatattgaaccgagagccctggaatatccgcttggaaaagagctgagggataaattttcaaacatgggacttgagatcagggaaacaacttcacacaaccaggtgaggaatatcccgggggaaggccacctgcaaaaatacagaaatgcgaaatccactttggtgatcggcgtcagaaaaacattgaagttcgattcgtcaaaaccgtccgcagaatacgcgatcccgtttgcaacagggtgtatgggtcactgtcattactgctacctgcaaacgacaatgggcagcaagccgtatatcagaacgtacgtcaatgtggaggaaatacttgagcaggcggatcaatatataaaagaaagggctcccgaagatacgcggtttgaagcttcctgcacatccgatatcgtcggaattgaccatttgacacatacgttaaaacgcgccattgagcatttcggtcaaaccgaccatggtaagctgcgtttcgtgacaaaatttcatcatgtcgaccatttgctcgatgccaagcacaacggaaaaacgcgcttccgcttcagcgtgaatgccgaatatgtcattaaaagctttgaacccggcacatccccgttggataaacggatcgaagccgccgtgaaagtagctgaagcgggctatccgctcggttttatcatcgctccgatttatattcatgacggctggcaggaaggctacagagtgctgctggaaaagctcgatcgtgcgctgccgcagcatgcgaggcgcgacatcacctttgaaatgatccagcatagattcacgaagccggcaaagagagtcattgaaaaaaactatccaaagacaaagctcgaactggatgaagaaaaacggcgctataaatggggcagatacgggattggcaaatacatttatcagaaggatgaagaagcagagcttcgcagcgcccttgaatcgtatatcgacaactattttcccgaagcaaaaatcgaatatttcacataacagagctttagttgaaaaagctctgttttttgttttgaaaacattatgttaaaaaaggatttttccactccattaacaccgcataatcaagcgattcctcatcttcaatgtagccgggaatcacacaaactggagagcgtccgcaatgaagcaggaacgagagcactggatcgcgcttttccccgtccaatacagcttgaacatactgttcgggcgtcatttcttcagccgacttgtgataatgaggaatccgtccgccgccaatgagacgcttgagccctttaaagaccgtcagttcatacatggattgcatcagccgcattccgatgccgagttttcgatagtcgggggacacggaaatatcgacgacataaagggagtttccatcgttttgatgtgtgccgatatacccgttgtccgtcacttcatcccagctgtggtgcggatgatgcggatcaaaatcagccatgagcgctgtcatcgaaccgatgatgcggccttcggaaactgcgcaaagcgctccatcgggaaatcgttcaatatgggaatggagctgctcttcattccacagaaggtcttccggaaacggaggcggaaagcattctctttggagagcaatcaaaccgggaatatcttttttgctgtaattgcggatgtccacctgctgataagaagtgccgttatcgacgtaaaactgtttatagatcgccaatcactccttttgctatttcctccattataccgttattttaacaggctatcttaattttgcgaaatttttgccgataaaaagaatatgaaggtgcatgtaaaggagggtttcatttgtttaaaaaactgcatgtcaaaattgccggatttgttgccgtcctgctggttttgacggttatcgtcctacagttctcgacaacacatttgttgaaatcgatgcttgaagatgaggcaaaagaatcaacgtccagcctcctcggttcaattaaaagaaatattgagcttcaattagaacactacgagatttctttgaatcgtataagtgatggagaaatggctcactcattcttaaaagacggggataataaaattataaaaatcgtcaatgatgaattaaaacaattaaaagaaaaaaatgagtatgtcaatttagcttatatcggcacaaaaaagaaggaaatgtttacatttccgaaaacgacctttgatgatgattataatccggctgaaaggccatggtatacgtcagctgcaaaaacacccgacaaagtcgtttggacggaaccttacaaagatgcggtttccggagatatgacagttactgcggcaaaagccatcgtcgtcaataataaagttgaaggcgttgtcagtatagacttgtcattgaattcattgaacaaaattatcgaaaatcaaaagatgccttatgacggctacgcatttattttggaccaaaacgggacaatgctcgcccacccgtcaaaacagggcgacgatatatcgaatgataaaacatatcgggacatcccgtcatcaaaagacggaatcaaagtaggcaaagatactgtgatcgcttatcagactgtcggcggtacgggctggaaagtcggtacgcagttcgacacggcgaagctgatgtgggtcgcgcaggaaatgaacaaaatggtcattatcgtttcaatcattgctctggcagcggcgatcattttaagctatttccttgccaaaacgatcacaggcccgattaagcagctgattgccaaaacaaaagcagtcgctggcggcaatttgacggtccaaacagcagctgcctcaaaagatgaaatcggtatattgacaaaagactttaacaagatggtcgaacatatgaaagaaatgattgtgcaagtcagatcatcgtccggaaaagtatcggatacgaccgatcaattaagcgctgtttcagaagagacggtttctgcgagcgatgaaatcgccaaagcaatcgaagaagtggcgacaggcgcgactgaacaggcggctgaggtcgaaaatgtcaatgaacaatccgaacggctgtctgtcaaaattaaagaaatcgaacatcatgccgacagcatcaagaaactttcgagaacatcagaagaagcaagctatacaggaatcgatgccctcgggcagctgcttgcaaagtcaaatgaagcaaactcggagacaaagaaagtggaacatatgctattccagcttgaagaaaaaacgaaaaacattgaagacgttgttacagccatctcggcgatctctgatcagacaaacctgcttgctctgaacgccagcattgaagcggcccgtgccggagaaagcggacgcggttttgcggtagttgcagaagaggtgagaaagcttgctgaacaatcggcggtttcttcacagcacatcagtgaaacggtcaaacagattcagatggaaacgaaagaagccgtttcagcgatgacagaagcaagcaagatgaatgaagtgcaaaatggaatgattcacgaaacaggtgaagcgctcagcaaaattactgctgaaatgcaggcgctcgtcaactcaattgaccacatttattctgaaatctcggatatgagcggagagcagcaaaaaatgtccgattcgattcagagcatttcagccatttcccagcagtctgccgcggctgcggaagaggtcagcgcttcggccaacgagcagctgacagcgctggaaagcatcgcaaaatcggctgaagcgctgagcgaggccaaccaagaattattaaatgcgatcaataagtttaacgtgtaataaagaggtccctcttgttgaaagagggacttctcctttttcaatattcacaatcccaattttcagaatatacgtgttacactataagaaggaagggagtgatcattgtggacttaaagatgaatggcaaaacagcgcttgtggctgcaagcagcaaaggacttggcaatgcgatcgccaaagccattgcgaaagaaggggcaaatgtcatgctgtccgggagacacgaagcggacttgaaaaaagccgcggaagagctgaacggactcggcggcggcaccgtctcttatcaagtatgcgatcttgcagacgccgacgggatcaaagcgctcgttcaaaagaccgctgacacatttggaacgatcgatatgcttgtcaacaatgtcggaggaccgaagggcggcagcctgcttgatctgacagacgatgactggacctcatcatttgaattgcatctgctcagctatgtccgtttaatccgcgaagcttttccatatctcaaaaaggatgggggacgcatcgttaatatcgcttcatcatcagtcaaacagccgattccgggcttgctgctttccaacacgtttcgaatgggaatcgtcggtctgacaaaatcgattgccgaagagttggccgaacaccgcattttgatcaacacgctcgcccccggaagaatcgcgacggaccgcgtggcagagcttgaccggctgaaagccgagaaaacaggcctttccgagcagcaggtgaaagaaagctatgagaaagaaattccgctcggctcctacggaaaacctgacgactttgcacagtatgcaagctttcttttatcagagtgcaatacatatatgactggacaaacgctgctgatcgacggcggaatggtaaaagcaatttaagggggatgagaccatgaaaaaaacggtcggatttatcggactcggtgtaatgggaaacagcatggcctcgcacattttagccgcgggctatcccgtcagcgcctatacgagaacgaaacacaaagcggacagcctcgtggaaaaaggggcggaatggaaatcatccgtcaaagcactggcgcagtcgtctgatgtgatcatcacaatggtcggctacccaaaagacgttgaagaggtttactttggaagcgaaggcattattgaaaatgccaaaaaaggttcctaccttatcgatatgacgacttccaaaccttcgcttgccaaacaaatcgagactgccgcaaaagagaaaggactttacgctttggatgctccggtttcaggcggggacgtcggcgcgaggaacggcacgctcgccatcatggtcggaggagaacggaaagcttatgatgaatgctacccgctcttttcgatcatgggtgaaaacatccagtatcaggggccggccggaagcggccagcatacgaaaatgtgcaaccagattgcgattgccgcagggatgatcggcgtcgcagaagcgatggcctacgccgaaaaatccggactcgatcccgacaacgtgctgaaaagcattacgaccggcgctgcgggaagctggtcgctctcaaatctagcgcctagaatgctgaaaggcgactttgaaccgggtttttacgtcaaacactttgttaaagacatgggcatcgcgcttgaagaggcggagctgatgggcgagaaaatgccggggctcgagcttgcgaaaagcctttacgacacccttgttgaaaaaggcgaagaaaacagcggcacccaaagtctgtacaagctttggacagaatacaaataacgaaaaaaaccacttgctgcatgcaagtggttttttgctggttcttattttccgatgaactgctgagtccagtagttgccgtccttcacatatccgacaccgatatgcgtgaagttaggattcataatgttttttctgtggccttcactgttcatccaagctttgacgacttcttgaggcgttttttggccttttgcgatgttttctccggcagtgcggtatgtgatgccgaatttcttcatcatgtcaaatggagaaccgtaagtcgggctgttgtgatcaaaatagttgttatctttcatatcttgagatttcgtgcgggcaaccttgctcagcttttcatccaatgtaagaggttttagcccttgtttctttctttctgcattcgtcagttcaacaacttctttttcatacgcgcttacagaagaagatgcaggcgctgtattttgcttttgctgtgaagtctgctcttttgaagccgcaggctttgaagcttcctgtttttgagtctgcgtgctttcaggctttgaagctttaggagcagaagccttcggtgcagaagctttaggctgttgagttgcttgtttcatataagaatgaagcagggactgaattttttcttggtcagctttagaaagctggttcatgttttggatattcagtttgcccgcgagatcagttacatttatggaatgaacggttttgacttgtacttgctgctgctctttagcgtctgcgtgctgaacgccgctgaatgtgaagagcgttgctgcagctgctgctgataaaagaaaagcttttttcataaacagtaatcctcctaaatgttgtagtagttgttgtttcgtacactagaatcataacatggcttttttgaaataatagatccatatattccctttgacaaggtattattgttaattttgacataaaaaaagaaaaaccctttgctgccaatatgcaaccagatcgttcttttacacgtcttgtcataaacgtggtaaaatttaaatttgttagttaaattttaatataaaaagagattgacagcttttttgaaaactttagattgtaacaaccattacaaaagtgttacaatatatctcagttaattaatgtaaaattgaatattgtgagaggagagagagtttcagtgacagaatctcaacatgatccggctgaaatcaaaaagagcaggcgttcgcgtttatggcggatcaacctgtacttctttgcggtgttcactttgttcgctgcgctgattgtcaagctgggcctcgtgcaaatcgtcaatggagaggcgtatgagcaggaagcttcgaaaaccgaggcgaaaattgcgtcatacccggcaccgcggggtaaaatgtatgacagatacgggcgggtggttgtcgacaaccaaagcgttcccgcgatcacatatacgatgatgactagcacaaaaacggaggaaaaaatcagcacagccaaaaaactcgcagaattgatcgatatcgatacttcgtttctgaaagagagagatctgaaagattactggcttgccagacacccgaaaaaagctgctgcacttctgaaagacagcgagaaaaccctcaagtctgatcaaacatacaagcttcaggtggaccgcgttccggcggaagagatcaaagcgctggaaaaggacaaagatgagcttaaagtcgcagcgattttcagaagattttctggcggctatgcgtatgagccgcaaatcgtcaaggcgatgagcccgaaaaccgcggggaaaaacgatgcgcagctccttgatgagaaggcttctaaacagatgccggccaacgatttgacgtatgaggaagtctcacgcgtttccgagcatcttgaggaactgcccggcgtcgacgtcatcatggactggaccaggaaatatccttatgaaaaaacgctctactccattttcggaggcgtcacaacgcctgaacaagggcttatcaaggaccgggaagacttttacctgacaaggggatatgcccggaatgacagagtgggaaaaagctatctcgagtatcaatatgaagaatatttaaatccgaaaaaagcgaaagtccaatataccgaaaaccgttcaggaaaggttatcagccaggaaacggttgatgaaggaagacgcggctacgatctgcagctgacgttcgacatggagctccaaaagaaagtcgaagaggctatcgaagaggagcttaataaattccgcggctcaaactacatgctggacagagcgttcgtcgtcatgatggacccgaataacggagacattctgtccatggccggaaagcggatcgtcgacggcaaaatcaccgactatgcaatcggcgcgtttacaacccagtacgaaatgggatcggcggtcaaaggcgcgaccgtgcttgccggctatcaggacggcatgccgcatgggcagagttatttagaccaagagctgagcttcgcagggggagttaaaaaaggttcctacagaggaaacactatcggttgggctaatgaagttagagcgctggaaaaaagttcaaacgtttatatgttctatgtggcaatgagaatggcaggaattacgtatgtaccgaacggcccgcttccggcgaacctagaggacttaaagaaaatgaggtattacttcaatcaatttggccttggggtaaaaacaggcatcgacttgccgcaggagtcggccgggatgcagacaaacccaaaaatagtcgggggtctcctcctcgatgaagcgatcggccagtttgacacgtacacgcctttgcagctcgcccaatatgtttcaacgatcgccaacggcggatacaggttgcagccgagagtcgtgaaaagcattcaccagccagaaagcgaaaaactcggtccggtcattgaagagcgctctgccaatgtgctgaatcgtatcaacaattctcaaagcgacatcgccatcgtcaagcaaggatttaaacgagtaacccagacgggaactgcagccggcgcattcggttcgcttgacgtatcaggcaaaaccggaacggcgcagacgcaatactacggcacaaaccgaaactggtgggggactaggacttacaatatcacctttgccggctattacccgtcggaaaatccgcaggtcgccttcagcgttgtcgtcccgaatgtcgacgacaaaacgaagatgaacaaaaacatcgccgccaaaatcgtcaaagcctatgtcgatctgcaaaaaaaatacagcaaagattagacaaaaaagaacacggattttttccgggttctttttttgttatcaaaatttgacgaatgctagaagttttgaaggagatttctcgcattttagcgaatccttttaagcaaaatagttttaatgaatgctggtcatgaatagggtataaaggagggatatgatggaacaaaaaacaaaacgttttgagcaatataagcctcatatgaatttacaggcagtcctgtcagctaacggccgttttatatacatatctgcaaattgcaaagagctcttaagctacgagcagaatgaactgatcggtacgtatttgaaggactatttacacgaagacgatctttttctggtagaaagctatttttacaatgagcatcatttgctgccctgcaccttcagatttgtgaaaaaagactacacgatgatctggatcgaagcatcgatcgatttcgtgacgacccatgttggagaaaaagaacgcgaaattgtactcaaaatgaaagtgtttgaagaccgtccctctaagaaaagcagctccataaaagaggaagacgctccggaagaagcctccaggctgccggcaaaagaggaattcgaagccataatcgaaggcttgccaaaccctctgtgcatcagcgttcaaggggaaatagtctacgtaaatgacgccatggtcaacctgctcgaagccgagcataaacggcaaattatcggaaagtattcctacgattttatcgagaaagagtaccatgacatcgtcaaaaaccgcattaagcggatgcagcagggacttgatgtcggaatgatcgagcaaacgtggcataagctcgacggcacgcagattcacctcgaagtcaaggcggcgccgaccatttatcaaaaccagaaagcggagctgcttcttctcattgacatttcatcgagaaaaaaatttcagaccattttgcaaaaaagcagggagcgatatcagctcttgattcaaaactcaatcgatacgatagccgtgattcataaaggaagatgggtctttatgaatgaatcgggcattcgtctgtttgaagcaaagacgtatgaggatttaatcggcaaagatatttacgaacacctgcacccatgcgatcacgaagatgtcaaagcgaggctgaaacggatcacagaccgccaatccgaatctgaaatcataaaacagacgtggtatacatttgaaaaaaggctcatctatacagaaatggtttgcatccctacgacatttttcggggaaacggcggttcaggtgattttaagggacatttctgaacgcaagcagaccgaagagctgatggtccgttcggaaaagctgtcgattgccggacagcttgcagccgggatcgcccatgaaatccgcaatccgctcaccgcgatcaaagggtttttgcagctgatgaagccgacaatggaagaaaatgaacattattttaatattatcttttccgagttaagcagaatcgaattgatcttgagcgagcttctcatgctggcaaagccgcagcaaaacgcattgaaagaaaagcttgatctgatcaggctgatccgcgaagtgacggcgcttttagaaacgcaggccaacttaaacggcattttgatcaatacgatcctcacagacgacaaaatttacattaaaggggatcaaaatcaattaaagcaagtgtttatcaacctaatcaaaaacgccgtcgaatccatgccaaacggcgggacggttcatttgacggtcagagaaaccgacgattcggtcgtcgtcgaggtggaggacgaaggagaagggatacctgaacatgtcctgaagcggatcggcgagccgtttttgacgacgaaggaaaaaggaacaggcctcggtttgatggtcaccttcaatatcatcgaaaatcacaacggaaccatcgaagtcgacagcaaagcagaaaaaggcacgacatttaagattctatttccaaaataaaataaaaaaacaacggcgtaaaagccgttgtttacgtagtctgtatcgattgcctcttattgaaaacaaaggactccagccggtcaagaccttcccttagcgtatcaggagaatatgcgtaagagatcctcacatagccttccccgtattcagaaaacgagctgcccggcacgatcgcaagcccctcttcttcaagaagcgacatgcagaagtcaaaggaagacattccaaacgatttgatggacgggaaaatgtagaatgctcccgacggtttaatcacatcgaggcccatcgtcacaagtctgtcgtacacgtagtccagccgttttttatactgctcgcgcatgatcagagcgtcatcaaccccgttggtgacggcttccagagcagctttttgagaaatcgatgaagcgcaagatacgttgtattgatggacttttaaaatatgctttgcgatttccttcggtgcgaacaaaaacccgattctccagcccgtcatgctgtgggatttggaaagcccgccgatgacgatcgtctggtcccttagcacagttgcgatcgagtggtgcggtctgtcaaaagtgagttcgctgtatatttcatctgagagcacaaagacgtttcggccttttaaaagggaggcgatgtccttcagctcttcttcggacagcgtcattcccgtcggattcgacggatatggaagaacaacacattttgtcttcggcgtcagcgcttcctcgatcaattttgctgtcagcttaaagccgtgggacgtggtgtcaatgatcaatggagacgctccgcacattttgatgatcggctcatagccggggtataccggccccggaagaatgacttcatcgcccggagataaaatcgtgcggaatgccgaatcgatagcctggctggcgcctgttgtcacaataatctcgctttccgcttcataatttaaatcggcttttttcttcatataaagctgtacagcctgcctcagctcaggatatccggcgttgtgagtgtaggatgtttgattctcatctatcgcttttttggcggcctgtttgacatggtggggggtgaagaaatcaggctggccgattgttaaagagattacgttttcgtactgggatacaaggtttgagaacttgcggatccctgagatttcgatttcttttacatttggattaagcaaatgttccatttagcatcaccttaaaaatgttatggtttatcttattttaccatcatcagaccaattgtcatcttttaatcaatcaattttataaaaactcgtaacaagtatatgcgaaacgatgcaaggtatgcggacatgcggacggcggcagatagaaaaataagacaatcaaacgattgccttacgttatgttccgtttagtagccgtaatcggagtcaaaatcttctttccacgaaatatatatttgttcttcactgtctgaagcttccttgagcatttctgtgtaaacggcccggctgacctcttctaaaatggtcatttcatgatttttaatcgctacaattgttcccatcataaacacctttcctgaaaaatccttgaccattgtaacacgataaatgtcaaagtcaatgaaaaacttgtgatccgtacattaatttaactttaaaaaaatgcgatacgtattgataatgttcagccagtcttagtagtatatagaagtcaagatgttaggaggaaaagcacattggaattggaattagacaaacacgaaactgctcctgaaaggagcgagtatgccggaatcggcgcgcgttttgtagcttccctgctcgacggattgattctcgggattcccgcatatattttcacgtacgttttaacagcgacgttgatgttgggaaattcggatatcatgctcatgatggagactgatcccgagtatttgagcgatcaggaagtctttacgtttatcatcagtatgttcaaaaccgtagcgatcgttggaagtattacttttattgtgtattttctttattacacgctgatggaatcatccaaatggcaagggacgctaggcaagaaaatcatgaacgttcaggtggcgaaggcagaaggcggaagaatctcattcggccgtgcagccggaaggtttctggccaaaagctttctatctccgattttgatgatcggctacattatggccttttttacagaaaggcgccaggcgcttcatgatatgttggcaggaaccattgtcgtaaaaaaataacgggcaaaagacagcacgctttcagcttgaatgcgtgctgtcttgttcaggaaaatgtttcacggcaggaataaaaataaggaggcatcaatccagatggatactcagccggaacgtgaacaagctgtaaagcgggcgcaaagaacgggaatcaagctctttttgacgctgccgattctttcttgggcgttatacgattttgcaaataccattttttcatcaaatattgtgacgatcttttttcctttttatttgcaggaggcagtcggcgaaaatgccagcatgaatcaggtggcaagcacttttatctcctattcgaacgcagccgcaagctttctgcttgtcattttcacgcctttattcggagtgctgatcgaccgaacgggcagaaagaaaaaatacatcggcctgtttacgatgatttgtgtttcatgcaccattttaatgggggtttttgccggggcttcgtttcagaaggacatatacgggcttccgctatccttgatccttgtcgtcatcatgtttgtgaccgcaaagtttttctatcattcaagcttggtgttctatgatacgattttggctgacttggggacaaaagaagaaatcccgctcttatcaggtttcggaattgcaatcgggtatatcggcactttagccgggttaacggtataccttcttgtcggcaaccaggattttcaccgcgcattcatcccgtcggctctcttgtttctgcttttttcacttccgtatctgctcttcacgaaagagaaaagaaaaccggaaccgaaagaaaagaaatcgtttttcagcggatactgggaaattgtgcagacattcaaagacattcgtctatataagccggtcttcttattcatgatcgcctactttttcctgaatgatgcgcttgctacagcaatagccatgatggcggtttattcaaaaacggtcatcggttttacgaccggacaattcgttttgctttatcttgtttctactgtatcaagcatcatcggttcatttctgctcggctttgtgacgaaaagaatcggcgccaagcacgcggtcagccttgtcgccgccattatgatcaccgctttgacgattggagcatgcacgacgtcaacgctcttgttttggattgcggggagcttgttcggcatttcgcttggaggcacatgggtcgcatcaaggacactgattatcgagctgacgccagaacataaaagaggcgaatttttcggattgtttgctttgtcggggaaaatctcttccattttcggtccggtcctctacggatcgattactttgctgttcagggatctcgggaacatggccagccgaatggctttcggatctttagtgttattggcggcgatcggcctgatcattcatcaaaaaagtgttaaggcaaaagcttgagccggagcatcaacttttaacaaaaagacgccgatataaaaaagtaaacacaaagtaggatagagagggatatcagtgtcttcaaaccaacaggaaattttattaagttcgggaaccaatgaattagaaatcgtgaagttcgaggttggtctcaacattttcggcataaatgtcatgaaagtcagagaaatcattcagccggttgaaattacgaaagtgcctcattcgcataagcatatggagggcatgattacattgcgcggggaaattcttcccgtcattgatttattctctttctttggcgttgagcacggtgatgacgagcatcaagaaaaatacattgtgacggaatttaacaagcggaaaatcgtctttcacactggagcggtttcacagattcaccgggtgtcatgggaagaaattgagaagccgactgctttgaatcaagggatggaccgtcaccttaccggcatcattaagctcggcggcaccatgattttcctgccagattacgaaaaaatcatttttgatcttgagtctgagtcaggtatggacccttatcaaatgaaaaatgaaaaattcgatcagagacggacagacaaaaagctgatcattgtcgaggactctccgctcctcttgcggctattggtggaaaagctgaatgaagctggatacaacaacatcgtgtcttttgaaaacggaaaagacgcttacgagcacgcgcttcaattgatggaagacggcacagctcttcacgaaaaagtcgatctgatgatcacggatattgaaatgccgcagatggatggacaccggctcacaaagctgctaaaagataacccgctgagtacggagctgccgatcttgattttctcttctttgattacagacgatcttcgccataaaggggaacaagtcggagccgatgaacaaatcagcaagccagagctcaatgaactgatcgaaaagcttgataaatatattttcaagaactaaaaaaagcctcgaaaggaggctttttttttattaaaaatagctttcgccaagcttcttgaagacgggttttgaggctggacgcttccggtttgtgacgagcggtttttctttgattcccgtgtagttttgaagaagctgtttcgctatattcaaggacatatgagctttagggttccgatacgaatgatttaatgtacctaagtgtggaaggtttgcgaagtcttcttttgttggaggcatgtgaaaaaagtagtctccgagagatatcagcacatctgactgctgctggctgaatcttggatttttcgaaaaatgcaggcctacctttttaccttttccttcattaagcagcttttgcaaagctttctttttcagaagatacaggtatttgggattagtcgcggttttcgcatggcggttaactgtataaatcgcttttgaaaggttttcaactgtcggttttaattctttcgtatgattatggtcgtccattttttctctcctatccattcgtttctagatcacctcctaaagatgcaaggcttatgtctaaattatacgaaatagaacagaaaatgcaaatatcccatagaaaaaacgcgcgattttttatggaatcgcgcgttttcatctttataaaacagagttcattttcgcttttgttatttttttgtctcttcagcgccgcttgaacgtcgatttccgcactctcggcgcttaatttaggcagggcgataaagtagtacagcgccgccagcagaataattcccgccaagccgtaatatatataatccacatcggcgatgattcccgggaataggacagcgatcatgccaagcgctgaggattgcgccagcattgtcagcggatcggtccacccgctgacccttcccatcagccttggatggacgattttgggaatccagccgccaagagctgtgttgatcggcccgatgcatatcccggcaagaaatgcagccgagtagtatacgggcaattgatctgtaaagccaagcaggatgataaaggcacccgcgataaaaatcgggactgacatcatgtatgccggcttctacttttttttcgagcagggcggcgacggcaatcccagtcaaaagtccgatgcccagtacgattgtgaagagggaagtatgccactcataactgtcaggggacagctcatacttcattttaaacatcggcagaaccgaaagtccgccgcttacaagcccgaaaataaaatatccgaatacaagagaggcaagcaatttattttttaatatataaacgatgccttccttaaaatcgcgcatcgaatctttgacggtcatgtttttccagcctttatttccgttcggcttccgcgctgcaagcggtatatcgcaggaacggattaaaaagccggagacgataaagctcacaaaatcaagagcgattgctccatgcaagccgatcgtcttgtacataaatgctccaattcctacgccgaacaatagaaacaggctgaaaagcatctggttcagtcctgcagcctttgcatactggtcctttcttaaaatggcctggaccaaacttgcttcggccgggtagaaaaattttgtaaccgcgcttctgataaataggactaaaaacacaagcggtataatttgaagatacaatacaaagaaaagaacgacagtcagtcccgctctgatccaatcacagttttccgcgactttcttgcggtcaaaacggtcagcgaccaccccgacgataaagaatacgaaaaccgtcggcaaggaatacatcagctcggcgattgtcgtataggccggctggctgctgaaccggtcgagcaagaaaaaggcgaaagccatatttccgactgtcgttcccatttgagaagcgaaagctgcgaaaaaaagtcggacgaaattacgatttttaaaaagatccatatatacgctccttaccctaaaggtcccattatatcttaatacaagatgttgtattgttcaaattgcatttgtctggaaatgtactcgtctaaggtgtaatggacactcgggttccgttgggtacgatagaagcaagttccagaacatcccgattgtgcatgcggatacatccccttgaaacagctttgccaattgacgaagggttattcgttccatggatgccgtagtgctgttttgacaggctcagccagtaggcgccgaacgggccgcccggatttggctgccggttgacgatgacaaattcgcctctcggcgtctgtgtgaggatttttccgacggcaatcggatatgtttttacaagtctgtctcgctcatacaatctgagcgttcttccgttgagagacacggcaatccggtatggaattgtgtccggatttctgatgccgggaatgataatcgactggcccgcggacacttggccgccgtttaagccaggattcgcctgcagcaacgcctgccgggtcgttctgaaatcggcggcgatgctttccagggtttctccgggtttgacttggtacatcagcaataatcagcacatctccttttcaaaaacgaaaagagagccttttccgctgctaatatatagacggaaagaggctgaggaagtttcgtttttttgatggggattggatgaaatggagcgggaatgtttttacttaatgtatgcagatgccttttgttttgagccaaaagaccgggcaagatttaaatggattcaagctggaacacggtgatttcaggctttgacagaaagcggagcggcagcctggtcgtgccgattcctcgattgacatagattttcattccggctgtttcatacattccttccgtataaatttctccgtacggaggcgtaatcaaaggaccgaatacgggaatctgaatttgtccgccgtgggtgtgtccggatatttgcagattgacggggtattgatttgccgttaaagcggcatcaggctcatggacgagcaaaatcgaaaaggcttttttgctcagctttgacaggatgccttcgtagtcaggtctgccgagcatcaaatcatcgagtgaagcgatctcaattacgcttccgtctatcaattcaagcttcagcaaatcgtttcgcagcacccgaaaaccggccgatgccatgagcgtctgatagacttttgttccatagcctccgtgatcatggttcccgaatatagcaagctttccatagggggctgaaagcttttttaaggcgcttacagcacgctcgtgttcccggtagcgatgcggtttatctattaaatccccgctgaatacgataagatccggggagagggcgttcacttggctgacaacatttgaaagctcgtctgctgtaaagtattcgcttaagtgggtatcgctgaactgaacgatccgaaactgatcaaaccctttaggaatgagccgatgccgaatgggaataaagtttgtttcaagcatgtgcggttcgagatagcgcgcatagcccaagccgccggcagcggtaaagagccctgctgcggcaaggcctaagaagccttttaaaaattgtcttctggacggatttttcataatcaaccaacctttaatagattctctacattatatcatccagaaaagccattttaggacagtccgcatgttttgttaattttttttaattgatatgataaactataaattgaatgaatactcattcataacaagggggatggatatggacagaaaagttgtaatcgtgaccggcgggtcgagcggaatgggaaaagcgatcgccaaaaagcaggctgaagaaggatggaatgtgatgattacgggcagaacacaagaaacgctcgaagcggccaaagaagaaattgaaacttttgccgggcaggtggccgtatgccggatggatgtccggtctgttgaagatgtggaacagatgatcacagaggccgcaggacggtttggcacgatcgacgctttggttaacaatgccgcaggcaactttatctgcccggctgaaaaactatcggtcaacggctggaaggcggtcatcgatatcgtgctgaacggcacattttattgcagccaagcagccggccgctactggatcaaggaaaagaaacgcggccagattttaaatatggtcgcgacgtatgcatggggcgccggtgccggtgtcgttcactccgcggcggcaaaagcaggcgttctgtcgctgacaaggacgcttgccgtcgagtggggaagtgcatacgggattaggtgcaacgccattgcgcccggtccgatcgagaggacgggcggagccgaaaaattatttgaatcggaagaagccgcgcacgcgacaatcaaaagcgttccgctcaaaaggctgggcacccctgaagaaatcgcgggactcgccgcatttttgctttctgagcaggcgggatatgtcaacggggagtgtgtgacgatggacggaggtcaatggctgaatccccgtccgttttagatttcaaattcaaaggtgcgagccggtatggtataatcagacaaagattagaagcaggtgatatgccatgttggatccactcgatattttaacgaacattgaagatgtcattccatactatcagccgatcttcagtgctgaagaacaaaaggtgatcggctatgaagtgctggggcgcatcaaggtagaaactgaagtgaagagcctcgggccgtttttttctgatccgacaattccggaagaatacaagaaagaggttgatctcaaggtgatccgccaggcgctcgatcattttctggacagcgggcgcgacctgctcatcttcgtcaatcaagatgcaaatgtgctgatgatggatcacggcgaatcgttcctcgacctgttgatggaatatcaggataaagggctcgagctcagccgtttcgttatcgaaatcacggagcaaaagtttgaaggggatattgaacagcttcatcatttgctgacctattaccgtacatacggaattaaagtcgctgttgataatatcggtaaggaaagcagcaatctcgacagaatcgctcttctttctccggatctgttaaagatcgaccttcagccgctcaagctgtcttctccttcgccttcctatgaatatgtgctttacagcatatctctccttgccagaaaaatcggagccgcattgctttatgaagatattgaagcgagctttcagctgcaatacgcatggagaaacgggggccgatatttccaggggcagtatcttgagctgccgaaggataaatttatcgaacgggatgtattaaaggaccggctgcaggccgagtttcatcaattcatcacgcatgagaagaagaagctaaccattctgtacgatcactccgagcagttttacaaacgggttcatcagcttgtcacatcgctaaagaaaacggctcagtcagacgatgaatttctcttcaatctcggaaaagaactgacagattgcagctttagaatttacatgtgcgatgaagacggtattcagctgacgaaaaacgtgtttaagcatgacggagcatggatatttcagcctgagtacatcggcaaaaattggagctggcgcccttattttctcgagaatatcatgaggatgagaacgatgagaaaagggtttttcagcgatttgtacagcgatatcgaaacgggggaaatgatcagaacgttttcctatccgatggatgaagaattgtatctgttcattgacctgtcctactcatatttatacgaacaagacggattaatttaagcggcggcctttcgccgctttttctttttgaaaaaatgaatcccgagaggtttgtttcgcgtatataaaggaaaatgtgaaaatataaatgctaaaaaggggtggatcatatgaagaacgtttggtcatccttactgtgcgcgcttctggctgcggctcttgtattcttcgacgcggattttgccaaagccggagaaaaaccgacaagagcatcgttatttgagacccttcaatccgtatcggacgtccattttcagctgaccgaaaaggaaagaacgaaaacagacatgatatccctcttggaaccttatatggagcacgccatggcagtgaagtatgtagaggcgaacgcctttcctgaacaagcggggtggattttttacgggacagacgcgcctgaagttgcaatccctttcttcagctatgacgaagacacaaaagtggcggagaaagacggaagctataccgtatatgaatttgttggagatcaaaacgacggccctgtttcatatcaaaaaaattatcagacggtgacgctgaagaataccggcggcagcttcaaagtaacggatatcggccaatctgatacaaaaccggctggagaagaaataatgtccaaacaaccggatgaaaaagaaacaagctcgaattttgcggataaaggggaaggagaccaggctgcatttccgctttttgccaccgatgttaactggacattggccggaattttcagctagcaaaagaatttaaagaaaatcattgacaatgatactgataatcattatcatttaattatagagagatgaacctctctgttccccaacccctctatcagatcaagatttaaaaaacttggcgctgcccccgccaagttttttatttgcatggaatcccgcacttcaaatagctgcgggatttttgggcattaggcgcgcgcaggaataagacaatcctttgctccataaatctaaattggtggttcaaatagactcctctgcagtcaaaaaaatatttttcatgtatgacatgaaaaaagaaaactcaaactatgaaaaagcggtttttctttttcatgatcaaaaaggaaaaatgtcatcggctgatactttgtggtatgatgctttgtagaacttgtattataattaatacttgttgatcctgaagttgttttttgaaaggagtcttttttagaatgtcacaattaatgggtatcatcacgagactgcagagcctgcaagagactgcggaggctgccggagaaccgacgcagcgcaattttgaagtgaacggagaaaaaatttgcagcgtaaaatattttgaaaaaaaccaaacgtttgagctgacagtttatcaaaaaggagataagcctaccacatttccgtttgacaacatcgatatgatttcaatcgaaatctttgaactgcttcagcaataggaggatatggcatgaaagcttttccaagcgttatttgtccgcattgcaaaacaaccgagcatatggatcaagttctgacggcccagtccaatcagaatgtgatttacagatgtgagagctgcgggttcagcttgaaaaatataccgaccaaaaaaggatagcagacagacgaatcgttccatcttcggtgcagatcaaaaatgaaaaggggcattccaatggctgattcttttcttttttacaatctttctgaagatcaaatgacatttcctgaagtgatcgggagactaaagtcgttcatacgccaagatccgagggcaagctatctgctgtccgtcggaacagactcgcagatccatcagaattgcacaaaatttatcacagctatccatttgcaccgcaaaggcaaaggagcgtggggctgtctgaaaaacacggttgtcaacagaccgatacatagcctcagggagaaaatatcgcttgaaacagcttacagccaagagattgccgcatatcttttaaatgattattttaatgaaatcatggatctgcttcttccgtttacagacgagggagcagatttaacccttgaagttcatttggatatcggaaaaaaaggaatgacaaaggatttaattcaggaaatgacaggacgaatcacttcgatggggatctgcgccaaaattaaacctgactcctatacagcttcaagctatgcaaaccggtacacaaaataattgtttgaaagaaaatcgaacagatgtcgaaatgtgcggttgacgtttgattttcaatttcatattctagccctatagaaactagagagaacatattgtttctgactctagctaaatcaattagggggctggttaagaatggaacgcttttcagaagaagagagaaaactgttgctgaacgtacttttggaccatgagtatgccgtagagctactaagcagtgagatcaatgatatagaaactggtacaaaaaatgtggatagcctgacatataagaaactggttaccttatatgaccgtgtccggtctgaaaattaggtcagattatatcaattgatactcattagagtatcttttttgtttcctaaaaggatattgaatgataaactgaccttgggagaaaggaaagttttcgacaaatattgatattgtttatattattgtagtatagggaaattatgcgttgatggattaaagctgaaaaggagtcgaaaaatcatgattagtttgcaatcagatgaacttcttgaaacgacagtaggtcagtttatgatcgatgctgataaagtagcccatgttcaagtcggaaacaatctggaacatgcccttctcgttttgacgaaaaccggatataccgcgatccctgtacttgatgcttctttccgtttgcacggattaatcggaacgaatatgatcatggataaaatcttcggcttggaacgaatcgaatttgagaagcttgataagattcatgttgaagaagtcatgctgacggacatcccccgcttaaaaattgatgatccgattttaaaaggattcggactcgtcatcaacaacgcgtttgtatgtgtcgaaaatgaagagcaggttttcgaaggcatttttacaaggcgtgtcgtattaaaacagctgaataagcatttgaggacgttgaataaataggcgcggcagcggcctattttttatttgcagcgctccatccaatcctccgcacattccccgatgcccgacttcccgcttgattaaaaaacagccgtttgattaaatgtatgataagaaaaacttattggaatgaggaatgtccatgcagcttcaagagcttcacatgcttgtcgttctggcggaagaattaaatatgcggaaagcggctgaacgtctgtttgtttcccagccggcattatcccagcggctgcagaccatcgagaaatcatggggaacgaaaatttttttaagatcgcaaaaagggctgactgtcacgtctgccggagaaaaaattatccagtttgcaaaagatgtaacattggaacaggaaaaagtgagagagaatatagatgagctggagggcgagatacacggtacgctcaaattggcggccgcttcgattatcgggcagcattggcttccgaacgttctgaaaacctacgttaaacaatatccgaacgtcaaaatctccctcgtcaccggctggagcagcgaaatgctgaaaagcctctacgaagaccatgttcatattggcattatcaggggaaacccggaatggaaaggccctaagcactacttgatgcgggacgaattgtaccttgtcgatacagagatccgaaacattgaggacattgccaaaacggaacggccgttcatccagttcaaaagcgacagcacgtactatcaggaaattcagcactggtggcaccaaaagttcaaaacatcgccgaaacaaaccattattgtcgaccaaattgaaacatgcaaacagatggctttccacggaatcggttatgcgatccttccatcggtgacgcttcacggaagcgggagccatgttcaccaaatccctttgcttgatgctaaaggaaaagcaatcggcagagatacgtggctgctcggttatgagccggctttccagctgaagcaagtacaggcgtttgtagaagttgtgaaagaatgtacggcaatggaataaacactagaaaggcaggactccaaaaaggggactgctttttttgtacgatttattgacattgataatcattatcatttaaagtgtatctatacaataatgaaaatcattatcaattatagaggtgattctgttgtctaaagcattgattgcatatgccagcatgtccggcaacacggaggatatcgctatgatcattaaagatacattgcgagagtacggttttgatgtcaccattcaggaaatggatgatgtcgataccgactcattggctgaatatgatcttcttttaatcggcacctacacatggggggacggggatcttccttatgaagcggaatcgttttacgaagaggtctcttcgcttgaccttaaaggaaagaaagcggcatgcttcggatccggcgattatgcatacccccgattttgcgaagcggtcaacacgttttacaccatgcttgaacgaaccggcgccgacctttatcaagagacactgaaaatagagcttgctcctgaaacagatgaagatgccgagtgctgcaaggaatttgccgaaggctttataagatgggcagaacagcaaaaacggcgggctgagatccatgtttcataaaggtgcgacggccgtcgcttcggcaaagcattccggttactttgtcgccgtcaagcgggaaggcatttttcactattcacttgagcaaggctggaaaaggctctttcaattaaaaagcaaaatttgttccatcacctatatcggcgattatttattcgtcgcaggggagagaggaacgattatcagatcgtctgaccaaggggcaacctggtcaatctcaagctttccgacaaacgccacgatttggtcgatcacggggagaacggacggctttgtgtgtgcgcatgggaagcattgcatttacatatccgacgatttcggcgtctcatggaaagtcgtcaagccgttttccggtttgagtcatccgcccgttatccgctctctgtgcctccatgaagagtgcctttacatcgggacgcagattcatgaagtgcacggcggtgtttgggcatacgatttggcatcagaatcggcttttatgatcaaaaaagaaaccggccgcatgaccgcctcgatgatcgcatttgaaggcgaatggctggtatgtgcgatgggatccaaaaaagggaatcacggtgccgtcgatttggtcaacattcacacaaatgatgaaatacaaatcaggcggggccttgttgagaatgaagaatcattcctggatgtgtccgaagacaacggaatcatctatgtcacatcggctcaggaccgagacggcttttcaagaatctatcagcttgatttctttgagagggagctgaaatggtttgacacgataaaagggcatgggttcagggtggccaaccaaaaggagaacttcttttgcgcaggtctttatgaatgcaaatttgtcaggccttatgaacagcctgctgcagcccactgattttatagcgttttataggaggaataatgatggggaaagttttgctggtttatgcaagcatgtctggaaatacagaggcgatggccgatttaatcgagaagggccttcttgagggcggggccgaagtggaccgtcatgaagcgatggatgtagatgcggcgctctttaacgattatcagcacatgatatttggcgcctatacttggggcgacggagaacttccggatgagtttttggatatttacgacgatatggaagggatggatttcacaggcaagacgtttgccgttttcggatccggagatacttcttattttgcggtgccgtcgacattcttgaagataaaatcaaggagctcggcgggaacgtggtgcttccgtccgtcaaaatcgaaatgaatccggaggatgaagaagaaggcatgctgctccaattcggcagggattttgcaaagaaatgtgaagtgccggcatagcttttgataaaaaaggaaacgggacatccctttcctttttttcttgtttttaaatctttcctttgatacagtaatgaggagaaaaagagaaggaggacttacataatgaaaatgatggatgcaaatgagattatctcatttattcaaaatagtaagaaatcgacacctgttaaagtgtatgtgaaaggcgaccttgaaggaattgacttcggcgcttcagccaagccttttattacaggcaatacaggggttgtattcggagaatgggcggagattcaagctgcgctcgaagccaacaaaggcaaaattgaagactatgtcatcgaaaacgaccgccgcaattcggcgattccaacgctcgatttaaaaaatattaaagcgcgcatcgagccgggtgcgatcatccgcgatcaagtggaaatcggcgataatgccgtcatcatgatgggggcttccatcaacatcggctctgtgatcggagaaggaacgatgatcgatatgaatgtcgtgctgggcggacgagctaccgtcggcaaaaactgccacatcggagcgggatccgtgcttgcgggtgtcattgagcctccttcagcaaaacctgtcgttattgaagacgatgtcgtcatcggtgcaaacgccgtcgtacttgaaggcgtgactgttggaaaaggagccgttgttgctgccggcgcgatcgttgtggaagatgttgagccttacacagtagtcgccggaacacctgcgaaaaaaatcaaagacatcgatgaaaaaactaaaggcaaaacagaaatcaaacaggaattgcgccagctttagaagcggcagcgaaaagtgcgtggatgtgacaatccacgcattttcgcatcgccggggaggttagaaagatgaaattggacgaattagcagcgattcgcagagatctgcaccaaattcctgaactcggttttcaggaatataagacacaggcttatcttttgaaccacttagcaaagcatccggaaggacggattgaaattgaaaagtggagaaccggactgtttgtaaaggttaaagggacggcccctgaaaagattttggcgtacagggcggatatggacgggctctctattcgggaagataccggatattctttttcttccgttcatcaggacaggatgcatgcgtgcgggcatgatttccacatgacgattgccctcggcatcatcgatcatttcgtccgccacccggttaaacaagatctgctgtttttgttccagccggctgaggaaggaccgggcggcgctgagccgatgcttgaaagcgacttgtttaaaaagtgggagccgagcatgatcacagcgctgcacatcgcgcctgaactcccggtcggaacgatcggaacgaaaagcgggctgctctttgccaatacgtcggagctcgtaatcgaacttgaaggaaagggcgggcatgccgcatatccccaccttgcagaagatatggtggtcgcggccagttcgctcgttacgcaaatgcagtcgatcgtagccaggaatgtcgatccgctggacagtgctgtcattaccatcgggacgattacaggcggatcggcacaaaacatcatcgctcaggaagcaaggcttgaagggacgatcaggacgctgtccccagcgtcaatggaacaggtgaagaaaaggatcgaggccatggttcggggcctggaaacggcttatcaatgcagcggtaaagtcagctatcctgcagcatattatcaggtctgcaattcaagcgatttagtcgaagactttatgcagttcgtttctgaaaacggccttgcagaggtcgtccgttcaaaagaagcgatgacaggggaggacttcggctatatgctgaaaaagtatccgggcttcatgttttggctcggcgtcgattcaccttacgggcttcaccacgccaagctgcagccgaaagaggaagcgcttgaaacggcagtccgcgtcatgacggcttatttctcttccaaagccaattagataaagcggctggtataaaaatcggcaaacgtggcatcttaattggtggaggtgtttcttcatgtcgaaaaaaatcggaatcgaacaatctctttctgatgtcgaggctgctttgaaggaaaaagggtatgaggttgtaacgatgaaaaccgaagacgatgcaaaaggctgcgactgctgcgtcgtcactggtctggacactgatatgctcgggatttcagatacgatgaccggagcatctgtcatacaggcgacgggtttaactgccgatgaaatctgtcagcaggttgagcaaaaacttcagtaatagacataaaaccgaagttccagcttcggttttaacttgttttccaaaaaaacagctgctgcgtgttaaacggttgtttcctcatccggcggcatgttacaatttttttaaaggatttaaatagaacaaccgctaatttaaatttattatcaattaatattgacttaaaatatggtaagcattataatgaactatgtatgtgatattattaactaaatgagaatttaatatttgaattctcatttagatacgggtagcataacccaaaaatcacaattggagggatacataaaatggcagaacgcatggtaggtaaacaagcgccgcgctttgaaatggaagcggttcttgcaaacaaagaattcggaaaagtaagccttgaagaaaacatgaaaaatgataagtggacggttctattcttctatccaatggacttcactttcgtgtgtccgacagaaattacagcaatgtctgaccgctatgacgagtttgaagaccttgatgcagaagttatcggcgtatcaactgacaccatccacactcacttggcatggattaacacggaccgcaaagataacggtctcggccagctgaaatatccgcttgctgccgacacaaaccatgaagtatctcgtgaatacggcgtactgattgaagaagaaggtgtagcgcttcgcggattgttcatcattaatccagaaggcgaacttcaatatcaaacagtgttccataacaatatcggccgtgatgtagacgaaacattgcgcgtgcttcaagcgctgcaaacaggcggtctttgccctgcaaactggaaaccgggacaagcaaccctttaatttcgataagaaatctgattggaaaggtctaacatttgttagacctttttaaacgacaaaaatgacattggaggaaaaatcatgaaattacgtcagccgatgccggaactgaccggcgcaaaagagtggttaaacggagaagtgacaaaagagcagcttataggagaaaagccgacattaattcatttttggtccatcagctgccacttgtgcaaagaggcgatgccccaggtcaatgaattccgcgaccgctacagcgataaactaaacgtggtggccgtgcatatgccgcgttcagaagacgatttagacttgaataaaatcaaagaagttgccgctgaacatgatatcactcagcctatttttgttgacagcgaccataagctgactgacgcttttgagaatgaatatgtccctgcttattacgtgtttgacaaaacaggccagcttcgccattttcaagctggaggcagcggaatgaaaatgctcgaaaaacgtgtgaaccgcgttcttgccgaaacagaacagtctgctgaataaagatgaaaaaccccgttttcatggggttttttatttatttggctccccaattacaaaaaaacaaaaaaaatttacctctagcctccgctttcgacaaataggccatttgacactgtttatttcatttgatgagtctggtggcctgtttttggttcgggagcatttcttacttaccccgtgcataaaagactgtggattcgacaagtgaaatctggaaattttaaatattctggatttataaggcggaataatcattgatatctcacactttccatcataattaaacagtggattctattcctaaattatgtttcattgaaaagtaattttctaggttccttcattatttaccatttttcgacaatgagcttagaataggccgaaatgcttcaaaaactcctcaggcttcaagtttttcggaaatttagttctattttcttaacggagagcaacagtagaaaaacgaaaaaatagttgataaaattagtttggtaatctaatatttttattggaaggtttatttattctgataggagggtataaacggtatgtttaacgagagggaagcattgcgtttaagattagagcagctgaacgaggctgaagttaaggtgattagggagtatcaaattgagcgggataacatatatgcaaagctgcgtgaattggatcgtccatccagctttaatgatacaaaaaaagattttcgcccggagcgtaaaactgaatctctccctgttttagctgaattggctgcacaggagatgaagagctaccagcaacagcagcaacagcagccgcaagcatctcaaaagaaccagcagcagacttctccgcaaacctcctcactgcctgccggaattccagatggaacgacaaggcgcagaaggggtacagcacgtccaggctcaaaagctgcaaaattgcgtgaagcggcgattaaaacattaaaacgccataatgcggccatcaaaagctccgaacttcaaaaagaaatcgaaaaagagagcggacttgagatccctaatatgacaacctttatgcaaagcctgattaaaatgtacccggaagtcaaaaaaccataccgcggtcaatatatattagagggtgagatttctactgagacagagcagcaataggtcaaacccttgctttttcagatagcgtttccattttaagggaacataaaggcggccgctttatacgccgccgcccaatcaactgcttgagacaatctactcaagcggtttttttgtaaaaaccaaattattccttaaagtggtatttaatttaaaggttttgtttctttgtctttgcgtttaatttgatagacccatttttgcgggggtgtttcttctttcgcctgtttttttccattctgtttatttttttgatccattttcgtatcattttgttgaatggcgctcaattgttgttggagctgatcaacttgctctgtaacagtttgaagcaccgcctcgatctgttctgtccgttcaaaaacctcctcgttttgttcaagcgccttctccgtctgctgaaatgcatcaatatcggcaaaatgagaagcgatccacttatcactttcatcgagttgccttttataagagagaatcgtttcataaaacagcgcttctttttgttttttcagcctccaaaagccggcttttcgtttccgtcacccgctcttttaataccgcaacatcagtttcgatttgtttgagctgaagacttttagcatgaagttcatctttttcaggcgggcattttcgtatgcagcgtttttgagctcctgttcctttttttccctcagcgttttttctctttctgcatgaagcttttcgtattctatttggctatgtaagctttttttctcttcttcggcttttacatttgttaaatgaaggcggtgcttttcttctatctcttgttttcttgcataggtttctttttgaagaagctcctgaagaacgacgattttactcagcaattcgctttttatccggttgagcgtttcggccgacttgtcttccttgtttgccgaaatccgctccagttcgaatgacagctgctgaagctgctgtttcattgctgcgttttcccggctgagcttatgatttttctggtgaaaatagcttgcttcaagctcgtgtatcaattgatgtgatcttgccagctcagcttttaaaaaaaggttttcctgtgataaatcttgaaaataaggcagcgaacccgatgtttttttcatggtgaccagccccctataaatgttacaactacaatatgcataaatgaaacccgccatgccttttgaaaaagagattttacagacttgttcggatttctaaagttttgctatgatgttcgcaggcaggaacacgcgaaggaaggttgagccgtatgaaagaaatacatgtcatattatcaggggggctttcgcgccgttttggggaaccgaaggcgtttgcccgctggaaaggcaagccgctttatcaatggtgcaaacaggcgctgggagacgacgtcctgatattgagccgtccgggcttgacggagcggtttatagaactcggggaaaaaagcggtgctggaagatatcgaaccgtacagagggaaagggccgcttgccggtatgtacacagccatggagcgggcggaaggggaatgctatattttttcggcctgtgacaccccgcttgtccggcaggagaccatatcggctttaaaacggcagttgaccccggcggatgacgccgtcgtgcctgtcgcagacggaagggcgcagccgcttgttgccgtctaccacagaagggtaaaatccgtcctccatgaacagcttcagcagaacgaactgaagatcagcagttttctcgaccgcattcgcgtcaagtacattgaagcagatgcggttggtgcagagccgtgggaatttataaatgtcaataaaaagtcggatttagaagaaatagagccgttctttccgggatgaaatattttatcatagattgcaagggtttttcggaaggtgtttttcaaagaacagcagacggaaaaatggtatgatatagaaaaggaagtaaaggggatcatcctgatgcatgaacggtattcaagacaaatcagatatcaaaacatcggacaggcgggtcaggacagaatcaggcagagccatgttttgatcgtcggggccggggcgcttggcacgtcagccgctgaagggcttgtgcgcgcaggcatcggcgcactgtctattatagaccgcgattatgtggaatggagcaacttgcaaaggcagcagctctacacagagaaagacgcggaggaaaggcttccgaaagcggcggctgcaaaagaacgtctttccgagatcaacaccggtgttgagcttcgtacatatgttgcagacggcacagttgaaacactcagaccgctgatcgaagaggcggatgccgtcattgatgcaacggataactttgagacccgcatgatcatcaatgaccttgcgcaggagacgggtactccgtgggtttacggcgcttgtgtcagcagtcagggcatgtatatgacgattattccccaaaaaacgccatgccttgcctgcctgtttgaagatgttccgattggcggggctacatgcgatacgtcggggattatttcgccggccgttcaaatggtgtcggcttatcagcaagctgaaattttaaaaatcttaactggacagcaagaagcgcttcaaactgcttttgtcacgtttgatttatgggcgaacacccattatcgcatgcagatcggccgcaatgagaaatgtccttcgtgcggagaaacgccggtttatcctttcctcagcaacatgagccaaaagaaagccgacgtgctgtgcggaagagagaccgtccaaattcgcagcgaaatgttaaaacggctgcctaaagaggagctcatgaaaaagctttcggtcatcggaaaagtggatgcgaatgattatttgctgcatgtacaatatgaggcgttcagaatcgttattttcaacgatggaagagcccttgttcacggcacaaatgatataaaagaagccaactccatattggcgagagtcatcggaatgtaacaacaggaggtttttttaaatgattgaaaaaagaacgcccattccagtttttgaagccgctgcgcgtgtctctcagcaccagaagctgggagatgcagagtggattcaccttgaggagagtctccatagatttttagccgaagatgtcaaggctgatcacgatgtacccgcttttgaccgttcgccatacgacggctttgctgtccgagcatgcgatacagccggtgcttcgggggaaaatccgctgcaattcgaggtggttgatcacattggagccggggccgtatcggataaaaagctgggttcttttcaagccgtcagaattatgacgggagcgcagattccggagggcgctgatgcggtagtcatgcttgagctgacaaaaaccttctcggaagacggcaaaaactatatggtgttgaagcgctcactacagccgggagaaaatatatcaaaaaccggagaagatgcgagaaaaggatcagttcttgtgaaaaaaggaacccggataacgccgggtgttgtcgctttgcttgcaacattcggatatgcagcggttcctgcagtcaaaaagcctgtggtaggcatcattgccaccgggacggagcttctgaatgtcagcgatcctcttgttcccggaaaaatccgcaacagcaatgcaggcatggcggccgctcaggttgaagaatcaggcggaaaacccctttatttaggaaagatttctgatcaatttgacgaaagctttgcagcggtggaaaaagctttggacaaggtggattttctgattacgaccggaggggtatccgtaggggactttgattttctgccggcaatttacgaaaagctcggtgccgaggtcctgtttaataaagtggcgatgcgtcccggaagtgtaacgacggtcgctcaattaaacggcaaattgctgtttgggctgtccgggaacccgtcagcctgcttcgttggatttgagcttttcgtcaagccgtccctgcgcacctggctgcatcatccgaagccgtattctttatgtgcagaagcggttttagccaaggattttccaaaacctaacccgtttacgaggtttgtccgctcgtttgtatccattcaagacggcgcgcttcaggcggagcctgtcggtctggataaatcgagcgccgtaacgtctcttgcagatgccaatgcgctgatggttttgccgggcggaacgagaggctttgaagccggggcaagagtgcatgttcttttataccgggatgagaacggaagtgaacagctgtggccgcacattttccaatcctccagatcgtagggtaccaaaacagcggcaaaacgacgttcgttgaaaaattggcgggaaagctcgatcagctaggagtcaatgttggctgtctgaaacaccacggacatggaggagaaccggacgcttttgccgaagggaaggattccgaccgcttttttcgggctggagcggctgcgtccggcgtagaaggtgcgggcgtttttcagcttacggcgcgcggcgagtggacgcttgatcaactgattgccgcttacggcgttttagcagttgagtgtctcctcatcgaaggatttaaacatgcgccatatcaaaaagttgtcatggtcagaaacgaagcggactgccggctcctgaaggaattggacggcatcatcgccgtcatttaccagcagagcgagccgaaaacagatgttccatcctttcatattgaagacccgggtgccctggcttttattctgaatcatctaaaggaggaaggcgtttgtctgaacgatttatcataacaaaagacccgattgtcatcgaagatgtcgtcaaaaaagttgaaagaagggaagccggtgccgtcacgacgtttatcggaacagtgagagaatggaccaacggaaaaaagaccctctatctcgaatatgaagcttatgttccaatggcggtcagcatgctcgctcagatcggcaaagaaatcaatgaaaaatggcccggcacagctgcagccattacccatcgcatcggcaggctggacatttctgacgcggccgttgtcatcgccgtgtcgtcgcctcaccggaaagcggcgtatgaagcgaatgaatatgcgatcgaaagaataaagcaaatcgtcccgatttggaaaaaagaacattgggaggacggcgagacttggatcggcgaccagcttgagacaactgaatacccggaagggaaaccggatattgaagaggcggcttccggcagagaaagaggtgctgaccattgattaaaattttgctgtttgcccagcttgcggaacaagcgggtgcgcagagtatcgatatagatgaagaaaagacgacaacagacgagattagacagtttttaaaagaaacgtacaatcttcaggggacggaccgggcgatgatcgctgtgaacgaagtgtacagaagaggaaacagtgaggtcgagtcgggagatacggttgcttttattcccccggtcagcggaggatgagaacgtcggtcggttcaggcataagcctgtcaccgaccgacgttttttttagaaccgttctctatataaagaaaacagccgcgccgttctttcgaaatgtttggttctaatttttgaatcaggtcataaagctcactaatacggtgaacgttaaaattggttctttccttcagtttcattttcagttcttttgtcgttacaatttctcctttttgctgtttaataatgtctacgcaatgtgctgcataatactctttattggaacgtctatgtcgctggatttgtctgtcaagttctcccaaccttgcataaatcccttcgcgttctttccggaagtccttccagattttttgttccaattcacctaagaggagaagccgtttttttaaagcctctcttttcgacattgcaatcaactccgtcattcataatttgataactttttctattattttacatcatcttccttcattcatcaaaaaatttcctttgacatcgagaaactattttttatcggctgtcccattttaaacaggctttatttcaaaccgaagaagggggaaaactccataataagactgaattttttaaaaacggtggaattttatttcgtaaaccgatatattagatgatgtgtccttgttttacatgaattggaaaggtgctggtgctaatggagtcccttaaaaaactaaaagatttttattggccttataaaaaaatgtttttatggtcgattgcgtcgatgcttctaatgacggcgattaccgttgtttatccgattattctgcaaatgacaattgatgaagtaattctcggcggaaaatacggtttggtcatatggatcagcctcgggttcatcgctgtcatggcggcgaagggcgcagccactttttttcatcagtatctcggagatatgttcggaattcgctctgtctaccggttaagaaaagagctgtatgcgaaattgcagcgtctgccgttcaaatattacgacagcgctaaaacgggagatttaatgtcaaggcttacggcggacgtcgaaggcatcagattctttttatctttcggctttgctgaggcgattcgatttatcctgcttgtcactttcagtctgtctgtcatgttttcttattctgtgccgctgactctggttacgattgcttctctgccgtttttaggagcggccgtctaccggtttgataaaaaagtgcatcccgcttttcggaacataagaaaatcattcgcccgtttaaatacgaaggttcaggaaaatatcagcggcatgaacaccgttaaatctttatcaaaagaagattttgagattcaaaactttactcattcaaatgcccattttcgaactaaaaatttaaacgcttcgtttatcatgtcgaagttctttccgctgatggagtttatcggcaatatctgcctcgtggctctgctgtcgttcggcggctggctcgtgatgcagaacagcttaaaaccgggtgagcttgtcgcttttttcagtctcgtcaattacttgatgtggccgatcatgaacctcggttatgtcatcaacctgttttcacaagcgaaagcatcgggagagcggctgctggaaattcttgatgccgaggaggaaatcaccgataccgaacaggcggtgaaaagcggcagactgaacggcgatgtcgtattcagcgatgtttcccttcaatatacaaaagaaaatgcggaagcattgcatggggtgtcttttcaggctgagcgcggcaaaacaattgggttaatcggcgcgacggggtcaggcaagagcagcatcattcaactgctgagccgcttttatgaaccgacatccggccggatcacgatcgacggcaaaccgcttgaacactactcattaaagatgctgcgctccaatatcggcgtcgttccacaggaatcgtttttattttcctcaacgatcaggtcaaatatatcgtatggaaagcctgatgcatcgatggatgagattatcgaaagcgcgaaaagagcccaggctcacgattttatcatggagcttccgaatcaatatgatacgatgctcggcgagagggggctcgggctgtccggtggccaaaaacagcggattgcgattgcgagagcgatttgtatgaacccgggcattctcatcctggatgattcgacgagtgccgttgacatggaaacggagcaccgcattcaacttgcattgcgggaagtgatgcgggatcggacgactttcatcatcgctcacagaatctcatccttaaagcatgccgacgaaatccttgttctcgataaaggcgtagtcaaggaaaggggaacacacgaacaattaatggaagcaaacggtttatacaaacggatttttgatttgcagtataaagatcaaaatgtgttgaatgagccgcattttgcaggataggaggctcttgctatggaaaaccaggcgaaaaaacaaacgttgatgaaccggtttttttatacttcagaccaaatcattgaaaagccttttaactgggcgcagatgtggaggctgcttaaatatttaaagccctaccgaaaaaatttgctgccgctgtcgtttttaacggtcatgatctcggcggcgatccggctggcggtgccgattttgatcggcgtctatgcgctcgaccaagcgatcgcaggccgggatatgaatcttcttgtgattctgatctccgtcatcagtgggttgtatcttgtcaattatgttagcaatgtgctgagaatccgctggatgaacaagcttggccagcatgtcatatatgatctcagacagcatttgtttacgcatgttcagcggctgtcgcaccgctttttcgacgagcgttcggcaggttcaatccttgtccggatcatgaatgacatcaattctttgcaggaactgtttacgagcggagtcatcaatttattgatggatattttgcttctttttggaattgtcgtcattctgttctcgctcagtcctgagctgaccatcgccattatggtgacgctgcctgtgatgttcttcatttctactaatctcagaaggaaaatccggcgatcctggcaaaaggtgcgcttaaagcagtccaagctgaattcccatttgaacgaaagcattcaaggcatccgggtcactcaggcatttactcaggaaaaagagaatatgatgtattttgaaggcgtcaacagtgagaactttgaagcctggcgggaagcgacgaaaaaaaatgcgactttccgtccgcttgtagaaatgacaaacgctgtcgggacggccattttaatctggtacggctcaagcttgatcatcaatgaaacgatcacgatcggtgtatttgtatcgttcgccttctatctcggaatgttctgggagccgatttcaaggctcggccaagtctacaaccagctgttgatggggatggcttcgtcagagcggatctttgaatttctggatgaaaagccgagcgttgcagacaaggaagatgcggtcaaaataaaagaattaaaaggccggatcgaatttgaacaggtggaattttcttatgacgggaaccgcaaggcgctgcacagcatttcatttgagatacctgcgggatcatcgcttgcgcttgtcggacatacaggatcagggaagacgacgatcgcaaatctgatcagcaggttttacgatgcaacaggcggggctgtcaaagtggacggtataccgattaccgatatctcgctttccgatcttcgttcgcaaatcagcatcgtgctgcaggacacgtttattttttccggaacgattatggaaaatattcgttttggccgtccgaacgccgccgatgaagaagtgatcgaagcagcaaaagctgtcggagccgattcgtttatttcagcgcttccgaatggatacgccacagaagtggaagaacgcggcaatgtattatcggcaggtgagcggcagctcatttcatttgcgagggcgcttctggcagatcctcgtattctaatccttgatgaagcaaccgcaagcattgacacagaaacggaagtcaaaatccaggctgccttgaaaacactgctccatggcagaacggctattatgatcgctcacaggctttcaacgataagggatgcggataaaatcctggttcttgaccacggccggaaaatagaagaaggaaatcaccaggaattgatcgggaaacgtggaatgtattatgagctggtaaaagcgcagtatcaaatgtttcagcgaaactaaaaccgtccgcgccgcaccttctaagaatgcggccggggcgtttttttgagaacagttgtgaaacattttaggacattctgcgtataaactggtaattcattttttaagggggatacatatggaaacgaatttagaaactgaaaaagtaaagaatccatcattgctcggattgattacccggcccggagaacagttcgagagaatgagagaaaagccggctttctggtttccgcttgtcattgttttaatcttgtcggttgcgggagcgtatatgctcagcgaaaaaacggcgttgtctaccgatttgtcggaaatgccggatgctgaagcatttcaagctgctatgaagggaatcggcatcatcggcgggatcttcggctttgtgattgccttgctgatcagcgctttaatttattggctgattgtcaaaatcggaagaggaacaaccaattttgttcacatgttttcgctgtctgtttttacatattttattgcggctatcggacaattcataggcggactagtgatctattattcaaatatcgatcccacgatcgtcgtcacgtctttaaacggcatcatcccggcagacgagccgctcaaatcggtattgggtgtatttgatattttcacgatctggtcgctctcattggttgccctgggtctccaaaaggttgggggcatctccaaaaaagcggcttggaccggtgtgatcattttatttgtgatctccattctgctcgctttaataggcggtatggcgatcaatttcttcgattcatttgaaggagcaatgtaaatgaaaaaaatatggatcggcatcgtcattgttggggctgctgcgctttttatcggactcaacctctaccgctcggttcaaacgagcggaggggctgaagaagcggttcaaaccgtgaaattggaagaaaaagagatttcttctgaagtcatggttccggggacccttcagtttgcaaacgaacaatacgaatattttgaacctggaaaaggagaaattgccgacatcaaagtaaaagaaggcgataaggtgaaaaaaggagatgtgcttttcacctatacaaatgaagaaattcgcctggaaaaggagcaaaacgctttatccattcaatcgaaggatctccagcttgaacaggttaagcgaaaaatcagcagcctaaaaagcaaggaagacgagctgaaggctgagctcggagcggaaaaagccaagaggcaaattgatgaagaacggtcacagcttgaaatggaagaaaaatcgctccagcttgaactgaaacaagccgacctgcaaaaggaaacgctcgagaagaaatcggcagcgctgcaagtgaaaagcggcattgacgggacggttattaccgttgacaaacaagccgctgcaaagcaatcggatattcaaaagccggttatacatataggtaacgaggacaagcttgtcgttaaaggcgtgctctcagagtatgacacattgaaagtgaaaaagggacagaacgtgaccatcacgtcggatgtcatccaaaataaagagtggcgtggaagggtatcacaagtcggattggttcccaaagaagaggcgtctgcaggtgctgcgggaacaaaggagcaagctgttcaatatccgtttgaagtcaaaataaaaggggagcgtcctaaagcaaagtccggctttaacatgattctcaaaatccagacggacaaaagaatcgttcaggctcttcctgaagatgccgtcaagcaggatggtgatcaatcatacgtgtttgccgtaagagacggcaaggcaaaacggatcaatgtcaaaaccggtgagaaagcagacggcctcgttgaaattaccggcggtctgacaaacaaggacccggttatcgcaaacccggccgaggatatgaaaagcggaacggaagtgaagcttcaatgattgagctttccaaagtgaaaaaaagctaccaaatcggaggagaaaccattgatgttctcagggagatcgatatgaaaatcgagccgggagaatatctgtccatcatggggccgtccggttcgggaaaatcgacgatcatgaacattatcggctgccttgaccgcccgacatcgggtatttacaggctggacggcgaggatatttcatcatacggcgaaagggagcttgccggtgtcagaaaccgtttaatcggttttgtttttcagcagtttcagcttctgccgcgcttgaatgccataaaaaatgtggagcttccgatgatttacggcggcgttccaagaaaggagcggcgggagcgggctgaacgggcgctcgaaaaagtcgggctcaaggacagaatgcgccatatgccgaacgagctttccggcgggcaaaaacagcgtgtagccatcgctagagcgatcgtcaatgaacctaaactgatattggctgatgaaccgaccggagcgctcgatacgaaaacaagccgggacatcatggagcaattcaccgaattgaatgaggaaggaacgacggtggtgctcgtcacacacgaacctgaaattgcggactatacaagccggaccatcatggtgagggacggtgtgatcgtctcgccggaaacagagcggagggggacggtgcaatgaatctcatcgaaaacttgagaatggctttaagttccatcctttcccataaactgcgatcgattttaacaatgcttggaatcattattggtgtaggctccgttattgtcgttgttgcagcggggcaaggaggagagcagatgctcaagcagacgatcagcggacccggcaacacggtcgaaatctattatcagcccagcaatgaagaattaaccgccaatccgaacgcctacttagacgccggcttcaccgaagaagacatcagaagcttaaagtcactcgaaggcgtgaaacatgtcgttgcgaaaacaaccgagtccatgaatgcccgcttccgggatgaaaatacggatgccgctgtaaacggcattaatgacggatatatcagcatcaattcgatggaaatcgaaaagggaagagaattttcagaagaggattaccttgctggaagcagggtcgccattatttcgccgaagcttgcggaagaactgttttctcagcagtcgcctctcggccgtgtcgtatggataaatagccagcctgttgaaatcatcggcgtattgaaagaagaaaccgggctgcttgcattggggatgaatgagatgtatgttccattttcaatgttaaaatcgtccttcggcatcagcgactatgactctgtctccgttcaagctgagtctgccgacgatctgcaggccgtcgggaagcgggctgcagcggccgtcaacaagaatcacggcacttcggactcgtacgaagtgatgaacatggaggccatagcggccggaatcagccagattacaacaattatgacgatgttcatcggttcaattgcaggcatttctttactcgttggggggatcggcgtcatgaatattatgctggtgtcggtcactgaacggacgagggaaatcgggattcgaaaatcgcttggtgcaacaagaggccagattctgatgcaatttttaatagaatcgtctttaattacactgatcggcggggtgtttggcatcggccttggatacggcggtgcagccctcgtatcgttttttgccgggtggccgccgctcgtttcctggcaggtggtcctcggaggcgtcctgttcagcatggcgatcgggattatctttggactcatcccggccaataaagcggcccgccttcatccgattgatgcattgaggtatgagtaagatggttgagaaacttgaagcagttgcaggaaaaacccaaatgcacgaatggtccatgccagtacgtcagactatcgacaatattgaaaccgcctgagcaggcggtttttttatggaaaagcaaatttgatcaggcatatggtgtatggatgttccggttaaacatgcctatataaagggatgcttggtgcttggtggctacattccggccgagaagcctctattaaatctacttggaatatgcatcagcagccggagaacgatggatcggcatttcaattatatttatatccatgttgcggcctgtcttactatatcaatttatagaaaatattcagtaatcggaaacaggatacagatttgctgtaaaacctcatgcggtgagcatggggttttatcctgtgatctgaatgatgtttgaaggaatagataataataatgtcacatatttttgcggatttttatagtttatacagtttacaaacggtacatatcacgttaatattttaaaatgtgaaagattttgatggttattgaatgaatttgaaagatttttgttgagttatgtcgaaaaagcgtttacaatgaaattgtaagcttaatgaaggcgtttccaaaaggggtgataatgtgttgactcccgaacggcatcagctgattattgacgagattgaaaagcatgatgtcgtgaaaatccagtacttaatgaatttaacgaacgcatctgagtcaacgatcagaagagatttgtcgacgctggaagcccgcggatatttaaagcgtgttcatggaggggcatcaaggctttccgatattcgtacggagcctgacatgctagagaaatcatccaaaaaccttcatgaaaagcgaaaaatcgctcaagaagcggcctcacttcttgaagaaggcgattgtatttaccttgatgccggaacgaccacattgcaaatgatcgattttatcaatccagagatggatattatcgtggttacaaatggagtcatgcacattgaggcactaggtaaaaaaggcattactttttatttattaggcgggtatgtgaagtataaaaccggagcgatcgtaggcggttcggctttatcagccatcagccaataccggtttgacaaaagcttcatcggcgtcaacggcattcataaggaagcggggttcacgactccggatcctgaagaagcgcttttgaaaacaaaagctgtcaaccaggcgaaaaaagcatttattttagctgacgtttccaagtttggggaaatttcattttctgcctttgccggtttagacgaagcaactatcattacagcaggatctgcaaaacattcatttgataactatcaagaaaaaactgtcgtaaaggtagtgaaaacatgatatacactgtaactctcaacccatcggtcgactatattgttcacgttgaagaattttctgtaggcgggctgaatcgttcagtctatgacacgaaatatcccggaggcaaaggaatcaatgtctcacgcgtactgaacagacaccatgtaccttcaaaagttctcggttttatcggcggttttaccgggggatatatcaaatcatttctcgaagaagagaagcttgaaacggcgtttcatgaggtgaatggcgacacgcgcatcaatgtcaaattgaagaccggggatgagacggaaatcaacgggcaggggccggtcatcagcgaagaagatttcgcggcctttttagaccagttttcagcgatgaaagaaggggacattgttgtactggcgggcagcattccttcatcattgccgcaggacacatatgaaaagattgcggaaaaatgcaaagagcaaaatgtccgtgttgtcgttgatatttcgggtgaggcccttttaaaagcagcagaaatgaagccgcttttaatgaaaccgaaccatcacgagctcggagaaatgtttggaacaactatcacctcggccgaagaagcggtgccttacggaaagaaactcgttgaacgcggggctgaaaacgcgatcgtttccatggctggagaaggcgcacttttatgtacaaaagacggtgtctaccatgccaacgtacctaaaggaaagctcgtaaactcagtcggtgcgggggattcagtggttgcaggctttctcgcaggcattgaaaaacagcttggcatcaaagaagcttttcgcttaggagtcgcttcaggaagcgcaactgccttttcagaggagctgggaacggaagagctcgttcacaagctgcttccggaagttcaagtcaaagcgatataaaggaggaaaggttatgaaaataactgagctactaacaaagcatacgatcaagttaaaccttgagagcagccagaaagaaaacgttatcgaagaactcgtcagcgttttggatcaggctggcaagttgaatgataaagaaggctacaaagaagctgtgatcaaccgcgagaaacaaagctctaccggtatcggcgaaggcatcgccatcccgcatgcgaaaacggcaagcgtcaaagagcctgcgatcgcgttcggccgttcaaaaggcggcgtcgattatgaatcccttgacggccagccaagccatctcgttttcatgatcgccgctacagacggtgcaaataacactcacctcgaagcattgtcaagactgtcgactttgcttatgagggaggagattcgcaaacagctgcttgaagcttcatctgaagacgaaatcatcgacatcatcaatcagcatgataaagatgatgatgaagaagaagagcaggccgaagaggctcctgcaccatcagcaaaaggaaaaatccttgcggttacagcatgcccgacagggatcgcccacacgttcatggctgcggatgctttgaaagaaaaagcgaaagagcttggggttgatatcaaagttgaaacgaacggttcaagcggtattaaaaatggtctgacggcccaggaaatcgaagatgccgttgcgatcattgtcgccgccgacaagcaggttgaaatggaacgctttcaaggcaagcatgtcattgaagtacctgtaacagcaggtatcagacgtccgcaagagctgattgagcaggcgctgaaacaagacgcgcctatctatcagggtaaaggcggcggtgcaaccgcttctgaagacggagctgccaaaggaaaaggcggcggtttctacaaacacttgatgagcggtgtcagcaacatgctgccgttcgtcgtcgggggcgggatcttagttgcaatttcgttcttctggggaattaacgcgaccaagccgggagatccgacttataatgagttcgctgctgtattaaataatattggcggaacgaatgcacttggattaattgtcgctgtattggccggatttatcgcgatgagcattgcagatcgtccgggatttgcgcctggtatggtcggcggtttcatggcgacacaagctggcgcaggtttcttaggcggcctgattgccggtttcttagctggttatattgttgtcctgttgaaaaaagtgttcgctggtctgccgcaagtgcttgacggtttaaaacctgtgctgctctacccgctgtttggaatattcttgaccggaatcattatgcaatatgttgtcaatacgcctgtcaagtacattatggacggcatgacacattggcttgaaggtcttggaacaggaaaccttgtcgtaatgggtattgttttaggcggtatgatggcgattgatatgggcggtccgatcaacaaagcggcctttacattcggtatcgcaatgattgaagctggaaactttgggcctcacgcagccatcatggcaggcggtatggtgcctccgcttggaattgcccttgcaacgactttctttaaaaataaattctcaaaacgggatcgcgaagccggaattaccaactacgtgatgggcttgtcatttattactgaaggtgcgattccttttgcggcagcagatccggcacgcgtcattcctgcttgtatcatcgggtcagcagttgccggcggtctgtctcaatttttccatgtcacactgcaagcgccgcatggcggaatattcgttctcttctttacgacgaatcatgcgctgctgtatctcctcagcatcttgatcggtgcggttgtgacagctttgattctcggcgttttgaaaaagccggttccaactgaaaaataagtgctgaaagtgccacagtaatccctctcgtggcactttcttttttacttgtttttgccggaagtgagcgcggggattatgtattcagcgggaacttgtgataaagtataggaaagcttttattttggcatgtatgctgtgacagactgtttttaggaggaagcgttttgactgaagaaaaatccaccaataagaaaaactctctctttgaatgggtaaaagccattattattgcagtcgttctggcgttattgatcagggcatttttattcgaaccgtatttagtggaaggtacgtcgatggacccgacgctgcacgacggagagcggctgttcgtctataaaacggttagatacgtaggcgaatttaagcggggagatatcgtcattatcgacggcgacgaaaagaatgtccattatgtaaagcgcttgatcggcctgccgggagataccgtgcaaatgaaagatgacacgctgtacataaacgggaagaaggtgtcggagccgtatctttcggaaaacagaaaagaggcggaagcagtcggcgtcaagctgacgggcgactttggccctgtgaaggttcccgaaggcaagtatttcgtgatgggagacaatcgccagaggtcaatggacagccggaacggcctcggactgattgataaaaaacgagtggccggaacttcgcaatttgtgtttttcccgtttaacgaaatccgaaaaacagactgaaaaatgcctgatgtccatttggacaatcaggcatttttgcttgatttatgcggataatgatgccagcactgcgataaacagtacggtaacgaacacagaggccataatcagaagaacgctgtacaagattctgatttccgcggcttcttttccccgttttgacagcattcgtttcgccgcgatatgaacgaacacgtaaatcatggcaatcccgatgtaaagccccagatcccgtgctgtaaagccggttatggcaagatagacccctgcaaaaaaaataaacatgcagtattccgtcaaagtgataagcttcatggtttcctccgtctaacgatccgagttttcttcaaatatcacctttttataatatatcttttggagccatcccacaaggaggccgaagccgatcagcagacaggaaaatataaaaaagtcagcggtccacatatcaaaccctttgaaaagcccgatagacatcgtagaaatcaccatggccactgacgcgaaaagcgcttggcgcggcctcgaattaatccatctgatgatatcagggtcatctttcaatttcattattccttcccccattcttcattaattgtaacatattgtcacaaagaaagtggaaataagcgtttttttgatatatttttctttcaaactttatcgtaaaaaagcaaagcatttctcttgcggaattttcgtgttatactcattttaatgaagtatagatggaggatattaaatgatagctgttcaaaatgtcagcttgcggtttgcagaccggaagctgtttgaagatgtaaatattaagtttgcgcccggaaactgctacggattgatcggagcaaacggcgccggaaagtccacttttttaaaaatattgtctggcgaaattgagcctcagacaggcgaagtccatatgagtcctggcgaacgtcttgccgtcctgaagcagaaccactttgagtatgaagagcatgaagtgttgaaagtcgtgatcatgggacatagacgactttatgaagtcatgcaggaaaaagacgcgatttacatgaaacctgatttttcagatgaagacggaatccgcgccgcggagcttgaaggcgaattcgccgagctgaacggctgggaagccgaaggggaagccgcgatcttattaaaaggactcggcattcctgaagaacttcatacgaagaaaatggcagatttgggcggctctgaaaaggtgaaggtccttcttgcacaggccctgttcggaaaacccgacgtccttcttctcgatgagccgaccaaccacttggatattcaggcgatccaatggctagaagagtttttaatcaattttgagaatacggttatcgtcgtatcgcatgaccgccactttttaaataaagtatgtacgcatattgccgacctggattttaacaagattcaaatttatgtcggaaactatgatttctggtatgaatcaagccagcttgcgcttaaaatggctcaggaagccaataagaaaaaagaggagcagatcaaacagctccaagagttcgtcgccagattcagcgccaacgcctcaaaatcgaagcaggcgacatcgagaaaaaaactgcttgaaaaaattacgcttgacgatattaagccttcatctcgcaagtatccgtatgtacatttcgcacctgaacgcgaaattggaaacgatgtgcttgttgtcaaagacctgtcgaaaacgatcgacggcgtcaaggtgcttgactctgtcagctttatgatgaataaagaggataaaatcgcctttacaggccggaacgagctagccgctacaacgctctttaaaatccttgccggggaaatggagcctgacagcggatcgtttaaatggggcgtcactacatcccaagcgtttttcccgaaagacaacagcaagtattttgaaaacagcgatttaaaccttgtcgactggctccgccaattttcgccgcatgaccaaagtgaaagcttcctgcgcggatttttaggccggatgctgttctccggagaagaagtgctgaaaaaagcaagcgttttgtcagggggagaaaaagtccgctgcatgctgtcgaaaatgatgctgtccggcgccaatgtgctgatgcttgatgagccgacaaaccatttggacctcgagtccattacagcgctgaataacggtttaatcagctttaaaggcgccatgctgtttacatctcatgaccatcagtttgtccaaacaatcgccaaccggatcatcgagatcacgccaaacggaatcgtcgataaacaaatgagctacgacgagtttttggaagacaaaacggttcaggacaagcttgctgaactttacgcgtaatgatagaaaacccgccttaaaaagcgggttttttttataaaaaggagatggttgctgtgtcatgccgaaaggctcttgagcaatatattcaagcaacaaacacacatgagtttgagaatgtcaaagccctccttgaccccggcgctgtgtactggttttcggatcaaacgtgctcgggctttgaggagattcagcgttattttgaaaacgcctggaagcaaatcgaaaatgaagtatacagcgccggtcatgtcagctggatcacggaaacggacgaacaggccgtctgtctttatacatacgaatggaaagggttatataggggcgaaccggttcaaggggcaggccgtgcgacaaacgtatttgtaaaggacgagtcaggacgctggaaactgaagcatgaacatttaagcagtttgcccaagcgatgaggcggcggagcatggacctgattttcagctgttacagccgccatgcatgtacagggaagtttaggattgcgggcggcatgcggacacgatataaaaggacctcagaagttttctgaggtctttttttgcggaaggctttatatcgcccagttgccgtttctgaatatcggctctctttttccgtcagcagtgattccgtctatattcatttctcctgaaccgatcataaagtcaacatgtgtgatgctttcgtttaatccttctttcgccagctcctcgcgcgacatctgttttccgccttcgatgttgaatgcgtatgcactgccgatcgcgaggtggtttgaggcattttcatcaaacagtgtgttgtaaaacagaatattggacttggaaatcggcgaatcgtgggcaacaagcgcaatttcgcctaagtagtgtgaaccctcatccgtttcgatcagctcttttaaaatttcttcgccttgttcagctttgacatccgtaatccgtccgtttttaaatgtcagtgtaaagccgtcgattaaattgccgccgtagcttaacggcttcgtgcttgaaacggtgccgttcaccccgtcttttttcggagcagtgaatacttcctctgtcggcatattggccatgaactcgacgccgttttcgtttgtgcttccggcgccgacccacagatgcttctcgggaagctcgatcgtcaaatctgttccctttgcttggtaatgaagggcgtgataatgcttgtcgtttaagacgcttactttatcgcgcaaggtttgatcgtgatctttccacgcttgaacgggatcttcacggtcgacgcgggtcgttttgaaaatctcattccatagcttttgcacggctgtctcttcatctgcctcagggaatacttttttcgcccaggccggcgaaggcgctgcgacgacagtccagctgactttatccgattgaatcatttgcctgtatgtatgcatcgcttttccggcggctttctgctgtgcggagatttttttggaatcgatgcctttcaaaagatcaggacttgaagagacaatggaaataaaagcagcgccttctttggcgagcgtctcaagcccctttgcttcccattcagggaactcttcaaaggcttccgcaggagccagctcgtatttcagccttgtgacctcatcatcctgccagcggaccgtcacgtttttcgcccctctttgataggcgcttttgacgaggagccgtgcaaaatcgcgtacttctgttgacgcgttgatgacgacttgctgtcctttttgaacgtttacgccgacttcggccacaagctttgcatatttgctcagtttatcagtaaacgaattcattggcaaaacctcctttattgtccataacatcatatcaaatatttgattgaaaagaaaaaaagaagcagcccggttcaggctgcttcttttttaacggttgattttggccgtttggccggggggcgagcttggcatgtttgcaagggagatgctcatccccccgagaataataccgcttaaaataacggtgatggccaggcgtcttcccatatctctaagcatggtcttcctccttatcgtttctccattcctcacgatatgaaagaagccgggaaaaaagacgcgaaaacaaaaattatttagccgctttttgcaatttatcgatcacttcgagagaacgacccgttccgatagcgacagattcaagcggatttgcagcaacatgcacgggcacaacgatttcctgtgacagccattctttgatgccgttcaaaagcgcgcctcctccggtcaaaatcacgccccggtcgacaatgtctccgctcagctccggaggacagtcttctagcgtcgctctgatggcttcgataatatgcaggagcgattcgcgcatcgccttctgaatttctttcgattccagggtaatcgttttcggcaggcctgtaacaaggtcgcgtcctctgacttccatcgttttcgtctcatggtcaatcaatacgtagccgatctcaattttgacttcttcggccgtccgttcaccaatcagcaggttgtatttttttctgacgaatgacacgatgtcttcatcaagctgatcaccgccgatccggatcgagtggcacgagacaacgcctccgaatgaaatgatcgccacttctgtcgtgccgccgccgatatcgacgacaacgtttgcgacaggttcatcgacaggcagatctgcgccgatggcggcggcgacaggctcctctatcaaatggacttgtttggctccgcagtttttgacagcatcgctgatcgcgcgcctttcaacagcggttgagccggacggcgtgcagacgacgacgctcggctttctgaacgtaaagccgatgttctttccggcttttttcataatctgcttcaagaggtctgtcgtcatgtcataatcggcgatgactccgtctttcatcggcctgaccgcgacgatttttcccggcgtttttccgatcatgtttttggcttctgtgccgaccgccaatacgctctttgtttccgtgtccacggcgacgacggaaggctcatttaaaatgattcctttgtttttgctgtaaaccaatatgttagctgtgcctagatcaattccgatctcggttgtttgaaacatgttttcacccaatctctatttaaaatttttccgaaaaacgaaattttcttcgtgctgaaaaaatgaatttcatttaaattttctcaaatcatcggcgatttttgggggtttgtgacgattttgaaaccaatctgtaaaatgctgtcctcatatttacatgatgagaaaattatttcatttttatgaccggatttttgtcgaagaaacgcttgataagggaaacctttttcagtcttcattcgtctatcgttatgctaagacaatatcttagaaaaatagaaacaatagaggaagtaggcgaaagttttgaaagcaataggagttgtgagaaaagtagacgaactcggcaggatcgtgatgccgattgaattgagaagagctttggatatctcgatcaaggacagcatcgaattctttgtcgaccaagataaaatcgtcctgaaaaaatataaaccgcacggtgtgtgtctgatgaccggtgaaatcacttctgaaaaccgcgagtatggaaacgggaaaattacgctcagtcctgaaggggccgaattgcttttggaagaaatcaaagctgccttaaacggagtgaaagcataacattcgacgcccttcatcagaagggctttttcttgcgccgggagcagataaaaccgccgtcactgaaaaattcagccatagagacgataaatacttcgaacaatcctctcaaatgtggtgtaaagaatgttacaattgactgagaaatacaagtggcaggtgggggtatgaaaagatatcaaggacgaatcattgcaaccgtgctggcaatgacttttatcatgttttggaattttttattctatggggtgttgggaaataaaatcaattggacggttgatctgctgtttacgctggtgacattaatcagcgtttggtggctcacactttatatcgatgagtcaaatcagcttgtctataaattgaaggaaagcgaaaagaaatataaagagctttcctcagaaaccaaccgcataatggataatcttcaggaaatcgtctttcaaacggaccggataggatacattacatttctgaatcaggcgtggacaaccctgaccggatacagtgtcgaagagagccttggaacgatgtacaacgattattttgaccatgaagaacggatctcgaatcacctgatcgcccagttgaagaacaaggagcccgaaggcaggatcgaggtgctctaccatcgcaaagacgggagcaagttctggggcgaagttcactataaactttattataaaaacggtcaatttacgggcagcttggggacgctgactgatgtgacagaacggaaaaaagcggagatggaactgtttaagtcgaatcagcggctggccatgcagtctcaaaagctggcgatggccgggcagctcgcagcggggatcgctcacgaagtcaggaacccgctgacatctgtaaacggatttttgcagctgatgaaagcggaatatcctgaccggaaagattactttgacattattttctcagagattaaacgaatcgattctgtgctcggagaactgcttgtgctggccaaaccgcaccaggttcaatttaaaaagatcaaaatcaattcggttcttcagcaagtggcaacgcttcttgagacgaacgccgtgctttcccacattaagatcgaaaaagcgtttcagcacggggaggagtgggaaataaacggtgatgaaaatcaaatcaaacaggtattcatcaatttaattaaaaacgggatagaagcgatgcctgacggcggtaaaattacgatttcctcaaaggcagaaggagactatgtgaaaatcagcatcaaagacgaaggcggcggcatttcccaagccgacttggcaaagctcggggagcctttcttctcaacgaaagaagaagggacaggtcttgggctgacaatttgcctgaatatcatcggcgcccacaacggagaaatgaaaatcgacagcaaattgggcgagggaagcacattccacattttgcttccggtcgataaaggtgcggcgtccgaagagaacgacattcagcaaggatgctgcagccgcgcaactataaaataaaagaggaaaaattccacttcatatgatagaatttgttcaagattgacccatggaggaattaccgatgaaaaaagaatttgcagtaattggactcggccggttcggcggcagcatttgcaaagcattgagtgaagaagggcttgaagtaatggcgatcgacagagatgaagatcgcgtaaacgaatacgccaaaattgcaacacatgctgtgataggagacactacagacgaatctgtgctgaaaaaccttggactgcgcaattttgaccatgtcattgtagcgatcggggagaacattcaagcgagcattttgacaacgctgatcttaaaagagcttggtgtgaaaatgattaccgtaaaagctcaaaacgattatcatgaaaaagtattatccaaaatcggagcggaccggatcgttcacccggagcgtgaaatgggaaaaaggatcgcccacaacatcgtctccaacaatgtgcttgattatctggaactttctgatgaacacagcctggtcgaaatcgcagcgaacggcaaactggccggaaatacactgcttgaccttgatatccgggccagatacggaattaatattgttgcgatcaagcggggaaaggaagtcatcgtatctccgcttgccactgaagaaattcagaaagacgatattttaatcgtcatcggctcaaatcctgacattgagagatttagaaaaaaagtctttcaacattaaaatgccaccgattaaccgcgggaaccccacagcccgcggtttttttgatcttttcattgactgtttcaagcgattcggctacgatattgaaccatatacatataaaaaagagaggggacatatacctttggacaaagagatgttcattcgccggcttggcgccgccagtcatcgcaaaaaagcggaaactgtaattaaaaacggaaaaatcatggatgtttttaatcaggaatggttggagacggacattgccatcacagacggggccatcgtcggcttgggcgaatatgaggggaaaaatatcattgacgctgagggacaaatgatcgttcccggctttatcgacggtcatgtccatattgagtcctcgatggtgacgccgcccgaattcgctaaagcggtgattccccacggtgtgacaaccgttgtcaccgatccccacgaaatcgcgaatgtctcaggtgtgaagggtcttgagttcatgttggagcaggctgagatgaccaggctgaacatttattttatgctcccttcttgtgtgcctgcggcaccattcgaaaaatcgggtgcgattttgaacgccgcggatttacatcctttttacagccgcgaagaggtgctcgggcttgcggaagtgatggactatgtggccgttgaagctggagagcaggatatggtgcaaaagctcattgatgccgataaagcgggcaagcggatcgacgggcatctggccggcttgtcagccgggtttgtcaatgtctacagagcggcgggcgtacttacagaccatgaggtcacaacacctgaagaggcgcttaaacgggtgagaagagggatgtacgtcatgctgagagaaggttctgcggcaaagaatacgcgtcatgttttacctgcggtcaacgagaaaaatgtgagacgcttctttttctgtacggatgataagcatctggacgaactggtcgatgaaggaagcattaactaccaggtcaagcttgccattcaagaggggcttgacccgtttcttgcatatcaaatgggcagcctgaatgcagcggaatgcttcgggttaaagacgaagggagcggtcgccccgggttatgacgcagatcttcttttcatcagcgattttgagaacgtgagcattacaaagacgatgattaacggcgtgatctggagcgggacagagcaaagccaatcgacgggcggcaaagcggcatccggtctgcttcaatctgtgcatctgtctgatttacatgaggatgatctgcaaattccgatcgttcaagagaatgacatcagggttattgacattatccccaatcagctcgaaacaaagctgtccctggccaagccgaaaagcggagctttttttcagccggatctggaaagcgatctgttgaaaattgcagtggttgagcgccatcgcggcgttaaagaaatcggactcggcgtagtcagaggcttcggtttaaaagaaggcgccatcgcgacaaccatttctcatgattcccacaatttaatcgctgtcggtacaaatgatcaagacattttaaaagcgattgaacgcctcggagaaatcggaggaggcctcaccattgccaaaggagggaaggagcttcaatccgtcgcactgccgatcgccggcctcttgtcggacaaaccgcttgagacggtcaacgaaagcttgaaatctctccacgcggcaataacagagacaggattttcaggagcgtttaatccttttctgacgctttcttttttagcgcttccggtcattcccgacattaaaatgacaacggaaggattgtttgatgttaaagcgttcaggcatatcccggttcaaccataaaaaaacggatgcaccccggtgcatccgttttttgctgtatccgcatccgcgattagacttccataataatcggaaggatcatcggccggcgttttgttttttcatagagaaaaggagcaagcgtgtctgtaatctcgttcttaatttcagaccactgtgtcgttttgcgctccatcacttttttaaggtgtcctgcaatcagttcctgggcatcattgattaaatcaccggattctctcatatagacaaatcctctggaaattaagtcaggccctgcggacactttgaattctttcatgttgatgctgacaacgacaatgacgagcccttcttcggaaagaatccggcggtcgcgaagcacgatattgccgatgtcgccgatgccgcttccgtcaatataaacattgcctgacgggattttacccgcaactgaggcttcttcgcttgtcaaagcaagcacttccccgttgtccataataaagcagttttcctcaggaattccgcagtctgtcgccagtttgacatgcattttctgcattctgtattcaccgtgaatcggcatgaaaaactttggcttgatgaggcggagcatcagtttttgctcttcctgtccgccgtgtcccgaggtgtgaatgttagtcacagctccgtggatgacatcggcacccgcccggtaaagctggttaatcgtgcggctgacgctgatcgtattgcccgggatcggagatgatgaaaatacgaccgtatccccgggattgatagagatttgccggtgtgtgccgtttgcaattcgagatagagcagccatcggttcgccttggcttccggtacagagaatcgtcactttcccggcagggagcctgttgatttcattcgcttcaacgaaagtgtttttcggacacttaatatatccgagcgtttggccgatttcgatcgccgactccatgcttcgcccaaatacggcaaccttccgtccgtttgcaacagccgcttcgatcacctgctgcaggcggtggatgtttgacgcaaaggttgcgaagatgatccggccttcgacttttcggaaaatatcatcaatgctttctccgactttgcgctctgacatcgtgaaatcagggatttcactgtttgtgctgtctgacagcaggcaaagcacgccttcttttccgatttcggccatctttgtcaagttggcgggttcgcccaccggtgtaaaatcgaatttaaagtcaccggtatgtacgatgtttccttgcggtgtttttacgacaatcccgtatgagtccggaatgctgtgggtcgtcctgaaaaaagaaaccgacgtttttctgaatttgacgatatcgtcttcttcaatgatatgaagctttgtttggcgaagcaaaccgtgctcttcaagcttcttcctgagaaggccgatggcgagctgtccgccgtaaaccggaatgttcacctgtttgagcaggtacggaattccgccgatgtggtcttcgtgtccgtgcgtaataaaaagacctttgattttttcttcgtttttgactaaataagtgtagtcagggatgacatagtcgattccgagaagctcgtcttccggaaacttaatccccgcatcgatgagcacgatctcgtcctggaactggaccccgtacgtgtttttgccgatttccccaagtcctccaagggcaaatacagccgtttggtcatttttaacaaatttcattcattcataactccaatactttaaaattttcgctttgcttttcatattctaaaaaagcgccttcaacttgctgtataaactcaatattgtagttgtatggttttaatttagatctgacttcacgttcagattgagcttccacaaaaattgaatctgttttttcacgaacaggtacttcgtcattgcttgcttgataaaataccttatagatcatccaaatctctccttaactgccgattgttagactcatctttctattatattcgaaattggctcataagaaaagcgcctgagaaaaaaaggaccattccacacgagtgaaggtccttttaggcaatcgactttctgcgcatcatgccattcagctgtttttttaattttttccgcagacggcgaagcatacgggttcctcctttctctgacttgtctgagtaacttccgtatctctttagttctattatatgatgaatccgtctattgttacatggatattattggcatgttgatttagttttgattttggagtgaaaaggttttcttgcgtacgcagtttttgtatgatggtacaggagaaccatcaatcatactagctaagggagaaggattcactgccatggataaaaagctgattttctttgatattgacggaacgatttatgatcacgataaacgcattcccgccaccgcaaaacaggccgtctccgatttgaaagcgcacggccatcatgttttcatcgcgtcaggccgtgcgccgtttatggtcaggcctgttcttgaagaactgggcatcgattcttttgtctcttataacggacaatatgtcgtttttgaaggagaggtcatttataaaaatcccattgccgagcagtcgttagaagcgctgcttgcgcattcggacagctgcggccaccccctcgtcttcatgggggaagaggggatgcgctctacaactgccgcccatccgttcgtcgatgaagggatcggcagcttaaaagtcaatccgccggaagaggatcgtacctactttaagggcagggacattttccaggtcctcttgttctgcacgcaagacgaggaagagcggtacagccggtttaaagagtttgatctcgtccgctggcacgagcgctccacagatgtgctgccttcaggcggatcgaaagcggaaggaatcaaaaaagtcattgaaaaacttccgttcgacagagaggatacttatgcgttcggggacggtctgaacgacctgcagatgatcgaatttgcgggaaccggagtagcgatgggcaacgctgtgcccgagctgaaaaaaatagccgactttatcacaaagcccgtcgatgaagacggcattcaatacgcggtggaagcgctcggacttttgaaatcataaaaaacggatcagaaatgatccgttttttttatgactttacctgcctacaggcgttgcattttcaggttgtttcagcgggttttctttgtcgatgtggtcgtaaaacataatgccgttcaaatgatcgatctcatgctggaatacgatcgccggatatccttttaagcggatgtcgatgttttcgccttcaagcgtcgttcctttgactcggatccgttcatagcgcggaacatatccgggaatcggctcgtcgacggacaggcagccctcgccgcttgtcaaatagcatctttgaacagagtggctgacgatcttcggattgaaaagcgcatagctgtatagtgtcccgtcttcgctttcggcatgaacggcgatcattcgtttattgatattaatttgcggagcggctagaccgacaccaggacgaaggttgtactttttagcgatttcggggtcctggctgtttttgacaaactcgatcatttcgctcagctgtttgatttcttcttcgcttgctggcaattgaacttcttcggcgacggttctcaaagcaggatgaccgtcgcggacaatgttttccattgtgatcaacatcttcactcccaacgattcattatgtaaagtatagcggatcttgctctttccgcgcaatctctgtgcatgataaaatgaccagcctaaaggaggctggtcatgacggatccatcaggggctagcaacctaaataagcggcccctacaataatcagcaaaataaagagaacgacgatcaaagcgaatgtgcggccgtagccgtatccataaccgccgccgtacccgtatccagggcagcaataaccgtacatataaagacctcctccgttattttacgcacagccttttcttttttagtaggcatggcgtctaatataaactatgtaaaagtccaaaggttgtatagtcgaatgcccagcttcaaggaattttccctaaaggtttggtctaaaagcgaaggcggttgcataccgatctgatatcggcttgtccatatctttagacttctgttgtcaaacaagcgaattcattttatagtggaatttgtcgagattgggggaagttcatagtgaaattttcaaatatgcgggtgcccgcaggcatcgtcgttttttgcacggctgcatttgtattaacaggctgtctctggaaggatcctgtcgagtcgtttcacggctcgctggagaagatcgtggaattggaagagccttttaaacaagagcagggttcacttaaaagtcttgaaaaagccgaatcgaagctttacgaggaaatgatcaggctcaatatggatgattttgaccggatcgctgcgctctccgacaaagcgctgaagacagccggcaaacgcgagaagcacttgaattctgagaaagaaagcatagatgaagcaaagcaggagtttgaagcaaataaagcgtcggcagaaaaaatcgatgatcagaaggtcaggaaaaaggctgagaacgctgcatcttatatggaaaagcgctacaaagcatacgactctctttatggcgcctatcaaaacgcaatcggccttgacaaagagctgtacaagctgctcaaaaataaagggcttaaactggatgaccttgaggagcagctgaaaaaaatcaatcaatcgtatgacaaagtgctgaaagaaagcaagcatttcaatgagtatacaaaggactacaacaaagccagaaaagatttttacaaggctgcggggtttgagatgaaagagggctgaattgttcagccctctttttttcgacaaaatctgtatcgctattgtaatacagattgttatctatactagaacagtttgcagcagtcttgacaacgctgaaacagaaatccgataaagcgaatacatttattgaaattcaggaatgaaaacgattgacgatcatgatcgactggtgtaaacttagccttggtggaacttgttgtattagtttgtcataaactataagtgatacagttttagaacgcgttgtgctgtccttacataaaagtttcgacaaccatcaaagcggctaataagaaataaatatgagttgcgcccgtcaatttaggacaccctaattctgtatgtataagggatacacgtctatgactgtcaaaagaaaggaagaggtgactttatatggctgcaaaaacgaaaaaagcaatcgttgatagcaaaaagcaattcgatgccattaaaaagcagttcgaaacgtttcaaattttgaatgaagaaggcgaagtcgttaatgaagcggcaatgccggatctatctgatgatcaattaaaagaattaatgcgccgcatggtgtatacacgcattttggatcagcgttctatttctttgaacagacaaggccgccttggcttctacgcgccgactgccggtcaggaagcttctcaaattgctacgcatttcgcgcttgaaaaagaagacttcgttcttccgggctaccgtgatgttccgcagctgatctggcacggacttccgctttatcaagcattcttgttctctcgcggacacttccgcggcaaccaaatgcctgacgatgtcaatgcgctttcaccgcaaattattattggtgcgcaatacatccaaacggctggcgttgcactcggcttgaaaaaacgcggcaaacaggctgtggcgatcacctatactggagacggcggtgcttcccaaggtgacttctacgaaggaatcaactttgccggtgcgtataaagctccagctattttcgttgttcaaaacaaccgctatgcgatttcaacacctgttgaaaagcaatcagcagctcaaacaatcgcccaaaaagctgcggctgcaggtatcgtcggcgttcaagtagacggaatggatgcccttgctgtatacgctgcgacacgcgaagcacgcgagcgcgctgtaaacggcgaaggccctaccctgatcgaaacgctttgcttccgttacggtcctcatactatggccggtgacgatccgacaaaataccgtacaaaagaaatcgagaatgagtgggagcagaaagatccgcttgtccgtttccgcaagttcttggaaaacaaaggcctttggtctgaagaagaagaaaacaaggtaattgaagaagcgaaagaagaaatcaagcaggcgatcaaaaaagctgacgaagagccgaagcaaaaagtgaccgacctgatcgacattatgtatgaagagcttccttacaaccttgtagaacaaaaggaaatttataaagagaaggagtcgaagtaagccatggcgcaaatgacaatgattcaagcaatcactgatgcgttacgcacagaactgaaaaatgacgaaaatgtcttagttttcggagaagacgtcggtgttaacggcggcgtgttccgtgcgactgaaggattgcaaaaagagtttggtgaggatcgcgtatttgacactcctcttgctgaatctggtatcggcggccttgcactcggcttaggcttacaaggcttccgtcctgtaatggaaattcaatttttcggctttgtgtatgaagtgatggactctgtttccggacaaatggcacggatgcgctaccgttccggcggccgctggaattctccggtgacaatccgttctccgttcggcggcggtgttcatacgcctgaacttcacgcggacagcttggaaggactcgttgcacagcagcctggacttaaagtcgttattccttcaactccgtacgatgctaaaggacttttaatctctgcgatccgcgataacgatccggttgtcttccttgagcacatgaaactttaccgttcattccgccaggaagttcctgaagaggaatacacaattgaaatcggcaaagccgatgtgaaacgcgaaggaaaagacctttccatcatcacatacggagcgatggttcacgagtcattaaaagcggcggaagagcttgaaaaagaaggcgtatctgctgaggttgtcgaccttcgcacagtcagcccgcttgacattgacacgatcatcgcgtctgtagaaaaaacaggccgcgcaatcgtcgttcaagaggcgcaaaaacaggctggagtagctgcaaacgttgttgccgaaatcaacgaccgcgcgattttgagcctcgaagctccagtgcttcgcgtcactgctcctgatactgtattcgcattctctcaagctgaaagcgtatggcttccaaaccataaagacgtgcttgaaactgcgaaaaaagtattggaattttaattagatctgaacaattcaaaagggaaaagctgatatcagcctttttcccttcatgcatttccacagtcagtcggagaaactgtagccgtgtactgacagtcggcctaaacaagaggccgaccactatatcaactacgtaataatcttaggaggtcgagaactgtggcatttgaatttaaacttccggatatcggggaaggaatccacgaaggcgaaatcgtgaaatggttcgtcaagccaaacgacgaggtaaacgaagatgacgttttggcagaggtacaaaacgataaagcagttgtagaaattccttcacctgttaaaggaaaagtattagaattaaaagttgaagagggaacagtcgcaaccgttgggcagacgatcatcacatttgatgcaccaggttacgaagatcttcaattcaaaggcgacgaatcaggcgaagcgaaagcggaagaagctgaaaaacaagaaactgatgcacctgcagaagcagcggaagcaaacgagcaagcggatgcagatccgaataagcgcgtcattgcaatgccatctgttcgcaagtatgcccgcgaaaaaggcgttgatatcgtgaatgtttcaggttccggcaaaaacggccgcgttctgaaagaagatatcgacagcttcttaaacggaggaactgccggagacgctaaggctgctcaagctgaagagaaagcagaacctgctgcacagcaacctgcagctgcggttcaagtgcctgaaggcgaattccctgaaactcgcgagaaaatgagcggaatccgcaaagccattgcaaaagctatggtcaactcaaaacataccgctccacacgttacattaatggacgaagtcgatgtgacaaaccttgtcgctcaccgcaagcagtttaaacaagttgcggctgatcaaggaattaagctgacttacctgccttacgtggtaaaagctttgacatcagctctgaaaaaatatccagtcctgaatacatcaattgacgacaatacagatgaagtgattcagaagcactactacaacatcggtattgcggcagacactgaaaaaggcctgcttgtgccggttgttaaaaatgcggaccgcaaagcgatttttgagatttcaaacgaaatcaacgagcttgcgacaaaagcacgcgaaggcaaacttgctcctgctgaaatgaaaggcgcttcttgcacaattacgaatatcggctctgccggcggtcaatggttcacaccggttatcaaccatccggaagttgcgatccttggaatcggccgcatcgctgagaaagctgtcgttcgtgacggcgaaatcgtcgctgcacctgttctggctctttctctaagctttgaccaccgtatgatcgacggcgcaactgcacaaaacgcgttgaatcacatcaagcgtttgctgaacgatccacaattaattttaatggaggcgtaatgtaatggtagtaggagatttccctattgaaacagatactcttgtcattggtgcgggacctggcggctatgtagctgccatccgcgctgctcagcttggacaaaaagtaacaatcgtcgaaaaaggcaatcttggaggcgtatgtctgaatgtcggatgtatcccttcaaaagcgcttatcaatgcaggccaccgctatgagaatgcgaagcattctgaagagatggggatcactgctgaaaacgtaaaagttgactttacaaaggttcaagaatggaaagcctctgtcgttaataagcttaccggcggtgttgaaggccttctgaaaggaaacaaagtcgacatcgtaaaaggcgaagcatactttgtagacagcaattctgtacgcgtgatggatgagaactcagctcagacttacacgttcaaaaatgcgatcattgcaacaggttctcgccctatcgaattgccaaacttcaaatatagcgaccgcgtactgaattcaacaggcgcacttgcactgaaagaaattcctaagaagctcgttgtcatcggcggcggctacatcggaacagagctcggtactgcatatgcaaacttcggtactgaagttgtcattcttgaaggcggagaagaaatccttccaggatttgagaagcaaatgagctctcttgtgaaacgcaacctgaagaaaaaaggcaacgttgaaatccatacaaaagcaatggctaaaggcgtagaagaaaaagctgacggcgtaaccgttacgttcgaagtgaaaggcgaagagcaaacgatcgatgcggactacgtacttgtcactgtcggccgcgttgcaaacacggacgagctcggacttgaacaagtcggcgtcgaaatgacggaccgcggcatcatcaaaacggacaaacaatgccgtacaaacattccgaacatctatgcgatcggtgacatcatcgaaggtcctccgcttgcgcataaagcttcttatgaaggtaaaattgctgctgaagcgattgccggagaagctgcggaaatcgactatcttggaattcctgcggtcgtattctctgagcctgaacttgcatctgtaggctacactgaagcacaggctaaagaagaaggtctttcagtgactgcagccaaattcccgtttgcagcaaacggacgtgcgctgtcattaaacgaaactgacggtttccttaaacttgtaacacgcaaagaagacggcttagtcatcggtgcacaaatcgccggagcaagcgcttctgacatgatttctgagctgagcttggcaatcgaagcaggaatgactgctgaagatatcgcaatgacaatccacgctcaccctacattgggagaaatcacaatggaagctgcagaagttgccatcggcatgccgatccacgttgtaaaataaatcaaaaaccccctctgcagggggtttttttatgttttctcttattcgggtgcatgacaaattgcccgggatacatgtgaagcaagaaaaaaaatccccttgcacatgcacagggggcttttaatgtttcaattccttttgaagaagccttacaattttatctttatcttttatttttccttcaattttaaccagtactttcttatcattaacaagcagcaagcttggaaagactttaacctctttttccactcgcctttatcatgtgaaatttccatacttgaaacctgttcgggaaattctttttttaaatccaaaagcgcatcataataagccacttcctgctccatatgctcgtcatcggaaaaaaagatgagcttgaggtggcggtgattggtgctttgatgctgctggtcaggcatgatgtgagataaagaacatccactcgtacaaaaaaaggaaacaaattgcggcggtgaatatcgctcgaaaccacatgacgtctcttcacctctctatataatgcaagccgattttcctgttcgattagtaaacaattcctattttatcatgataattgaaataatttttcgttgttacccatttgttacacaattgataactgccgttttatttatgagatgttgtaggttgagcgtgtttgatgggtacatcgtcggaatcagccgggaagcgttctgcttataccttaagcaggaatacatatataacatgatggcctttttttagaaaaagagcaaaaatgatttaaatatgttatacaatttaccgttgacaatattaatgtgacataatattataggggtaacaaatttaaacgcttccattttgaaaagaaaaggggaatgaaagatgggcacgatcgtttgtcaagactgcaatgaaaccattcagcattttgaagatgagaaagtgacgatactttacggaacgtgcggacagtgcaactgccatcttaaagaggaagaatagaaaaaagcatgcggccatttacagtgccgcatgcttttatgtttttacaggattgcctgctgttctttaataacgcggatcatatggagggtgtcatcttccggtccctgaacaggcagcccagcttccaggttcttttcgatgtagttgatattatcctcggtaatgatctcgcccggaatgaagatcggtatccctggcggataaaccataacaaactcggcaatcattctgccagctgcttttttgaacggaatgatctccgtgtttgcgtaaaaagcgtcacgcggtgtcatcgcaagcgccggaatgtttggcagaagcacttcaggcttgcgtctgttttccgcagatgaagcggcctgttgagcaatctcggttaatcctttaattaacgcatctgcatcctctttccggtctcccggtgtaaaaatgcacaggatgttgtataagtcagaaagctccacttcgatttggcatgactcgcgcagccatttttccacatcatgaccggtcaggccgaggtctttcacagatatgatcaacttggttggatcatagtcaaaagccgctttggagccgaggatttccctcccgacgcatgaaatcccgttgatatcattgatgcgttcccttgtttcgttggcgagcttaatcgtttgttcgatcagttcgtgtccctctgtggctaagcgttttctggcgacatcaagcgaagcgagcaatagataggaggtcgatgtcgtcgtcagcatgcttaaaatcgattgcaccctttcctttgaaaccagaccttctttcatattgagaatcgaactttgtgtaagggatcctccgagcttatgaacgctcgtcgccgccatatccgctccggcctgcattgccgaaagaggcagatcttcatggaagtggatatgaacgccgtgcgcctcgtcaactagcaccgggacatgaaaagaatgagcaagctcgacgatgctttttaagtctgcagctatgccgaaataagtcgggttgatgacgagcagtccttttgcgtcaggatgctcaagcagcgcttttttcgctgattcaggggtgatcccgtgtgaaatccccagctcatcgtcgatttccggatggatgaagatcggtacggcgcctgagaagacgatcgctgacatcaccgatttatgaacatttctcgggacgatgattttgtctccgggtccgcatacggccatgaccatcgtcatgatggcgccgctcgttccctggacggaaaagaacgtgtagtcggctccgaatgcttcagccgccagatcctgcgcctgtttgattattcctttcggcgcgtgcagatcgtcgagaggctcgatgttgattaaatctatgcttaatgcattttctccgataaactccctgaattcggggtccatcccagagccttttttgtgccccggtatatggaactggatcgggtttttgccggcgtgtttttttaatccggtatataggggtgtttcgtgctgcaacaattgttttcccaccttcatgataaacctgctatttccttaaagactaatctttatcaaaaatcgttgagttattttgcgtttttgcttgatggcataaaacaaatgaattatattatgttcttgaaagaatgtaaagaacattttatcatctttcctgtaaggggcttctaggtccctatggatagtcgcaaaaaagagaaccaatactaaagctatacaagccgtcaggctgaactgcacaaggagatgaaccaaatggaagaagggtaccaatatccgatgaatgaagactggagcacagaggaagcgatagacgtcatatcgttttttcaggcggttgagctcgcttatgaaaaaggcgtaaagcgagacgtgctgatgagtgcttaccgccgctttaaagaaatcgttccgggaaaagcggaggaaaaaaagctgtgcagccagtttgaagaagcgagcgactactctccgtatcaagcagtcaaaaaagcaaaggaacaaacggaagatacgaaaattaaaatgtaatgagaaaatccaaaacaaaaagggatggcaccaccggccatccctttttaattataccgatactttctgcgtcaggcggtaaaggaaggcgagcttttcaaaagccgcttcgatttcggatagaaacgcctcttcactcatatgcagcacctcgtctttagaaagctgaataccgcaaagcgcttctgctttcttcacgttgacgagccgttcaaacaggttttccagatctttttcattcatctcagactgtctcttggcatccggtttcgtatgatcggccgaccagaaaaagcgacttggaatgctgctctcaatatccggcagatgcttcttaaacagctggccgtattcctgcttgagaggggactcatagatcaatgcaaaccatacgaaaacgtgggtttcccataaaccaatttggaaatgcggcagctttttatagccgcgcttattgtttgcgaaagcaacccagctgtcgtccggcggattgactgagcggcgcgcgtgcttggcgacgtggacaaacatttcgtctcctgtcaaagcggacagaacaggcgcaaaatgatcgccgagcccttgaagtttcgggcgcactgtgtctttcagaacgctcatccgcgcatctaaaccttctattgtaaatgtacgaaaatcctcttcagtaaaacgcagactgctcattgtgttcctccttgtccaatcagtaaagatattgtatcacagtcggcttttcaaacaaaaaattacgtttcgccttgcggaatttggggaatcgttaggtaaacacacaatttttagaataacgttgcgaatgtttgagcacttcatacgatatgaataagaaattaatatatatcacgcttaggacttaaagccagaaggattccttttgaaatcaattttctctggagggggcgtagggcacatgaaaccaatagtaaaacaaggatgaaagaggaaaaagacaatcgggccgctgtttggaggcttgaggtcgattatgaacttgcaacgcttttgaagctatggaaaaaaaggatgaaacccaaatcgagttgagcaagcgcaaactggaacgactcagaaaagaatggatcagattacatggttgaaaccataataaaaacgaaccgtttgagaggttcgtttttatctgggctgcctggatatttgtcatttttcttgatttttcccggttaatatcagtatgctatgaataaatcaacaggtatacatagaaaagaggtagtgtgatgacaaactggaaggaaatcgatcgcctggcgaaaagctgggtgaaagaagctggtcagagaattaagcaatcaatgaaagaaaagatgacgattgaaacgaaatcgaatccaaatgaccttgtcacaaacattgacaaggaaacagagcgttttttcattgaaaaaattcaatcggtttttccggatcatcatattcttggcgaagaaggccaaggggacaagctcacatctttggacggcgtcgtttggatcatcgatccgatcgatggtacgatgaactttattcatcaaaaacgcaattttgcgatttcaatcggcatttttgaaaacggaaaaggcaaaatcggcttgatttatgatgtaactcacgatgagctttatcatgcttttcaaggcgagggtgcttacataaacaatacaaagctcggcaagatgaaagaagtgccgcttgaggaatcgattctggccatcaatgcgacatggatcaccgagaacagacggatcgatccaagcgtattatccccgcttgtcaggcgcgtcagagggacccgttcatacggttcagcggctttggaactcgcttatgtagcggcaggcagaatggatgtgtatgtgacgatgaggctcgctccttgggattacgctgccggctgcattctgcttgacgaggtcggcggaacatatacaaccattgacgggaaaccgctcaattttcttgaaaaccacagcatcgtagccggcaatccggcagctcaccgggcgattttcgacgaatatttgccgcatgaatagcaggtctttctcttcttctgatctcgccttttttgaagagctggccgaagcgagccccgggtgggtgaaggaagagcttgacggaagcagcctggaacgctatatgagtgcttatgcgatgtataacggtgaatggctcgtgtgggaagacgggggactgccggcggctctcagctttcatctcgaatgggcgccttctaatggcaagccttggctcggaacgcttcttgtccatcccgatttccgcaaaaaaggccgggcaaaagaagtgatcaaaacgatcggaaaacgcttgagagaaaaggggcataaagcgttgtttgcggcagtgccttatgagaaagacgaatggttgaacatgctggcccgttcaggatttgaacagctgaaaacggaaaaagatgaaaagggaaaacgatatttgatcatggttttgccccttcccttgaggctgcaatgagacttgtttaacaacaggtctctttttttatgattttatgaaacaatatgcagcgtcgtttgtctataaagatgaggccttaatttgatgtaaaggaattgtggaaattgatcgaactatttagtgattatgtgctccattttgaacgttattttgttttaagcagacagagcatgcttgtcattcagtggtgtgtgacaggccttgtccttttgtatgccgtgtcatttcatccgaaagtgtgcaggcggcgcctctttttttatgcaggcatcgttctcaggctgatactggttggcgccctttcgtttgaattggctcaccaaatgaaagccgctgagttttcaaacctgtacatagacgaacaagatgcgcttctgccttttatgcagtttttgctgttcggctatattttgcttgtctcttttcattatatgatgacactcgcggaaaaagggggcaaggggctgttttttgcatttgacattgcggtgatggcgatgccgcttttccaatcgctgttcagctttgccgcctatttgaaggaatttggagcggaggagcttgaagaattgccgctcgttctgttgttgattgtcggaataccgggactgatgatctgcttgttttttcagctttattggaaaagaaaccgttacgttctccttttgattttttatattgtgacgatcggcggtttcttcatcaaaaagcttggatacgaattttttccgctgaacgtattgacaatgatcggttttcttatgacatatcacttgctgaatgactcgagaaagcctttgttgatggtgaagcgtgttttagccgcgggcaccgccgtatttttcacgcttcacctcaatcctttttacaatttggcggatgccgcttttacaatctcacacccggaggtttcagacgtggttgatgccaattttcggcctgtttcggttaaagaagcgaagcagactgtcagctcgttttttccgacagagagctttatctatttgtcagctaccaaccaggattttcataacgtttatcatttcaaaacgaaagattacgatgcggacgttgacggctggacgggaatgatcaccaattatcacaatcaaaaaaagcctagcgggaatatcctgtccggtcaggcatatatcaagcggtcgaagcaatttctaagggaacacggccgcgaacttgacaaacaaatcaaggcaaaggtcagccgtgatgacggcgaagctactgttgaattttaccgtgaatgcgaggatcctgaattaagcacaatgtggtttacttggcggaaggagactctgatgggattccatgaggacgcgtctgtttacagcttagaaagcgtgaaccaagcccgcgtttctggtgaggatatcgagcggggagttgaagccgtctatcgtaagctgggcatacccgtctcatcttatcggctgacagatattgatttattattcccattcagcctcaactcggcatccatcaacataaagacaagtgacggaatggggatggagttccaccctgtaacaggtgcattaacggctatttcgatcaaatctgaaagcgccttgccttatcgcggacaagagcttgaaaaacgcttgctttcattatttgatcaagacatttccaatctgaaaagggtggagttagaaaaggatctgatagaatttcagaaaaaagaaagcgatgctgtgttaaatacggtctggaccatgacgaaacatgaagagggagcttatctgacggtgagaaaaaactttcaaaaagcagatgaaaaacccccctacacgtatgcagacggggaaaaagcttttcagaaagtgtctgaacgctatcaaaaagggctggtctatcataaacggacgaagcttgtaatcgtttcagacggggatcaaaagagccgttatgcgtggcttgtcatcatccagccgttcggctcaaatgaacatgacgcatacttggttgatgccgagacagatgaggtgaaacattttgatgacaaatgaagaaaaaaaagcggtgtttatcgatttgtatgagctctatcaagaaagtgaactggaagaggaaacgatgatctggatgaaagagcatgagcagttttttcaggatcaggctgaagcggcagcagccgggaatagagagctccccggcatgcaaaaaacagatgatcatcagaagctccttcatatcaagatttttgtttactcgttatatggtgctttcctgctcctatcgatttggatgacggtgtggtttttttctaaatggctcacaataaaaaacagacgattgaagaactgtacagggaatattatcatgacatcatgtactatttgtacaggcgaacccatcagcttgagacggcgaaagacctggcgcaggatacgtttctaaaagcttttgcgggcctgaagtctttcaggggccattcctcgatcaaaacatggctgtatacgatcgcacatcatacgtttatcaactggtacagaaaagataaaaaaatccaattttccgacgtggcggcctgcggcgatatggaacagcacacatttgaaatgcctgagcgccatttggcaaacgccataatgcaggaagagctgaaacatcacattgaccggctgaaagaagattaccagactgtcctcattttaagagagtttcaagagctgtcatacgaggaaatagcggaagtgctgaattggaaactgtcaaaggtaaaaaccaatcttcaccgggcccgcctggagctgaaaaaaagcttggaaggcagggaggtttaacaatatgaaatgccatcttgtaagagatttactgcctttatacatagaaggcgattgcagccgcaaaacggaacgtttggttgccgcacacattaagacatgcgaggattgccgggaaatgtacgacatgatgagggaacctgtcaattttcatgatgacggaggattgccaaaggaagcagaagaagcggaagaacaaaagttcaggaaagcgtattatcaaaggctgattctcaaaggggcagcgctgtttggcgggggctacttgctgatgcttttgatttacttattctttttataagaactggcggcaaccagccgccggttttttgatataaaatcaaaagccccttcattcggtaggggcttctttcctattcaagcaggcctttttcgcgcattctttttttcagtgtaaaaccgcttcccataatgacgatcagaatcgcgatggcgattgcgacgccggctgcgcttttttcggcgactgcaactccgatcatcatgatgctgatcactgcagcaagtgcgaataataagaaaatccatttgatttgtttcactgtttttccatccccttagtatgaagtctactgttagtttacagaaaatcgcgctggatagaaaggggcaatgggagctgaaaatttgaaacaaattgaaataactttgtttgtcagttataatatgaaagattatctgaatttttttaggagatgaaaatgtgaaacttcgagaagatcttcgcaatatcgctattatcgcccacgttgaccatggaaaaacgacgctggtggatcagctcctccatcaggccggtacattccgtgcaaatgaaaacgtggctgagcgcgccatggattccaatgatttggaaagagagcgcggcattacgattttagcgaaaaatacggcgattaattataaagatacacgcattaatattttggatactccgggacacgcagatttcggcggggaagttgaacggatcatgaaaatggtcgacggcgttctgcttgttgtcgacgcttatgaaggctgcatgccgcaaacccgctttgtgctgaaaaaagcacttgagcaaaacttgacgccgatcgttgttgtcaataagatcgaccgcgattttgcccgtcctgaagaggtcgttgacgaagtgctcgatttgtttatcgagctagatgcaaatgaagaacagcttgaattcccggttgtttacgcttctgcgatcaacggcaccgcgtcagcagatccgaagcagcaggatgaaaacatggaggctttattcgaagcgattgtcaaccatattccttgtcctgtcgataaccatgaggagcctttgcagttccaggtggctctgcttgactacaatgattatgtcggccgtatcggaatcggacgcgtgttcagaggaacgatgaaggtcggacagcaagttgctttaatgaagcttgacggttctgtcaagccgttccgcgtcacgaaaatcttcggtttccagggcttgaagagagtcgagattgaagaagcgaaagccggcgaccttgtcgctgtatcaggaatggaagacatcaatgtcggagaaaccgtctgcccgattgagcatcaagaggcgcttccggttcttcgcattgacgaaccgacgcttcaaatgacgtttgcggttaacaacagtccttttgccggtcgcgaaggaaaatatgtcacggccaggaagattgaagagcggcttgaacagcagctgcagacagatgtcagccttcgagtcgatccgacgccatctcctgacgcatggatcgtgtcaggacgcggtgagctgcatttgtcgattttaatcgaaaacatgcgccgcgaaggctttgaactgcaagtatcgaagccggaagtcatcattaaagaaatcgacggcgttcgctgtgagcctgttgaacgcgtacaaatcgatgtgcctgaagagcataccggatctgtaatggaatcaatgggtgcgcgcaaaggtgaaatgatcgacatgatcaataacggaaacgggcaagtccgcctgattttcaatgtcccttcacgcggattaataggctactcaaccgaattcctttcccttacacgcggtttcgggattttaaatcatacgtttgacagctatcagccggttgagccggggcaagtcggcgggcgccgccaaggcgtgcttgtctcaatggataccgggaaagcttcagcctacggcattcaaggcgttgaagagcgcggcgtgatttttgtcgagccgggcacagaagtatatgaaggcatgatcgtcggcgagcataaccgtgaaaacgaccttgtcgtcaacatcaacaaaatgaagcagcagacaaacgtgcgctcagcgacgaaagatcagacggtcagcatgaaaaaaccgcgtatcatgtcgcttgaagaatcgcttgaatacttgaacgaggatgagtactgcgaagtcacacctgaatccatcagattgagaaagaaaattctcgacaaaaacgaacgcgaaaaagcagcgaaaaagaaaaagctggcaggattgtcgtaatatttgcagaacctaaaaaaagagcaacccaactaagcaaaggggaggggaatctttttgactgatgtaagtgaacggctgtcgttttttgccgctctctataaagtggaccagaatcccgaggcgggaatgtggtggctttatgccaccatcttcgtcctgtctgcggtcgtctttaaactgggtttcgccaaacggctgccgctgttgaaaacggcgatcatttacttttttctggcattaggctgtacgtttttaacttttttcggcgtttttctgccggttggagaagggctgatcgtagctgttttaatcctttcgatttataaaatccgcctgcaccgttcgaaaaaagagcagacgggggcgaatacgtagaaaagacatagccgaagaaggctatgtcttttctgtatccgcgagaaaatccgccgttaataagtcccgaaacaaagccctggcaaaaaggatctcatcaaatgaataccggcttaaaaatcgtttaaatctttgttcgattttatcgtgctcccgctggtgaaggtgatggatgcttctccctttatggcttaaacggaagtagatttcttttttattatcgctgagctgtgttttgctgacgagccctttttcggtcagctttgcggtgatccttgagaccgtcgcttttgaaaattccatcttctcggaaatcgaggtgacgttgatcggttcgtggtcgccaatgcagctgatcgtatggatgtcagacatattgagtctcatttcagctccgaattcgcgctccatctttttcatttctgcggagatgcgctctttcatgacggtttcttgctgctcctgctgatgaatgagcctgatgtacaggtaaaatatttcttgtttggcgtgtgttaaatgttccatgcagaaaaccggctcctttaatcgattattctgctttgattataccattttgttacgcgtgaaacaaaatggttaaacagattgcagattaagcgtttccgcaccagcggcggattccatcggcaatcaattgctccgcgttttccagggattcgtccacagcccaggctatgtggccgtcggggcggatcagggctgcttttacgccattccattcaggccgtccgtcaatcgctttcagttgcatgagccggacatgaggcagtctggaaaattccttcggttcttttccgaatgctgctaataagaaacgtccatcgcggtgaaatgtgtaaagtcgtttgacagtaccatctgaaagggtcaggtcaatatcgggcaggcgtttaccgttcagctcatgttcaggcattttttcatctgcttcatactgcacgctgagcgctgcaatttgttctgccagatagcgattgacgtctgaaaatccgagtatgccggatagcaattcacggaggtacagcccttcacgcgtaaaatcaatcagctttgtttggatttgtgtattgacgatcagcgctttgccgacagggtgtctttcatgatggtaactgtcaagcagccagccgggacaccgtccgttgatctttgctgcgagcttccagccaaggttcatcgcatcttgaagcccgacatttaaaccttgcccacctgcgggaaaatgtatatgcgcggcatctccagctaaaaaaattctgccggaacggtaatgctccgccaacttgctggcatttccgaagcgggacatccaaaccgggctgttaattccaaagtccgtaccgcaaatgcggctgagttctttttttaattcttccagtgtgacgggctcgtgaagcaaagcttggggcatatgcggcgccgttatgaggacgcggaaaatgccgccgtctaaaggcacgatcacaacgccgccttcacggttcacgcaagtatagaaatgcgattccggcggattttcaagcgacacatcaccaagcattgcggtgatattcgcatcagttccggaaaaagcgatgcgcgcctgcttgcggatggtacttccggccccgtcggcaccgacgatataggaagcggttagtaaggacaggccgtccggaccctggacgacaagctcggcggtgtcttcatgctcgcggacagcgagaacttcatgaccgcgaaggatgcagacaccgagattcctcgcgtgttcctcaagcaccttctcagtttcgtactgggggatgaacagtgtaaaattggctcgcgtgtcaagcgcagaaaaatccaatccagtcttcagacctgcaaagtgccccgaaccgagcggcttgccaatttccttaaatcgttctccaagccccctcatttcaagtatttcgattgagcgaggatgcagtgtgagcgcttttgagaatggagaaggctcattcagccgttcgacaatacaggtccggacgccggccaaagccagctcggaagccgtcagcagaccgacggggccgccgcctgcaatcaatacatcaaaatccatgatcaatcactccttttttgttgcatatgaaacaattttaaaatactacaaatgaaaatttttatcaactatattctgttattttgttacttatgtaacaaaaagagataaaaaaagcatggtgcttgtccatgcttttatgacttgatctgctctttatcttttctgtgcggatataacttaaaacggccggttttcatccggttttcggttttgattttaattctttcgctgcattcatggcacatataggtatgtatcggccggtttcggagacgtttggcaatgagtgtgtcgtcatcgattttttcgattttgtcacacaatgaacactttaccctcacttgattcacctcgcttacgatccattataccttaatcgatctgacaaataaattttctctattagaaaaaaggaaaaagcctataccgtcaagaaaacagtggcacaggctttttaaagttattgctgccgatttttcatatgtttgttcgattgattattctgcttcttttcgagttgtttttggtttctctcattcagctggtcgttgttggattttgtaggatttgtttgctggttgtctgttgcgtcgttcggcacttcaggaaggacgcgcccgacaatggctgccagctcatcgagaatccctttgacaggacgtcccgcttgaatttctctgcccattgcccgcaggcggtttacagtgtcgggatccgcgacaacggcggcgtttgctccataagggtcattctgcagagcttcagcgaccgaatacttaatggattcgactttgctgcgttccaaattgtctttcacatcaattccgacgacggcgagcctgcctagcacgacggcggtcgcatcattgacacccggaacgctttcggtgatctttacaaggcgccgtgagatggcttgtccgtcttcgcggttcaccggctcctgggcgctgttttttacatgaatcggtctgttgccgggaagctcatttgcttcatttcgggcattattttgaatgccgcaggctgaaagcagcataacggtttgaattaggatcaaaaaaaagattcgcacttgaggttgcctccttaaaaatgctttcattaatttttattgttgaattaaccttctatctttattcacaaaaacatatattttagcgggcgctccatcagtttttaacccaaatgaaaataaaaggctaaaaatcctgatcaggaggcggaagattgagtaaaatttatgtgctagatacgaatgtgttattgcaggatccgaattcaatcttttcttttgaagataacgaggtcgtcatcccggctgtcgtattggaggaagtcgattcaaagaaacgttacatggatgaaattgggaggaatgcaaggcgcgtatctaaattgatagatgatttgcgtttaaaaggaaagctgtatgaaaatgttcctctccctaacggaggaagcttgagaatcgagcttaaccatcgctcttttcagcagcttcaggaaatctttatcgaaaaaactagcgacaaccggattttagccgtagcgaaaaacctcagccttgaagaagaaacgaaagaaggcggcagaccggttattcttgtcagcaaagatatgctgatccgcgtcaaagccgatgccatcgggttgatgtcagaggattttttgcacgacagggttgtcgacaatgatgatatatacagcggttatacggacgtgtacattcgctcggatcagatgaattcattttttgaacatcattatttgcagcttgacgaaatcagcgaggagccgctgtgtccgaaccagtttgtcgtcatgaaggacgcgctcggcggatcatcttctgcggttggaatcgtagatcaaagcggaaaagccgttaaaaagcttgtttttgaccaggagcaggtttggggcatccgttcccgaaacgtacagcagacgatggcgttggaacttctattaagacaagatattccgcttgtcaccctgatcggaaaagccggcacaggaaaaacactgcttgcgctggcagccggattgctgcagacagaggatctggggaattttaaaaaacttgttgtcacaaggccgatcgttcctgtcggaaaagatctcggctatcttccgggtgaaaaagaagaaaaacttcgaccgtgggtccagcctatttttgataacctggaatacttgttcaatgcaaaaaaaccgggggaacttgatgatattttggcggggatgggctccattcaagtcgaagcccttacttatataaggggcagaagcattcccgaccaattcatcatcattgatgaggcccaaaatctgaccaagcatgaagtcaaaacgcttctgacacgcgtcggggaaggcagcaaaatcgtattgatgggagataccgaacagatcgatcatccttatttggatgcgatgaacaacggcctggcctatgtagtagagcgctttaaagatcaaaaaatttccggaaacgtgaagcttttaaaaggagagcgctcccggcttgcaaggcttgcagcagacctgctgtaaataaaaaaaccgggcttttaacccgggtttcaacttgcatggcacgccggccgggtcgtctgcaaaagccgaaaacccggccgggaaaagaagaggcggagttttttccccgcctccggcgcacccgttacagtgttgccgctttaaataatgtgaatttcttttactcgtttcacaggattcatcttgttagaaccgtcgggaaaataaacgtgtacaggcccgtcttcgccaagcggcttgcctttgttgctgaagcagagaatcatgccgcccgcttcttcaattggaacggaaacgtcttcaccttccgttttgaagaggcatttgacggcggagcctgacacctccgcgtttttcaaaaaaggctcaagcttgattccgaaagtgccgtcaagcaatttttccttttcatactttttctccgatttcagcgtcggcggcgatacagcaccttctctgatttgccgttcccggtcaatcacaaggtcgtcatcttcatcctgtacctctccgaaatgtgaaaagaactgctcgagatcgaattttcggtcatcaaaaatccagacgctcggatcgagcgtaatcggatactttacatttcctgtgatcgttacaatgctcatgtctctaccactccctcacaaaaaattataagcgctttctttcgaattgtcacttctcataacaaaagccctctcggggaaagataacagcaatgacgctcggatggagggaaaaaacttgaattgccggcataataaggagctcgaatattttgtcacagaagcgaaaaaagtgacggacaaaggaaaggttgcatcttacataccggctttggccgaattatcggaggacgatttatcggcggcggtctactttaccgacgggacttgtatatcagcgggggatgtggaaaaagcattcactctgcaaagcatatcaaaagtattgtcgcttgccctcgttctgatcgatcacggaccggaaaaagtgtttcattacgtaggacaagagccgactggcgatccgtttaactccatcatcaagcttgaaaccgtcaacccggggaagccgctgaatccgatgataaacgcaggagcattggtggtcacaagcatgattaaaggagagacgaacgctgataagatcgggagactgcttgattttattaaaaaacttgcaaacaaccggagcattaccgtttgcgggaaggtcgccgaatctgaatttgaaacctcgatggtcaacagggcgatgtgctattacatgaaagagcacggcatttttcaggctgaggttgaggatgttatggatgtatatacaaaacagtgcgccattgaaatgaacagcctggacctggcaaaaatcggctctgtttttgctttgaacggcaagcatcccgaaacgggagaacaaatcataccgaaggatatcgcgagaatttgcaagacatttatggtgacatgcggaatgtataatgccagcggcgaattcgcaatcaaaatcggaattcccgccaaaagcggggtttcagggggcatcatggggctatccccataccgtttcggcatcggcatcttcgggccttcgctcgatgaaaagggaaacagcattgccggaatccggcttttagagctattatctgcgaattacagcttaagcattttttaaaacgttagcggaagcttaaaaagcgagtctttgaaatacggcgaaaggacagaaatagcttgctttttttcggctgaggctttatcataaatagaagaattaggtactcgcctggggaacggagggatacttttggcgtctgagattgtagtcgaccatcgtgaaaaagcacttgctctgttaaaacgtgatgctgataaaatcttaaagctgattcaagtgcaaatggacaacttaacgatgcctcaatgtcctctttatgaagaggttttagatacacaaatgttcggactctctagagaaattgattttgctgtccgccttggattagtggatgaagaagagggtaaagaactgctttacaggctggagcgtgaattgtctgcattacatgatgcatttacaaaaaaataaatgaacacctcagaagaatctttctgtctgagtcagcttgtcgacgacgtttcgatagaaacaaactgccggcaggctttttttattatggaatgagaaagaaaacgccagttgatgaaggaatggccgctgttcacgccgaataaacgaagacgcatgatttgccgataaaaaaatagaatggcagtcttggaacagacggacttttctttctgaggagattcgaagtcttatgaaaagggtatctttcgtgctttttaagaaagtgtagtaaaataacgaaggaactaccacaaacacattttgaaggcaagtaaggaagaggataatatgataaaaagaatgctcaaatcctatgattattcattaatcttcgctgtattcctgctgtgcgggttcgggctcgtcatggtgtacagttcaagcatgatcacggccgtgacaaggtacggacaaaacagcagctacttttttgacaggcagctgatgtttttggcgctcggaaccgtcatatttttatgcgcggcgctttttccgtataaggcttttgccaatcaaaaattccaaaagtttttgctgctcatttccgtcgtcgctttgttcgggctgtttgttgtcggacatgtggccgggaatgcccaaagctggttcagggtttcgaattacggcatccagccgggggagtttgtcaagctgaccgtcatcttgtatctttcttccgtctacgccaaaaagcaaagctatattgacaacttgggagccggaatcgcccctcctgcgatcatcacgctcttcatttgcgccttggtcgctgctcagccggatgtgggaacggcctttatcatcgctttaatcgcattgtgcatcattttgtgctcgggattcagcggcaaaacgctgttaaagctcgtgcttttggccgggattgtccttgtgctcgtcagcccgctcatttatttcaactgggacagcattttaacagaaggacggatgaagcggtttgaaagctatcaaaacccgtttaaagatgcgggagattcgggctttcaagtcgtcaactcctacttggcgatcggttccgggggactgttcggcctgggcctcggcgagagcgtccagaagtatgggtatctgcctgaaacgcacaccgattttattatggcgatcatcgccgaggagctcggtattttcggtgtcctttttgtcgtgttgctgctttctttcatcgttttaaaagggttttatatagcgaggaaatgcgatgatccgtttggaagcctgctcgcgatcggcatatcgagcatgatcgccatccagtctttcgtgaacctgggcggcatatccggcttgattcctttgacaggggtgacgcttccgtttatcagctacggagggtcatcgctcattctgctgatggcaagcgcggggatattggtgaacatcagcatgtttaatgaatattttgatcggttcaaacgaaaacagcctgtcaatactacaaaaacgaaagaaaatcaatataaaaaaagtataaatttttaaaaaactaagcgtgtacaatgaccatccgattcatttagaatagatacatacttataacagcggatgagggggaacgacatgtcacaacagtctattcaaaaagttcttgttgcaaacagaggggaaatcgctatccgcgtatttcgcgcctgcacagaactgaatatccgtacggtagcgatctattctaaagaagacagcggatcttaccacagatacaaagccgatgaagcatacctggtcggcgaagggaaaaagccgattgacgcttatcttgatattgaaggcatcatcgagattgcaaaacgcaaccatgtggatgccatccatccaggctacggcttcctgtcggaaaacattcagtttgctaagcggtgtgaagaggaaggcatcatctttatcggaccgacctccgagcacctcgatatgtttggagacaaagtaaaagcccgcgaacaagctgaaaaagctggaattccggtcataccggggagcgacggaccagtggcggatatagcggaagtgaaacaatttgcggaaaagttcggatatccgtttatcattaaagcgtcgcttggcggcggcgggcgcggcatgcggatcgtcagggacgaatcggagctggaggagtcctataatagggcgaaatcagaggcgaaagcggcctttggcaatgatgaagtttatgtcgaaaagctgattgaaaagccgaagcacattgaagttcaagtcatcggagataaagaagggaacgtggttcacctttacgaccgcgactgctctgtgcaaaggcgacatcaaaaggtcatcgaagtggcgccgagcgtttcgctttctgaatccctccgggaaaagatttgcgatgctgccgttaagcttgcgaagaatgttgactatgtcaatgccggtacagtcgaatttttagttgcgaacgatgagtttttctttattgaagtgaacccgcgtgttcaggtggagcataccattacggaaatggtaacgggcgtcgatatcgttcagacgcaaatcctgatcgctgccggtctcagtctggacagcagcgaaatcagcattccgaaccaggatgcgatcacgctgcacggatatgcgatccagtcaagggttacgactgaagatccgtcaaacaatttcatgcctgacacaggcaaaatcatggcatatcgctcaggcggcggtttcggggtgaggcttgataccggaaacagttttcagggcgctgtcattacgccttattacgattcgctgcttgttaagctttcaacttgggcgctgacgtttgaacaggcggcagccaaaatggtccgcaaccttcaggaattcaggatcaggggaatcaaaacgaacattcctttccttgaaaatgtggcgaaacacgaaaagtttcttacagggcaatacgacacgtcttttatcgatacaacgccagaactttttgtctttcctaagcagagagaccgcggaacgaaaatgctgacatatattggggacgtaacggtcaacggcttcccgggcatcgataaaaagaagaagcccgagtttgataagccgcagatcgtcaaaacagatgtcgatcagccaatcgcaagcggaacaaaacagattcttgatgaacgcggagccgaagggctcgtcaaatgggtgaaagatcaagaggaagtgctcctcactgatacgacgttccgcgacgcccatcagtcattgcttgcgacaagagtcagaacgcatgacctgaaaaaaatcgccaatccgacggctgcgctctggccagagcttttcagtcttgaaatgtggggcggcgccacatttgatgtcgcttaccgtttcttgaaagaagatccgtggaaaaggctcgaggagctgcggaaggaaattccgaatacgatgtttcaaatgcttttgagatcttcgaatgccgtcgggtatacaaactaccctgacaacctgattaaaaagttcgtcagcgaatcggctgcggccggaatcgatgtattccgcatttttgacagcttgaactgggttaaagggatgacgctcgccattgatgcagtgcgcgagtcaggcaagcttgccgaagcggcgatctgctatacaggggacattctcgatccgaacagaagcaagtataatcttgaatattatacgtcaatggcaaaagagcttgaagctgcgggggcgcatattctcggcattaaggatatggccggcctgctgagacctcaagcggcatacgaactggtgtcggctttgaaagagacgatcgacattccgatccacttgcatacacacgacacgagcggcaacggtatttttatgtatgcgaaggcgatagaagcaggcgtcgacatcgtcgacgtagcggtcagctcgatggcgggtctgacatcacagccaagcgcaagctcgctttaccatgcgcttgaaggagataaacgccgtccgcagttcaatgtcgatgcggtagagtcgttgtctcaatattgggagtctgtcagaaaatattacagcgagtttgagagcggcatgattgcgcctcataccgaaatttacaagcatgaaatgcctggcggccaatacagcaaccttcagcagcaggctaagggagtcggcctcggcgaccgctggaatgaagtgaaagaaatgtacagccgggtcaaccacctgttcggggacatcgtaaaggttacgccgtcatctaaagtcgtcggggatatggcgctttacatggtgcaaaataacctgacggaagatgatatttacgaaaggggagaatctctcgattttcctgactcggttgtcgagctttttaaagggtatatcggtcagcctcacggcggattccctgagaaattgcaaaagctgattttaaaagggcaggagccgattacagtacgccctggagaactgcttgaaccggtttcatttgacgctataaaagcggaattcttggaaaagcatggtatggagctttccgaccaggatgctgttgcatatgcgctttatccgaaagtgtttaccgagtatgtcaagacagcggaactgtacggggatatctctgtgcttgatacaccaaccttcctctacggcatgaccctcggcgaagaaatcgaggtcgagattgaaagagggaaaacgctgatcgtcaaacttgtctctatcggggaaccgcgtccggatgcgacgagagtcgtttattttgaactgaacggccagcctcgcgaagtggtcattaaagacgaaagcattaaatcgtccgttcatcaaaaggtgaaagccgaccgttcaaacccgaatcatatcgcggcatctatgccgggaacggtaatcaagcttcttgtaagcaaaggggaccaagtgaagaagggcgatcatttgatgatcaatgaagcgatgaaaatggaaacgaccgttcaggctccgttttcaggaactgttgaaaacattcacgttacaaacggagaagccattcaaaccggcgaccttctcattgaactgaaaaaataaaagcacggccgctgacttttgtcggcggcctctttttatgaaaaaatcccccgcaaaaggcggaggatcaaccgtttatttttatttttgcacctgcctgcgatagcgcgcaacaagcagcaggaagtagcaaaggattccgaacaggcaggaaataaagaatgcgtgggcgagtgcaaaacccaaatccagtctgctgtagacaaccgcaattcctgaggcagcctgaaggatgatcaggatcagggaaatcatccagccccaataaatgcgtttttgatttttatactgtcttgctgcatgtaccgctgccgcgatgatccaggcgaacagaagaagcgccgcagctctgtgtcccatctgcacccattcgtgaaacttcccgggaagccagccgttttccgtgctgcacatcggaaagtcaaggcacgcgaggcttgaactcgtatgccggacatatgcgcctgtataaacgacgacatatgtgtatataatgattcctatcatatgaaactgcatggtttttcctatataaaacgattcggatttctgtttgctgtcagcttcaaacaccaggagcgtcaaaagcagcacagaagcaaaggaaataagcgagattccgaagtgcaaagccatgatcagggccgatgacccgaagacgaccgctgcagcgcccaaaagcgcctgaagaatgagaaagacgaccgacatcaccgcgagaaatttcgtttctctgatatggccgatttttttccatgtccaaatggcgagagccagcacaaggacgccggatgtgccgctgacaaacctgtggctccattcgataatcgattcaagggttaaagccgggaatatgcttccgttgcaaagcggccaagatctgccgcagcccattcctgaacccgtctttgtgacgagggcgccgccgatcagcacgaaaagcatggcgatagttgtgataattcccaagccttttaatgctttattcataaattcaattctcctttttaatgcaaactgactaataaaaagatatttaccaccttcaagtgtaagcgaattgatgttctgctgcaattcataatgattattgttcacaaaaatgcaatagaaggcgttcacatttttattggttttgaagacttgataattgtggcttcgtttgatagaactatattagaatgacagtggttttccgctcttgttcacaacttttccttcatctgtaaagaaagtcataaaaagttcacaaatataaaccggtttgtcgattaatatttaataggctgtttttttccatccggtaatcttgtatgatagagttgtaggttttttatgaatataccgcttctcttgacgtgatgaaggtttgagtaaggggggttagtattatggctgaaacaagaattacagctgatacagcaatgaatggacaaatagaagagacgacagcatggaaagatttcctcgcccttatcaaagtcgggattgtttactcgaacctgataacaacttttacgggcatgtggctcgctttttacttttcaaatctgagctttctaggaaaccttgatatcgtgctgttcactttagcggggtcctcgcttattattgcaggctcatgcgtcatcaacaacttttatgaccgtgatattgaccagctcatgcagcggacgagaacaaggccgacggtgactggaaaaatccagccttcacaggcattgtggttcggcattctgctgactgcgctcggttttatcatgctgctgatgaccaatctgacagctgccgcagtaggatttgtcggcgtctttacgtacgtgtttctatacacgatgtggtcaaagcgccgctataccgttaatacgatcatcggaagtgtgtcaggggctgttccacctttgatcggatggaccgctgtccaaggttccatcggagtcgaggcgtgggtgctgtttttaattatgtttatttggcagattccccactttctggcgcttgcgattaagaaaacggaggaatacagagccgcaaatataccgatgctgcctgttgtacacggttttgaagtgacgaaaaggcagatcatcatttggattgcctgcttaatgccgctgccgtttttcctgggcggactcggactgccgatcgtcattttggggacggtgcttaatatcggctggctcgtttgcggtctggtcggttacagaagcaaaaatatcatgaagtgggcaacgctcatgtttgtatattcattaaattacttgaccattttcttcgttgccatggtcgtatttacactttttaaaattggatagaactctataattcatcacattgaaggctgtcaattaacacttcaagcagacaacaatcatgtaaaagccgccttatcgattttttcgattatgtttaacaaggcggctttacgttcatacatagatggtattttgagtaaaaaacctcattatttatgaaatgaggaaatgtaagtgctttaattggagtggggagtcagatgaatgaataggtgtcctataaacgtttgaacagtgaaagtttcaaaaggattgattgaaaaggggttgggaagaaatgttaaagaaatggcgtctgatgtcgctgttcactattttggcgctcgttttagcagggtgcggagaaccgtttatatcaacgctgcagccggcgggcgaggtggctgatcagcagtatttcctaatgattctcagcacgctgatcatggttgttgttgtagtagtggtaagtttcattttcgtatttgtcatcgtcaagtacagaagatctaagctcggtgatgaccacatcccgaaacaggttgaaggaaaccgcaatttagaaattttatggactgttattccgattatcctccttcttatcctggttgttcctgttgtcgcacagacctttgatcttgctgatacgaaaccgatggataagaaaaacagggatccggagaagacgctcgtcgtcaacgtgcgggcgaacctttactggtgggaattcgaatatcctgactacggcgtgattacgagccaggagctggtcgtgccgaccgatgaacgcatttacttcaagctgaaagcttccgatgtcaaacattcattctggattccttctgtcgggggcaaggttgatacgaacacagacaatgaaaacaagttctacttaacgattgattcaaaacgggcggaaaaagccggagactatttctacgggaaatgcgccgagctctgcggaccttcccacgctttaatggactttaaagttaaagcggtttcgaaggatgagttcaagaaatggatgagcgatatggaaaacaataaagcggaagcgaaaaccgatctcgctgttgaaggagaaaaggtgttcaaagagaaaaactgcctgagctgtcatgcgaccgattcaaaagaccaaagggcggaagcggccagaacggctccgaacctcgcgacttttggagacaggtcgacgatcgccggcgtgaaggaattcaacgatgaaaacttgaaagcgtggctcaaggatcctgaaagcataaaaccgggcaacaaaatgaccggcacataccctgatttgagcgacaaggaacttgatgcactgactgaatatttaaaggggttaaaaaccgaagactaacgcttcaaagggagaatgagggaggttacattgtgagtacgcttaagaaaaagcaaggttttggggctgtattatgggactatttaacgactgtcgatcataaaaagattgccatcctttatttgctgggcggcgggttcttctttgtgctcggcggaatcgaagcgatgctgatcagggttcagctgatgataccgaacaatgacatcatgagcggcggggtctacaatgaaatcatgacgatgcacggcacaacgatgattttcctggcggcgatgccgctgttgttcgcattgatgaacgccgtcgttccgctgcagataggcgcgcgggatgtcgcgtttccattcttgaactcgctcggcttctggctgtttcttttcggcggcatctttctgaatttaagctggtttttgggaggggcacccgatgccggctggacgtcttatgcgtcgctttcccttcattccgaagggcacgggatcgatttctatgttctcggtctgcaaattgccgggatcggtacgctgattgccgggattaactttctcgcgacgatcatcaacatgagggcgccgggcatgacatacatgaggctgccgcttttcacatggacgacattcgtcgcttcggctttgattttgttcgcgtttccgccgctgaccgtaggcattgcgctcttgatgctggaccggttgttcggaacgagctttttcaatccggaattaggcggaaatacgatcatttgggagcatctgttctggattttcggacaccctgaagtttatattctcgtactcccggcgttcggcattttttcggaaatcattccggtttttgcgagaaaaaggctgttcggctattcttcaatggtatttgcaaccgtattgatcggctttttaggcttcatggtttgggctcaccatatgtttacaacgggactcgggcctgtggcaaacgccatttttgcggtggcgacgatggccattgccgtcccgactggtattaaaatcttcaactggctgctcacggcgtggggcgggagcatcaagtttacaacgccgatgctttacgcgatatcctttatcccgacgtttgttatgggcggggtgacaggcgtcatgcttgctgccgcaccggctgactatcagttccatgacacgtactttgtcgtggcccacttccattacgtcatcattggcggagtggtgttcgccatcctcgccggagctcattactggtggccgaaaatgttcgggaaaatgctgagcgaagcgttgggcaaaataacgtttgtactctttttcatcgggttccacctgacgttcttcatccagcattggctcggattgtggggaatgccgagacgcgtgttcacatacttgccgaatcagggatttgacatggcgaacctgatcagttcaatcggagctgtgtttatggcggctgcggtcatcatactcgtgatcaatattatcgtgacgactgccaaaggggaaaaagtcggcagcgatccttggcatgacggaagaacgcttgagtgggccgtttcttcgccgcctcctgaatacaacttcaaacagctgcctttggtcagaggccttgatgctttatggatcgaaaaaagagccggcaagcagtcaatgaccgccgcggagccgcttcaggacatccatatgccaaacggatcgattcttccgttcatcatgtcactcgggctgtttatatccgccttcggctttatgtaccggacggaatttgcctgggggctgcctgtcattctgatcgggttagggatcacgttatttatgatgcttctccggtctgtaattgatgaccacgggtaccatattcataaagaagatctgatggatgatgacgacaaaggggtgaaggcataatgcatacagaagagaaattgacggctgaaaccttcccggcttctcctgaaaaagctacgttagaaggaaaaaataaatttatcggcttttggctatttctcgggggagagacggttcttttcgcgtctctcttcgcaacataccttgcgctgaagaattcgaatgcaggggggccgaaaacgaccgagatgttcgacatggggctggtctttcttgcgacaatgctccttttgacgagcagtttgacgagcgtgtatgcgatgtatcatatgaaaaacttcgcttttaaaaagatgcaggtttggctcggaatcaccgttctgctcggtgcaggctttctggcgcttgaaatatatgagttcacgcattacattcacgaatatgggttcaccattcaaagctcggctctcggctccgctttttatacgcttgtcggcacacacggagcacacgttaccttcgggcttctctggattctttctttgatgatcagaaatgcgggccgcggattaagcctttacaacgcgccgaagttttttgtcgcaagcctctactggcattttatcgacgttgtctgggtgtttatctttaccgttgtatacttgatggggatggtgggataaaaatggtgaataacgaaaacagagggaatcccaaaacagatcttgcctaccgcaaaaagaaaaacgcggaggacatgagatatcaggttatttcattcggtttgatgatcggcctgaccattgtcgcttttttaacggtcgcctcaggtgccggcgtatggtttacggtgccgtttattctgctgctcgccgtcattcaggttgcgtttcagctgtattactttatgcatatgagtcagcgggggcatgaagcgccgactttgttcctttattcgggcgttttggtcgcttttgttaccgtgttggcttttgtaacgctaatctggtggtaatcgaaccgacatacagaaaggaggatgctcatgttgggcagccttgaaatattcggttttcgcgccctttggagcccctatttcctaggggctgtcgttttcataaccgccctttacttttttctgatgaaacgcttaggatcagaaggagagcgggcgtccaggaaagaaatcggtttattcctgacggcgatgattcttttatacgcgtctaagggcagtccggttgatttgctgggacatattatgttcagcgcgcatatggcgcaaatggcggttctgtatttgatcgtgccgcctctgatcatccttggcataccgccttggttttggaaaaaggtcatttttctgccgatcgtcaagccgctgttccggtttttttccaaaccattgatcgcgataatcgtgtttaacggtctattttcgatgtatcacattccattggtgtttgattttataaagacggatgccgtttatcatgccgccattaccgtgctgatctttattgcagcgtttttcatgtggtggccgctcgttcacaaggtcgaggagcttccgcagatgagcggacttttgaaactcggctacattatggctgacggcattttgctgacaccggcgtgcgcgttaatcatgttcagcgatacggctctgtattcgacatattcggatccgtcagcatgggcggaggcaatgaagctgtgcgttcctctcgatacgctgagcggaatgacgcttacaggtccggaaatgttcagcagcatgcctgttctcgaagatcagcagcttggcgcgattgtcatgaaaatcctacaggaaatcgtgtacgggacatttttggcgattatctttttcggctgggcgaggaaggaaagagccaaagacgaaaaggacctggaagaagaatcatattctccgtctacggttcattaaggtcaaaaaagggtacagcctcaccgaggggctgcacccttttttatgtacgcctgctacacttcaagcgctgaaaccttttctttgatcgaattcagcaccgtcttgcttgttttgaggagctgcggcggaaaatgttcgtcttcgccgtattccactccatgcggataataatatttgcccaaaagcggcgtcatcagtttgattaccgcgcgccgggcgcccacgtcaccttcgatggcatatccgaacacgcgaaggtagaatcttccttcgaccatatcgaatttgcggtcatatgtgacgcgttcataatcccattgtccagctcttacgaacccttcgttttccatgatgtcgtctaaccggttaaggtcggcagtcaatccttcaattccggattcttcaaatttcatcccgtaaaacccccttaaaaaaattacctttactgacaatcatagtatgaaagcgttaaactttcaatcctgcctgagccgatatataaatatttttgtggacagtatgaatcgcgcgcggcttgacgacaatatgaacaaacgaacgacaagaggaggtcttctgattgacacgtgtgaaagatatcatgacaaaggaaacattatattgtacggttcttgataatgtatacgaggctgccgtgaaaatgaaagacggggatgtgggagcgattccggttgtgcttgatgacggcttggaactggttgggatcgtcactgaccgggatttagtgctgcggggaatcgcagctaaaaaaccgaattcgcaaaaaattacaaatgtcatgacgactgatctcattacggtaagtgaagacgattcaattgaaaaagcggtcgatctcatgggagattatcagatcagaagggtcccggttacacggggaaaaacgcttgccggcatcattacgctcggcgatgtttcaactcacaataaatcgaaccgccaggctggcgacgcgctgacatttatatctgaaaacgaagagcggcctggagattttcttcattaaaacatattttgtctcacatcttaataggctgtattaacattgaaaattcatgtcagttctgtttaaatgacactaaaggcaagtttttgatgcgtgcgcagcttaatggatagattgatccgtcagtcggaggtgaaagtttgaaaaatatattaagagcggtcgtgatccttctcatcgttgcggcttcatacacgctgtttattcaatacggctcaacgcctgagaaaattgcgaaggaagacaagccgcaagtctcaaacgaagatgcaaaaaaagagaagcccttgaacattcccgattccggcctgctttcctttatcggggaatcggccgagacgatcgaaaagaaactggggaaaccggacagagtcgatccttcagcgtatgattatgaatggtgggtctataaccaagggaaaaaacagtacgttcaaatcggcttgctgggcggcaaggctgtgacattgtttgcgacaggcgacggggtgaacaccgctccgtttaaaatcggacggccgtcaagggaagttttcaaaacgacccagatcgccccgtatgtcaatgttcaatataaaggcagttcataccgttttgagttttccgaggaagatatgaatacaaggccgacggttaaagtcggagacatctatgttcagctgtacatggataaattcgaggggacgctttcaagcatcagggcatttgatgcgccgactttaatcaagcaaaggccgtatgaagttgtctacagaggcaccctgatcgagcctaaagcattgacagaatcggattggaagaaaatcgagaaagcaaatgagaagcagatttttgatataacaaacgttatccgcgcaaggcacggcctgtctgagctcacttgggatgaaggcgtatcaaaagtggcttacggccacagcagcgacatgaaagagcaccattacttctcccatgtgtcagaaacggaaggcaccctcaaagacaggcttgaaaaaggaaaagtcaattttgagcaggcgggggaaaatatcgcgctcaactatgtcgacgggcctgcggcggttgaaggctggttaaacagcgaagggcacagaaaagcgctcttaaatgccgactatacccatctcggcgtcggggtggatgagaaatattatacgcaaaactttattaaagaatggcaatagagcccgggacaatacccgggcttttcgttttttgagaaatcctgaaatgtcggctgctcaccgttcctgtaaaaagaggaattttaggcgaacattttttgccggggcggattacactatagtaggcatatgttttcggagggggtgtagacgttggcaaatcaaaacgcgcaatcatccatcaatgaatttaagcaatttataaaacggcatcctaagttgatttccgaagtccggaaacaagaaaaaagctggcaggaagtctatgaaaactgggttttgctcggggaagacgattcgatatgggatccgtacagggaagaagcttcagcggaaaaggagccggacgctggcggcaaaaacgatttcatttcgaaaatggtgacggccgttcgaaagatggatgccaatcaaatgaatgagcagatcaataaaatgagccagtctatttcttcgctgcaaagcttgctcagccagttttcgggcggaagccaaaaacagcagaaacaaagcggcggcgagcatccgttttctttccgaaaagattagggaaggagaaagacatgcgtaaagaagtgcaggagtatgtgttcgccgacgaagagcgccgccggttcatccgtgagcagccggtctggtaccgcaagctttcgcggaatccgaatgatctgtcagcctttcatctcgatatgatgaatttttatgaaaaaacgattcctcacagggtcaaccagttatcgggcagcattcagatggcccagatgatgctgcaaatgtttcatgcgatgcgcactcaggattaatttaagcctgagtctttttttgtgatgataaatcgcgccattctggtaaagctaggtgtgaaggagttgatctgtgatgaagaagtgctggcttgtaatctttctgtgcctcttgctggccggctgcgccacccataaaccaaagcccaaaggcttatctgattggcgcgattccgcttgtgaaagcgaagtttttggaaaattatagttcggaggcggcatagacatttttgaaaacggctgttttgtgatacactatagctggaggtgcatgtctatgtttgccacaatggaatcgttgcggcttcaaaatgaagcatatgatttggccaacatgattcttcaatcagaggcggctgaacattacagaaaatgctacaagcgtctccgcgaagatgaagaggccggacgtattatcgcttcgtttacgaaaataaaagaacagtacgaggatgtgcagcgctttggcaagtatcatcctgattataaagagataaccaagaaaatgagggaaatcaaacgggagcttgaccttcacgatacagtagccgaatttaaaaaggcggaaaccgagctgcaatccattcttgatgaagtcagcgtggaaatcggtcatgctgtgtcaaaacatatcaaagtaccgactggaaacccttattttgataatctttcatcttgcggcggcggctgcgggtcaggcggaagctgcggctgtaaagtttcctgatgaggctcggtcgccccgagtctcgtttttttatagaacttcatgcacagagcgacaggcaggtgaacaatttggaaatcaggcgtcaaggtttaatcgtttggctgcactccttgaagcaggcgaaaatgctcaggaaattcggaaatgttcattacgtttcaaagcggctgaaatatgtagtggtgtattgcaatatggaagatgccgaaagaatcatcgcaaaaatacgttcgtactcttttgtcaaacaggtggatctttcatacaaaccgtttttgaaaatggagtttgaatccaagcaggataaagcgaaagaatacgactataaagccgggctctaacttggtttatgttaaaaaaatccccgcagaaatacctctgcggggtccttctattccttaaaaaattaaggagaaggcaaagggagaggagaaaccggaggaagaacttatggggaaacgtaagtcttctccgcggttggcaacaacatcaatcgatgctgttgctattattatcaccaccgagcctttttgctatacatatgaatttgcactttgggtgtttgtgccagaaaacactttatgataagataggaatgatttttttcgagttttaagaaaaagtggtggaagtatgagagtgatttctgggacgtataagggacgtgccttaaaggcggttcccggcacgtcgacaaggccgacgaccgataaagtaaaggaatccatctttaatatggtcggcccgtattttgaaggcggcaccggccttgatctgtacgcgggaagcggcggattgggcattgaagcgctgtcgcggggatttgaccgcttcatttttgtcgaccgggattttaaagcgattcaaaccgtgaaaggaaatttgaaaacgctgggcttagaaaagtgcgccgaagtgtacataaatgacgcagaacgggctctgcatgcactggtgaaaaggggcgcaagctttgatgccgtctttttggacccgccatatcgagagcaaaagctggaagcgcttttatcgatcattgatgaagcggatatgctgactgaaagagggtttattgtggctgagcatgcgaaggaagtcatgctgccggatgcggcgggcggacttcagcttgcccggcaggaaatatacggcttaacaggcgtgaccatatacagaaagagagggaatggggatggctagcattgccgtttgtcccggaagttttgatccggtgacttttggacatttggatatcatcaggcgcggggcgaaagtgtttgataaagtttatgtatgcgttttgaacaattcttcgaagaagccgctgtttacagtggaagaacgctgtgggctgcttcgcgaagtgacgcaggatatcccgaatgtgcaagtggaatcttttcaggggcttttgattgattatgcaaagagcaagcaggcaaacgtcatcctgcgggggcttagagcggtatctgactttgaatacgagatgcagggaacctcgatgaacaaagtgctcgatgaaaatattgaaacgttttttatgatgacgaataaccaatactcgttcctcagttcaagcattgtcaaagaagtggcaaaatataaaggttcagtcgcagaactcgtgccggaagcggtcgaggctgcacttgaaaaaaagtttgcaaaaaatgagcggccgtaaccggctgctcattttttaacaggggcgtaagatttggcataaagaatgatatagatgagaagggtgccgattgttaggagcggaccgatctctgctaaagtgttccacatctccagaaagaaaggttccgtcttcccggccgtcagaaaggagaagaccggctccgtcggagaatagaacgatgtgtaaagaggcttccaaagaataagaacaaagatcgctgcataaattccctggaggatgcgagcgataaaaaacggctaaagcggatatccgtttcagcaagaatgcctgcaacctgcgcttggacgcagaagccgctgaaacccaaaataaagctgacgatcaccgcttgctggagaagcgccgcatccgttgcgctgaccagtttgctgccgagcgtaatctcaaacaatcccgataataaaggcttatcaaaatcaccgggcaattgaagagccgtcaaaatcattcttgtcgcgtgcgaaagaatgtcggtgatgtgcatcacagaaagaatgttattaaaaaccgaaaaaagaatgatgaagccgcccaccattagcagcgtttgaacggaggagatgacagcatcgctcaaaagtttgccgagcggccgcttttcttcaagtcttgcctgatggagcgcttttaaggcttctttaattgaaggcacaggaagcttctttcgcacggcggtgcggttttcttcttttcttccgtaagtgcgcatcgtcagtccaactgcgaaattgcccaaataatgggccgccgcaagcacaacgccaagagaaggattatggaaaaagccgaccgcaacggctccgaaaataaacagcgggttagatgagttggtgaatgaagcgagccgctctgcttcgacccgggaaatctgccgttcctgtctcagccttgaagtcagttttgcgccggccgggtttcccgatgccattcccattgcgagcacgaaccctccgacgccgggtacgcggaacaccggtctcatgaaaggctcgagcaacagcccgacaaacctgacgacaccaaacccgatcaagagctctgataaaataaaaaaaggcaaaagggaagggaatacaacctcccaccacatggcaagtccacttttagaagcgtcaaatgattcttgcgggtgggtaatgacggcagctgtaaatgaaagcagcaaaacggcaatcatgagtgtctttacctttgacatgtccatttctaaccccctttgcggctgtgaatacacattggaaacaggatcatgataaaataaacgaaaagcttgcccgatttgtgcggtagccttctccgtgaaacttctttatcattatacgaaggctggtccttattttagaccaccagattgcagatcggcgatgaaacaaatgaaccggaagctctttaaacgcgcggaaacccttctccttgatgagcatcaaaagaaggcatttcatacatctgtgaattcatgcaggctgaaaattcgaagccggatcaagatgtgagccggtgaaaataaagatggagggttacattttcatgctgaaaaaaagaattatacgcatcgcattattgctcgttatcatcgtggccgcgctgtcatttgtgaagctgccatattacatcaccgaacctggcgaagcgaccgagctgaaccctttaattaaagtcgataacggctatcctgaaaaagggagcttttctttaatgacagttaaagtcggtcctgccaatccgcttacatatatatgggcaaaaatgcgcccttaccacgaaattcttccggaagaaaattttaaacaagaaggcgaatctgatcaggaatatatgaagcgccaactgcaaatgatgagagattcccaggaaaatgcgatgatcgccgcttataagcgggccggaaaagaagtcagctacacgtttaacggcgtatatgccatgtcggtcgtcagcggcatgcctgcagaagggaaaatacaagtcggggacaaaattaaaaaagcggacggaaaatcgttccggtcagcggagagcttcgtccgctacatcgagtcaaaaaaagccggggaccgcgtgaaaatcgtagttgaacgggataaagaagaaaaaacatatgagatgaagctgaaaacattcaaagaagatccaaagagagcggggctcggcgtctccctcatcacagaccgcaatgtcaaggtgaagccggaggtcgatatggatattgaaaacatcggcggcccttcggcagggctgatgatgtcaatggagatctataaccagctgacaaaagaagacgagacgaaaggacaccatattgctggaaccggaacgatcgacgacgaaggcaaagtcggtccgatcggcggcatcagccagaaagtcgttgcggcagacaaggcgggagccgacatcttttttgccccgaacgaaggcggaaaaaaaggatcaaactatgaagaagctgtaaaaacggcaaaagatattaaaaccgatatgaaaatcgtccctgtcgacacgatggatgatgcgattcattatttggaagataaagtgaaaaacacctgatgtccatcaggtgtttttatttgcgcaaaaatatccggctgtcttcgtcatacctgatcggcgaaagggaatattcctgctctgtcagcatcgtccgcaccggctctttgagcggggcgctgtatacttggcccgcttttatgtcaagctggagggaaggatgggaaaacgatcccgtctttgtaataaggggtgcgctcaagctttttttcttttcagccaaataggcctgccctttttttgtcattccgagaagtctgatatatgccggatgtgtttcgtttaacatgcgcttaacgtcggctttcttcgtttttgtgaggatatgggtgttcatgcgctgcagtcttgtccacgtatagcgcttcgttttcaaaagctccatgtattccttaaaagagcctgctttccggatcgcttttttgacgcggtgctcaaggccttcttccacttcgtatatccctttcagctcttctgtatccattgtatgcaggctgtatttcaaaaaggggaaataatcttcaggcgagtgccacatgccgaaagtccgggcgtattcatcgagctcatcgaccgttgtctttggaaggtagaagcggctgtccgcaaggcttcccgtttcaaaaatcgacttgcgtatgctcgtagcgcttgcgattcggtccgcttcagggaatgttgaatcgtgatagcctgaggaccggcgcttgacggtttcgggcttcatgcttaattgcttttgcatgatggctttcacataatggaatccgagaatgttgttcggctttgaaaggtcaacgatgttaccgccttctcttgttacagaccggaacgcttttgccatcgcttgcgggtagctcagcccaaacgctatctgctttctggcttcttcgttgagcctgtcttcgtgctctatcgtgtgtgcgactgtattgagaaatgcctcaatatcgccgtgctcgcttccgaaaaacaaagaagaacaccctaattcatttaaaatcgagacggcgccttcagcaaacgtttccgctttttggacggcgaatatgtaagggagttcaacgacgacatcggcaaaagatgcgagcgccatcttcgtacgcgcccactttgatacgatggcgggttcgccgcgctgcaaaaaggagccgctcataacggcaaccgccacctcgctccgcgtttctgattttgcttcctttatatgatataaatgtccgttatgaaaaggattgtattccacaacaaggccgaccgctttcattttttcacctctcttgcatctcttgaaatagttatgatacatttacacatggaatgtccagacgcctcgcgaaaacagcgtttttcctaagtgtatgaattgttgttcacgatgtcaacgaatgaaaggcgcaggcgcatatctgtaaagaaaaaatattgacaaaaaacatgatgaaagctataatcatgtttgttgctcacttagaggtgatacaatgaaatggacgatacatcagctgaatcaaatgccgaagaaggactttgaatttgatgaaacagttgatttaagcgaactctctcaaagctcggaaatccgcagcatttcaccggtgcgggtgaaagggcgcgcggaaatccgctcaaagcaggctgcatttgattttaccatttcaggcgagatgatcttgccttgctcaagaacgcttgttgatgttcgttatccattcagcatttctacaaaagaactgtttatatttcataagaccgaggaaatggaagatgaagacatccatattgttgaagatgacctcatcgacttgactccggtcgtgaaagaagaaatccttcttgagatccctatgcaaatcttttgtgagtctgttcaaaaagaagaaggtgctccgcaggagggcaaggattggcaggtcattacagaagatgaccggaaagaccggatcgatccgagacttgccggactcgggaagctcttaaaacaagaagatgaatcttaacgctctttaaggaggtgggaataatggctgtaccttttagaagaacttctaaaacgaaaaaaagacttcgtcgtacacactttaaattgcaagtgcctggtatggtagaatgcccaaactgcggtgagatgaaactttcacaccgcgtctgcaaagcatgtggatcatacaaaggaaaagacgtaaaaagcaactaatcgtcaacaatgaaaacacaagacttcatgtcttgtgtttttttattacccgttttcccttcatccttttatttcctgtaaagaaaatagtctatctactctatcagccgcatatgtatgaggtaaattcataaagtcatggagggggataacatttgacgattacaagacaggatgcatggacacaggatgaagatatattgctggctgaggtcgtattaaggcacattcgggaaggcgggacacagctttcagcctttgaagaagtgggcaaggctttaagcagaaccgcggccgcctgcggattccgctggaattcatttgtcagaaagcaataccaatcaggcattgaactggcaaagaagcagcgcaaagagctgcgcaaaaaaatcggcatccattccgcaaaccttcctggatctgtcaaaacggtttctgagagcaaggcggaaaacctgacgctcgatgatgtcatagagtacttggaaaagctgaaagaagccccggttcaaaaggactttatcgacgagaagaaaaagcttgctgaagaaatcaatgagctgaaacaagaagttgaaaagctgcgaagcgaaaatcaatcgctgaaaaaaaagcttgaattgacagaagaggattataaagcgctgattgaaatcatggagagagccagaaaaatggtcgttcttcagggagacgaacgaaacaaaaaggcgatgctccagccggagccgaatgaaaatctgggggaagcttgaaaatagaaaaccggccatccgctatcggccggcttttttcgtttatgctgattcagaactttgactaggttcgctcgcaggatgccaaacgagcggattttcccctttatcccgggccatatcgtatttaaccggtgtaaagcccatcttgttccaaaaatcggatgatttgacgcgcggacttgtgcgaatcgggagtccgaaagatttggcgaactccacaagcatcgttccgtagccgtttcgctgataccccggcaaaacttcaagcttccagagctcgaggtaatcttggccttcttcaaaatattggtttgatttaccatccactttatacaggctcattcttgcgacgagccgatttccgtaatagatgccgtaaaacggtgagttgctgtcgttttcaatcatgttgctttcaaggtcctccagcatggaaagctcttgaatcccgtactccctgaactttttaaattcttcaagcgttttgtagttgatcagcaaacgttcgactttgaccattatgttacccccttgtttgtggtctacttctattgtaaacgcttttttcaaaaaatccaaatgataaaaattttctaatataatgaagcgaaacggttctgaatatttgaaacaactgacaagtcaacggcgaaaatttctgctatgatatacagtatatgaaaaaatcagggtgtgagaatgtgaaaatcggagtcatcggaggaggctcggtcggcctcctttttgcatactatttttcgttcggccacgaagtgactgtgattgcgcggagaaaggaacaggcggaagcgattgaagaaaagggaatccgccttcttgaagacgggaaagagatgaccgtgaacgccaggggcgtgactgaacttgatccggactgcgaccttctttttgttgccgtaaaggagcatcagctcggagccgttctgtctgagctggagcaggcggctcctcttgacatcatgttcctgcaaaatggaatggcgcatattcccgtgcttgaaaaatggcagacgggccaccgcatctatacgggatctgtggaacacggagctgtcagggtggatgaccgtacattccggcacacgggaaaaggggccgtaaaatggagcgcgttccgaagccaatccgccgcccggctgaaaaaagagctcgcttcggtgcatgaagcgttcccttttatttggtgcgaagactggtataagcccctcgccgaaaaattgattgtcaatgcgtgcatcaatccgctgacggctcttttgcgggtgaaaaacggcgcgctgcttgaggagccgatgtatggggcctatatgaagttcgtctttgaagaagcgagccggattttggaacttgaagatcgccaggcagcgtgggaccatgttctttccgtctgccgccggacgaaaagcaacacgtcctcaatgcttgccgatgtgctggcagaaagaaaaacggaagcggatgcgatcatcggctatctgctgaagcgggcaaaagagtcaggagagcccgccccgcaccttacctttttatatcgcagcatcaaggcgcttgaaaacgaatgaagctaaatcttttgaccgaatcgcataacgtgctatactcgtttcggatagctaactatttactggagaaaggaagttctagagatgcagcttactgaactttccatacaaagtcaaaacccttttgtacgagactatataaatggaaaaaaggagatagagccgttttttgattacggcctaagcaatgaaagttggagtgtccgtttggatgatctttcctcccggacgtatgaccgcgatgcgttagcagactatttgctcgactatcaccgcaaatttcaatcggcaaccatgaatgaaacaatcgaacgccttcgcgatccgaaaagcgtcgtcgttgtcggagggcagcaggccggccttttaacgggtcctctttacactatacataaaatcgtatcgatccttttattagcaaagcaaaaagaacaagagctgaacgttccggtcattccggtattctgggttgcgggggaagaccatgatctggaagaaatcaatcacgtctacatttctgacggcggcaaggtgaaaaagcacaagctcccgcagtcccactggaaaaaaagccaggcggcaaaaacggcgctcgatgccgagaaagctgaaaagtggctggacgggatttttgcttcatttgaagaaacggagtatacgaatgatcttctcggccatttgcgccgatgtttaaggcagtctctttcttttaccgattttttcgaatttcttgttgccgacatgtttgaacaagacggcttgatccttttgaattccggagacccgggcatcagaaaccttgaagcgcgctttttccggcagctgctggacaaaaacgatgagctgaccgactctgtcaaacggcagcaggaattgatgaaacaactgggttacacaccgattatcgaaggggccgcacaacatgcgaacattttttatgagcgcgacggcgagcggtttttaattgaaaaagaaaacggcgcgttttttataaaagagcttcatcttcagtggtctgaagcagagctttgcgatttgatctgccagaacccggaagcgttcagcaataatgtcgtaacccggccgctcatgcaggaatatcttctaccgacattggcgttcatcgccggtcccggagagatcaattattggggcgagctgaaaggcgcttttcaggtcatgggctataaaatgccgcctgtcgtaccgaggcttcaggttacattccttgaacggcacatcgaaaaaaagctggacgaacggggaatcgaactccgcgaatcgattgaaaagggagcgcgggccaaaaaagagcagtattttcaagataaggttccgaacggatttaccgattcggtcaaacaggcgaaagaaaaaatcgaaaacattcattccgcagtgcgcgccgaagccctcgaaatcgacggcagcctcggcccccttttagaaaaaaacgcgggcttcattcaagatcagctccaatttttggagaaaacagtcatcagaaggattgaagaaaaagaaaactatattttgcgtgattttgacaaaattcaaacaagcatcaaacctttagacgctccccaggagagaatttggaacatcgtgtattatttgaacaaatacggtccggatttcttggaaaaatacaaggatttgccatattcatttcaaaacatgcatcaagttgtcaaactttgaaataattttttaaaaaaccctgagtagttcagggtttttttttgttctaaaacagtgtaaaataaatttgtggagagaagtggtggatagtggtgagttgaggaacgaaagtggggaccgagatcatgtttatgggtgaataccagcatacgattgattcaaaaggccgcatgatcgttccggcgaaattcagagaaggcctcggcgagcagttcgttctgacgcgcgggcttgatcagtgcctgtttggctacccgatgtccgaatggaaactcatcgaagaaaaactgaaggcccttcctcttacgaagaaagatgcacgcgcttttacccgcttttttttctccggagccaccgaatgcgaattggacaagcagggccggatcaacattgcatcgccgctgttaaattatgcaaagcttgagaaggaatgcgtggtcatcggagtttcaaatcgaattgaattgtggagcaaagagatttgggaacaatacgtagaagagcaggaagattcatttgccgaaatagctgaaaacatgatcggatttgatatataatgaatctttgcgcatgcggcgcttctgcaatcagttcatttgaaaaaggtgggactagtaaagaaatgtttgagcatacaacagtattattaaaagaaacagttgatggtttaaatgtaaaagaagacggtacatatgtagactgcacattaggcggtgccggtcacagcgagtatttgctttcacagctgtctgaaaaaggcaaattggtcgcttttgaccaggatgaaaccgcactccgccatgcgaaggaaaaactggcggattatgaaggacaagtcgttttcataaaaagcaattttcggtatttaaaagaccgtctaaacgaaatcggcatcacgaaagtggacggtgttttatttgatttaggcgtctcatctcctcagctggatacacccgaaaggggcttcagctatcatcatgatgcacctcttgatatgcgaatggaccagtcggcgggcctttcggcaaaggaagtcgtcaatgaatggccttatgaggatctcgtgaaaatcttctttaaatacggagaagagaagttcagcaagcaaattgccaggaaaatcgaaaaagcaagagaacaatcgcctattgaaacaacaggccagcttgtcgatatcatcaaagaggcgattcccgcaccggcaagaagaagcggcgggcatccggctaaacggatcttccaggcgattcgaattgcggtaaacgatgagttgagggtatttgaagaagcgcttttgcaggcgattgaggtgctgaagccgggcggaagagtatcggtcatcacattccactcgctggaagaccggatctgcaaatcgacatttaaagacatgtcgtcgcctcctgaactgcctcacggactgcccgtgatccccaaggagtttgaaccgaaattaaaattagtcaacagaaagccgatcacagcttccgaagaggagcttgaacacaataaccgtgcgcgctcagcgaagctgcgcatcgcggaaaaagcacgagagtgagctgtacgaattaaaaggaggtcatcagtctatgagcaatttggcttataaagtagaaaaacagcaaagacagacagacagtgcagaacaattcgttatcatccggagaagagcatcgattacgctgggggaaaaggtattgattgtgcttttcgccctggctgtgctcagcgcttcactttttatgatttcaaaggcttttgccgcgtatcagaccaatattgaaattcaaaagctcgaaaagaaggttgaaacggaaagcagcagagttgatgacctcgaaaaagaagccgatatgctgaaagagccggaccgtatcatggacatcgcccggaaaaaaggccttaaattgggtgataaaaaagtgaaagacatacaggaatgatgcaaaatgccgaaaaaaaataaattcatgaacagaggagcggcaatactcagcatttgttttgccctctttttctttgtcatcgtaggacggtttgcgtttattcaagcgacgggaaaagtgaacggcgaagtgcttgcgcagaaggcgaacgaacagtatgagaaaaagcggacgatcgaagcccaccggggatcgatccttgaccggaacggaaaagtgcttgccgaagatgctacgacatataagcttgtcgcgattatgagcgaaaagatgaagcctcaatacgttaaggacaagcagctgacagctgagaagctcgcgccgatcctcggcatggatgaggggaaagtgctcgatattctaaataaaaaaggagcgtttcaggtcgaattcggatcggcgggacgggatttgacatacgcccaaaaagagaaaatcgaaaagctgaagctgccgggcatcgtgttcacccgcgatacgaagcgctactatccaaacggaatcttcgcctccaacctcatcggctattcgcagatcaacgaaaaaacgggtgaaatgcaaggcatgatgggccttgaaaaaacgctgaacgattatttgaaagaaacggacggatacatgacgtacgataccgacagaacgggctggcgcctgccgaacagcaatgaaaagattaaagcgccaaacaacggagacaacgtgtatttgacgatcgatcaaaaaatccaggcgtttttggaagacagcatgacgaccgttcaaaaagagtacaagccgaaaaagattatggcggcggttgttgatccgaaaacgggcaaagtgcttgcgatggggcaaaggccgagcttcaacccgaacgtgcgcgatgtcacgaactattacaacgaccttgtctcctacagctttgagccgggctcgacgatgaagattttcacattggcggcggccatccaagaaggcgtatataatggaggagaacaatacaagtctggatcatattcggtttctaaaaaagataagccgatcaaagaccataacggtggaaacggctggggcccgatcacttttaatgaaggtgttgaacgctcctcaaacgtcgcgtttgcgatccttgccaacgataaactcggcacggaccggttcaatcaatatttgcggaaattccatttttacgacaaaacggggattgacctgcctggggaagcgaacagcaaaatcaactttgaatatttgcgggataaagtgtcgacggcttttggacagagctctgctgtcacgccgatccagcagcttcaggccgcgacggcgatcgccaataacggaaaaatgatgaagccttatgtgatcgatcatgtcgttgattctgacaaaaacaaaacgatttatcaaaataaaccggaacaagtcggccagccgatctctgccaaaacggcaaaagaagtgcgcgagctgttgggaaaagtcgtcacatctgaaaaaggaacggggcagccgtacaagatcgaaggatttgatgtcgccggaaaaaccggtacggcgcaaattgccggagaagacggcagatatttgaccggccgcgaaaactacgtgttctccttcatgggcatcggcccgaaggacgatccgcagcttctcgtttatgtggccgtgcagcagccgcaattaaaagctacggaaacaggctctgctccggtgtcaaaaattttcaatccggtgatgaaaaacagtcttcactacttaaatatcacaccgaaagagactgaaaaagaagaaaagcaggaagaaaaacagctgaaaatgcctgatttctccggcaaacgagccgaatccgccgcaaaagaggcgcaaggcagcagccttgttcccgttacgatcggcgatggcttggctgtgaaagaacagtacccgaaagcgggcgaagccgtcctgccgaaccaacgggtcttcctgaaaaccgacgggaatatcacactcccagatatgacaggctggtcaaaacgggacgccctccgcttcggcgccatggcaggcattcatatcgaaacgagcggccagggctatgtgaagagtcaaaatgtaaaagcaggcaaagaattaaaagcaaattcagtcgtgaaagtcagattgaaaaacgaatagatcccgtcaaaggctatcggctcaaagtcgatagccttccgtttggacgcggccgccttgaatagatgaaaaatcgggccgttctatcaaaacgctccgaggcataaaatgaaacaagcctaaataaggagtgaacggtctcttgcgcgtttccaatgtaacggtcagaaaacgtttaatattcgttctgctttttggtgtgatcatctttttgattattgatacaaggctcggatacgttcagttcgttctcggggataaactgacgactttagcaaaagattcttggagccggaaccttccttttgagccggaaaggggcgaaatattggacaggaacggcgtcaagctggcaacaaaccaaagcgcgccatcggttttggttgttccgaagcaagttgaaaatccgatcaaaacgagcagactgctggccagcgttttgaatatgtcggaagaaaaagcgtataaacatgtcacgaaaaaaacgtcgattgaaaggatcaatcccgagggccggaagatttcccacgagaaagcaaaagaagtcagagatctcaatttgaaaggcgtatacatcgcagaagactcgatccgccattatccgttcggcagctatctgtcccatgtgctcggatttgcgggcattgacaaccagggtctgctcggccttgaagccttttatgacaaagagctgaagggcgaaaagggctatgtgaaattttattccgatgcaaaaggcaagagaatgcctggggaggcggatgactataccccgccgaaagacgggcttgatatgaagctgacgatcgattcaaaggtgcagacgatcatggagcgggaatttgatatcgcagaagcgaagtataatccggacggtatggtcggtgttgcgatgaatccgaaaaacggggagatattggcgatggtcagccggccggactttgatcccgcaaactaccaatcaatcgatcccaaagtctataaccggaacctgcctgtatggagcacatatgagccgggttctacttttaaaatcatcacgcttgccgcagctttggaggaaaacaaagtcaacctccaaaaagatcaattctatgataaaggttccgttgaagtggacggcgcgaggctgaagtgctggaagcgcggcggacacggcgcacaatcgtttcttgaagtcgtccaaaattcgtgcaacccgggatttgttgagcttggtcagcggctcggcaaagaaaaactgttcacctacattaaaagtttcggcttcggacaaaaaaccgggatcgatctgcaaggcgaaggaacaggcatcctattccctcttgaccgcgtcggccccgtagagcaggcgacaacagctttcgggcagggggtatcggtgacgccgatccagcaggtcacggccgtttctgcggctgttaacggcggaacgctgtatacgccgtatattgccaaagagtggattgatcccgtgacaaaacaaacagtgaaaaaacagacgccgatcgccaaaagaaaagtgatttctgaagagacatccaaacagatccgctacgcgctggagagcgttgtcgcccaggggacggggcggaacgcttttgtcgacggctaccgggtcggcggcaaaaccggtacggcgcaaaaagtaaaagacgggaaatatttgaaaaacaaccacatcgtctcatttatcggaacggctccttcagatgatccgagcattgtcgtctacgtcgccgtcgacaacccgaaaggaacgattcaattcgggggtacggttgcagcgccgatcgtcggaaacatcatgagagacagtcttccgcagctcggcgttaagaagcggaaagatcagatcgaacgcgaatatcaatggctggacaaaaagctgatcgaggtcccgaaccttatagggctttccgtgacagagcttgaaccattgctgatcaacctcaggctgaaggcttccggagaaggcgatgtcgtcgttcagcagtcccctaagccgggcgaaaaagtaaaagaaggatcgacgattcgcatttatcttgacagcgatgacggagcctctgattaattcgtttcaatataggagcggctgcctgctgatgtccggggccgttcctcctaaaaaatatatcgattttaaaggattagctggatgtatcctcttttttacgctaaaatatgaactgtatgtctgcacgaagctcgtgcggcgaatcaatatgacaacgaatgaagaatgatgagacttgagaggtttgatacgatgaaattgacaaagcttcttacatatttaaaaaatgcaccttcctatgccggccaagaagaccctgatataacttcaattgagatggactccagggaagtcaagacagggagtctttttgtttgtataaaaggctatacagtcgacgggcatgactacgcccgccaagccgctgaaaaaggggccgccgccattgtggcggaaagggaagtggacgccgatgtgccggtgattatcatccgtcatacgaagagagcgcttgccgtgctgtcggacgctttttacggccagccgacaaagcagctgaggctgatcggaattacaggcacgaacggcaagacatcgacttctcacatggtggaggagatctttagaaaagccgggagccgtacaggactgatcggcacgatgtacacgaaaatccacgacgaaacgttcgaggcgaaaaatacgacgccggaaagcgtcacacttcaaaaaacgtttagaaaaatggttgatcagggtgtggatacagccgtcatggaagtatcttcacacgctctccacatgggccgggtgcacgggtgtgattacgatatcgccgcatttacaaacctgacccaggaccacctcgactaccacgagacaatggaagaatataaacatgcgaaaagtctgcttttctcgcagctcggcggatcctttaaccacgaaacaccgaagtgggccgtgctgaatgcggatgaccctgcttcagcctatttcgcccaagtgacgtcagcacatcttttgacatacggaattcaaaacgatgccgatgtcatggctgaaaatatcaaaatggctccgaaagggacaacctttgacctggtgacgccaaaaggttctgcacaagtgacgattccgcttgtcggcctgtttaacgtctacaatgttttaacggctgccgcgatcgcgattgcagcggatatcccgtttgccacgattacagaaggaattgaagggctgaaaggggtcagaggaagatttgagcttgtggacgcaggccaggacttcccggtgatcgtcgattatgcccatacccctgacagcctcgaaaatgtcttgaatacgtgcagaggcttaacggaaggaaagctgtttgtcgtcgtcggctgcggtggagaccgcgataagacgaagcgtccgaaaatggcgaagatcgccgttgaccttgctgatgaacccgtctttacagccgataacccgagaagcgaaaacccgctcgccattttaaacgatatggaggaaggcgtaaaaggagcttactatcacagcatcgtcaaccgcgagcaagcgatcttttttgcaattgcaaacgccaaaaaaggcgatgtcgtcctgattgcaggcaaaggccatgaaacttaccagcagatcggcggtcaaacctttgattttgatgacgctgaggtggccaaaagagccattcttgagctgaaataatcgaaaaagaactacaggaaagagttgttgaaatgatggatgaaataaatcaacatatagaaaaaaaacagtgaatatgataaatgcgtatgctgcttcttatatcatgcggaaaggagagaagaacgatgctcgaacaagtaattttatttaccattatcatgggctttttaatcagcgttcttttatctccgattttcattccgtttttaagaaggctgaaattcgggcagagcatccgtgaggaaggtccgaaatcccatcagaaaaaatcgggaacgccgacgatgggcggcgtcatgatcatattgtcgattatcgcgacgaccattgttatgacgatgaaattttccgaagtcagcatgaacatgatcctcctcttgtttgttacggttggatacggtctgctcggctttctggatgattatattaaagtcgtgatgaagcgcaaccttggactcacatccaaacaaaaactgatcggtcagatcgtgattgctctcgtattctatgccgtctaccacttccaaggaatgccgactgacatccgcattccgggaacagagctgtcgtttgacttcggctggatttatccagtgctcgtcatctttatgcttgtcggcggttcaaatgccgtcaacctgactgacgggcttgacggtctgttgtcgggtacagctgccatcgcgttcggtgcgtttgcgattttggcgtggaaccagtcgcaatacgatgtcgcaattttcgcggttgccgttgtcggagcggtgttaggatttcttgtgtttaacgcgcaccccgcgaaagtctttatgggagatacagggtcgcttgccctcggcggcgcgattgtgacgatcgcgattttaacgaaactggaaatcctgcttgttatcatcggcggtgtattcgtcattgaaacgctgtccgtcattttgcaggtcatttcatttaaaacgaccggcaaacgaattttcaaaatgagccctcttcaccatcactacgagcttgtcggatggtctgagtggagagttgtcgtcactttttggacagcggggcttctgcttgccgtcttaggaatttacatcgaggtgtggttataagtggatactcaagatttattgcaaaatcaaaatgtgctcgtactggggctggcgaaaagcggatatgctgccgcttcgatccttcatgagaaaggcgtaaaggttgtcgtgaatgaccagctgccttttgaggaaaatgaacctgcgcggattctcgcggaaaaaggggtggaagtcgtctgcggctctcatccgacggaactgtttgatcttcattcgatcgacattctgattaaaaatccgggcatccgctatgaaaacgtgatggtcgaagaagcgctgaagcggggtatcccggtctggacggaggttgaactcgcctatcatctgacagatgctccgttcatcggcattaccggttcaaacggaaagacgacaacgacaacgcttgtttatgaaatgctgaaggccgattcgaaaaaagcgctcgttgctgggaatatcggtacggcggcaagcgaagtggccaatcaggccagcggagacgaatggatcgtgacagagctgtcgagttttcagctcatggggacttatcaattcagaccgaagattggattattattaaacgtatttgatgcccatctcgattatcaccattcgcgcaaaaattatgagcttgccaaacagcaggtctatcgaaatcaatcggaaacagacgttgccgttgtcaatttggacgatgagacagtcgtccggctcgcggagtgttcaaaagcggagaaggtgtatttttcggtccgccggacacttgagcgcggagcgtgcgtgaaagacggcgcaatcatgtttaacggcgaaccggtcatgccgctggaagacgtcgttttgccgggagagcacaatttggagaacattttggccgccctttgcatcgttaaaacagcaggcgtttccgacgcggccgtccgtaaggtgctgacgagctttacaggtgttaagcacaggatgcaatacgtcgcgacgatcaaaaacagactgttttacaatgacagcaaagcgacaaacattcttgcgacgaaaaaagcgctgtccgcctttcaaaagccggtcattttgctggcaggggggcttgaccgcggaaatgaatttgatgaactaaagccgcatatgtcttttgtaaaagcggtgatcactttcggcgagaccgcgccgaagtttgagaagctggccgaagaaatgggaatacaacaggttaaacgtgtcgataatgttgaacaagcagcaactgcggcgttcagcctgtcagacgaaggagatgtcattcttctgtccccggcctgcgcaagctgggatcagtacaaaacatttgaagaacgtggtgacatgtttgtaaacgccgtgcatatgcttaaataagggcttgtctcgtaaagatagccctaagaattagagcttggggtgttcggctttgcaaacaaaaaaaacgtcaccggattttttgctggttatcattacgctattgcttttaacaatcggactgattatggtatacagcgccagtgcagtatgggcgacttacaaatacgacgactcctttttctttgcgaaacggcagcttttgtttgccggcatcggggtcatcgccatgtttttcatcatgaacgtcgactactggacgtggaggacttatgcgaaaatactgatcattgtatgtttctttctgctcatcattgtcctggttcccgggatcggcatggaacggaacgggtcgaggagctggatcggagtcggcgctttcagcattcagccgtccgagtttatgaaactcgcgatgatcgcatttttggccaagtttttatctgaaaagcaaaagaatattacgtcgtttagaaaaggctttgtgccggcgctgggcattgtcttttcagcttttctgatcatcatgatgcagcctgacctcggaacaggaaccgtgatggtcggcacatgcatcattatgatctttgtcgcgggggcgagaatttcgcacttcgtttttctcggcctgatcggactgagcggttttgtcggccttgtgctgtcggcgccgtaccggatcaaaaggatcacttcatacttgaacccttgggaggaccctttaggaagcggctttcaaatcattcagtctctttatgcggtggggcccggcgggctgttcggcctcggcctcggccagagcaggcaaaagtttttctatctgcctgagccgcagacagattttatttttgcgattttatcagaggagctcggctttatcggcggatcgctgattcttttgctcttcagcgttctattatggagaggcatcagaatcgcgctcggtgcgcccgatttatacggcagttttgtcgccgtcggcgtcatttcgatgatagcgattcaggttatgatcaatatcggagtcgtgactggcttgattcctgttacaggcattacgcttccgtttttaagctatggcggttcatcactgaccttgatgctcatggcggtcggcgtgctgctgaatgtcagcaggtattctagatactagattttggcgataaccctgttgcgagatagcagggttatcggcgtgtacataaggattaagggggagaacagatgcggattgttgttagcggaggcggaacgggcggccatatttaccccgcccttgcgtttattaaggaagtgaaacggcatcacgaagatgttgagtttttatatatcggaaccgaaaaaggcctggagaaaaatatcgtcgagcgggaagggatccctttcaaagcgattgaaattacgggttttaaaagaaaactttcatttgaaaacgtcaaaaccgtcatgcgctttttaaagggtgtaaaagaatgcaaagaagaattaaaacggttcaagccggatgccgtgatcggcacgggcggctacgtgtgcggccccgtcgtatacgccgcttcaaaactggggattccgacgattatccacgaacaaaacagccttcccggactcaccaataagtttttatccaaatatgttgataaggtagcgatttgttttgatgaagcgaaaacacattttcctgcagaaaaagttgtttttacaggaaacccgagggcgtctgaagtcgtctctataaaagggggccgttccctgaccgctttgggtcttgcagagggcaaaaaaacggtccttattttcggaggcagccgcggtgccgctccgatcaatgaagcggtcattgcgatgcaaaacgaattaaaaaagcgggattaccaggttctttatgtcacaggggaagttcactatgataaagtcacagctgcgcttgaaaaagaaggcgccgctccgaatatggtcgtccagccgtttctccatcaaatgcccgagtacttaaaagcgttcgatgtcgtcgtgggccgcgcaggggcaacgacaatagcggaaatcaccgcgctcggcattccaagcgttctgattccgagtccgtatgttacggccaaccaccaggaagtaaacgcacgctcactcggggagcagaacgccgctgtcgttttaaaagaatcagagcttaatggagaccgcttaattcaggcgatcgatcatattttacaagacgaaaagacgttggaagagatgaagatccgcgcgaaatcgcttggcgtgccggacgctgcggaacgcttgtacaatgtgctgaaagaattgaaacatcatgcaaaatgataagacagaaggattgtggaggttttcgatggataaggtgatacaagaattaaaagaacttgaagtcggcaaagttctggaaaacgagccgctcagcaaccatacaacgattaaaatcggaggaccggctgacgtgctggtgattccgaaagacattcaagctgtcaaagatacgatgaaggttgtcaagaagcacggcgtcaagtggacggccatcggcagaggctcgaatcttctcgttctcgatgaagggataagaggcgtcgtcatcaagctcggccagggactcgaccatatggaaatcgacggcgagcaagtgacggtcggcggcggctactctgtcgtaaggcttgcgacaggcatcagcaaaaaagggctttccggccttgaatttgccgcaggcattcctggttcggtcggcggagcggtttacatgaatgccggcgcccacggctcagatatcagcaaagtattggtgaaagcattgatcctttttgaagacggaacgatcgaatggctgacgaatgaagagatggcgttcagctaccgcacatccatccttcaaaacaagcggccgggcatttgtcttgaagccgttctccaattggagcaaaaagaacgcgatcagatcgtcgcgcagatgcagaaaaacaaagactaccgaaaagaaacgcagcctgtgtccaacccttgcgcaggcagcatcttcagaaacccgctgcctgaacatgcgggccggctagttgaagaggctggtttgaaaggccatcagatcggcggggcaaaggtttcggagatgcacggcaatttcattgtcaacgcaggcggcgcaacagcgaaagacgtccttgatttgattgcattcattcagaaaacgattaaggaaaaatacgatatcgacatgcacactgaggtcgaaattatcggagaaaaacggtaaacggcctctctacttcagatcgccttatgatataatgtatgaaacaaacaagcaaacggcatcctagtatgtcgtttgtttcgctaaacggaagctttttagcttgcccccgtgctttcatatgtcgaaaagcgcgtctttttccgaacaaaaataagcaaataaaagtctttttgtctgctttattaacctgaggtgagcctacgtgaaacccggtattgataaagaaaaagtagtgaatatagaagaacgtattcccaaaattaaagaacagcgaaagcaaaaggcaaaccgccggctgatcacctttattctgctctttttcacgatgatgctgatcatcatttacctgcagacgccgatcagcaaagtctcgaaggtagagatcaaaggaaacaaaaacgtttcaaaggaacagatcatttccctttcttcaatccataaaggacagacggaattttggagtctgagcaagcaaaaagccgcagaaaagatcgagcagaataaactgatcaaaaaagccgaaatttctaaacaactgaccaacaaaatcgccatctccatcgaagagtataaaagcattgcgtttttgcaaaaacataatgtgtactactccgtgcttgaaaacggcacggtgcttcctgaagaggtgacgccgactgacatcggaccaacccttaataactgggaggaagacgaaaagctcgttcaaatggcaaaacagctgaacaagctttccgattccgtgaaaaaatcgatttccgagatcaactatacgcctcaaaaatcaaacccttggctgatcaaactgtatatgaacgacggctatatcgtgacagcttcgctgaaaacgttcggacagaaaatgaacagctatccggcgatcgtaaaagagctgccgaaaggggaaaaaggcattatccatatggaagtcgcgacttattttgaacctctgaaaaaaacggatgaaagcaaaaagggagacggaaattgaagaggcacacagtcaatctttcactcgccatgcttgtcctcggcttcctgctgtctttctcctatcaattcgccagggaaaacaaagaccatgaagaaactgctgaaaattggaaagaggaatattccctgcgcgaccggctgatttcccaagaaaagcaaaataagaagctggaacaggagctttacaaaaaacagcaggaagtacagaaaacagagacggctttgaaaaaggaaaaaaaagagtactacaatattgtggaagatgttgagaggtacagaatgttcgtcggggaaatcggcgttcagggcgaagggatcaaagtgacgctgaaagacgcttcgtacatcccagagggtgagaatgtcaacaactatatcgtccatgaaagccacattttccgcctgctcaatgagctgtggatttccggggcggccgcggtgtcgatcaacggacagcgcgtgacacatcattcctacatatcgtgcaacggccctgtcatcacggttgacggcaaccagtatccggcgccgtttgttatttcggccatcggggatgcggatgtgctgatgccggcgctgaacattgcaggagggcttgtggaccagctgagccgcgatcatatttcagtcagcatcgaaaaacaagataatatcgagatggagccccttttgaagcaaggggaatgaacgttgaaaagttggtgggcggacattgaagaaaaataatcgtttcatcagtttgagcatcttgatgctcattttcggcattatgctgtccgtgcagttcaattcgctgaaggcgccgaaggtccgcgatacgcgggacatttgggacctcagggaggacttgaaggaagaacagaaaaaacagcttgatctgatcagcgaaattgacaagtatgaaaaaatgctgaacacatacagtcatcaagaagaaacctcgcggacaaaagcgttgaatgaaacgcttcaaaacttaaaaaaacaggccggcttcacagatgtcacagggaacggaatcatcatcaccatttctcagctcttctcggaagaattgacaggggaatcgattcaaaatccccctcccgaccttctgaaaaagctgattaatgaactgaatatgtatgaagcggaagaaatatccatcaacgacagaagggttgtcaacacgacggtgatccgcgatatcaacggaacaaccaaaatagacggttatcctttggacaactatccgataacggtaaaagtcatcggcaaaaacgccgataaactatatagccgaatgaatgcttcatccctgcaggatctgttcgcgggagaaaatctggatttgcaaatcaaaaggcctgaaaaacaaatcaaaatcaaagcttacgaaggttcaatgcaagttgcgccattgaaaccgctcgaaaaatcaaaaggagagaattcctaatgtggcttccggttttagggcttttgctcggaattacaatcgggttcagcacgaatttcaccattccggatgagtactcaaattatttgtccctggcgattctggcatcgctcgatacgttgatcgggggaataagggcccatttggaaagtgtatacgatgaactagtttttgtgacaggctttttcttcaatattattcttgccataagtttggcttttctgggcgttcatcttggtgtagacttgtatttagtcggtatgtttgcatttggcgtgaggctttttcaaaacatcgcggtcatcagaagaatactgctcgccaaatggacggcatcgaggagaaaaaattaaaaaaaatcggatttaaaagaggatatacataggatatcacgaatattcacagtaatcctaaaactgaaaacgaagcgtattggtttgtattgattgttacacacttgtaaaaccagattcattgtattgttgttcggcaaataatagaatagaattgactgaaatgtgaggaggtgccatagaatgaacaacaatgaactttacgtcagtctagacatcggtacgtccaatattaaagtgatcgtcggtgaaatgtcagacgattctcttaacattatcggagtcggaaatgttccctcagaggggctgaaaaaaggatcaatcgttgatatagatgaaacggttcattctataaaaaaagcgtttgaacaagcagaaagaatgataggttttccgctgacccacgcgatcgtcggggttaatgggaactacatccatattcaagatacgaacggtgttgtggctgtctcaagcgagaataaagaaatccacgttgaagacgtgcgccgggtgatggaggccgctcaagtcgtttccatcccgcctgaacagctgatcgtcgatgtgattccgagacagtttatcgttgacggaagaggcgatattacagatccgaaaaagatgctcggcgtccgccttgaagtggaaggatcgctgatcacgggctctaaaacgattttacataacctgctccgctgtgtggaaagagcgggaattgaaataacggatatttgccttcagccgctggctgccggatctgtcgctttatcaaaggacgaaaaaaacctcggagtggctttaatcgacatcgggggaggatcaacaacggttgccgtatttgaggacggccaccttcttgcgacccgtgtcataccactgggaggagaaaacatcaccaaggatatttcaatcggattgcgcacctccacggacgaagctgagcgggtgaaaaagcagtttggacatgctttctacgaagaagcgtcggaagaggaaacatttgaagtcgccgtgatcgggacggaccaaaagcagacctttactcagcgggaagtggcagacattatagaagccaggcttgaagaaatctttttattcgtggcagaggaactgcggaacatgggaataaaagaattgccgggaggctttgtgcttacagggggacaggctggaatgccgggggtcctcagcctcgcacaggatgttcttcaaaataacgtcagagtggctagcccgaattatatcggtgtaagagaacctcaatacatgacaggagtcggcctcatccaattcgcttaccgcaacgcaaaaatccaaggtagaaaagtagggtttaagatgccgaaacaagcggttcaggaagtcgcggcaactcatcaaaaagaagtgcagcagcgaccgaagccaaaatccaagcggcaggctcaagctgagaaaaagccgagcaaaatgaagaaaatatttaacttcttttgggaatagagattagtcattcgacggattaggaggatttagcatgttagagtttgaaacaaatatagacggcttagcatcgattaaagtaataggagtaggtggcggcggtaacaatgccgtcaatcggatgatcgaaaatgacgttcagggagtcgagtttatcgcagtcaacacggatgctcaggctctcaacctgtcaaaagcggaaacgaaaatgcagatcggtgcgaagctgacgcgcgggctcggcgccggagccaatccggaagtcggcaaaaaagccgcagaggaaagcaaagaacaaattgaagaagcgctgaaaggtgcagatatggtgttcgtcacagccggaatgggcggcggaacaggaacgggcgcggcacctgtcatcgcacaaatcgcaaaagatctgggcgcattgactgtcggcgttgtcacaaggccgtttacctttgaaggaagaaaaagacagcttcaggctgcaggcggtatttcagcaatgaaggaagccgtcgacaccctgatcgtcattccgaatgaccgtcttcttgaaatcgtcgataaaaacacaccgatgcttgaagcgttccgtgaagcggacaacgttctccgccaaggtgttcagggcatttcagacctgatcgcaacgcctggactgatcaaccttgactttgccgatgtcaaaacgatcatgtccaacaaaggttctgcactgatgggtatcggtgtagcgacaggcgaaaaccgcgctgcggaagccgctaaaaaagctgtttccagcccgctgcttgaaacggcgattgacggcgcccaaggcgtgctgatgaacattacaggcggcaccaacttaagcctatacgaagttcaggaagcggcggacatcgttgcagctgcatctgaccaggacgtcaacatgatctttggatctgtcatcaatgaaaacttaaaagacgagatcgtcgttacggtgatcgcgactggatttatcgaacaggatcaagattcatcaaagccgcagagacctttaaaccaaggcttaaaacagcatcatcagcctgctccgaaacgggagccgaagcgcgaggagccaagcatgccgcatcgcagcccatcacagcctgccgaggatacgcttgacatcccgactttcttaagaaaccgcaataaacgctaaacgtctacaatacattggaaagctgccgacaagaagtcggcggctttttttgcgcgctggaacagcagccgatgttccttcccctccaaaagcatcaattgtcttcttgatggaagcggctccctcaaaagccttgcatctaatctctctcttttctcccgaatgtacagattttccttttttcttgtcatcaggccgaactatgaacggtgaacaagtcatatgtaaaaagaacgaatttgcaaactgacaaaggaaaaatgacagaatacgacaatatctataaaccttttctattaccattattaatagattctgtttctagacatagaaacgcaagaaacgactatatttgctattgcttaaaggaggatgtcatgtgaagaaaaagccattattccgcacgttcatgtgcgctgcactcatcggttcacttctcgctccggttgctgtgcaggctgatacaggcacggcagcgaagacaaaggaacaaagcaaaatatctagcgctctttataaacgttttgagaaagaaggtaaagtgacctttttaattaaaatgaaaagccaggcgaaccttcagcaagcggcaaccgcggctgaaaaacgggcgaaagcaagtgttatgaccgtgaaaaaagcaaaagagatcaaacgctcggcagtgctgacttccctgcgtacaaaagctgaaagaacacaaaaagatttgaaatcgtttttggaaaaagaagagaaaaaaggaacagctaagaaagtggaatctttctatattgtaaacggcatcgccgtgacggcgacaaaagatgttatggaaaaagcggcttcatttcctgaggttgaaaaggtgctgcccaatcaaaaaatcaagctgggcaataccgaaaaacctacagtagaatcgaaaacaaccgcggatccgcacccctgcttccaacattgagcaggttcatgcgccggatgtctggaaaaagcgctataaaggcaaaggagccgtcgtcgcttcaattgacaccggcgtagagtgggatcatccggcgttgaaaacaaagtacagaggctacaacccttctaaaccgaacagtccagacaatgagttcaactggtttgatgcggtaagcaataagaaaacgccatatgatgacttgggccacggcacacatgtgacaggcacgatggtcggctcagaagccggcggcaaaaaccagatcggtgtcgcgccgacggcgaaatggatcgctgtcaaggccttttcagaggacggcggagatgaaaaatcccttttggctgcaggagaatggattttggccccgaaagatgcgaaaggaaaagcgcaccctgaaaaggctcccgatgtcgtcaacaactcttgggcaggggaacgcggactcgatgaatggtatttggatattgtcaaagcttggcgggcagctgatatcttccctgcatttgcagcgggcaatgtcagcgaattcgaaccgggcggaccgggttcagttgaaaacccgtccaactatccgcaatctttcgcgattggcgcagttgacagctcaaacgcgttagccgacttttcattgcaagggccttcgccatatgacgaaatcaagcccgatatttctgcacctggcgtcagcatccgctctgcttatccgggacataagtatgctgcaatgaacgggacatcgatggcgaccccgcatgtatccggcatcgtcgccttaatgagggaagccaatccggacctcacagtcgatgaaatcgagcgcatcctgctgaaaacggcgacgcctctgactgacaaaacgtttaaaaaatccccgaacaacggctacggatacggcttggtcaacgctttaaaagcttttgacgcagcaaaaaaaactaaatgataaaaaaggacaaaacctttaagcggttttgtcctttttttatctaattttaaacaaggccttgacaaataccgacaaaataattaaccagtttttactatatttaagttacatcaaagtcagacaaggcgtccacaaggagggggggacaggaaaattcagctaatttcataaaaaagggggatgttcatttgaaaagaaagctgagaaaaaaggcgttttccaccattttaagcggtttgttaatcggctcgctgttcatgcccgccgtttcagatgccgcggcaaagcccgcacttacttccatgaaagaacaagcagccgcagggaaggggaaaatttcaaaaactcttgtcaaacagttcaaaaaagaagatcaagtcacatttttgattaaactgaaagatcaagtcgatacaccaaaagtggccaaacaggcggaaaagaacgcgaagaaaaagtcgctgagcgctgctaaaacagaatatcaaaaacgctcggctgttgtttccgctttaagagtcaaagcggatgagtcgcaaagcgatctgaaacgttatttgaaaaagcaggaaaaacaggggaacgtaaaaaaaatcagatcctattatattgtcaacggcatggcagtccatgcgacgaaagaggtcatggaacaagtagcggcttttccggaagtagaaaaagtgcttccgaacgaaaaaaggcagctgatcaaaccgactaaacagtctgtgaaaaaatcagcagccaaggatgaaaaagaaatcgaatggaatatcaatcgagtcgacgcaccaaaagcctggaaattgggatatgacggatcgggcacggttgtcgcgtcgattgatacgggcgtgcagtgggatcatccggccttgaaagaaaaataccgcggatatgacccgaagcatcccgatcagcctaaccacgaattcagttggtatgatgcggtttcaggcgcttctgaaccatttgacgatctggagcacggcacgcatgtaaccgggacgatggtcggctcagagcctgacggccaaaaccaaatcggcgtggcgccgggtgcgaagtggattgctgtgaaagctttttcagatgacggcggaacggacgaagaccttattgcagcaggtgaatggattttggcgccaaaagataaagacggcaacccgcaccctgaaatggcgccggatgtcgtcaataactcatggtcagggggagccgggattgatgagttttacagggatatcgtaaaagcgtggcgagctgccggcatctttcctgagttctctgcggggaacgtcgatttcgccaatccgggaggacctgcttcgattgccaatccggcaaactaccctgaagcgttcgcaaccggagcgacagacatcgataatcgcttagccgatttttcacttcaaggtccttccccgtatgatgagactaagcctgaaatatcggcgcctggtgtcaacattcgctcatctgtgcctggaagcggctatcaagacggctgggacggcacttcaatggctggcccgcatgtcgcagccgccgccgctcttatcaagcaagccgattcgtcgatcactgttgatgagaccgaaaagattttgatggaaactgcaacaccgctcacagacagcaaatttaccgaatcgccgaacaacggatacggccacggactcgtgaacgtgtttgacgcagtgtccgctgtgacaggcgggttgggcagagcggaaggacaagtcggaaaagaaggcgaagacaaaagtccgccggccttaaaccatcaagagatcaccgaaatttactcaggctcgaaaacgcctcttaaagttgatgtagaagacgatgtcagcatcatatcggtcaaattgagctataaaacagatgacgccgattgggagacgatcgctgccaaacaaacttccggcgactataaaaaaggaacgtacgaggtggctgtaactgtttctgaagggaaaaccctttcctacaagtggattgtcaccgatttcggaggcaacaaaacggaatccaaagtgtacgaagtcccgatttccccggctgtgacaacagggtataaacaagatttcgagaattccgccagcggctggctcacatcaggcgtgaagaattcatgggagcgcggaattcctcagtcaggcccgaacgccgcagcatcgggaaaaaacgtattcgcaacaaatctgacagggccgtatgaaagttcggctaatatgaatcttctcatgcctcctgtcagcgttccaaaaaatcaaaagctttatctcacatacaaatattggcacgatattgaagaggactttgattacggcttcgtttacgtacagcctgaaggaaaaggtgaatggatcccggctgccgagtacagcggcaagacatcagaatggaaagacggacagatcgatttgtcggaatacgggggacagacgattaaggtcatgttcaaccttcaatctgacgacagcattgaaggtgacgggctgtacatcgatgatgtagcgcttgtcaaggaagtgaagagcgccggtacgaaaaaacgattgggcgttgaaaaacagccggccaaaatgaaggataagaaaacaaagaaacgaatgattgatccgaaaaaagcaaaaccggcagaagcccttcaggaaaaaaccgaaacgaaaaaagcagctcctgcggttcttccggtgcgcgctcaggtcagcgtgctggaaacgggcaaatcgacatattccaaccaggcaacaggcgcatacagcttggctcatgcacctggaacctatacgctgaaagcggaagcgtacggatatgaatcaaacgcccaaaccgtaaaaatcgagtccgacaagacaacaacggcagactttgttttaaaagaactaaaaaaagggacgctcaccggaacgataaaaaataaaaaaacgggcgaacccgtccggcatgcaaagttgtatatcgttgaagatgcagctgtaaaaccagtccagacggatgatgacggaagctattcattaacggcctatgaaggctcgtatacggtaaaggtctctgcaaacggatattacagcagcgagttttccgttgatttaaaaggcgatgtctcgaaagatatcgatctcgatcctttcatcggctatccgggggaaataggctatgatgacggaaccggggaaaacgcctgggctttctatgaatccggcaacgggctggccgttaaaatgacgcttgaaaacgggcaggaaaaagccatgctgaaaggcggtttgtttaaattctgggatacagaattccctgatccgggcggcactgattttgcagtagaggtctatgatgcttcgggtgaaaaaggctctccgggcaaaaaaatcgccggcccgttcaaggctgaagcgctccgcacaggcgaatggacgaccgttgatttaggtgacgaaggcatcatcgtcggaaaagacttttacctcgtatacgtccagaaagaggatctggccaactcacctggacttgctacagacgaagacggagaatattccggccgcaactggcagtatacggacggctcatggtcaaaagcgccatcagaccaaggcaactttatgatccgcgctttggtcgactatgaattgtcggtgcctgtgattacgtttcctaaagacggattcatcaccaaccaaaagaacgctgtcattgaagggacatcctcgccgaatacgaccgttcatctctttaacggggatgaagaagccggaacagcggaaacggcggcagacggcactttctcaaaagaaataccgttgaataaaggggaaaatgtcatcaccgcgaaatcgtcatcggcttccggaacgactgatgcttcagaaccggtccggatcgtccttgaccagaaaaagccgaagcttacaatcgacacgccggaaagcggctcaaaactcaataaagagaccgtcaccgtgaaaggaacagtatcagacgatcacttagaatctgttcatgtaaacggcaaaaaagcagctgttgacaatggcgaatattctgcaaggattatgcttgacaacggcaaaaatgaaatcaaagtaacggcatcggatgcggcaggcaacaaaacgaccaaaaaggtcacggtagatgtcaactttgaagcgccgcaaatcaccggcttgaaaccgaccgaagatctcgagctcaaaacgggagaaaccgtgaaaatcgagtttgaaagcgccgctgatttggatgctgtctttttgatcagaatgccgctgaccaatttcaaaaccgctgcccaaaacgtaacggagctgccgatcagagaagtctcaaaaggaaaatatgaaggatattggaccgctacttcaactgcaaaagcaaaaggagcggaaatcgaggtcatcgtcagagatgattacggcaatgaaacgagacaaacggcaaaaggcaagctgtatatcaatgaaaagctgaaataaaggtgaaaagacgctgtctttaatggcagcgtttttttcgttttacgatcgacaaattcagtacgaaaacttcaaaaaatgtacgatttacgcaacattaattgacagactttacctttgggcttgatttatacttaggaaaacaaacactaaggtcaccgagccgcagaaaggggaaggatgtggaaatctatttagatgcgatatggctgttaaacttttgttttgacttgctgcttttaatgatgaccgcatttattttaaagcgaagggttaaaaagcggaggctgatcctaggggcatttgtcgcgtcaagcatcgttctgtttatgtttacacctttttcaccgtacgtccttcatcctgccggcaaactgtcgttttcggttgtgatcgttcttgtggcatttggttttaagcggttccggttttttttgcagaatttgttttctttttattttgccacttttttaatgggaggagggattatcggagcgcattctttgcttgaaacggattcgatcatggaaaacggcgtctttatgacgaattggtccggttttggagaccccgtcagctggctgtttgtctgtgtgggttttgcggctgtatggctgttttcaaaaaagcgttttgaagatgctgaagcgaagaaaattcaatacgaagaacgcgtccgcctagaggcctgcattggtgaacatacgcttcatttcaccggattgattgactccggaaaccagctctacgatccaatcacaaaaacgcccgtcatgatcgtcaatattgaaaaattgaaagttgtattgggagaagaggcaagtgtgaccatcaaggaaatgagcccgcttgatgccgtcgggaaactggatgaagcactgccgtatatcgggcggatccgcctgattccgtactgcggggtcggccatcagcatcagtttctgctctgcttaaagccggatcatgtgctcgtttgtacggaaagagaagtgattgaagcgccgaaatgcctgattggcatcagcacatcaccgctttccgctgacggcgaatttgacgccatcgtccatccgaaaatgctggccggaaacccggtcaaacacgtttcttaaacttgaagtctgttacattatcatactcctgaagacgtttatttagaagggggaggaagatgaaaaaactaaaattaaggttaacctatctatggtacaaacttttaatgaaactggggctgaaaagcgacgaaatttattatatcggcggaagcgaggcgcttcccccgccattgtcaaaagatgaagagcaggtgcttctccataagctgcctgacggtgatcaggcggcacgagcgattttgattgaacgaaatctcagactggtcgtgtacatcgcgagaaaatttgaaaatacaggcatcaatatcgaggatttaatctccatcggcacgatcgggctcatcaaagcggtgaatacgtttaatcccgagaaaaaaatcaaactggctacatatgcttccagatgcattgaaaatgaaattttgatgtatttaagaagaaacaataaaatccgttcagaggtatcattcgacgaaccgctgaacatcgattgggacggaaatgagctgcttctctcagatgtgctcggaacagaaaacgacattattacaaaagacatcgaagcaaacgttgacaagaagctgctgaaaaaagcgcttgaacagctcaatgacagagaaaaacagatcatggagctccgtttcgggcttgtcggaggggaagaaaaaacacaaaaagacgttgccgatatgctcgggatctcccagtcatatatttcccgacttgaaaaaagaattattaaaaggctccgaaaagaattcaacaagatggtttaatttttttatgaaatttgaagcattgacagtcaagggttttcggctcgatcttcttatttttggaaattaacgatgcatatttttcccacccgaggagatactgaactttgtacagcagctcctgtagggagggaaaaaagtgtcgaggaataaagttgaaatctgcggggttgatacatcaaaactgcccgtactgaagaacgaagagatgagaaagttattcaagcaaatgcaggatgaaggagacacaacagcaagagaaaagcttgttaacggcaatttgcgccttgtcttaagcgtcattcaaaggtttaacaacagaggagaatatgttgatgacttattccaagtcggctgcatcggactaatgaaatcaattgataattttgacctgagccacaatgttaagttttcaacatatgctgtaccaatgatcatcggagaaatccgcagatatttgcgcgataacaacccgatccgcgtctcacggtcactcagggatatcgcgtacaaggcgctgcaagtgagagaacggctgatcagtgagacaagcagggagccgactgctcaggagatcgctaaagagcttgaagtgtcccatgaagaaatcgtttttgcgcttgacgccattcaagatcctgtatctttgtttgagccgatttacaatgacggaggagatccgatttatgtcatggatcaaatcagcgatgagcgcaacaaggattcgcaatggatcgaagagctcgccttaaaagaaggcatgagacggctgaatgaacgggaaaaaatgatcctcagaaaacgcttcttccaaggcaagacgcaaatggaagtcgctgatgagatcggaatctcccaagcccaggtctcaaggctggaaaaagccgccattaaacaaatgaataagaacattcactaagccgcagtcaatctgcggcttttcacatgctaaaaatggaaaatctctcattcactttattaaatatataagctataataaaagaattatattttaatttatcagaatatttacataaaaaaagggggattttaagtggttctgcagcttgagcatgcttcactaaaacgaaacggagagtggatattaaaggatattgattggacggtggaaaagggggagcactgggcgttatacggattgaacggagccggcaaaaccgcactgctcaatatgctgtgcgcttattattttccgacaacaggaaaagtcaccgtgttagggcgcgaattcggaaaaacggagcttggcgagaagcttcggcgaaaaatcggccttgtttcagccgccctgcagcagaagctttatcctgaagacagtgcatttgaaattgttttaagcggcgccttcgcttcgatcggcctttatgaatcgccttcacagtctgtcagagagaaagcggtcgccctcttggaggaattcggctccatccgctatgcggacaggagatatgaaacgctctcccagggagaaaagcaaaaggtgctgatcgcaagggccttgatggccgatcctgagctgctgattctcgacgaacctgtcaccggtctagattttatcgcgagggagcaggtgctggatacggttgaacaaattgccaagaaagacagtgcgccgtccatgctttacgttactcaccatgcagaagaaattctccccgctttcagccaaaccctgctgttaaaaaaaggggaagtgtttgcgttgggaaagacaagagagatgatgtccggcgaggttctgtccgaatttttcgatatgcccgtccaggcggtatggacggaagatcggccgtacttgtccaagaaaaaaactgcaaacctcaatgtttaaagcttcggatgtgtttgggagcctccttctattatggaggctctttttcagctttcatcatcttaaagaagctggtaagataataaagaacgtcatgttttaggggagttcatcattatgatcattcaattcattcgctacagataatgaaaggtatagacaaacgcttagcccatccacacctatggctttaaaaatgccgaaggagcgggtttatttgtctatgcctttttcattgatctaaatacgaatgaatgaggtgtaacaatgatgaataaaaaaattaaaaaagagcagcgcttatgaaggagcatgaaacgatgtttcagtgcccgctatgcgccgcgaacatggcgatcagcgagttaaaaagccttatatgttcaaacagacatacgtttgatatcgcaaaaggagggtatgtcaatgtcgcgacgcattctccttctgttaaatatgatatagatttatttgatgccagaagaatgttagcagccgccggcttttttgaaccgatgagaggcgcgttgacagaccgtcttaaacaagccggcctgccgttttgcaattttgtcaggatcctcgatgccggctgcggggaaggttcgcatttgacgcgaatcgctgaaacgctagaagcgcgtttcggaacgcctgtccttggagtcgggctggatttggcgaaagccgggattgtatcggcggctaagcaagaaagagaggcgatctggtgtgtcgccgatctggctgccgcaccgtttcggaatcgttcattcgacgcgatcctcaatatattgtcgccttctaattacgcggaattcgagcggctgttatcggatgacggcatcgttttgaaagtgattccgagaagcggccatctgaaagaactgaggagatttttgtacgacggctcggacaaacaagcctatacgagcgaggatacggctgagcgcttcgcgtctcattttgatctgatcgacagaacggagatcgcctacagcaaacgtttagaccgaatccagctcccgccgctcatcaagatgacgcctttatcatggcgcgcgcgaaaggagcggatcaatgcctttctaaagaaggaatccgctgttatgaccgtccatctcgatattttagccggcaggaaaaaaacgaaataaaccactgaaaaggcagtctaaataaaggactgcctttcatataatcttaaaaggacatttgatcagaggaggcgtgcggtggacatgatgaatatttctgatttccagataaaagatgtcgttaacgtatcaaacggaaaaaagctcggcagcatcggcgatatcgatataaatgtaacgacaggcaaaatacaggcgatcgtcatcggaggaacggggaaagtttcggatttttcggaaaagaagaggaaatcgtcattccgtggcgaaatattgttaaattggagaagatgtgattcttgtgcgtttaagctgatctagcacaatcagatgctgcctgatcaatcggcggacctttatccgcctgcttttttcaaaatgttgtgaacgatgagaacgtctgcaaaagcagggataaatgttgcaaacaatacatttcgtttagttttttgaaacgaaactaaacgaatgcatcaagatgtgttaaaataggagcgatatgatgaaagactacgatgtttgtcgaaaggctgatcaccatgaatacatataacccctttcgtcttgatgctccgtcaatgcttttgattgaggaatggaatcagacggcggaaaccggcggagccgtcacagccggatttacgacaaaaaacggcggagaaagcgaaccgccttttcactcattgaatacagggctgcacgttcaggatcatgaacagcatgtcatcaataacagaaaaaaggttgccgacatcctaaaaacagatctgcacgactgggtatttgctgatcagacgcatgaagaccggattcataaagtgacggatggcgatcgcgccagcggcgctttccgatacgatacggcgctgaaggctacggacggactttatacagacaggccaaacctgtttttggcgctttgctttgccgactgcgttcccgtttatttttacgatccggtccgctcgctggtcggcatcgctcacgcgggcttgaaaggcaccgcacttgggatcgccgccagcatggttgacatgtggatcaggcgggaagggtcgaatcccgcagacatccgtgccgtgatcgggcctgcgatcggttcgtgctgctacactgtcgacgatcatgtaatagacaaaatcagaaatcttcctcttcagcaagaagacaaagcctttttgacgataaaagaaggggagtaccgtctcgaattaaaagaagtgaacaggcagctgcttgtacacgccggaattccaaacggccagatcgaagtgagttccctttgtacgagctgcgagcgttcactgtttttctcccatcggagagaccggggaaaaaccggacggatgatgtccttcatcggattaaaggaggtatagcttacaggtggatgtaaaaagcaatttacgacatataaatgacaggatcaacgaagcgtgtatcaaagcgggcagaacgcccgacgaaatatccgtcatcgctgtcacgaaatatgtttccccggaacgggcgcaggcagcgctggatgcaggaatcaggcatttgggtgaaaaccgtgataccgggctgcttcacaagctcgacgttctgaaagacagcgaaccggtatggcattttatcggaaccctgcagacgagaaaggtaaaagcaatcatcgatcatgtctcatatatccattctttagacaggctttcactggccgatgaaattcaaaagagggcaaaaaaaccgattgactgttttgtccaggtcaacacatcccttgaaccttcaaaacacggcatggcaaaagaagaagttcttccttttgtaaaaaaactgtctggatacgaaaacattcggatcgcgggattaatgacgatggctccttttacggatgatgagaaggcaatcagaagctgttttcgcttgctgagagagctgcgcgacgaggtgcgcggccttgatcaatggaacgctccgtgcagcgagctttcgatgggtatgtctaacgactatgcgatcgcagtcgaggaaggcgcgacattcgtcagaatcggatcttccttagtcggaaatgaaactggaggtggacaatcatgagtttgaaaaacaaaatttaaaaactttttttccttggatgatgaggaatacgaatacgagtatattgaaacagacagggaggaaatccctgaagagcatgaatcaaaagacagaaccgcctaccagtctaaagcggctgggaagcagaatgtcgtaagtttgcaaagcgttcagaaatcttctaaagtagtgttaagtgagcctcgggtgtacgcggaagcccaggaaatcgcagaccatatcaaaaaccgacgcgccgtcgtcgtgaacctgcagcgcatccagcacgatcaggcgaaaagaatcgttgatttcttgagcggaactgtatatgctctcggcggcgatattcagcggatcggagcggacatctttttatgcacgcctgagaacgtcgatgtttccggcacgatttccgagctcatagaagaagaacatcagaggtggtaaatcgcagatgatcctactttatcaaattttaagcacgcttttaaccgtctattcttttgcgctcattatttacatttttatgtcttgggtgcctaatgcaagggaatcttcattcggccgggtgcttgcttcactttgcgagccttatctcgaaccgttcagaaggatcattcctccgctcgggatgattgatatttctccgattgtggcgattttcgtcctgaaattcgcagatgcagggcttcttgcggttttcagaatgctcggcgctttttaattgagatcatgccgatttcccgtaaggacttgccggcggcagcggcgccgcttttcatgagtgtgccttcaatctttgcgggccgagtatcgggcttggctgtagccaggcctctttacatagaaaggaaagacaatgagcgatatttaccagcatttcagaaaagacgaagagccgtttatcgaccaggctcttgagtggaaaagaatcgtagcggaacagtactggatgaagctgaccgattttttggatccgcgggaacaggtgatcctgcagtctgtcatcggtcagtcggacgaagtgaggcttgaatttttcggggggttccctgaggctgaacgaaagcgggctgtgctgttccccgaatatgccgagccgtctgccgaagattttcagcttcaagcctgggaagtcatctacccgcaaaaatttgcctccatcgagcatcgcgagcttctcggctcattgatgggcatcggattgaagcgccaaaagttcggcgatctgatcttttcggacggaacatggcagtttatctgttcggaagaagtcgctgattttgttttcacccagctgacacaaatcggcaaggtgaaagtttcccttgaaaaaattccgctttcaaagcttaaagtaccggagcaggatgtcgaaataagggatgatacggtttcatctttgaggcttgatgcgatttgctcggcaatgagcaggcaatcccggcagaaagcacaggttcttgtgaaaaacggcctcgtgaaagtgaactggaaagtcatcgaagacccttcatatgcactggctgaaggggatatggtttcgatccggggatttggccgcttcagaatgaaaaacattgacggcaaaacgaagaagggcaaatggagattgacgtttgaaaaacaaaaatgacgcgttttaacagttttttctccgcccggtcgaattttgctttataatgttgactaggacaagtgtacataaaagaaaaaaatggaggtgggcagcatgcctttgacgccaaatgacattcataataaaacatttacgaaagcgttccgcggctatgatgaagatgaagtgaacgaattcctggcccaggtgaggaaggattatgagatcattctgcgcaaaaaaaatgagcttgaaacaaaggtgaacgagcttgacgagcgtctcggccatttttcgacgatcgaagagacgttgaataaatcgatccttgtcgcacaggaagcggcagaagacgtaaagcgcaattccgagaaagaagcgaagctcatcatccgtgaagctgagaaaaacgcagatcggatcattaatgagtctctttcaaaatcgagaaagatcgctatggaaatcgaagagctgaaaaagcagtcaaaagtgttcagaacccgtttccaaatgctgatcgaagcgcagcttgacctgttgaaaaacgatgactgggatcatttgcttgaatacgaagtagacgcagtaatggatgaaaaggaatagattttcgtttgcaatcttgacataccgtcatctgttcgcatataatacgttcataaattgagtgaaaaacgtttgagagggacagacattgattcctgaaaacaatgaaagcgacccgggggcggtgtaagcccgggattgttggaatcgttgtgtatcagccctcaagtttcctttctgaaccgtccagtaggaaaggacgtcccatcacgttacgatgtttgagcggataagccgaatcggcttgtctaaaagggtggtaccgcgagatcaaagccttctcgtcccttatgggatgaaaaggctttttttgttttagaaaagatgttttggaggaatggtaatggattataaagacacgctcttaatgccgaaaacagattttccgatgagaggaaacctgccgaaccgcgaacctgaaatccaggggaaatgggaggatatggacatttacagcctcgttcagaaacgtaccgaaggccggccgatgttcgtgcttcatgacggaccgccgtatgcgaacggcgatattcatatggggcatgcgcttaacaaagtactgaaggatttcatcgtccgttcgagatcgatgagcggctatcatgcgccgtacgttccgggctgggacacacacggcctgccgattgaaacagcgctcacgaagaacaaaaaagtgaagcgcaaagaaatgacagttgccgaattccgcaaactttgcgaagaatatgcatggcagcaaatcgaaggccaaaaagcgcaatttaagcggctcggtgtcagaggagattgggaaaatccatacgtgacgcttaagcctgagtttgaagcgcagcaaattaaagtattcggcgaaatggcgaaaaaaggctatatttacaaagggaagaagccggtttactggtctccttcaagtgagtctgctctggctgaagcggaaatcgagtaccatgataaacgctctccgtctatctatgttgcatttgatgtaaaggatggaaaaggcgtattaacaaacggcgaaaagattgtcatctggacgacaacgccgtggacaatcccggccaacctcggcatcgccgtacatcctgaactggagtacagcgtcgttgctgccggcggcgcgcgctacgtgatggcaagcgcattgattgaaagcgtggcaaaagcgatcggctttgaagatcatgaagtcgttcagactgttaaaggtaaagatttggaacatatcgtcgcagttcatcctctatacggcagagattcgcttgtgatgctcggcgaacacgtaacaacagatgccggtacaggctgcgttcataccgctccaggacacggggaagacgactttatcatcggtcaaaaatacgggcttgacgtgctttgtccggttgatgaaaaaggacatatgacgagcgaagcccctggttttgaaggactgttttacgatcaggccaacaagccgattacagaacagctcgaagaaaaaggcgctttgctgaagcttgatttcatcactcactcctatccgcacgactggagaacgaaaaaaccgactattttccgtgcaaccgcccaatggttcgcttccatcaaagactttagaggcgagcttcttgaagcggttaaagaaactaaatgggtgcctgaatggggcgagacacgcctctacaatatgatccgcgaccgcggcgactggtgtatttcaagacagcgcgcatggggcgtgccgattccggtattttatgcggaaaacggggagccgatcatcacggacgaaacgatcaaccacgtttctgaactattcagggagcacggttcgaacatttggtttgaaaaagaagcgaatgaactgcttccggaaggctttactcaccctggaagcccgaacggcaagtttacaaaagagcaggacatcatggacgtctggtttgattcaggttcgtctcatcaggccgtactggaagagcgcgaaggtcttgtaagacctgccgacttgtatctggaaggatctgaccaataccgcggctggtttaactcatcgatttcgacagcggttgccgtaacaggcaaagcaccttataaaggcgtgctttcgcacggttttgctcttgacggagaaggccgcaaaatgagtaaatcactcggcaatgtcgttgttcctgcaaaaatcatgaaccagttcggggcagatattttaaggctgtgggttgcgtctgtcgactatcaggcagatgtccgcgtgtctgacgcgatcttaaagcaagtcgcagaagtgtaccggaagatccgcaacacgttccgcttccttcacggaaacattgctgattttgacccggcgaaagatgcaatcgctgtggaagatctgagagaagtcgatcagtacattttgatcaagctgaacagcctcattgaaaaagtcaaaaaagcgtatgaagaatacgattttgcggtcatttaccatgctgtccacaacttctgtgcgatcgagctcagctcattctatatggactttgctaaagacgtcgtttatattgaacacgccgatcataaagaccgccgcagcatgcagaccgttttttacgaaacgctgcttgcgcttgtcaagctgatcgcgccgattctgccgcatactgcggacgaaatgtggagccacttcacattcgtatcggaaaaaagcgtgcagcttacagatatgccggaaacaagagacattccgaatgcaaaagagacggaagagaagttcgacagcttcatgaagctgcgcgacgatgttcttaaagcgcttgaaacagcacggaatgaaaagatcatcggaaaatcttcggttgccagcttgacgctgtatccgaatgaagaagctaaagcgctgctttcttcaatcaaggaagacgtcaaacagctgttcatcgtgtcggagcttgccatcggcggaacggaagccgatgcgcctgaggatgcgcagtcgtttgaaacaggaaaaatcgtcgttgctcaggcagaaggcgagacttgcgagcggtgccgcatggtttccaaagaaatcggcgaggatcccgatcatccggaactctgccctcgctgtgctggaattgtgaagacgtattatcaaaattaaccatgaagcggttcggagtttttccgaaccgcttttagcatgccgccaaaccttatcatttgctgtcatgcctgctaagtaaataaaaaggatcggcagctaacctgcttgaacgccgccgccacatcctgtgaaagtccgcagtaaggatgccattgctgacatcgttttgtacgtcaggaaaaatcttttgggcttggataccggcattgtcggtaacactaaggtcacaaacgataagagcaggagttgatgtaggcgtgaacgagcagctggcggcaattcataccgaacttcttcaaatgaaggaagagttggaagcaaggctttttgaatactccttttttcagcaggattctcagggcatcagttcgtatcagcaggcaacacttatgtatcatgtaaaagaagagcttcaggacgtgcttttggccctttcaaaaatcgaaaacggaacatacggcatttgcgaagaaacaaatcaggctattccgctggcaaagatggctattctgccgacggcgcgcactgcgaacgattttttatatcatgcccaatttgaaaaaaagacgcttcctatttgggctgagacggatgaaacgttcaaccgggcgctctactcataacattctgcaagaggggagggcatttgccctcttgcaggatgtcaatgaatattcctttactccttttctttttcttgttaaaatgcttaaatgaagagaaacagaaactggaggaacggtttgtgccttattacataattgcgctgctcattatcggtatcgatcaatttacaaaatggctggtcgtcagcaaaatggagtacggtgaaagcatccccgtcatcgatggcttctttcagattacgtcgcacaggaatacaggtgcggcatggggcattttggccgggcagatgtggtttttttacatcattacgacggtggtgatcatcggcattgtatactacattcaaaaacatgcaaaaggacaaatcctgctcggaatcgctctcggtttgatgcttggcggtgctgtcggcaatttcatcgaccgcgtgttcagacaagaagttgtcgattttatccacgtgacgatcgtcaattatcactatccgattttcaacattgccgattcatctttatgcatcggagtcctgctcttatttatacaaatgctgttagacggaaagaagaagaaggagctgtaacatggagcattatgatatgaccgttcatgaagaacataaaggtgaacggattgacaagtacttgaccgcagttgaagcggattggtcgcggactcaagtacagcagtggattaaagaagaccgtgtgctggttaacggaaatgcggtgaaagccaattataaagttcaggaaggggatgcggtgtcagtccaggttcccgaaccggaaccgctggatgtcacggctgaaccgatggatcttgatatttattatgaggaccaggacgtactggtcgtcaacaagccgcggggaatggtcgttcatccggctcccggccatttgacagggacgctagtcaatggtttgatggcgcattgtgacgacctgtcaggcatcaacggcgtgatgagaccggggatcgtccaccggattgataaggacacttcaggcctgttgatggttgccaaaaacgacatggcgcatgagtcgctcgtgaaccagcttgtcaacaaaacagtaacgagaaaatacaccgcgctcgtccacggcgtcatcccgcatgaccacgggacgatcgacgcgccgatcggcagggataaaaaagacaggcagagtatgacggttacaagggaaaatggaaagcatgccgtcactcattttgaagtaatcgaacggttcgacgattttactgtcgttgaatgccagcttgaaacggggagaacccatcaaattcgcgtgcatatgaaatatatcggctttcctctcgcgggagatccgaaatacggaccgaaaaagacggtcgatttcaacggccaggtgctgcatgcgggcgtattggggtttgaccatccgcgtacgggagaatatgttgaatttgaggcgcctctgcctgacgacatgaaaaacctcctcgacaaaattcgaaataaacgttgacagacgttttcttttttgaaataataaatgcagttaaatcagattctttaacacagtccagagaggctgagaaggataccggacaagcgaatcaatgcattcgtttaaagacccctctctgcctttatgcagaaggggtttttgttttatcctttaaaagatgcgaggtgtttggccatgcaagagcaggaaaaggctgttgtgcttgacgaacaggcgatcagaagggcgctgacaagaatcgcccacgaaatgattgaacgaaacaaaggaatgaacaactgtatccttgtcggaatcaaaacgagaggcatctatctggccaaacggcttgccgaacggattgagcaaatcgaaggaaacaaagtcaccgtaggagagctggacatcaccctttaccgggatgatctctccaaaaaaacgtccaatgaagagccgcttgtcaaaggagcggacattccggcggacatcaccgatcaaaaggtgatcctcgtcgatgacgtgctttacacgggacggacggtcagagcggccatggatgcgctcgtcgatgtcgggcggccttcatcaatccagcttgcggtgcttgtcgaccgcggccacagagagctgccgatcagagccgactttatcgggaaaaacatcccgacgtcgaaaaccgaaaaggtcatggttcaattggaggaagttgacggacgcgaccttgcggcgatttataaaaagtgaatgataatccttttttaaatgcattccagtgagtttgcaaagagggatggaacgaaagaaagccgccttaccgtgcggcggtctttgtctgcctctttgcgcaatttaagcaaagaggcttttttaatgggcataaatcatttcaggatatgaagacatcatagacagtgagtcgatcatcaggaggaaaaaatatgagtcagaaaaaagtgaaccttggtgtcagagaagtaccaaaacctttgaattggatatctttcagcctgcagcatctgtttgccatgttcggagcgacgatccttgtgccgaagcttgtaggattaagcccgggcgtggccctcattacaagcgggcttggaacgcttgcgtatctcttgattacaaaaggacagatcccggcttacttaggttcatcctttgcatttattgccccgattatcgcggcaaaagccgccggaggccctggcgcggccatgatcggcgcatttatggcaggcatcgcctacgggttgatcgcccttctcatccagcagcttggaacggactggctgatgaggcttctgccgcctgttgtcgtcggtccggtcattatcgtcatcggactcgggctggcaagcacggctgtcaatatggccatgtatgaagattcgggagcaaaagtgctcgtctacagcgccaagcattttggcgtcgcaggattcacactcgcgctcaccataatctgcgcgattttcttgagaggatttttcagcctgattcctgtcttgatcggaattatcggcggatacttgttcgccctgacccagggaatcgtcgacttccagatggttcttgacgccaaatggtttgctgttccggacttcgtgcttccgtttgtcgactatacgccgagcgcggcggctgtcggaatcggaatcgccatggtgcccgtcgctttcgtgacaatgtcagaacatatcggacaccaaatggtattaagcaaggtcgtcggccaggattttattaagaagcccgggcttcaccgctcgattttcggcgacagcgtcgcaacgatgcttgcatcatgcatcggcggacccccgacaacgacttacggagaaaacatcggcgtactcgccatcacaagagtattcagcgtatttgtcatcggcggagcggctgtcattgcactgtgcttcggatttatcggcaaaatttcggccctgatcagctctgttccttccgcagtcatgggaggcgtttccttcctgctgttcggtatcatcgcatccagcggactgcgcatgctgattgataataaaattgacttggaaaacaagcgaaacctgatcatctcatccgtcattctcgtcatcggagtgggcggcgcatttatcaagatctcagggtttgagctgtcaagcatggcgcttgcggcgatcgtcggagtagttttaaaccttgtcctacctgaatcaaagggagatcaggacggaattgaaatagaagagcatatttaaaaaccttttaaatgaagtccagagaggcttgaaagggttgcggagagagaagtgcaaaaaagcgcattctctgattcactgtaccccaagccgttatggcctggggtttttttacgggaaattaagcctgagggggagaaaaaatgaaacacttgaccgcaatgaatgagcttagtcttgaggatattcacgagctgattgaagaggcgagagagctgaaaaaaggcaagtccgattccgttctctccggaaagttcgctgccaacctgttttttgaaccgagcacaagaacgcgcttcagcttcgaagtggctgaaaagaaactcggcatgaatgtgttgaacctggacggtgtttcaacgagcgtacaaaaaggagaatcgttgtacgataccgtcaagaccctcgaatccatcggcgctgatgtatgtgtgatcagacactctcatgatcattattacgatgaactcatcggacatgtcggcattccggtgatcaatgccggagacggctgcggtcagcatcccactcagtctttgctcgatttgatgacgattcacgaggaatggggcagatttgccggactgacggtatccatacacggagatatcaagcacagcagagtggcaaggtccaatgccgaagtgctgacaagactcggagcaaaggttcttttctcaggtccagacgaatggcgggatgaagacaatccatacgggacatatgtgtcgcctgacgaagcggtcgcacattcggatgtcgtgatgcttctccggattcagcacgaacggcatgagaaaaaggcggcagaacgcgattatctcgaaacattcggattgtcgctcaagcgggcggagctcttgaaaaaagacgcggtcatcatgcaccccgcacctgtcaaccgaggcgtcgagattgacagtgcactggtcgaatccggccggtcgaggattttcaaacaaatggaaaacggagtatatatcagaatggcggttttaaaaagagcgcttctaaacggcgaaaacaaaaaaaggggagatcaggcttatgtcttatttaattaaaaacggcttcatgctcgacgaaaaaggcgaaaaagtacagcgcgatatcagggttgaaggcgatgcaatcagcgagatcggaagccttgaggccgcttcgggggaaacggtcatcgatgcggatggacttttcgtctcgccagggcttgttgaccttcacgttcacttcagagagccgggcggcgagaagaaagaaacgatcgaaacaggtgcaaaagccgcagcgagaggcgggtttacaactgtcgccgcaatgccgaatacccggcctgtccccgatacgaaagagcagatggagtggcttgtcaaccgcattgacgaaacggcatcagtgagagtgctgccgtatgcttcaatcaccatcaggcaaacaggtcgggaaatgaccgatttcgaagggctgaaagacgccggcgcgttcgcgtttaccgatgacggcgtcggcgttcaaacggcggggatgatgtatgaagcgatgaaaaaagcggcttcgattaataaagcgatcgtcgctcactgtgaagacaattcactgatctacggcggcagtgtacacgatggggaatttgccaaagccaacggtttaaacgggattccttcggtgtgcgaagcggttcacatcgcaagggatgtgcttcttgccgaagcggcaggctgccattaccacgtctgtcatatcagcacgaaggaatcggtcagggtcgtccgcgacgccaaaaaagcgggaatccgcgtgacggcggaagtgacgccgcaccatctgctcctttcagacagcgacattcccggccttgatacgaattataaaatgaatccgccgcttagaagtccggaagacagggaagcgctccttgaggggcttagagacggaacaattgattttatcgcaacggatcatgccccgcatacagaagaagaaaaacaacagacaatgagccttgcgccttttggaattgtcggcttggagacggcttttccgctcctttacacgcactttgtcaaaacaggcaaatggacgctgaaacagctgcacgattatatgacggtcaaaccttgcgaggcgttcgggctgccgtacgggaagcttgaagccggacggtccgcggatattacgctcattgatcttgaacgcgaagaaaaaattgataaaagcacctttctttctaaagggaaaaacacgccgtttgacggcatcagctgcttcggctggccggctatgacaatggcaaagggaaaactcgtttaccaagaggggagacttgtaaaatgaaaagacgtcttatattagaaaacggaacgatttttgaaggggaagcattcggcagcctggaaaacaccatgggagaagtcgtcttcaacacggggatgacaggctatcaggaaatcctctcagacccgtcatactgcggacaaattgtcaccctgacctaccctttgatcgggaactacgggatcaacagagacgactttgaatccatcaccccttatgtaaaagggtttatcgtaaaggaattatgtcaacttccatcaaactggcgctctgcttatacacttgatgaatatttaaaaatgaaaaacatcccgggactctcagggatagacacgagaaagctgacaagaatgatcagaacggcaggtacgctgaaaggggtatttgccggccctgaagaagatgctggggctttggttcaaaagctgaaagaaacgaaccttccgaccgatcaggtcagccaagtatcaacaaaaacggcatatccgagccctgggagagggaagcgaatcgtgctcgtcgatttcggaatgaaacacggcatcttaagggagctgaacaagcgcaaatgcgatgtgatcgtcgttccccacaatataacggcagaagaagtgatgcagctgaagcctgacggcgtaatgctgtcaaacggacccggagatccaacggacgtaccggaagcgattgcgatgatccaaaacattctcggcaaggttccgctgttcggcatctgtctcggccatcagctgtttgccctcgcctgtggagcaaagacggagaaaatgaagttcggacaccgcggttccaaccatccggttaaagagcttgaaaccggcagagtatcaattacggctcaaaaccacggctataccgtatcgtctgttgaaaacacgccgcttgaagtgacccatgtggcgataaacgacgacacaatcgaagggcttaaacataaacacgaaccggcttttacggttcaataccatcctgaagcttcaccggggccggaagacgcaaaccatttatttgatcaatttttagacatgattgaaaccacagagaaagaaggggaagcggtatgcctaaacgcgtagatatcaaaaagattttggtgatcggatcggggccgattattatcgggcaggcggcggaatttgattatgcaggcacacaggcctgcctcgctttaaaagaagaaggctatgaagttattctcgtcaactcgaatccggcgacgatcatgacggatacggaaatggccgaccgcgtgtatatcgaaccgctgacgcttgaattcttaacacggatcatccgcaaagagcggccggacgccatattgccgacattgggcgggcagacgggcctcaacttggcggtcgaactgtcagagcacggcatcttggctgagtgcggcgtcgaagtgctcggcacgaaattgtcggcgatccaaaaagcggaggaccgcgatttgttcagaagcttgatgaatgagttgaatgagcctgttccggaaagcgagatcatccactcgctcggcgaagcgcgcgagtttgtcgagcgcatcggtttccccgtcatcgtcaggccggcatacacgcttggcggaacaggcggaggcatctgctcaaacgaagacgagctgaaggaaatcgttgaaaacggcttaaaaatgagcccggttcatcaatgcctgcttgaaaagagcatcgccggctacaaagaaatcgagtatgaagtcatgagagactcgagcgaccatgcgatcgtcgtctgcaatatggaaaacatcgatccggtcgggattcataccggggacagcatcgttgtagcaccgagccaaacgctgagcgaccgcgaataccaaatgcttcgcaatgtctcgctgaaaatcatccgcgcgcttgaaatcgaaggcggctgtaatgttcagctggcgcttgacccggacagctttcagtactacatcatcgaggttaacccgcgggtcagccgttcttctgcgcttgcctcaaaagcgacgggctatccaatcgcaaagcttgccgcaaaaatcgctgtcggtttgtctcttgacgaaatgatgaatcctgttacaggaaaaacgtacgcgtctttcgaacctgcactcgactatgttgtgtcaaaaataccgcgctggccgtttgacaaatttgaatcagcaaaccgcaggctcggcacgcagatgaaagcgacaggcgaagtgatggcgatcggaagaacgtgggaggaatctctcctgaaagcggtccgttctcttgaagcggatgtctaccatctggaactgaaagatgccggtgagatctcgaatgaagtgcttgaaaaacggattaaaaaagcgggagacgaacggctcttttacctggccgaagcgttcagaagaggatacacagtcagcgacctccacgaattttcggcaattgacctgttcttcctccacaagcttgagggaatcatccgctttgaagagaagctgaaagccggacgcggcgacctcggccttttaaaagaagcgaaagagctcggcttttcagaccgctttatcagccttctctgggagatgcctgaacgaaagctttatgatcttagaaaagaagcaggcatcacgcctgtttataaaatggttgatacatgcgcggccgaatttgaatcggagacgccgtatttctacagcacgtatgaagaagaaaacgaatcggtcagaacggacaaaaacagcgtcatcgttcttggctccggtccgatccggatcggccagggggtcgaattcgactatgcgaccgtgcattcggtctgggcgattaaagaagccggctatgaagccattattatcaacaacaatcctgagacggtttcaacagacttcagcatatccgacaagctctactttgagccgcttactgttgaagatgtcatgcatatcatcgatttggagcagccgaaaggcgtcgtcgttcagtttggcggacagactgcgatcaaccttgccgacgagctcgcagaaaggggcgtcgccattctcggaacatcccttgaagatttggaccgcgccgaggaccgcgacaagttcgaacagacgcttgaaatgctgcaggtaccccagccgcttggaaaaacggcgacatctgtggaaggcgccgttgaaatcgcagccaatatcggctatccggtgcttgtccgcccatcgtatgtactcggcggacgtgcgatggagatcgtctactatgaagcagagcttctccattatatggaaaatgcagtaaaaatcaatccgcagcaccctgtcctgatcgataaatatttgaccggaaaagaaatagaagtggatgccatttctgacggtgaaacggtcgtcattccggggattatggagcacatcgaacgggcgggcgtccactcgggggattcgattgccgtttacccgccgcaatccctttcagaggacatcaagaaaaagcttgaagcatacacgattaagctagcaaagggcttaaacatcgtcggcctgctcaacattcagtttgtcctttcaaaagatgaggtttacgtccttgaagtcaacccgagatcgagccgaacggtgccgtttctcagcaaaatcaccggcattccgatggccaatctcgcaacaaaggtgattctcggcgggaagcttgccgatatgggctatacagaaggcctccaaaaagagcaggaaggcgtatatgtgaaagtgccggtcttctcgtttgcgaagcttagaagagtggatatcacgctcggaccggaaatgaaatcgaccggggaagtcatgggcaaagacagcacattggaaaaagcgctatataaaggactgatcgcttcaggcattcaaattccgaactacggctctgttctcctgacagttgctgataaagataaagaggaagggctgttgatcgccaagcggttccatgcgatcggctataaaatcttggctacggaaggaacggccggctatttaagagacgcatccgtacctgttaaaaccgtcgggaaaatcggcgaagaaggtacaaatctccttgatgtcattcgaaacggggaggcgcagttcgtcgtcaatacgctgacaaaagggaagcagccggcaagggacggcttcagaatcagacgcgaatccgttgaaaacggcgttgcctgcctgacatcccttgatacggcggaagcgattttgcgggtgcttgaaagcatgagcttccgcgccgatcatatgccggcgattaaaatcgcccaaaaggcggccgtcagatgagaaaagggtatatgacagtccgttcaaacaagtgcatcgcggatcatatttatcaaatggtgcttgaaggggagattgccgaagtttgcggcgctcccggccagttccttcacatcaaggtctcagactccctcacgccgcttttgaggcggccgatcagcatcgctgatatcaacaaagccgcccggcaggtgaccatcatctttcgcaaagatggggaaggcacgagactcctttctttaaaacaggaaggagatcagctcgatgttctcggtccgctcggcaacggttttccggctgaatcgcttgaacaggggaaaacggctcttctcgtcggaggagggatcggtgttccgccgctttacgagctgagcaaacagctgacaaacagaggggtgcacgcgatccatgtgttaggatttgcttctgcaaaagatgtcttttacgaacaggaattcagccgtttcggccgggtgtatgtggcaaccgcagacggcacccgcggttcaaagggatttgttacagatgtcattgaaaacgaggggcttcagtgtcagtttgactgcataatggcctgcggaccgacgccgatgctgaaagctttaaaacagcgctatccggataaagaggtatatctgtcaatggaggagcgcatgggatgcgggatcggcgcttgctttgcctgtgtctgccatacggaagaaagcgaaacgtcttatgtgaaggtatgccttgacggtcctgttttcaaagcccaggaggtgctgttatgatgcttgaaatcaatttgccgggccttcaattgaaaaatccgatcatgccggcctcaggctgcttcggattcgggagagaatttgcgaacttttacgatctttcgcgtctcggtgcgatcatgattaaagcgacgacgagcgagccgcgcttcgggaatccgacgccgcgcgtcgccgagacgcaagccggcatgcttaatgccatcggcctgcaaaatccgggtttaaaggctgtcatggaacgcgaattgccgtggctcgaacagttcgatacaccgattatcgccaatgtcgccggctcgcagatcgaggattatgttgaggtggctgaagaaatcagcaaagcgccaaacgttcatgcgctcgagctgaatatttcctgtcccaatgtgaaaaccggaggcatcgccttcggcacgcagccggaaatggccggcgagctgacgaaagcggtgaaagaggttgcgagcgtccccgtctatgtgaagctgtcgccgaacgtcgcgaacattaccgacatcgctcttgccatagaagaagcgggagcggacggtttgacgatgatcaacacgctgatcgggatgcggctcgacttaaaaacgggaaagccgattttggcgaacaaaaccggcggattatcaggacctgccgttaaaccggtggccatcagaatggtgcatgaagtcagccaaaaggtcagcattccgatcatcggcatgggcggcgtccagtcagccgaagatgtgcttgagtttttgctggcgggtgcgagcgcagtcgccgtcggcacggcaaacttcgttaatccgtttgcttgtcccgacatcatcgacgatttgccgcgcgttttagaaaaatacggataccgttcgttgaacgagtgtatcggaaggagctggaaggatgaacaatacgccgcccatcatcgcgcttgattttgcatcagcacaggaaacatatgcgtttttggaccggtttcaaggagaagagctgttcgttaaggtgggcatggagcttttttatcaggaaggacctgccatccttgaaaatctgcaggagcgcggctgccgcattttcctcgatctaaagtgccacgacattccaacgaccgtatacaaggcgatgaaaaggctggcgggatttggcgtcagtcttgtcaatgtgcacgcagcaggcggaaagcaaatgatggagtcggcgcttgaaggccttgaagcggggactccgggaggccaaaaacgcccttcattaattgccgtgactcagctgacaagcacgtcctcagaaatgcttcagcgtgagctcctgattgaaacgccgcttctcgatacagttgtccactacagccggctggctgaagaaagcggtcttgacggcgtcgtctgctccgttcatgaagccgaacacatttaccgggctgtgtctgtagattttctgaccgtgacacccggaattcgcatggcagatgacaaaaacaacgaccaggtccgggtggcaacgcctggctacgcaagggaaaaaggcgtgtcggcgatcgttgtcggccgttcgattacccaggcggaagatcctgtgtcagcctacagaagaataggacatgagtgggagggaaccaaggcatgaaaacagacattgcaaaccatttattaaaaatcaaagcggttttcctgcgcccgaacgaaccgtttacatgggcgagcggcattctgtcgcccatctactgcgacaaccgtttgacgctttcatatccggaagtaagagatgatatcgcttcagggcttgccggactgattcaagacaaatttcccggagccgagatgatcgccggtacagcgaccgcgggaatccctcatgccgcgcttgccgctgacaggctgagcctgccgatgtgctacgtcagaagcaaaccgaaggcgcacggcaaaggaaaccaaattgaaggggccgttgtaaaaggacagaaagtcgttgtgatcgaagatttaatttcaacgggaggaagcgttcttgaagccgccgccgccctcacagaggcgggatgtgaagtgctcggcgtcgccgccattttcacttacgggcttccaaaagccgccgccgccttcagcgaagcaggcgttgaataccacacgctgactgattacgatacgctgaccgaggctgcgcttgccggtggatatattactgaacaggatgccgccaaactgaaagaatggaaagcggatcctgaaagcaagtcttggatgaactgatgatcaaagccgtattctccaaatgggagaacggcttttttgcgcctttttgtccgtttttaaaatagtaaaatcggattatttttattttttattaatcctataaaaaagtcgggttgacttttattcgaattgtgctaaaattttaaaataacaaaagcaaacttatcaagagcggtggagggactggtccgatgaaacccggcaacctgcgtgtgaagcgtaaggtgctacttccagcaaaatgccctcattttgagagataaggaatagcggagttcctcgtctttctttcaaaattggaagaaagattttaattttttaggggcagaggaggagctagaagtgaagacagatgaacagcttgaaaaggtgatcatcaaaatgaaagacatgctgaaagacatgaattacggatcgatcacattcgttgttcaggacggcaaagtcattcaaatcgaaaaaaatgaaaaaataagattgaaatagctgactagacaaactagaggcggttttcacagttttttttctgctggaagccgtttttttgttggcgaaaaaagggggaaccgaaaatttttacttacagcacatgggaggaaccaaacatctcttttcaggaagatgactcttataaaggagcgctgtccgtcctgaaatgggcgtacggacattacggggatcagctcgtatacgcgtgcagcttcggaattgaggggatcgtcctgatcgatttgatttataaggtgaaaaaagatgcagttatcgtttttcttgatacagggcttcattttaaagaaacgtatgaaacgatcgacgccgtcaaagaacgatatccaggccttcagattatcatgaaaaaaccggagcttaccgtcgaagagcaggcgaaagaatatggggacgaactatggaagaccgctccgaattcctgctgcgaaatgaggaaggtcatccctctccgcgagacgctttcaggctacccggcgtggctgtctggtctgcgccgcgagcaatcgcccggacggagcaaaacgaattttttgaacaaagatgaaaaattcaagtctatcaaagtttgtccgctcattcattggacgtggaaggatatttggagatatgtgacaaagcacgatctcccatacaatccgcttcatgatcaaggctatccgagcatcggctgcgctccgtgcacctctccggcctttacaatggatgatcttcgatccggccgctggaacggatcggctaaaacagaatgcggattacacgagtaaggagatgagtcatggaacttgccgccattttatttagcatgttttttgcgatgaatatcggagcgagcggtgcagctgcttcaatggggatcgcctatggatctgaagctgtcaaaaagaagtttcacgccctcctgatctgtgcagcgggcgttctctcgggcgctgtcatcggcggaggaaacgtcgtgaaaacgatcagttcaggcatcattcccgaacgggtgatttcgcttgaaatcgtctgcattattatcggatcagcggcgctgtcgctctttatcgcaaatgtactcggcattccgctttcgacaagtgaagtgacagtcggatctgttgtcggagtaggtgtcgcataccaggttttgtatgtcaaatctttgcttgtcatcgtctcattttgggtcattgtaccaatcgtcgcttttgcatttacatttgcgatggcaaaaatcatgaaaaaaacgatcaaacgtccagcctcgggaaaaaaagcaaaggttttggcggtcattctattgatcacagggttttttgaagccttctcagcgggcatgaacaatgtcgcaaacgctgtcggacctctggtggcggcgcatgttttgacagtcggggaaggaacgctctacggcgggctgtttgtcgcgctgggcgcccttttactgggcaggcgcgttcttgaaacaaacggcaaaaagattacgaggttttcaaaaggagagggaatcatcctttccggaacgggggccgggcttgtcattaccagttcaattttcggtttaccggttccgcttgcgcaagtcacatcatcttctattatagggatgggaatggcaaaaaacggcggcaacgtctttcataaacaagtggtcaaaacgatgctgaaagtatgggtcgtctcgccgttcctttcattaagcctatcttatatgctggtcagccttttattaaaaggagactactacgctcttattgttgtcacaagcgttctgctggcatctgtcggaacgatcagcctgatgagagcggtcaaaaaagagcacagctccgtccatgaacaaggcggaggaatttaaacacaaagtagggggaaacaagtttatgagtttagcaccacacggcggtgtattggttaaccgcgtcaatgaagcatacgattttcaacatatcgcacatgaaattgagcttgatgtaatggctttttcagatttggagctgatcggaatcggtgcgtacagcccgctccaaggctttatgacagagaaagactatctgtccgttgtcgaaaatatgagactatcaagcggcgaagtatggacgcttccgatcactctgcctgttgacgagcaaaaagctttaagcttaaaagcgggtgacaccgtccgccttacctataatggggaaacctacggcgtcattgagatcgaagatatctatacgccggacaagaaaacggaagccgtcaatatctataaaaccgacgaactcgaacatccgggcgtcaaaaaattgtttgaccgcggcagcgtttatgtgggcgggccgatcacgctcattaagcggagtgtaaaacaattcccggcgcacacattcgaacctcttgaaacaagaaaaaaattcgcggaactcggctggaaaacgatcgtcggattccagacgagaaatccggttcacagagcgcacgaatacattcaaaaaacggcgctcgagacggtagacggccttttcctcaatccgctcgtcggggaaacaaaatcagacgatattccggctgatgtccgcatggaaagctatcaggtgctgcttgacggctactatccgaaagaccgcgtcttcctcggcgtttttccggcggcgatgcgctatgcggggccgaaggaagcgatcttccatgcccttgtgagaaagaactacggatgcacgcactttatcgtcggaagagaccatgccggagtcggcgattactacggcacatatgaagcgcaggagctgttcgatcagttcgcgccggaagaaatcggcattacgccgctgaaattcgaacacagcttctactgcaatgtctgcggttcaatggctacggcgaaaacgtgccctcacggcaaagaacatcatgtcattttatccggcacaaaggtgagggcgatgctgagaagcggcgagttcccgccgagcacattcagccgtcccgaagttattcaaacattaatcaaaggcttagcggccggggtttcttaagggggagcatctcttggtaaataaagatattgtctggcatgaagcgtccattacaaaacgggaatatcatgagaaaaatcaacataaaagctcaatcatttggctgacgggcttaagcggttcaggaaaatcaacgattgccaacgccgctgcgcgtgagttgtttgcacaaggctaccaggtcacggtgcttgacggcgacaacgtcaggcacgggctgaacaaggacctcgggttttccgatgaagaccggaaggaaaacatccgccggatcggcgaggttgcgaagctctttgtcgaacaggggacgatcgtcattacggcgttcatttctccttttaaagaagatcgcgggcttgtcagacagcttgtcgaggaagatgagtttcacgaagtctatgtgaaatgcgatttggcgacgtgtgaagagcgcgacccgaaaggcttgtacaaaaaagcgagaaacggagaaattccatttttcacagggatcgattcgccttatgaagagcctgaaacgcctgagcttgttcttgatacaggcgcacataaccgggaagagtgcaaaaaccagctcgtccaatacgtgaaagatcaaacgaaataaaatgcgggtgaataggaaagtgcggcgcatgcactttcctatttcataaagaaaacgtttggtttttgtgatattttcaggcaccaaacgctttctttatgatttataatgaattgaagaagacgttgatcagatcggggggagatctaagatggggaaagtatatatcgttggggcaggtcctggagaccccgatttactgacgatcaaagctttaaaagccatccagacagccgatgtcattttgtatgacaggcttgtgaataaacagattttacagcacgccaaggagggagcggatctcatctactgcggaaagcttccggactaccacatgatgaagcaggaaacgatcaatcattttctcgtcaagtatgcgaaaaaagggaaaaccgttgtcagactgaaaggcggcgatcctttcgtattcggcagaggcggcgaggaagcgcaaaccctcgctgagcacggggttgcttttgaaatcgtgccgggaatcacctcgggaatagctgccgctgcttatgcgggcattccggtgacacaccgggaagcgagttcaaacgttgctttcgtgacaggccattatcaaaaagaagaaaactttgaagagaagtggaaagcgttagccacagggatcgatacgcttgtcatttatatggggattaaaaacgtgaagcaaattgaaaggcttctgatcgaaaacggcagagacccgtcaacgccagccgctttcatccattggggaacgacagacaaacaaaaaacggtgctttgcacggttgaaacgcttgccggtacagtcgaaagcgaaaagattgaaaacccgagcctgattgtcatcggggatgtcgttcaattcagctcgcagttaagctggtttgaacctgagctgaaagatccggcattaagcgaggcgctttaatatgaaacaagcgattttatatatcggccatggaagccgtctgaaaagagcccaaacagaagcagccgcttttttggagagctgcaaagaaaacatgtccgcccccattcaggaaatatcttttttggaattggcggcaccggatatcgaaaccggctttaaagcgtgtgtggaaaagggggcgacgcatatcgcggccgtgccgcttctcctcttgacagccgcacatgccaaaagggacatccctgaagagcttgcccgtgcttcctcacagtacccttccgtcagcgtcgcttacggaaagccgatcggcgtcgatcaggaagtcgtcaaagcggtttttacaaggatcgaagaaacggggacgccatatgaacatgcaagagtcgtgttgatcggaaggggaagctctgatccggatgtcaaacgggatgtttatgatatttgcgaacggctgagagacctcacaccagtggatgaggtcattccctgctttatgacagcctgtgagccgcactacctggatgtgtttaaacagcttaaagaacgggacggaaaaacgacattcatcgttccgtatctgctgttcaccggtatgctgatgaacgagattgaaagggaaaccgcaaagctgaaagaaacgaatccgaatgtcgtgctgacggattacctcggcttccacccccatgtaaaaaacgcctttttgcaccgcgtagaggaagcggttatcaacaaagccggccgctttgattttacaggagcatcagatgctgccgctgcacattaacatgaaaggcaaagccgcagtcattgcgggcggggggaagattgcggcgcggcggctgaaaacggtgctggcagaaggtgcatccgcgaccgtcatcagccctgaagcatcagaagagatgctcggattgattaacgaacacggcatcgaatggaagaagaaaaaggcggaacccggtgatttcaagaatgcatttctgatcattcttgcgaccgatgaccatgaggcaaacaagcgtctcgccgcatcggcagctcctgagcagctcgtcaatgttgcgagtgaagcggagctgggaaatgtatatgttccaaaaataatcaacagaggaaacataaccatatccgtctcaacaaacggagccagcccgcgccacacgatcaggctggccggacagatcgatgatttgatcgatgatgagctcgtccaagagatcgacgagcttttccgaaaaagaagaggcctgaacccttgaggttcaggcttttggcattattatttttttcagcttgatgatcaagtcttcatcaggtgttacaaaaacggtttgctggctgtcgtaggtgacaaaccccggttttgcgccattcggttttttgacgtggcgtatttttgtatagtcgacgggaaccgaagcggagtttttcgctttgctgtaatatgcagcgatctgcgccgcttccagaatggtttgctcgtccggatcggtcgattgaatgacgacgtgcgaccccggaatatcttttgtgtgaagccagatgtggtcgcgggcggcaagcttcatcgttaaatattcgttctgcttgttgtttttgccgacgagaatcgtttctcctgagctggactcatatgcttcgagcgtcggcgcctgttttttctgtttcttctggcccccttgctgcttggcccgcaagtattttccttcggcgagctcttcgcgaatttcggttatatctttcggtgaggcagatgaaagctgctgaatcagctggtcgaaataagcgatttcctcttctgccaatttgatctgctccttcacgacttctaccgaatttttcgctttttgatattttgtaaaatagctttgtgcattttcagaaggcgttttattaggattgagcggaatcgtgattttccccccgttttcatcatagtagttgatgaccttcgcctcctttgtcccctttttttctagctggtacaggttcgctgtcaacagctctccgtacagctgatagtcttgcgcgtgttcggactgctcaagcgtttttttcagctttttgattttattttcgttctttttcttttcgtttgccgcgaaacgctctaaatcgtgagcctgctgtttgacgcggtcacgctccgcttttccgaaatagtagcggtcaagaagttcgctcagcgtatgaaagggcctgttgtctccttttatatgggtcagctcaagaaggtaaaaatattcttttccgtcttctgtggtgacaagctggggctgaaaacgccggcttttgatttcgctgaacatctccgtcaagacgtttggcagtgtcgccctgttggctagacccgcgcgaaagacggcttccttcgcaaacagaggcgagacgccggagaaggtatcgacgatctgcctgtcaagtttgccttcctggaaattcagatggcggagaatatcttcagtctccgcttcaagcggagacaatttgttctgcgcgggagggagaatgtaatcgtatcccgggagcacggtgcggtagctgttcatcgcaggtgacagatgcttcaaactgtcgatgatgacgtctttttctccgtctgttaacacgatgttgctgtgcctgcccatgatttcgaccatcagctttcttgtcagcgtgtcgccgatttcgttccggctcctgatatgaaagaccatcattctgtccatgccgatttgctcgacttggtcgataaagccgccttccagatgtttgcggaggagcatgcagaacatcggaggggtgctcgggttgtcgtaggtttcgtttgtcaggtgtacccgcgcataactcggatgggcggagagcagcaatttgcggttcttcccgtttgccctgatatgaaacactagctcgtgcttaaacggctggtggatttttgcgatccgtccgcctcgaatcgcctcatttaattcctcgatcattccgtatgtaaaaatgccgtcaaaagacatatgaaaaactcccttttctcgttaatcctcttcgtaaaacgtccattcaataattatagcatgatttgggacgagtctgaataaattgacttatagagatggatacaccaaaagcaacctttagggcaggaggagtggacgattcaatgaaatggcacgagatgggacaaaccgaattgttaaatataacaaaaacgtccatcgacaaaggtctaacagaaaaagaggccggaaagcggctggaaagacacggaacaaacgaacttcaggaaggggaaaaaacatcggcggtcgcattgtttttttctcaattcaaagatttcatggttcttgttttgcttgcggccacgttgatttcgggtttcctcggcgaatacattgacgccatcgcgatcatcgcgatcatcgcgatcatctttgttaacggcattctcggattctttcaggagaggcgggcggaaaggtcgctcgaggctttgaaagaactgtcagctcctcaagtggctgtgctccgggaggggaattgggtgaaaattccttccaaagagcttgtcccgggagatgttgtccgttttgcaagcggagacagaatcggcgccgatctcagacttgtcgagacaaagagccttgaaatagaagaatcggcccttacaggtgaatcgctccccgtgtccaaacaggcagatgcttttcaggcgtcagatgtatcgctgggcgatctgaagaatatggctttcatgggaacgcttgtcacaagggggagcggaatcggcgtcgtcatcggtacgggtatgaactctgcgatggggaaaatcgccgatatgcttgaatctgccgggaatacggcgaccccgctgcaaagaaggcttgaagagctcggcaaaattttgattgtcgccgctttgttcctgacactgcttgtcgttgctgccggcgtcattcaggggcatgatttatacagcatgtttttagcgggagtttcccttgccgtcgctgccatacctgaagggctgcctgccattgtcacggtcgctctgtctctcggcgtgcagcggatgatcaggcaaaagtcgatcgtcaggaagctgcccgcggttgagacgctcggctgcgcgtccattatttgctccgataaaaccgggacgatgacgcagaacaaaatgacggtcacccatgtctggtcaggcgggaagatatggaacgtgtcagggatcggctatgagcctgaaggctctttcagcatgaacgggcgcgatgtgcaagcaaagcatcataaaccgctccagcaggtactattgttcggcgcattatgcaattcatcttcgattatcgaaaaagacggggagtttcgtcttgatggcgatcccaccgaaggggctttgctgacggcggctcgaaaagcaggctttacggacaaatatgttgatgaacattttaaaatcatcgaggagtttccgtttgattcaacgcggaaaatgatgtctgtcattgtggaagacaagagcggcaagcgctttgtcattacaaagggcgcgccggatgtattgatgaagcgttcgtcgcatacgctgacagaagaaaagcgagaaatcttcacaaaggaaaggctcgctgaaacaagcgcggcgctggaaactcttgcgtcacaggcgctgagaacgattgccgtcgcgtataaaccgatcaaagatacagaaaatcccccgctcgaaaaagcggagtcaggcttaactttcatcgggctgttagggatgatcgatccgccgcggcccgaagtgaaaacagcgattaaagaatgccgggaagcggggatcaaaacggtcatgatcaccggcgaccatgtgataacggcgacggcgattgcaaaagatctcggattgctgcctccgcgcggaaaggtcatggacggccagatgctgaacgaactctcgcaggaagaattggcggaaattgttgacgatgtttacgtatttgcaagggtgtcgcccgaacataagctgaagatcgtgaccgcctaccaggaaaacggccacatcgtcgccatgacgggagacggagtcaatgatgcccctgcgattaaacaggcggatatcggcatatcgatggggattacgggaacggatgtcgccaaggaggcgtcctcactcatccttgtcgatgataattttgcaacgattaaatcggccatcaaggaaggacgcaatatctatgaaaatattagaaagttcatcagatacttgctcgcatccaatgtcggcgaaattttggtcatgctgtttgcaatgctgctcgctctgccgctgccgcttgtcccgatacagattctgtgggtcaaccttgtaacggacggcctgcctgccatggcgctcggcatggatcagcctgaggacgatgtgatgcagagaaagccgcggagtccgaaagaaggcgtgtttgcaagggggctcggctggaaggtcgtatcgcgcggattcttaatcggaatcgcgacactcggggcgtttatgttcatttataaccgcaatccagaagcgcttgagtatgcacagacggttgcatttgcaacgctcgtccttgcgcagctgatccacgtgttcgactgccgaagcgagcggtccatctttgaccgcaatccgtttgaaaacatttatttgctcggtgcagtgctgtcttcgattcttttgatgcttgtcgttatttattatccgccgctgcagccgattttccatacggttccgattttaatggcagactggctcctgattgtcggaatgtcggcgattccaacttttttactggccgggtcacttttgacaagaaaaaaataggcttgtatgatataatcttaaaggtaatagaggtttctattgccttttcatcttgcgtaaatttaaatcaaagaaagtctttttcacttatacggaattgggtgtgttttatgatacggagtatgaccggtttcggcagcgcgagcaaaacgaaggatgggctgacagcagctgttgagctgaaatctgtcaactatcggtttaaagaagtaaacgcccgcatgccaagacctttgctctatttagaagacaaaataaagcaaacgatttttaaacatatacaaagggggcggctggagctgtttgtttccgttgacgacgaggctctggtcacccggaaaatccaggttgactggccgctgcttgaagagtaccagaaagccgcgcgcgaaatgaaagaccgctgcgggctttctggagacatcacgcttcaagacgcctttcagtttgagcatgtcatccaagttgaagaagagccaatccaaaatgacaagcttgaagaggttcttctagaagcggtcgaggctgccgttctagaattgtgcagcatgcgcgaagcggaagggctgaggctgaaggacgactgccttcagcatattgaaaggcttgaaaagctgacagacgacatcgcagagcttgctcccaaggtcgtcgaccactatcgggaacgccttgaggcgcggcttgaagaatggtcaacagacggtctcgatgaaagccgcctgctgacggaagtcgcactgtttgcagaccgttcggatatcacggaagaagtgacgaggctgaaaagccatttccgccagttccgcgatatttgcaaagcgggaggagccgcggggagaaagctcgatttcctcgtccaggagctcaaccgtgaagcgaacacgatcggttcaaaagcgaatgatcaccagatcacaaaacatgtggtcgaaatgaaaagctctattgaaaaaataaaagaacaagtgcaaaatatagaatagcgattgtgcgtattgtttacggatgttctctgcaggttaaactagagacgtccaagtacagggggaacgtataggatgacgattaaactgatcaatatcggctttggaaatatcatatccgcgaatcggctgatctcgattgtgagtcctgagtccgcgcctattaagcggatgatccaggatgccagagaccgcggcatgcttatagatgctacatatggaagaagaacccgtgcggttgtcattatggacagtgaccatatcatcttatctgccgtccagcctgagacagtagcacaaaggctttccgttaaagaagaaattatggatgaagggcagggataagagctttatgaaagaaagaggtttgttaatcgttctctccggcccttccggcgtcggaaaaggaacagtcaggcaggcgctgtttgctcaggaggacacaaaatttgaatattcgatttcggtgacgacaagaaaaccgcgtcaaggcgaaagagacggcgtcgactacttttttaagacgcgcgaagagttcgaagagatgatcgagaacaacaagctgctcgaatgggccgaatatgtcggcaactattacggaacacccgttgactacgtcgaacagacgcttgaaagcggaagggacgtttttcttgaaatcgaagtccagggtgcgctgcaagtcagaaaggcatttcctgaaggcttgtttatctttttggcgcctccgagcctcgccgaattgaaaaaccggattgtcacaagagggacagaaacagaagccctgatcgaaaaccggatgaaagcggcgaaggaagaaatcgaactgatggacgcctatgactatgttgtcgaaaatgacagcattgagcttgcgtgcgaaagaatcaaagcaatcgttctcgccgaacatttacggcgcgaccgagttgctccaagatataagaaaatgctggaggttgaataaatatgctagatccgtcaattgactctttaatgaacaaactggattcaaaatacacgctcgttaccgtatccgcacggcgcgcccgcgaaatgcagatgaacaaagacacgcagatcgaaaatccgaagtcgcataaatttgtaggcaaagcattggaagaaattgatgccggactgcttacattcgaaaaggaaaatcgctaatagccttaaaaatagcaacctatacactaggttgttatttttttcagggctggcgaacagaacataagggggagaaatacgatgctgaaaaatcgcaacatcctgctgggagtaagcggaggaatcgcggtatacaaagcggccgccttaacgagcaagctcgtgcaggcaggagccaatgtgaaagtcatcatgacaaaatccgcctgtgaatttgtgtctccgctcacctttcaggcgctttcgcgcaatgaagtatataccaatacgttcgaagaaccgaatccccgtgtcatcgcccatatcgatgccgcagattgggcggatctcgtgatcgttgctccggctacggccaatgtgatcggaaaactcgcctcaggcatcgctgacgacatgctgacgacgacgcttttggcgacgacagcgccggtgtggatcgctccggcgatgaacgttcatatgtacgaccacccggccgttcagcggaacatcagcgttctttacaaagacggctaccggtttatcgaaccgagtgaaggctaccttgcgtgcggctatatcggcaaaggcagactggaagagcctgagcggatcgtccagttggcagagtcgtatttttcaagcgaaaaaagcggtttgcttgaaggaaagcgcgtcgtaattacagcggggccgacaagagaacaagtcgatcccgtccgctttttctccaaccgttcgacagggaaaatgggctatgctttcgctgaggaagcggcacgaatgggagcgcacgtgacgctgattgcaggcccgacatcgcttgatgatcccgcaggggtcgacgtgattcatgttgagtccgcagaagatatgtatcaagcggctctgtctgttttcgatgagagcgacatcgtcattaaaacagcagctgtcgctgattacaggccaaaacatgtccacgatcaaaaaatgaagaaaaaggacggcggcctcgtcattgagcttgaacggacgaaggatattttaaaagcgctgggagagcggaaaacaaagcaaatcttggtcggctttgcagccgaaacgcagcacgtcgaagactatgccaaacaaaagctggagacgaaaaatctcgatatgattgtcgctaacaatatcacggctgaaggcgccggttttggaacggaaaccaacatcgtgacggtgtttcatcgagacggcaaaaagacggcgcatcctctaatgtcaaagcgggaggttgccgccgcagtcttgaaggaagccgctgagcttgccggacggagcgggacgtcttcatgaacttcgctgaagtgatcgtcgatgttacaacgaaaaatatcgacagaccgtttgattaccgcatccccgacaaattcaaaggtatgattaaaaaagggatgcgcgtgatcgttccgttcggcgcccgcaaaatccagggatttgtcaccagcgtgaaagaatcgtcggagcttgccggccgttcggttaaggatatcgaggatatccttgatctggcgcccgttttgacggaggagctgcttgagctgtcagactggctgacagaaaaaacactttcttttaaaattacggctttgcaggcgatgctccccgcggctatgaaagcaaaatacggcaaagaaatcaaggtgatcggcgataaaccgcttcccgaaccgctaaaaaccttgttctcgcaaaaagagacgctttcttattccgatataaatgaccacggaacattaaagctgattcagcgccaggttcaagaaggcaatcttgaagtggcgtataaagtaaagcagaaaacaaacaaaaaaatgcggagaatgatcgcccccctttgcgcgaaagaacatttaaaagaagcgcttgccggcctctctccgcaagctgtcaaacaaaaagcgatccttcagtttttcatcgaccgcaaagagggcggcgctgttccggcaaaggatctgatcgacaaaacggggggctcttccgcgtccttgaaagcgctcatcgacaaggggctgttaaaggaaagcgaagaggaggtttacagggatccttatcaggacagaatgttcaaaaaaaccgaaccgcttccgctgactgaagagcaggcgcaggcctacgaggcgatagcggatgcaatcgaagaaaagcggcacgatgtgtttcttcttcacggagtgaccggaagcggaaaaacggaagtctatctgcaatcgatcgaaaaggtgctggaagccggcaaagaagcgatcgttctcgttccggaaatttccctgacgccgcagatggtcaaccgctttaaagggcgctttggctcgcaggtagccgtactgcacagcgggctttcaacaggagaaaaatatgatgaatggcggaaaatccaccgcaaagaagtccggcttgtcgtcggggcgcgctcggcgattttcgcgccgtttgaaaatctcggcatgattataattgatgaagagcacgaaacatcgtacaagcaggaggagatgccgagataccatgcgaaagaagcggcgattcaaagggccgaataccaccagtgtccggtcgtgctcggcagtgcgacgccgacgctcgaatcgttcgcgagggcgaaaaaaggcgtgtacaagcttctttctctcaagcaccgcgtcaatcaccaagtcatgcccgacgtgtctctcgtcgatatgagagaggaactgcgcagcggaaaccgctcgatgttttccaaagacttaatggccgggcttgaggaaactcttgaaaaaggagagcaggccgttctgtttttaaacaaaagaggctattcctcatttgtcatgtgcagggactgcggatatgtcatccagtgtcctcattgtgaaatttcattgacgtaccacaggtatggacagcgtctgaagtgccattactgcggctatgaaaccggcatgccgtcaagctgccccgaatgcggaagcgagcatatccgctactttggtacaggcacacagcgggtcgaagaagaattgacgaaggttctgccggctgcaagggtgatccgcatggatgtcgatacaacctcaagaaagggagcgcatgaaaagctgctcacatcctttggcagaggcgaagccgatatcctgcttggaacgcagatgatcgccaaagggctcgatttcgaaaacgtcacgctcgtcggtgtcttgagcgcggatacgatgcttcacatccccgatttcagagccgctgaaaaaacgttccagctgatgacgcaggtgagcggaagagcggggcgccacgaaaagccgggcaaggtgatcattcagacgtacacaccttcccattacagcattcagctcacaaaaacgcatgattatgaaacattcttcaggcaggagatgctgcacagaagggaacaggcctatcctccatattattatttggcgctggtcagcgtatcgcacgaggaagtgacgaaggcggcactcgtgactgaaaaaatcgccacctatttaaaaaagaacatttcaagcgaggcgaagattctcggccctgtcgcatcgccgatcgccaggatcaaagatagatatcgctatcaatgcgtgataaaatacaaacaggaaaaccagcttacatcgttgcttaaaaacattatggatcattacaaacgagacattgaacaaaagcaattggcgatttcgatcgacatgaatccatatatgatgatgtaaaaataacagtgtgatggagggcttttagattggcagtaaaaccgatcgtaacgtatccggcggaggttcttgagacccctgccgaacccgttgcgtcttttgataaatcattaaagaaactactcgacaatatgtatgatacgatgcttgagctggacggagtcggactggccgctccgcaaatcggcgtttcaaaaagagcggcagtcgtcgatatcggcgatgacacgggaagaattgaactggtcaacccggaggtcatcgaagagagcggtgaacaaacgggtcctgaaggctgtttgagctttcctgatctatacggtgaagtgaagcgttccgattatgtaaaggtcaaggcgttcgaccgccgcgggaaaccttttacgattgaagctgagggctttttggcgcgtgcgctgctgcacgaaatcgaccatttggacggtattttattcacatcaaaagtaacgcgctattatgatgcggaagaacttgaggaaatggaaggatgattggatgacaaggatcgtttttatgggaacgccggatttttccgtcccggtgctcggcacattgattgatgacggctatgaggtagtgggtgtcgtcacccagcctgaccgcccgaaaggcagaaaaaaggtgatgactccgccgcctgtcaaggaggaagcgctgcgccgcggcattcccgtgctccagcctgagaaagtgagggaagaagcggaaacggacaagattttggcgcttgaacccgatttaatcgtaacggcggcattcggacagatcctgccgaaaaagctcctcgattatcctaaatacggctgtatcaatgtccatgcctctcttctgccggagctgcgcggaggagccccgatccattacgccattctggaaggcaaagagaaaacaggcgtgacgatcatgtacatggtcgaaaaattggatgcaggcgatatgctcgccaaggttgaagttgacatcgaagaaacagataatgtcggcacgctccacgataagctgagcaaggccggagctgcgcttctttccgaaacggttccgagaatcattgacggttcggtaaccccggaaaaacaggatgaacagaaagcgacatacgcgccgaacattaaacgcgagcaggaactgatcgactggtctaagcccggcgaagtcctgtacaaccaagtcagaggcttgaatccttggcctgtcgcatacacggtcttaaacggccagacgctgaaagtatgggccgcgaaaaaatgccaagccttaaaacaggcagagccgggggagatcgtcaccgttgaaaaagacggcattgtcgtcgcaaccggaaatgacaccgcgttaaaattaacggaagtgcagcctgccggcaaaaaaagaatgaaggctgaagattttgtcaggggagcgggtcttcaagccggaatgaaattgggtcatgacgatgaaaaataatgtgagagaagtcgcgcttgatgcactgattaagcttgaccagaatcaggcatacagcaatcttttgcttcagtctgccatgaaagcgaacgatttaagcgacaaagacagaggccttttgacagaactcgtttacggcacccttcagaataagctggcgcttgattatatgctgaagccgtttattaaaaagccggaaaaggtgaaagactgggtcatccatctgttgagaatgtcgctgtatcagatggaatacctggagaaaatccctgaccgggccgctctttttgaagccgttgaaatcgctaaaagacgcgggcataaaggaatatcttcatttgttaacggtgttctgcgctccgttcagagggaaggagtgccttcctttgcggatattgccgatccgattgaacgccttgcggttgagacaagccatccggagtggcttgtcagagaatggacggatgcctacgggttcgaagcggcagaacaaatctgccggattcatatgatcccgccgaaacagacgatccgcgtcaacaggctgaaaaacgaccgggatacgcttctttcccgtctgaatgaagcggggattgaggcggaagaaggcgacttgtccaaagacgctgtcaaactgctgaaaggaacgattgcgtccactccttttttcaaagaaggcgaagtcaccatacaagatgaaagctcaatgctagtagcgagagcccttggacctgagcggggagaaacagtgctggatgcatgcgcagctccgggaggaaaatccactcatatcggcgaactgctcgaagatacgggaaaggtcgtctccctggaccttcatcagcataaagtaaagctgatcaaagaagcggcaggccggattggactttccaacattgaagcaagagcgctggatgccagaaaagccggagaagtcttcgaaccggaacagttcgaccggatcctcgtcgatgccccgtgttcgggattcggcgtcatccgcagaaaaccggatctcaaatacagcaaaacgcccgaagacagcgcgcgtctcgccgggattcagcttgcgattttaaacgaaatcgcacctttattgaaaacaggcgggacattggtttacagcacatgcacaatggacccgaccgaaaatgaacaagtcatgcatgcttttttggaagaacacgacgaatttgaagcggaccccaccctcgccgagcggctgcccgaaaaagcggcgccgtatgtcaaggatggaagcattcaaatccttccccactactttggaacggacggcttctttatttgcagcatgagaaagaagggatcacaataatggaatcgaaacaaaaagtaagaaaagaattgcggacagaaagaccgtccatctattcttttgaaatagaagaactgaaaagctggctatcggaaaacggcgagaagccattccgcgccgcgcaaatattcgaatggctatacgaaaagagagtcacgtcatttgaaaagatgacaaacctttcaaaagagctgcggacaaagctgaatgagcatttcgtattaacgacgctgaaaacggccgtcaaacagacttcccaagatggaacaatgaagtttttattcgagcttcatgacggctacacgatcgagaccgtattaatgcggcacgaatatggcaattctgtttgtgtaacgacacaggtgggctgccggatcggctgtacgttctgcgcatcgaccctcggcggcttaaagcggaacctggaagccggagagatcgtcgcacaggttgtcaaagtgcagcaggcgcttgatgaaacagatgaacgcgtcagctcaatcgtcattatgggaatcggcgagccgttcgataattttcaggaaatgcttgcgttcttgaaaatcgtcaaccatgataaaggactgaatatcggagcgcgccatatcaccgtatcaacgagcgggatcattccgaaaatctacgagtttgcagacgaaaagctgcagatcaactttgcgatttctctgcacgcgccgaacactgagatcagaagccggctgatgccgatcaacagagcctacaagctgcccgatctgatgaaagcggtcgattactacattaagaaaaccggcagaagggttacgtttgaatacgggcttttcggcggtgtcaacgatcaggttgaacacgcggaagagctggctgaattgctaaaaggaatcaaatgccacgtcaacttgattccggtcaactatgtacctgaacgagactatgtcagaacaccgaaagaacagattttcgcctttgaaaaaacattaaagtctcatggagtaaatgtcacgatcagaagagagcaaggccatgatattgacgctgcctgcggacagcttcgtgcaaaggagcgccaggaagagacgaggtgaatcaaggttgaaaacagccttaaaaacggacaggggaaaaatacgccagcacaatgaagacgatgccggcattttcacagaaaaaaacggactggtattagctgttgtctgcgatggaatgggaggtcatctggccggcgatgtcgccagcaggatggccgtctcagcccttcgtgatatttgggaggaaaccgaagaagtcccggcttcgccggctgaaagcgaagcgtggctgaaagagcagatttcagccgtcaaccaaaaacttttcgaccattcgagggcccacgaagagtgccagggaatggggacaacggtcgtctgcgctttatacacgggaaaaacgctgacggtcgcccatatcggagacagccgctgctatctcctgcaaggcggaagtttcatacagctgacggaagatcactcgcttgtcaatgaactcgtgcggactggggggatttcgaaggaggatgctgaacaccatccgcggaaaaacgtgctcacaaaagcgctcggcacagatcccgaagtgaaggtagaagcccacacatttgaaatcgaaccgggtgatcaagtgctattatgttctgacgggctgacgaataaagtggatgatgagacactgaaggatatgctcacgactctttcttctgcggaggagaaagcggatcagctcgttcagctggccaatgacaacggcggcgaagacaatatcaccgtcgcgctattggaacttccttctcaaattgaagaaggtgaagacaagtgttaatcggcagacggatcagcggacgttacgaaatcctgcgcgccatcggcggcggggggatggcgaacgtttatttagcgctggacatcatcctcgaccgtgaagtcgcgattaaagtgctgcggtttgacttcgttcacgatgccgattttatcaggcggttcagacgggaagcgcagtccgctgcaagcctcgaccacccgaatatcgtcagcatttatgatgtcggagaagaagatgacatctattatatcgtgatggagtatgtcgaggggatgaccctgaaagaatacataaatcgaacaggcccacttcatccgaaagaagcggtccaaatcatggagcagatcgtatccgccatcgcacatgcccatgataaccagattgtccaccgggatattaagccccacaacattttgatcgaccatatgggccacattaaagtgactgatttcggcatcgccatggcgctcagctcgacgaccatcacgcacaccaactcggttttgggctctgtccattatttgtcgcccgaacaggcgagaggcggattatcgacgaaaaaatccgatatctactcgctcggcatcgtgcttttcgagctgctgacggcgcgtatgccgtttgaaggagaatcggcggtcagcatcgcgctgaaacatctccaatcagaaacgccgtcggtgaaaagatggaacccggccgtgccgcaaagcatagaaaacgtcgtcctgaaagcgatggcaaaagatccattccatcgctatgaagcggccgaagagatggaaaacgatttgaaaacggctttcgacccggaccggctcaacgaaaagcgcttcacgattccatccgatgatgagatgacgaaagctgttccgatcatcaagaatctgccggaaaacgggagcagctcgcaatccggcggcggagaagaggaagcggctccattatcaaaaaaagaaaagaagaagcaggcaaaagcaaacaagaagaaaaaaagaaagaaatggccgcttatattgctgacggtgtttttcgttctggctgcgtcagccgtcttggctttaacggtgtttccgtcgctctttattccgaaagatgtggccgttcccgatgttgccggccttgaatatgaagaagccgtcatcaagcttgaagacgaaggatttgaagttgatccgaatgctgaagacattgccgacgataaaattgaagaagggctgatcgtgaagacggaccctgcagccggcgatatcgtgaaggaaggttcaactgtcaagctatataaaagctcaggcaaagagaaaactgaagtcgatgatgtggtcggccagaaagtcgatgtcgccaagaagcttcttgagcaaaaaggctttaaaaacatcaagacagaagaagtgcacgatgaagaagaagcgggaaccatcatcgaacaggaccctgcagccggaaccgaaatcgttgccgccgacgacgaggtcaaattaacggtcagcctcggtccggaagccattactttaagggatttaaaaacatacagcaaacaggcggcttcgggctatttggacgaccatcagcttgtccttgtcgaaaaggaggcgcattctgaagacgtgccggaaggtcaggtcattaaacaaaagccggaggcgggggcatcagtcaagccgggagacaaagtcgaggtcacgttttcgctcggacctaaacaaaagcccgtcaaaacggtgaccgagaaaattgatattccttatgaaccgggagcggcgggcgaagaacaaaacgtccaaatttcgatcgatgatgaagaacacagcatttctgacgtctacgaaaatttcaaaatcacagcgccggcagagcggacgatcaaattcaggattgcgcccggccaaaaagggtattatcaagtaacgatcaacgataaagtagtcaggtcaaaaacgattgaatatcctgaggatgaataagggaggtgcgatatgcctgagggcaaaatcattaaagcattaagtggattttactatgtattggatggcgatcaggtcattcagtgcagaggaagaggggttttcagaaaaaataaagtaacccctctcgtcggcgacgatgttgtctaccaagccgataacgataaggaaggctacattctcgagattaaagacagattcaatgaattggtcagacctccgatcagcaacgtggatcaggcggttctcgtgttttcggcaaaggagccgacattcagcacgtcgcttttggatcgttttttagtgctggttgaggcgggtgatattaggccgatcatatgcatcacgaaaatggaccttgtggatgatgacgcgctgaaagagcagattcatcaatatgccgaagactaccggaacatcgggtacagcgtctatttgacatcaatgaaaagcggaagaggcatcgaagacatcatcccccattttcaggataaaatcaccgtattcgccggccagtccggcgtgggcaagtcttcgcttttaaatgcgatcagccctgaccttgaactgaaaaccgccgggatttccgcccacttgggaaggggaaaacatacgacgcgccatgtggagctgatcgatataaacggcgggctcgtcgcggacaccccgggcttcagctcgcttgagtttgccggtattgaagctgaagatttagggcagacatttttggaaatcggcgaaaagagcgccgaatgcaagttccgcggatgcctgcatataaaagaaccgaactgcgccgtcaaacgcgccgtggaaaacggtgaaatcgcccagtatcgctacaaccattatgttgaatttttaacagagatcaaagatagaaagccgaggtattaagatatggtatatgttgctccttctattctttcagccgattttgcccgtctaggggaggaaattcgagatgttgaacaaggcggcgccgatttcatccacatcgatgtgatggacggccatttcgttcccaacctgaccatcgggccgcttgtagtggaagccgtccgcccgatcactgagcttccgctcgacgttcatttaatgatcgaagcgcctgaccgctatatacctgcttttgcaaaagcgggcgccgatattttgtccgtccatgttgaagcatgcccgcaccttcacaggacgatccagctcatcaaagagcaaggggtcaaagcgggagtcgtcttgaatccgcatacccctgtgcagcagatcgagcatgtgcttgaagaccttgatctcgtattattgatgacggtgaatccgggcttcggcggacagtcgtttatttcctcggtcctgccgaaaatcaggcaggtcaaggagatggctgagcaaaaaggacttgccgatctgctgattgaagtggacggtggcgtcaacaaaaatacggcaagacagtgtattgaagcgggagcgaacctgcttgtcgcaggatctgccgtttataacgaaaaagaccgcaaaaaagccatttccgatataaaaggtgcgcttgggtaaggtttcctgatgaaagagagccggctttctgcagctgcgctctttttttagggcgttcacagaaaggataatgcgatgaaaacgatcaatattgtagcgggaggccccgatcatcttattcccgacttgctgcagtatcaggccggggatgcgctttgggtcggggttgacagaggcgctgtcacccttttggatgcggggatcgtgcctgatgaagcattcggggattttgacagcatcacagacgagcaaaaaaaagcgattgaaaaggccgctccccgcctccatatttatcaggcggaaaaagatcagacggatttggaccttgcgttgagctgggctgtcggacagcgtccttcatttattagaatgttcggcatttcgggaggcagagcagaccattttctcgggaatctgcaccttctttataccgcgatgaagcaaaacgtcaagaccgtcatgatcgaccgccaaaatacgatcagcatgcatcccccaggctcctataccgtcatgcatgatcaaacaaaaccgtatatttcattcctgccgtttgcggagacggtaaaaaacctttctctcgaaggatttaagtattctttaaataagtgtcatattgctctcggttcgacactatgtattagtaacgaactcatccattcacaaggtgctttttcgttttcagaaggcatattaataatgataagaagcactgattaaatatcctggcgcttccgctcgctatgtgtttgggatccgatgttgaaggtggatgcggttgcggactctttgaggagggaagggaatgaaattttacaccatcaaattaccgaagtttttagggggaatcgtccgggcgatgcttggctcgtttcgcaaagactaagaagcgccgggtgcgctttttttgcggagcgggtcaaagggctgtccccggatggcaaaagaacgaaaaaacgcctgcctaaagcgtacagtcgctcttggcaggcgtttattttttcttatacacgctcaacttttccagatttcaaagctcgagcagatacatatacttttttaggcttgccgttcacaaggatgcgcactttttgaacgttagcgccccatgtgcgtttagaagcgttcatcgcgtgagaacgagagttgccagaacgtgattttctgcctgtaataacgcatttacgtgccatttgtttccctcctaactatcaaaaaaacatcatcattctttatcagttgatcacctgtgatgcttcagatactttaataatttaccacagctgaaaaccgtttgcaactattgattgctctgctttcaagaaaaattccttgacatcttgaaaaaatgaacgcgctgtagtataagtagggttaggtttggagagaagcctgcctgttcttttaaaaagaaggtccttatagtagaatgatttataaccagaggtcaaaagcgagactcgaaaaggaggaaccaacgtgtccattgaattccgaacaaaatacggacagattgatatatcaaacgaagtggtcgccatggttgcaggaggcgcagcgatcgactgctacgggatcgtaggtatggcatccaagaaccaaattaaagacggactgactgaaatcctcagaaaagaaaactttgcaagaggcgtcatcgtccgccaggaagaggatcgtattcatattgacatgtacatcattgtcagctacggaacaaaaatttcagaagtggcacataatgttcaaacaaaagtcaaatatacgctcgaccatacagtgggtcttgcagtggattccgtaaatatttacgttcaaggagtacgagtgacgaacccgtagttaggaggaaaacaagagtgtctatacgaaatctggatggaaaagcttttgcagatatgattctgtacggcgcacaccatctgtctcaaaacgcaaatgtagttgatgcgttaaacgtatttccggttccggacggagatacgggaacgaacatgaatctgtcgatgacatccggtgcgaaagaagtggagcaaatcgacaccgccaatatcggcaaagtggcacaaagcctgtcaagggggcttctgatgggggcgcggggaaactcgggcgtcattttatcccagctgttcagaggctttggcaaatcgattgaacagaaatcggaaattaacgcgaaagaatttgccgccgcgttccaggccggagtggacaccgcctacaaggccgtcatgaaaccggtcgaaggcacgatcttgacggttgccaaagatgccgcaaaaaaagcagtgctcgccgctcaaactgaaaccgatatcatcaaggtgatggaagctgtcgtaaatcaagcggaggcttctttggagcggacgcctgagctgcttccggttttaaaggaagtcggtgtcgtcgacagcggcggaaaagggcttctttacgtgtatgaagggtttctcgcttctttaaagggagaaaagctttctgataaagcggcagctcttccgtcattggatgaccttgtcagcgccgagcaccataaaaacgctcaaagccacatgaatactgaagacatcgaattcggctactgcacggagtttatggtaaagctcgacagcggcaaaagaaactttaatgaagatgcgttccgccaggatttaagccgcttcggtgattcgcttctcgtcgtctcagacgaaaatatcgccaaggtgcacatccatgccgaatatccaggggaagtcatgacttacgcgcaaaaatacggcagcttaatcaacatgaaaatcgaaaatatgagagaacagcacagcgcgattctcagccagaacaaacaggagacagcaccggcagaaaaagcaccggcagataaacagccgtacggcatcgtcacagtggccatgggtgaagggattgccgagcttttcgaaagcatcggcgccacaaagatcatagaaggcggccagacgatgaatccgagcacggaagacatcgttcaggcgataaaagacgccaatgcggacacggtcgtgattctgccgaataattcaaacattgtcatggcggcgaaccaggccgcggatgttgccggacaacatgtaattgtcatcccgacgaagaccgttcctcaaggaatggccgcactgctcgcattcaacccggccctttcagcggacgagaatgaagccgctatgctcggtgcgatcggcgaggtgaaaagcggacagatcacctatgcggtcagagacacaaacattgacggcatcgatattaaaaaaggcgattttatgggcatattaaacgggaaaatcgttgagacggcgtcagaccagttaacagcagcgaaaaagctgatcgcaggcatgatcgatgaagacagcgaaatcgtcaccgtgatcaaaggggaagacgccccggaagaagaggccgaagaactcgcagcctacatcagcgagacgtacgaagacgtcgaagtagaagtgcacgacggaaaacagccgctgtattcctacattctggctgtcgaataacgaatcaaaggcagaagggcatgttgataaaagcccttctcttcttttggtctttttttaaagcctcagcccgcaacggacgttgtctgcttgccaattgggaaatgatcgattagtctaaaaaaaacggctttttttcctccgtacagcgggggaatctgtttgtaaaagggggataaggatgaagtacagaagtgtgtttgatattatcgggcccgtcatgatcggaccgtcaagttctcatacggccggcgcggccagaatcggcagagtcgccagaagcgtgtttgggagggagccgaaacaaattattgtatcgctctacggttcttttgccgaaacgtataaaggacatggaacagatgttgcgatcatcggcggccttttggattttgatacatttgatgaaagaatcaaagattcgatccgtctagccgaagaaaagggaatcgccatagagttccgggaagaagaagcggtaccgaagcatcccaatacagcccgcatcctcatctctgatgatgaaggctcccttgaactcgcaggcatctcaatcggcggagggaaaatcgagatcattgagctgaacggcttcgaactcagattatcgggtaatcaccccgctattttagtcgtccataacgaccgctacggaacgattgcaggcgtagccaatgtgcttgcgaagttcgcaatcaacatcggccatatggaagttgcccgcaaagacgtcggccaggaagcgctcatgacgattgaggtcgatcaaacgattgatccggctgtttttgatgaattgagagcgctgccgaacatcattgaggtgacccagatcgctgactaaaaaggagggtgagacgatatgtttcgaaatgtgaaagaattaattcaactgacaaaggaaaagaacgtgtccatctctgaaatcatgatcacacaggagatcgaggtgacaggccggacgcgggaagatatattcaagcagatggaagccaacttggctgtcatggaagacgctgttcaaaaaggcattgagggcgtcgtatcgcactccggattgacgggcggagacgccgttaagcttcaggcctaccttaaatcgggcaaagggctgtcaggggctgtcatccttgacgctgtcagcaaagcggtagcgacaaatgaagtcaacgctgcgatgggaacgatttgcgcaacgccgacagccggatcggccggcgttgtcccggggacgctctttgcggtaaaagagaaacttcacccgacgaaagagcagatggtccgctttttatttacatcgggagcgttcggattcgtcgttgccaacaatgcgagcatttcgggagccgccggaggctgtcaggctgaagtcggatcggcctcgggcatggcggctgccgccatcgtcgaaatggcgggcggaacccctgaacagtgcgccgaagcgatggccatcgctttaaaaaacgtactcggtctagtctgcgatcctgtcgcagggctcgttgaggtgccgtgtgtgaagcggaacgcgatgggcgcagccaatgcgatggtcgcggctgatatggcgcttgccggcattacaagccgcattccatgcgatgaagtgatcgatgcgatgtacaaaatcggacagacgatgccgacggcactgagggaaacaggccggggcggtcttgccgcaacaccgacgggcaaagaattggagaaaaaaatattcggaggagcgtcagctgcacgtggaacacaatctgcaacttagtatatctgttataaaaggcgtcgggacggaaacggaaaaaacgttgaacgagctcggaatctatacggttctcgatcttttaaactacttcccgtaccgatatgacgattatgaattgcgcgatttggaagatgtggcacacgatgaacgagtgacggtggaagggaaggttcacagcgagccttctcttgcctattacgggaaaaagcggagccgtctcacgttccggcttttggtcgggaactatttgatcacagcggtttgctttaacaggccttatttgaaaaaaaagcttgcgatcggctcgattgttaccgtaaccggaaaatgggacaagcacagacaatccgtgatggtgcaagagctgaaaaacgggccgcaccagggtgatcagtcgattgaacccgtatactccgtcaaagaaaacatcaccgtaaagacgatgaggaaattgattcaggaagctgtccgcagccatttgccgtttgccgaagatcctcttccggaaaagcttcggaccgcctacaaacttctgtcttaccaggaggcggtaaaggcgatgcacaagcccgagtcgagggaagctttaaagcatgcgcggcgccgttttgtatatgaggaatttttgctgtttcagctgaaaatgcaggctttgcgaaagttcgagcgggaagcgtccgacggaatcagccacacctttcggctcgaagacgtcaattcgtttgtcaaaagccttccgtttcctttgacaaacgcgcaggcgaaagcgctcgacgacatattaagggacatggcttcagggtataaaatgaatcggcttttgcaaggagacgtcggttcaggcaaaacagccgtcgccgcgattgcactatacgcctcgctgctttccggattccagggggcgatgatggttccgaccgaaatactggcggaacagcacgccgattcgcttgtatccctctttgagcagcacgacgtcaatgtggcgcttttaacaagctctgtgaaagggaaaaggagaagagagcttttagaaagattaaaagaaggagaaattgatattttggtggggacgcacgcccttattcaggacgatgtccactttaaacagctcgggctcgtgatcaccgatgaacagcaccgcttcggcgtcgagcaaagaaaaaaactgagaagcaaagggaaagatcccgatgtcttgtttatgacggcgacgccgattccgagaacactggcgatcacggttttcggggaaatggatgtgtccgtcatcgatgaaatgccggctgggcgaaagcggatcgagacgtattgggtaaagcacgacatgctcgaacggattctcgcgtttatcgataaagaactgaaaaaaggcagacaggcgtatgtgatctgtcccttgattgaagagtcggacaagctcgacgttcaaaatgcaattgatgtgcacagcatgctgactcatgccttcaggggaagatggcagatcggtctcatgcacggaaagctgtcaaatgacgagaaagaacaggtaatgaggcagttcagcaaaaacgaatgccagattctcgtttccacaaccgtcgttgaagtcggggtaaacgttccgaatgcgacggtcatgctgatctatgatgccgaccggttcggtctttcccagctgcatcagcttcgcggccgggtcggacggggcgatcaccagtcgtattgcatcctgatggcagacccgaaatctgagacgggaaaagagcgcatgagcatcatgtctgagacgacggacggctttgagctttctgaaaaagatcttgaactcagagggcccggggactttttcggcaagaaacagagcgggatgccggagtttaaagtcgccgacatggttcacgactaccgcgcgctggaaacggcaagaagagacgctgcagaacttgtctcttcaaaagcgttctggacggatgccgaatataaaagcctgcgggaacacttgcaaaacagcggggttatggacggagaaaagctgagctgatctgaagtccagctaaaatttatcgtcggcgggtaaagaaagattgcattccaatctatgaaattatatactactattagtacctagtcataattgcgcggatggtgtttaataacatgagaaaaagtaagagagaacgccaagaattgctgcagcagacgattcgtacgaccccgtttattacggacgaggagttagcggagaaatttaacgtcagcattcagacgattcgcttggaccgtttggaactttccatacctgaactgagagaaagaatcaaaagtgttgccgagaagtctcttgaagatgaagtcaagtcattgccgcttgacgaggtcatcggcgagatcattgatttggagctggatgagcacgcgatttcaattcttgagatcagaagggagcatgttttcagccgaaatcaaatcgccagggggcaccatttgtttgcccaggccaactcgctcgccgtcgccctcatcgacgatgagctcgcattgacggccaaagcggacatccgctttacaaggcaggtcaagcaaggcgaacgggtcgttgcaaaagcgaaagtcgtgaagcttgataaagataaaggcagaacggttgttgaagtgaacagctatgttgccgaagagcctgtgttttcaggcgaatttgtcatgtatcgttcaaaacaatcatagaaggtggcgcgtaagtcatgaaaattgctgtagatgccatgggaggagacaatgctcccaaagcggttattgaaggcgtgatgaaagcggtcgaagattttgaagacctcgagatcacgctgatcggcgaccgggaaaaaatagccgcccatttaacagaacacgggcggatcaccgtcaaacacgcggaagaagtcatcgaagcgacagacgagccagtcagagccgtcagaagaaagaagaattcatcgatggttctgatggccggagaagtcgccgaaggcagggctgatgcctgcatttccgccggaaacaccggagcgcttatgacggccgggctctttatcgtcggccggattgaagggattgaaaggcctgcgttggcaccgacattgccgaccgtctccggagacggctttctccttcttgatgtcggagcgaatgtggacgccaagcccgaacatctcgttcaatacgccattatgggatctgtttacggagaacaggtgctgggcgtcaaaaatccgcgcatcggacttttgaacgtcggaaccgaagataaaaaaggaaatgagcttgccaagcagacctttcaaaaattgaaggaaaccgatttgaatttcatcggcaatgtggaagcccgcgatatgctggacggagtcgctgatgtcatcgtcacagacggctttaccggtaacgttgccttgaaaacggtcgagggcgcggcgctgtccatttttaaaatgctgagaacgacgctgacttcgagcttcacggcgaagctcgccgcttctgcactgaagccgaagctgaaagaaatgaaaacgaaaatggattactctgaatacggcggagccggattgttcggcttaaaggcgcccgtcatcaaagcgcacggatcatctgacggacgcgccgtttatcacgcgatccgccaggccagagagatggtcagccaaaatgtcgcggcatttatcgaagaaaaaattcaacaaaaagcagatgaatagtctggaggttttaacacatgggcaagattgcttttctattcccgggccaaggttcgcagcatatcggcatgggacacgaattgtatgaaaaagaaccgaatgcgaagaagatttttgaagaagcggatcaaacgcttgaaacaaaactgagcaccctcatgtttgaaggggatgcaaaggaattgacgcttacatacaacgcgcagccaagccttttaacggcgagcatcgcagcgcttgaaaaactgaaggaatacggcattaaagccgactatgcggcaggtcacagcctcggcgaatacagcgcattggtcgctgccggcgccttgtcgtttaaagatgcggtttatgccgtcagaaagcgcggcgaattcatgaatgaagccgtgccggcgggagaaggcgcgatggcggccattctcggcatggacagccaggcgctgaaagaagtgacggacaaaatttccgaagaaggaaaccttgttcagctcgccaatttgaactgccctgggcaaatcgtcatctcgggaacagctaaaggcgtggagctcgcttcagagcttgcgaaagaaaagggcgcaaaacgcgcgattcctctcgaagtcagcgggccgttccattctgagctgatgaagctggcagctgataagcttcgtgaagttcttgatgcgtgcacgatcaacgacgcagccattccggtcgtctccaacgtaacggccgactttgtaacggataaagacgacattaagaataaactgattgaacagctgtattcccctgtacgctttgaagaaacaatcagccgcctgattgacgaaggcgtcacgaccttcattgaaatcggtcccggaaaggttttgtcagggcttgtgaagaaagtgaaccgcagagtcaaaacgattgctgtatcagacccgaacacaattgaacttgccgttcaaacgttgaaggaggaaaacgaaaatgctggaaaataaaacagccgttgtgacaggagcctcaagagggatcggccgcgcgatcgccctggacctggcgaaaaacggagcaaatgtcgtcgtcaactacgcgggaaatgaagcgaaagcgaacgaagtcgtagacgaaatcaaagcgctcggccgcgatgcgtttgcttttaaagcggacgtttccaatgcggatgaggttcaggcgatgatgaaggaagcggtcggacgcttcggcacgcttgacatccttgtcaacaatgcgggcattactaaagacaatctgttcatgagaatgaaagaagatgaatgggacgacgtcattaacataaacttaaaaggtgtgttcaattgttcaaaagctgtgacaagacagatgatgaaacaaagaagcggccggatcatcaatatcacctcggttgtaggcgtcgtcggtaacgccgggcaggccaactatgtcgcggctaaatcaggcgtgatcggcttgacgaaaacgctggcaaaagaactggcgtcaagaaacatcactgtgaatgcgatcgctccgggattcatttcgacggaaatgacggacaagctgacaaaagacattcaagacgaaatgctgaagcagattccgcttgcgcggttcggcgagccgtctgacatcagcagcgccgttgttttcctcgcatctgaccatgcgagctacatgaccggccagacgctgaacatcaacggcggaatggctatggtttaaacgaaatcaaaaattgaattatctctggttttttaaaaacgaatcaactataatacttgaggggaggtgaatagctatggcagacgcattagagcgtgtaacaaaaatcatcgtagaccgcctcggcgtggatgaagctgacgtcactcttgaagcttcttttaaagaggatttaggcgctgattccctggatgtagttgagcttgtcatggaacttgaagacgagtttgatatggagatttctgacgaagatgctgaaaagattgcaacagtcggtgacgctgtgaactacataaatagtaagcagtaagctcatttaaagtcccgtttaaagacggggctttatccctttataaatgcggctttaattttaatgttttgcccaatgataaacgaacctgccttttcataggaggtgaggtgaacttgatgtgcccatatggaggttgctatgtcaaaacattcacatttcagagacaaaaaaatgtttcaaaaaaaagcggagcagtttaaaaagtttcaggaacggatttcggttcaatttcaaaacgagaagcttttatatcaagcgtttacacattcatcttatgtgaatgagcatcgaaagaagccatatgaagataatgagaggcttgaatttttaggagacgccgttttggaactgacgatttctcaatttttatacgccaaatacccggcgatgagcgagggtgatttgacgaaattgagagcggcgatcgtatgcgagccttctttggtttccctggcccatgagctttctttcggagagcttgttctattgggaaaaggagaggaaatgactggaggaagaaagcgtccggcgcttttagccgatgtgtttgaagcttttatcggtgcgctctatctggatcaggggctcgaagccgtcgtgacttttctgaaagcgtacgttttccctaaaatcgacgatggtgctttttctcatgtgatggattttaaaagccagctgcaggaatttgtacagcgcgacgggcgaggcatactggagtataaaatccttcaggaaaaaggaccggcgcacaaccgcgaatttgaagcaaatgtatcgctaaaaggagaagtacttggggtgggaagcggccgttccaaaaaagaagctgaacagcatgccgctcaagaagcgctcgcgaagctgcaaaaacaccatatgaaacaataaatcccccttgcaaaaaccagggggatttcaatgtattttgagccttttccatagggttatgatagaattgtaatactttaatacataaggaggatcaccatgttcctcaaacgtttagacgtgataggatttaaatcgtttgcagaacgaatttctgtagattttgtaaaaggcgtgacagccgtcgtcggcccgaacggcagcggaaaaagcaacatcaccgacgcgatccgctgggtgctcggtgaacagtccgccaaatcgctcaggggcggcaagatggaagatatcatttttgccggcagcgactcgcggaaaaagctgaaccttgccgaagtgacgctgacgcttgacaacgatgaccgctttttgccgatcgattttcacgaagtcagtgtgacgagaagagtctacagatcgggggaaagcgaatttctcatcaacaaccagccgtgccgcctgaaagatatcatcgatctttttatggattcagggcttggaaaagaagcgttttccatcatcagccaaggcaaagtcgaagagattttaagcagcaaggctgaagagcggagaagcatcttcgaagaagcggccggcgtattaaaatacaaaacgagaaagaaaaaagccgaaaacaagctgtttgagacacaggacaatttgaaccgggtcgaagacatcctccacgagctcgagggacaggtggagccgctgaaagtgcaggcatcgatcgccaaagactaccttgaaaagaaggatgagcttgaaaaaatcgaaatcgcgttaacggcgtatgacatcgaagagcttcacggaaaatgggaagcccttcagcaaaaagtcgaaaaggcgaaagacgaagaaatgtcctcttctgcggccatccaggcaaaagaagccaaaatcgaagaggcaagagacaaaattcaagcgctcgacgaatcggtcgatgagcttcagcaagtgctgcttttgacaagcgaggaactggagaagcttgaaggccggaaagaagtgctgaaggaacgcaaaaaaaacgccacgcaaaacagagctcagcttgaagaagcgatcgtccagcgcagtgaaaaagagcgaaccctgaaagagaaaatcgccgcgcagaagcttgtgtttgaaaagctcgagactgaagcaaaagagcttgcccgacaggtgaaagaaaaaaatcaggctttatccggatacagcgaaaatgtagaggaagaaatcgaacagctgaaaagcgattatttcgagctgttgaacgaacaggcttccgtccgcaacgagcttcaatttcttgaagaccaaatgacccaatctgcggcacagcagaaacggctcgcacaaaacaatgaaaaatatttaagcgagcggaaggaaatcgccgaccaaaagatgaaaaccgaacacgaattcagcctcgtggacgagcgtcttcacagccagattcaagcattcagggacgcgcaaaaaagctatgaacagaaaaaaagccagtacgaaaaaaaggaatccgccctttaccaggcttatcaatacgttcagcaggcgcgctctaaaaaggaaatgcttgaagcgatgcaggaggacttttcggggttttatcaaggcgtcaaagaagtattaaaggccaagagcgagcttccgggaattcgcggcgcgattgcagagctgttaaagacggacgagcggtatgaaacagcgatcgaaatcgcgctcggcgcaacagcacagcatgttgtcacagaagatgaagacgccgccagacgggcgattcaatatttgaaaaagcattcgttcggaagggcgaccttcctcccgctttccgtcatcaaagagcgccgcatccagccgagagacatcgagacggcgaaagaaaacccgtcgttcatcggcatcgccagcgagcttgtttcatttgatccggcctaccggagcgtcgtgcaaaatctgctcggcaccgtgctgatcaccgagcatttaaagggcgccaacgaccttgccaagcggctcggccacagataccggatcgtcacccttgaaggggatgtcgtcaatccgggcggttccatgacgggaggagctgtcaagaaaaaaagcagctcgcttctgggacgaaacagggaactggaagcccagacaaaacgcctcgccgagatggaagaaaaaaccgaattgctcgaaaaagaagtgaaagccctgaagcagaccattcaggagcttgatgccaagctacagtcacttcgcgaggacggagaacgcctaagatccgagcagcaggaaatcaaaggccgtctgtacgaactcgaaatcgccgagaaaaacgtcaacagccatttggagctctatgaccaggaaaaatcggctctgcttgaaggggacgaagacaagaagcggcgtaaagaagagcttgaagaaaagctcgcatcgatcgccggcgagctgcagcgccttgattccgaaatcgaagccatgacggagcggaaacagacgcagacctcgacgaaagaagcgttgcaaagcgagctgaccgatttgaaagtggtgctggcgaaaaccgaacagtcgtgtgcaaacgaacgggaaaagctcgcaaggcttgaagaagagtatgccgagaatgcggaagcgctcaaggtggccgaagaggatctttctttcttaacgacagagatgtcctccaattcttccggtgaggaaaaacttgaagaagctgcgaaaaagaagctgaacgataaaaataaaaccgcagagctcatcgcctcaagaagagaacagcggatgaagctgcaaaaaggccttgaaaccgaagagctcgaactgaaagaaatgaagcgccagtataagcagatggccggtctcttaaaagatgaagaagtcaagctcggccgcatggaagtcgagctcgacaacctgctctctttcctgcgggaagagtacggcctttcatttgaaggggcaagggaaaaatatcctttggagctttcccctgaagaagcgaggaagcgcgtcaagctgatcaagcttgcgatcgaagagctgggaacggtgaaccttggcagcattgaggaattcgaaagggtcaatgaacgctacctcttcctttcagagcagaaagacgacctgctcgaagcgaaaaatacgctctttaaggtcatcgaggaaatggatgaggaaatgacgaagcgttttgcggaaacatttgcgcagatcagctcccattttgaagacgtcttccgggcgctgttcggcggcggaagagccgagctcaagctgacagatccgaatgacctgctccaatcgggcgtcgatattatcgcccagcctccgggcaaaaagctgcagaacctgagcctgctttccggcggggaacgggccttgacggcgatcgcgctcctgttttcgatcctcaaagtcagaccggttccgttctgcgtgctggatgaagtcgaggcggcccttgatgaagcgaacgtgttccgctttgcccaatacttgaaaaaatacagccatgaaacccagttcatcgtcatcacccaccggaaaggaacaatggaagaagccgatgttctttacggcgtgacgatgcaggaatcaggcgtttccaagctggtctcagtcaagcttgaagaaacaaaagaattagttcaataaagcgaggttacaggacatgagcttttttaaaaaactgaaagaaaaaatcacacagcagaccgattcggtctcaggcaaatttaaagaaggcctggcgaaaacgagaaatacgtttcaggagcgggtcaatgagcttgtctcccgctaccggaaagtggacgaggatttttttgaagagcttgaagaggttctgatcggcgctgatgtcggcgttgcgactgttatggagctgattgacgagctgaagagcgaggtcaagcgaagaaatattcaggacccgaaagaggtgcagtccgtcatttctgaaaagctcgttgaaatctatgaaggcggggagcaggaagcatcagagctccgcgtcgaagacggccgcctaaacatcattttattcgtcggcgtcaacggcgtcggcaaaacgacgacgatcggcaagcttgcccatcaattcattaaagaaggcaaaaatgtcgttcttgctgccggagatacattcagggccggcgcgatcgaccagcttgaagtgtggggagagcgcgtcggcgcgcatgtcgtcaaacaggcggaaggctcggatcctgcggctgttatctatgacgccgttcaagccgcgaaagcgcgcggcgccgatgtcctgctttgcgacacggcaggacgcctgcaaaataaagtgaacttaatgaaagagctagaaaaggtaaagcgcgtgattcagcgcgaagtgcctgatgcgcctcatgaagtgctgctcgtactggatgcgacgacagggcagaacgcaatgacacaggcgcgcgaattttccaaagcgactgatgtctcaggcatcgtgctgacgaagctcgacggaacggcaaaaggcggcatcgtcctcgccatccgccatgagctgcagattccggtcaagtttgtcgggctgggggaaaaaatggatgacctgcagccgtttgaagcagagtcatatgtatacggcctgttttccgatctgatcgagaaagaagagtaggcgtggaaaacccctttgcgggggttttcttttttgccgtccggtatgacaagataaaaacttgacagatcaaatatttcagcgtaaactagtgtatcgtaaagggatttgacttaacaaaggggagagtctcatgacgcttgaaaaaacaacgagaatgaattacttattcgatttctatcagtcgttgttgacatcaaaacaaaaaagctacatgtcgctttactacttagacgatttctcccttggcgaaatagctgaagaatatcatgtctcaaggcaggcggtctatgacaatatcaaacggaccgaagccatgcttgagcaatatgaagaaaagctacttttgtttaaaaaatttcaagagcgcaaaaagatttttgaagcgctgagaaagctgactgacggtcagcctgaggcggagtccctgattgatgcgcttgagaaattagattaggaggcggcacttaatatggcattcgaaggattagccgaccgactgcagcaaacgatctcaaaaatccgcggaaaaggaaaagtaacggagcaagacgtcaaagagatgatgcgcgaagtccgtttagcgctccttgaagcggacgtcaattttaaagtcgtgaaagattttgtgaaaaaggtaagcgaacgagctgtcggacaagacgttatgaaaagcctgacgcccggacagcaggtcattaaagtggtaaaagaagagctgacggagctgatgggcggcgaggaaagcaagattgccgctgcaaagcgtccgccgaccgtcatcatgatggtcggtctgcaaggggccggtaaaacgacgtcgactggaaagcttgccaacctgcttcgcaaaaaacataaccgcaatccgctgctcgtggcagcagacatctaccgcccggcggcgatcaaacagctggaaacgctcggcaagcagctcgatatgccggtattttcactgggtgacaaggtcagtccggtggagattgccaagcaggccatcgaaaaggcgaaagaagatcatcacgactacgttctcatcgatacggcgggacgccttcatattgatgaagagctgatggatgagcttgagcaggtaaaagaaaccgctcagccggaagagattttccttgtcgttgactccatgacgggtcaagacgcggtcaatgttgccaaaagctttaacgaacagctcggtgtgacaggtgtcgtcttgacgaagcttgacggcgatactagaggcggagcggccttgtcaatccgcgccgtgacaaacacgccgatcaaattcgccggaatgggcgaaaagcttgatgcgctggagccgtttcatcctgaacggatggcttcgcggatactcggaatgggcgatgtgctcacccttatcgagaaagcccaggccaacgtagacgaagaaaaggcgaaggaactcgagcaaaaaatgaaaaatatgagctttacgctcgacgactttttggaacagctcggacaggtccgcaatatggggccgcttgaagacctgattcaaatgatgcccggcgcaggcaaaatgaaaggcttaaaaaacgtgaaggttgatgaaaaacagctcagccatatcgaagcgatcatcaagtcgatgaccgggaaggaaaaagagcagcctgagatcatcaatgcaagcaggcgcaaacggattgctaaaggaagcgggacatcggtccaggaagtcaaccgtcttttaaagcaatttgaagaaatgaaaaaaatgatgaaacagatgacaaacatgacaaaaggcaagaaaaaagggtttaaactgcccttcatgtaaacctgttttcagatgataaaaacgttgttaagaaaaaacactttacaaacacttttatcattgttaatatactatcttgttgaaatattttcggaggtgctagtaaaatggcagtaaaaattcgtttaaaacgtatgggagctaaaaaatctcctttctatcgtattgttgtagcagattctcgttcaccgcgtgacggccgcttcatcgaaacagtcggaacttacaacccgcttgcaaaaccagcggaagtcaaaatcgacgaagagcttgcgcttaaatggcttcaaacaggagctaaaccgtctgacacggttcgcaacctgttctcaaaagaaggcattatggaaaaattccacaacgctaaacaaagcaaataatgagtgatctgcacttggaagagctgattgtatcactggtcaagccgcttgtggatcacccggatgatgttcaggttttcaaagaggaaaatccagagcggattatgttccgcctgtctgtcaacagagaggataccggcaagatcatcggcaaaaaagggcgcactgcaagagcgatacgctctgtcgtatttgcggcaggcgcacagtcttctaagaaagttcaacttgagatcgcagactaaggggagagggtgaaaacctcccccttttttaacatgtaagaaaaatagaaacagatgaacgattccgatcgtcagcttatgccaggctgccggatttcagggaaaggaaaaatcacgggacagtaggtgatgatgccatgcaaattatccaacgtgttaccgtcatgcaggttttgactgaaaacagcaaaaaaaagctgctggcttcttttgaagaaagaaaggaaatccttgagcgcgaatgcaaccagctctattttcagctcaggaaacacgaaaaggaacaccacaatccggcggcgactgaatcatttaaaaaagaaattgaaaaacgacaggacaagattaaaatgatcgtttttcaaatcaatcaaatccacacactgccgcttggcagcgaagtaaaggaaaaagaaatcgacgctttaatggacattgaagtcggggataattggcatgatatgacggcgggaaaaacaatcgtgattaaagacgggatcgtcattgaaattcgtccgaggtgaagaaatgctgaaacaatggtttaatgtagggaaaattgttaatactcatggggtaaaaggcgaagtccgcgtcatttcaagaaccgattttcctgaggagcggtacaagcccggaaacgcgctctacttgtttctggaaggaaaagacgagcctgtccaggtgaccgtcagcgcccacaggcttcacaaacagttccaccttttgcagtttaaagaggttgaaacgctcaccgaagccgaaaaattaaagaatgccttgattaaagttcccgaagaccaattaagccagttggcggaagacgaatactactttcacgaaatcatcggctgcgatgttttctcggaagacggggatttaatcggcaaggtgaaagaaattttaacgccgggcgccaacgatgtctgggtcgtggccagaccgggaaagaaagacgcgctcatcccttatattgacgccgttgtcaaagagattaacgtagcggataaaacgatcaagattcatatcatggaaggattacttgacgaatgaaaatcgattttttaacgctttttccggaaatgtttgaaggcgtgctcggctcgtcgatcctgcaaaaagctcaggacaaggacgctgtccgttttcgcgtggtgaactttcgggcctattccgacaacaagcatcaaaccgttgacgattatccatacggcggcggagccggaatggtgctgaaaccgcagcccgtctttgacgcggtcgaaaagctgacggctgaagccggagggtctccgagaatcatcctcgtctgcccccagggtgaacgctatacccagcagaaggcggaagaactggcgcgggaagagcatttaatgttcatttgcggccattatgaagggtatgatgaacggatcagggagcacctgtctacagacgagatttcgatcggagatttcgttttgacagggggagagctgccggcgatgatgatcgcagacagcgttgtgcggcttttgccgggcgtgctcggcaaggaagaatcgcaccttgaagactctttcagcacagggcttcttgaacaccctcattacacgcggccggcagattataaaggcttgaaggtgccggacgttctgacatccgggaaccatgcgaagatcaaagaatggcggcggaaggagtctctcaggcgcacatttttaaggcgtcccgaccttctggaaaactatcctttgtcagaagaagagcgaaagtggatttctgaatggaaaaaccggtagattctattgcgcccgggaaaaaggtgtggtatgatactacttgtgacttgaacgggaacgctcgtttaagtttgaaaacgatgttccgctgtgccggttaactcgcgcaagagcatctgttggaaggagttgaagacgatgcaaaaattgattgaagaaatcacaaaagaacaattgcgcactgatttgcctgcgttccgtcctggtgatactttacgtgtacacgttaaagttgtcgagggtaaccgtgagcgtatccaggtttttgaaggtgtcgtgattaagcgtcgtggtggcggaatcagcgaaactttcacagttcgtaagatttcttacggtgtcggagttgagcgtacattcccattgcacacaccgaaaatcgcgaaaatcgaagttgtccgtcatggtaaagtacgccgtgcgaaactttattacttgcgcgaacttcgtggaaaagcggctcgtattaaagaaatcagacgataatgataacgaacgaaaagagcttgttaaccataacaagctctttttttgtcaaacaagtataaatgcatcgcaccattaaaagaatagcaataacagaaagtaggtggcagacaaatggtgatccaatggttccccgggcatatggccaaagcgaggcgggaagtaacggaaaaactcaagctgatcgacattgtatacgaactggtcgacgccagaattccgatgtcttcaagaaacccgatgatcgaagacattttaaagaacaagccgagaatcatgctgctcaacaaggcggataaagcggactcctccgtgacaaaggcttggaagcagcactttgaaaaagacggaattcctaccctcgccatcaactcggtcaacggacaggggctcaatcaaattcttcctgcatcaaaagagctgctgaaagaaaagtttgataaaatgaaagcaaaaggtgtaaagccgcgcgcgatcagagcattgatcgtcggtattccaaacgtcggcaaatcgaccttgatcaaccggcttgcgaaaaaaaacatcgccaaaacgggcgacagacccggagtaacgactgcacagcagtgggtgaaggtcggaaaagagctggagcttctcgatacaccggggattttatggccgaagtttgaggacgagcttgtcgggctgaggctcgcggcaacaggcgcaattaaagattcgattatcaacttgcaggatgtcgccgtctacggtttgcgctttttggaagagaattaccccgaacgcttaaaaaagcgctatgacctggaggagattcctgaagaaattgcagcgctttttgatgagatcggaaaaaaacgcggctgcctcatggccggaggcgagatcaattacgacaagacgacagaagtcatcatccgcgatatccgcaccgaaaaattcggcccgctttcttttgaaaagccggaggatatgtaaaaggcgcgcttttaaaagagcgggcctttatttttgcagaagatgcgccgataagaacattaggggagaagagaaagtgaaaacattaaccgtcaaagaaattaaagaacatcttcaatcggtgagcgatgaaaaggacccttttatagagcagtgcaaaaatgatgagcgaaaaagcgttcaagcgctcgtcgacgcctggctgaagaaaaatgaaaggctttcggccatgcgggaagagtggcaggcgatgacgtcttttgaacggtcgctgagagcgcggggctatcaatatatcgccggaatcgacgaggcgggcagagggcctctcgcagggccggttgtcgccgccgctgtcatcctcaaagaagattgtgaaatattagggctgacagattcgaaaaaactgtcaaagcaaaaaagagaagactattattcatacataatggaagaagccgcagcagtcggcgtcgggatcgcggacgcccatgagatcgatgagctgaatatttatgaagcctccaaagcggcgatgctgaaagcggtccaagcgctggacgtcgcaccggattatcttctgatcgacgccatgtcgcttgcggtcgatagagagcagtcatcgattattaaaggggatgccaaaagcgcctcgatagcagcaggcgcatgcatcgcaaaggtgacgagggacaggctgatggatgaatacgctgaaaagtatcctctctacgggtttgaaaagcataaaggctacggaacgaaggagcatctgaatgccctggcgaaatacggcccgtcgccgatacaccgaagatcgttcgcccctgttaaagcacatgaataacgttccggaggaagaatgactttgatgatgctgaacgatgtacataacagcttaagaaaacaatttgaacaagcggattctctccagcggatcagcggaacggagacggatcagaaaaggctgatgctcggcaaagtgctccgctttatcagcgagcagttcgccgaaatacaaatcggcaatacgaaatggcaggggaagcttgaggcacccctgaaagcgggcgctcattactggttttcgtatgaaaagaagccggatgaagcgacaggccgccttcaggtcgttgaagcgtttgacaaaaacccgaagaccgtgcaggatgccgcctttaagctgttgaacgggctttctctgaagcggacgaaggaagccgtctttctggtcggagcgttgctgaaggagcagcagccgatcagggaaaacgatttaagagccgccatcaagtggcttgaaaatctgccgaagtccgatgcccaaaaaggcgccgatgccgtcatgttcgctcttaaacgcgaacttcccgtccaccccggcgtgctcgattcgattatggccgtcaaaagccccgttccgctcaatgagcagattgcgagaacgcttgatatgatcgcgaacgccgctcagccatccccaggcatggaaaagctgaaacaggcgcttttgccagttttacaagcggagactgaggtgcatgccgaaaggctgattcaaaagcttgcggaacacatcagatcgctggaaaaaggagaactgcaggccgttctgccattaaagccgcaggttcagtcagaaggcggaaaacctccgcaaaaagcagacgctggcggcgcatacggacaggaagcaaaagcagcccagcacaatccgcaaatcgcagcagctaaagacgtgttcgctaaattggcggcacaagccgaaacgaacgggacgcatattgcaagagaagcggcaggcgtcatcagagcgcttgaatcgcgcggagctctcggacaagctccggccgttctggaaggattcacgccaaaagagacggaacttttgcagcatatcatgaaagaaacagcgcctgcattgacgaataaagccgatgtattatccgttctcctcaagatcaaagatgttttaggcgtcagagatgagctctcattgttgagagcgatggaaaacggcgccgttctcaaagagcagggcctgcaatctttaaagctcgtgctgaatgaaatgaggcatgcttccgatcttccggctcctgtaaaacaggaagcggaccaaatctttcaccgtttaaacggacagctgtttttgcagaatgatcagcctgcccagagccagctttttctgtcgtaccctctgttttcaaagaacggcgtccaggatttgaacgttttcttaaaagggcagaaaaaagacgacggaaaaatcgacccttcccagtgccgcctcatgttttaccttcagttggaagcccttgaagagacggtgatcgattgtttgatccagcaaaacgtcatgacggttacaattgaaacaaagttcgatttggagtctttgattgaaccgctggtcccggctttaaaggaaaacctgaaagagctgggctacagcttgtcaggcgtctcagcaaaaaaacgggaaaacatgaagctcgctccgtttttggagtcccgttttgaacaaattacagagagcgcagtggatgtgaaaatatgaaggaatctgttccattaagaagagctgttgcgcttcactacgatgaaatgaaggacaaggcgccgaaggtggttgccaaagggtcgggatacacggcggagaagatcattgaagaggcgcagaaagccggtgttccgattcaggaagatgcgacgcttgtcgaattgatgcgccacttggagcttgacgaccacattcctgaagcgctttacgagatcgtcgccgagatcttttcattcgtctatacgcttgatgaaaaaatgaaaaagagggaatgacttttgaaaaaaagccgtttcctctattaattttatatttttaataaaataaaagtgtgaatgtttagaaggattttacgatttctcatcgaaacctagacaatcgatctatgattatataaaatgaaagcgcagtctatttttatttttgctacataagttaggaggatgggaaaatgaatatccatgagtaccaagggaaagaagtactcagaaaatacggagtggctgttccggaaggtaaagtggcatttacagcagatgaagcggtcaaagcagcggaagcgctgtccagctcggtttatgtcgtgaaagctcaaattcacgccggcggacgcggtaaagctggcggggttaaaattgcaaaatcaaaagaagaagtcaaagcctatgcggaagaattgttgggaaagacgcttgtcactcaccagacgggtcccgacggccaacaaataaaacgcttacttattgaagaaggctgcgatatcaaaaaagaatactatgtcggtctagttctcgacagggcgacttcacgcatcgtgctgatggcctctgaagaaggcggcacggaaattgaagaagtcgctgaaaaaacaccggaaaaaatcgtcaaagaagtgatcgatccggctgtcggactgcagagctaccaggcgagaaaaatcgccttcgccatcaatattccgaaagagcttgtcggccaggccgttaagtttatgatggggctgtacaaggcgtttactgaaaaagactgttccattgctgaaatcaatccgctcgtcgtcacaggggacggaaaagtcatggcccttgacgccaagctgaactttgacagcaatgcgctatacagacaaaaagacatcttggagtacagagatctcgatgaagaagatccgaaggaaatcgaagcatccaagtatgatttaagctatatttcgctcgatggaaacatcggctgcatggtcaacggagcggggcttgcgatgtcgaccatggacattatcaagcactacggaggggaaccggccaacttccttgacgttggaggcggcgcgacagccgaaaaggtaacggaagcgttcaagatcattttgtctgatcaaaacgtcaaagggatctttgtcaatattttcggcggcatcatgaaatgcgacgtcattgcagaaggcgttgttgaagcgacaaaacaagtcggtctgacattgccgcttgtcgttcgccttgaaggcaccaatgtcgatctcggcaagaagatcctcgatgattcaggactcaatattacgtctgcggaatcaatggctgacggcgcgcagaaaatcgtatccttagtgaagtaagaaaggcaggggaccaaaatgagtgtatttattaataaagacacaaaagtcattgttcaggggataacgggttcaaccgctttgtttcacacaaagcagatgcttgaatacggaacgaaaattgtcggcggagtcacaccgggcaaaggcggaacagaggtcgaaggggtgcctgtgttcaatacggtcgaagaggctgtaaagcagaccggggcaaatgcgtctgtcatttacgttcctgcggcttttgcggccgatgcgattatggaagcgacagatgctgagcttgatcttgtcatctgcattactgagcatattccggtgcttgatatggtaaaagtcaaaaggtatatggaaggcaagaaaacgagactcatcggtccgaactgcccgggagtcattacgcctgaggaatgcaaaatcgggatcatgcccggatatatccataaaaaaggccatgtcggcgttgtgtcgcgttcaggaacccttacatatgaagcggttcatcagctttccgaagcaggagtcggccagtcgacagcagtgggcatcggcggagaccccgtcaacggcacaaacttcatcgatgtgctgaaggcttttaatgaagatcctgatacacatgcggtgatcatgatcggcgaaatcggcggaacagctgaagaggaagcggctgaatgggtgaaagccaacatgaccaaacctgtcgtcggtttcatcggaggaaagacagcgcctccgggcaagcgcatggggcatgcgggcgccatcatttccggaggaaaaggcacggcggacgaaaagatcaaaacgatgaatgcctgcggaatccaagtggctgaaacgccttctgtcatgggagaaacattgattaaagtgctgaaggaaaaaggtctttacgaaacgtgtaaaacacactgatgattaaaaagagcgggaatagtccgattggtctattcctgctttttcataactggttatatcgtttagtactttcagattgttttgttttaaaaatttttggaggtttttgaatgaacgacagcagcgagcttttgatattgctccgccttcgcggcacactctccccttctctgctgaccaagtggtggaagcaggacccttccttgtctcttacgggcgaaaaaaaccatcttttaacgaagctttcattaaaaagatcagacttgtgctccatacgaaaactggcggaacaagaactgtctaatgttaaacggctcatccgttcttacgaggcggccggcgtccgcatgaccgccatatcttcccctgattatccagccagcctgaaaaccattcatgacccgcctcccgtcctttttttaaaaggaaacaaaaaacttctccatgaacaaagactgatcggaatcgtcggaactcgctgcccgtcattatacggaaaaagagctgcggtccagcttgtcagggagctttgcaaaaacagctggacgatcgtcagcggtcttgcaaaaggaattgacggtctcgcccatcaggagagcatccgttcaaagggaaggacaatcggcgttatcgcgggcggattcaacagcatatatccccgtgaacatcgccagctcgccggacaaatggccgaaagccacctgctggtatcagagcaccctcctcacattaaaccgcaaatatggcattttcccatgcgaaatcggctgatcagcggattaacggaaggaatcgttgtcgtccaaggcaaggaaaagagcggatcgctcattacagcataccaagcccttgagcaggggcgggaggtgttcgccgtgccgggtccgatctttgatgccaactctttcggtccttcaaggctgatccaggaaggggcgaaactcgtattaactattgaagacattttgaacgaacttccgccttcaaacgctcaatatacagagcctgtttagaattatcgtttgacaaaccgtattgtaatatttaataatagtgaggatttcaagtttaaacgctttaatcggcgttcaacatatagaaggattaaatcagacacttttcgtaaaaataatgactatataaacgacgattatgctgaatacaaataaaaaaggctaaattgaaaagagagagaacacctcttgagggggataatgttatgtccgaatacttagtcatcgtggaatcgcctgcaaaggcaaaaacgattgagcgatacttaggaaaaaaatataaagtaaaagcctcgatggggcacgtcagagatttgccgaaaagccagatgggcgttgacatcgagcagaactttgaaccaaaatacattacgatccgcgggaaaggccccgtgttgaaagaattaaaaacggccgccaaaaaggcaaaaaaagtttatctcgcagccgaccccgacagggaaggggaagcgattgcgtggcatttggcgcacagccttgatttggacctgaattccgactgccgcgtcgtatttaatgaaattacaaaagatgcgatcaaagaatcatttaagcatccgcgcatgatcaatatggatcttgtcgacgcccagcaggcgagaagaattctggaccgccttgtagggtacaaaatcagtccgatattatggaaaaaagtaaaaaaaggcttgagtgcgggacgtgtccaatctgttgcgctccgccttatcattgaccgggagaaagaaatcaacgattttataccggaagaatattggacaattgaagggtcttttctcaaaggtaaagaaacgtttgaagcgagcttcttcggaatcaacggggaaaagcaccagctgaaaagcgaagatgatgtgaagcaaatcctatcccggatcaaagggaacaaatttgaggtcaaaaaggtaacgaaaaaagaacggaagcgaaatcctgcgctcccatttacgacgtcgacgcttcagcaggaagcggcgcgcaaattgaatttccgggcaaagaaaacgatgatgatcgcccagcagctttatgaaggaatcgatctaggcaaagaaggaacggtcgggttaatcacttatatgagaacggattcaacccgtatctcgaatactgctcaagaagaagcggcatcattcatcggcgaacagtacggaaaagaatttttgggtagcaagcgaaagccggccaaaaagaatgaaaacgcccaggatgcccacgaagcgatcaggccgacctcggtgctcagaaagccttccgatctgaaggcggtattgggaagagaccagcttcggctatacaagctgatctgggagcgctttgtcgcaagccaaatggctccggcgacactggatacgatgagcgtcgaccttgaaaacaacgggttgacatttcgggcaaacggcagtaaagtcaagttttcaggcttcatgaaagtgtacgttgaaggcaaagacgatcagatggaagagaagaataagatgcttccggatctcgctgaaggcgataccgtgctttcaaaagacatcgagcccgaacagcacttcacacagccgcctccgcgctatacggaagcaaggctggtcaaaacgcttgaagaactgggaatcggacgtccatccacatacgcgccgacgcttgacacgatccaaaagcgcgggtatgtcgcccttgataataaacgctttattccgactgagctcggtgaaattgtgcttgacttgatcatggagtttttccctgagattattaacgttgagttcaccgccaaaatggaaaaagagcttgatgacgttgaagacggaaacattcaatgggtgcagatcatcgattccttttacaaggactttgaaaagcgcgttgaaaaagctgaagccgagatgcaggaagtggagatcgaaccggagtatgcaggtgttgactgtgaagcgtgcggacatccgatggtctataaaatgggccggtacggcaaatttatggcctgctccaattttccggactgccgcaacaccaagccgatcgtaaaagagatcggcgtcaaatgcccatcatgcaaaaccggcaacatcgtcgagcgcaaatcgaaaaaacgccgcattttttacggctgtgaccgctatcctgaatgtgaattcgtatcatgggataaaccgcttgaacggaaatgtccgaaatgcgaggacatgcttgtggagaaaaagctcaaaaaaggcgttcaagtgcagtgcgttaattgcgattataaggaagaacaacaaaagtagcggtgagcagggctttgctcaccttctttgttgtgttaaaagaataagtcaattcataaattaggagatgtgaatatgaatcaaacagtaaatgtcatcggtgcaggacttgcaggaagcgaagcggcatggcagcttgctaagcgcggtatcaatgtccgtttatacgaaatgaggccagtcaagcaaacgccggcgcaccatacagataaatttgccgaacttgtctgcagcaactcgcttcgggcgaattcattaacgaatgctgtcggtgtattaaaggaagaaatgcgggttcttgactcggccatcatcgctgctgctgacgaatgttctgttcctgccggcggtgcgcttgccgtagacaggcatgaatttgccgcaaacgttaccgaaaaagtaaagaatcatccgaatgtgaccgtgcttcatgaagaagtcacggaaataccggaaggaccgacaatcattgcgacaggaccgctgacatcagaagcgctttccgcaaagctccgggagctgacaggcgaggactatctatacttttatgacgcggctgcgccgattgttgaaaaagacagccttgacatggataaagtctatttgaaatcccgctatgacaaaggggaggcagcgtatttgaactgtccgatgacagaagaagagtttgacaggttttatgacgcccttgtgtctgcggaaaccgttccattgaaagaatttgaaaaggaaatcttctttgaaggctgtatgccgattgaagtcatggcgaagcgcggcaaaaaaaccatgctgttcggcccgatgaagcctgtcggacttgaagacccaaaaacaggaaagcgtccgtacgccgttgtgcagctgcgccaagatgatgcagccggcacgctttacaatatcgtcggttttcaaacccacctcaaatggggcgaccaaaaagaagtgctccgcctcattccgggactggaacaggcagaaatcgtccgctacggcgtgatgcacagaaatacgttcatcaactcgccgagtctgttaaaagcgacctaccagtttaaaaagcgggacgatctgttttttgccggtcaaatgacaggtgttgaagggtatgttgaatcagcggcttcaggtcttgttgccggtataaatgcggctcggctcatccagggaaaagaacctgtcactttttcaaatgaaacagcgatcggcagcatggcccattacattacggaaacaaacaagaaaaacttccagccgatgaatgcaaacttcggcctgttcaaagaattgggtgttaaaattaaaaacaagcaggaacgaaatgaacagtatgcttcgcgcgcattggagacaattcgaaatatttcgaaaacgctatagttattcattgccagatgaacttgttatgtgataacatttaaaagcccttttcgaagaggtgtaatgatggcaaatgttaagaattttttaactttattcattgaatatttacaaatagaaaagaattattcaaaatatacaattgtgggttacatttcttccattgaagactttgaacgctttttacacgttcagggcataaagggttttgaagacgtgacttatccggatgtgagaattttcttgacggaagcgcatgaaaaagggctcactcgcaggacgatcagcaagaaaatttcggctctgcgtagcttctataaatttttattaagggaaaagctggtaaaagaaaacccgtttctgcttgtcagtctcccgaaacaggataagcggattccgaagtttttatatgaaaaggaacttgaagaactgtttgaggtttcggatttgagtacaccgctcggccaaagaaatcaggcgctcctggaatttctctacgcgacaggcatgcgggtaagcgaactttgcagcctgaaggaatctgatttggatctgtttttagatacggttttggtccacgggaaaggcaggaagcaaaggtatattccatttggttcattcgcccgggaggctttggatctgtatttgcaaaatggaagacgcatccttctgttaaaagcgaaagagccccgcccttttatttttttgaatcaaaggggcgggcccttaaccccgaggggggttcgttacattttgggagaactggtcaagaagacttcgggtacattacatatacatccgcatatgctccgccatacatttgccacccatttgttaaatgagggtgcggatctgaggagcgttcaggaactgcttgggcattcaaatctttcttcaacccaggtgtatacgcatgtatctaaagatatgctcagaaagacatatatgtctcatcaccctcgggcacataaagggaaataaaggaggttcttttatgtcatcttttcacgcaacgacgatatttgccgtccagcacaacggaaaaagcgcgatggcgggagacggccaggttacgttcggtcaggctgtcgtcatgaagcataccgcaagaaaggtaagaaaactcttcaacggaaaggtcattgccggttttgccggttctgttgcagacgctttcacgctctttgaaatgtttgaagcgaagcttgaagaatacaacggcaatttgcagcgggcggcagtcgagcttgcaaaagagtggcgaagcgataaagtcctcagaaagcttgaggcgatgctgatcgtcatgaatgccgacagcatgctgctcgtttccggaacaggcgaagtgattgaaccggacgacggcattttggcgatcggctcaggtggaaactacgcgcttgcagccggaagggcgctgaaacgtcatgccggcagccagcttgacgcgaaagcgattgcgagggcttcacttgaaaccgcgggcgaaatctgtgtgtatacgaacgatcagatcattgtagaagaacttgaatagaaaggatatgaggcatatggaaaaaaagccgctgactcctaggcagatcgtcgaaaggcttgatcaatacatcgtcggccagctcaatgcgaaaaaagcggtcgccgtggcattgaggaaccgctacagaagaagtcttcttgatgaaaaactgcgcgaagaaatcgttccgaaaaacatattgatgatgggcccgacaggtgtgggaaaaaccgagattgcaagacgaatcgcgaaactcgtcggcgctccgttcgtcaaaatcgaagcgacgaagttcacggaagtcggttatgtgggcagagatgtggagtcgatggtcagggatcttgtggaaacgtcagtccgcctcgtcaaagaggaaaaaatgaacgaagtgaaaggcatcgctgaagaaaacgcaaataaacgcctcgtccgcctgcttgtaccgggaagaaaaaaacagacaggtgcgaaaaatccttttgaaatgctgtttggcggaaatcaggatcaagaaactggtgaagcggaaaagcaagaagacgcggatatcgaaaacaaccggaaacggattgcgcatcagcttgctctcggcgaacttgaagaccattatgtcaccgttgaggtggaggagcagcagccgtccatgtttgatatgctccaaggctcgggtatggaacagatgggcatgaacatgcaggatgcgctcagcagcctgatgccgaaaaagaaaaagcgccgcaagcttacggtcagggaagcgcgaaaagtgctgacgaatgaagaagcggcaaagctcatcgatatggacgaagctgcccaggaagctgtccagagagccgaacagtcgggaatcatctttatcgatgagatcgataaaatcgccaaaaagagcggtgcttcttcatcggcagacgtctcaagagaaggcgtgcagcgcgatattcttccgattgttgaaggatctaccgtcatgacaaagtacggtgcggtcaaaacggatcacgttctgttcattgctgcaggtgcattccacatggcgaagccttcagatctaattcctgagctgcaggggcgctttccaatacgcgttgagcttcaaaagctgagcatcgatgactttgtgaaaattttaactgagcctgacaacgctcttcttaagcagtataaggctttattgaagacggaaggtatatctcttgaattttctgacgatgctattcgtaagattgcagaagtggcttatcatgtgaaccaggacacagacaatattggggcgagaaggcttcacaccattttggaacgtcttttggaagaactgtcattcgaggctccggatgtgacgatggaagaagtggtcatcacgcctcaatatgttgaagaaaagctcggttcgatcgctaagaataaggatttaagccagtttattttataaacaattaaataagagtaatttaggaggatcaatttattatggctttattacaaaaaacaagaaagattaatgcaatgctgcaaaatgcggcagggaagccggttaattttaaagaaatggccgaaacgcttcgcgatgtgattgattcgaacattttcgtcgtcagccgcagaggaaagcttctcggtttctcgatcaaccagcagatcgaaaatgaccggatgaaaaaaatgcttgaagagcgccagtttcctgaagattatacaaaaagcctgttcaacattccggaaacgtcatctaaccttgacatcaacagcgaatacacagctttccctgtggaaaaccgcgatttgttccaagcgggtctgaccacggtcgttccgatcatcggaggaggcgaaagactgggcaccttgattctgtcccgccttcaggagaaattcgaggatgacgatctgatccttgccgaatatggcgccactgtcgtaggaatggaaattctcagagagaaagcggaagagatcgaagaggaagcgcgcagcaaagcggtcgttcaaatggcgatcagttcactatcttacagcgagcttgaagcaattgaacatatttttgaggagcttgacggaaatgaaggcctgcttgtcgctagtaaaattgcagaccgcgtcggcatcacccgctcggtcattgtcaacgcgctccgtaaacttgaaagcgccggtgtcattgaatcaaggtcactagggatgaaaggcacatacatcaaagtgctgaacaacaaatttttgatggagttagaaaaactaaagtctcattaaaaggcgaaagccgcagaacatgccgttctgtggctttttttatttcatgttttaaactatattatcgtaattttttcatatcaaaaaacaactaaaacgcggtgcaaaatcaatgcgttacttgaataaaagatatactaacataattttttgaaactttaatgaacgtaacattacatagttcttataatataggtcaaaatacctattcataaaatagatatttcttacgatttttttttgcttccagatcatagactttaagcctattattccttacaataggcttatggtttttacaattctcgacaagattttaagacagatggaaaaagattggaggtatttggacggtggatatattttcaggaacgatacatagactagagggagccttgaatcaagcgaacattaagcaaaaagtcataacgaacaatctggccaatgtagatacaccgaactacaaggcgaaaaaagtatccttcaaaaatgtgctgaatgaggagtcctcccggattaatgccataaaaacagactatagacacattgactttaaagggaatgagtcaaattattcagttgtgtcgagaaagaatacaacttatcaagaaaacgggaacaatgtggacgttgatcaggaaatgagtgaaatggcgaaaaatcaaatccagtatcaagcgctggttgaaagaataagcggaaaattcaactcgctaagaaccgcgattacaggaggtaaataatgggggtattcaatagcatcaacatttcagcttcagcgttgactgcacagagagtcagaatggataccgtttcttccaacctggcaaacatggatacgacagagagcgaagctggttgacggacagtggcagccgtatagaagaaagcttgtatcgacggctccgaaaggcgaatccttttcatccgttctccaatcatcgatgaatgcatcggcgagagtcggcgaaggggtgaaggtgaccaagataagcgaagacaaaacaccgtttaagctcgtttatgatccgacccatcccgacgcaaacgaagacggatacgtgcagatgccgaatgtcgatccgctaaaagagatggtcgatttaatgagcagcacaaggtcatatgaagccaatgtcacagcaatgaacgcgacaaaaggaatgctgatgaaagcattagaaatcggaaagtagggtgatgacacgaatggttaatggaatctctccgtttggagttcaatccgtgcaggcgggaacgaatgcaacaaatcagatcaagaacaagcaggacggttcagagaaccaagtcagcttttccaacgtgctgaaagattctatcaatgctttgaatcaatctcaaaatgaatctgataaactgacaaacgcgcttgctctcggtcaggatgtcaaccttgatgaagtgatgattgcagcccagaaggcaaacattacattgacggctgcgacggaattccgcaacaaagcggttgaagcttatcaggaaatcatgagaatgcaaatgtaagaaaggagtctgaaagcgaagagaattagtgtaactaccgggggagtaagatgaatcgtaatttattgcaaattaaaacgaaaataactgatttttggaaaaacagatcaaagctgcagaagattctgctgatcggcattgtcgctctggcagtcatcctgtcaatcatcattggaattgttgcctcgtcaaataaaatggtgccgctctataaagatttgtcagctgaagaaaccggccaaatcaaacaggtgctcgatgaaaaaggtattccatctgaagttgcgactgacggttcagtcatcaaagttccggaagaaaaagtcgatgaactgaaagtcgatcttgccgcagagggccttccgaaaagcgggagcatcgattattcattctttggcgaaaatgccggtttcggcatgacggacaacgaatttgacgttttgaaagtgaaagccacgcaaaccgagctatccaacctcatcaaaggaatagacgggattaaagattcgaaggttatgattaacctgccgaaggaatccgtctttgtcggagaggaaaagccggaagcatccgcttcgattgttcttcaggtgaagcccggccacacgcttgatcaaaatgaaatcaacggcctttatcatctcgtatcgaaaagcgtgccgaaccttgacccgaaaaacatcgtgatcatggatcaaaactccacatattacgatcaaacaggcaaagagtccggttcttacgccgacagctattcttcccaaagggaagtcaaggcccagatcgaaaaggacctgcaaagacaaatccaaaccatgctcggcacgatgatgggacaggataaagtggttgtatccgtcacatctgacatcgatttcacaaaagaaaacaggacggaagacctggttgaacctgtcgacaaagaaaatatggaaggaatcacggtcagcgcagagcgcgtcagtgaaacatattccggacagggagcacaagcgggaggcgtcaacggaacaggtgaaaacgatgtaacgaactatgctgaaacagaaggcggaacaggcaacggagactatgagaaaagcgaagaacgaatcaacaatgaagtcaacagaatccataaagaaatcgctgagagcccgtacaaaatcagagatctgggcgtccaggtcatggttgaaccgcctgatgcaaacaacccgcagtcactgcctgctgaaagggaggacgatattaaaaaaatcctctcaaccattgtgaaaacatcgattgacaagaactatgaagaagagcctctgacagatgaggatgttgaaaataaaatcgttgtttctgtccaatcgttcgacggcaagcagacaatcgatgaaggaacggaaacaggcggcataccgatgtgggcttacatcgcaggcggagcagcgcttgttgctgtaatcggcctcatcatctggcttgtcagaagacgtaaaaatagagatgacgaatacgaggaagaatggtatgaaacgcctcaggagccgattcgggttgctgatgtgaacaatgaaaaagagacagaagaaactgtcagacgaaaacagcttgaaaaaatggcgaaagacaagcctgaagaattcgccaaattactgcgcagctggctgaccgaggattaggaggagtattgaaatggcaaaaatgaaacaagacaggcttacaggcaaacaaaaagcggccattctcatgatatccttagggcttgatgtgtcagcttccgtttacaagcatttaacagatgaagagatcgaaaggctgacgcttgaaatatcaaatgtcagagctgtatcacctgagaaaaaagatgagattattcaggaatttcatgaaacggctattgctcaagaatatatttctcaaggcggcattcattacgccaagcaggtgcttgacaaagcgctcggcgaagacaaagccgccagcattatcaacaggctgacatcgtctcttcaagtcagaccgttcgattttgccagaaaagcggatcccgagcagattctgaactttatccagcatgagcacccgcagacgatcgcattgattctgtcttatctcgatcccgtgcaatcgggtcagatattgtcagagctgaatcaggatgtgcaggcagaggttgcaagaaggatcgctgttatggacaggacgtcgccggaaatcatcaatgaagtcgaacagattctggagcaaaagctatcgtccacattcactcaggactacacgcagaccggcggtatcgaagccgtagtcgaagtgttgaacggagttgacagaggtacggagaaaacgatccttgacgcccttgaaattcaggatcctgagcttgccgacgagattaaaaagcggatgttcgtctttgaagatatcgttacgcttgataaccgcgctattcaaagggttatccgcgatgtggaaaacgacgatctgcttctttctctcaaagtggccagcgaagaggtcaaagacatcgtcttcagcaacatgtcgcagcgtatggctgaaacatttaaagaggaaatggaattcatgggccctgtgcgtctgcgtgacgtagaagaagctcaatcgagaatcgtaagcgtcatccgaagacttgaagaagcaggtgagatcgtaatcgccagaggcggaggagatgatatcattgtctaacattattaaacagcgattatcatcaataccgcaaaaagaaaggcggacgatttcattaaaggaagtcaaacttcctgagacagaaaccgaacttgataccggacaggatccggaatacctcctcgaccatgccagacaagaagccggaaaaatatacgaaaaagcgagcgctgaactcgaacaggtcagacggcaaatcgaagaggaacggtcaagctgggaaacagaacgcgaagcgctgatagaccaggcgaaacaagaaggctttcaagctggatttgaagagggaaaggccgaggcccgaagcgcttatcaagcgtatttggatgaagccaatgccatcgtccgggcggctagacgtgactatgaagaaaaaatcgaacaatcatccgaagaaattgtcgaacttgccgtgtcactggctaaaaaagtttggaatcaaaaggctgacgacaaagaagcttttacagccctcgtaaaacaggtgctgtcggaaatgaaggaattcgatgacattgccatctatgtagatccggagtactacaccgaggttcaaagccacaaaaacgaacttgagcagctcctccaatacggcgcccatatcgcgatatacgccgatgaaaaagcgccgaaaggaacgtgctatgttgaaacggctttcggaagaatcgatgcaggcatcgacactcaattgcagcagctgaaacaaaaactgctcagcctgcttgaaacggcaggtgttgtccggtgatgctcaagcagctgcttgaatgtatagaaaccgcagattcctacaaacgatacggaaaagtcaaacaggcggtcggcctgatgattgaatccaaaggacctgaatgttcaatcggcgatgtctgcaaaatctatacaaaaggtgacgggccaaaggctattaaagctgaagttgttggcttcaaagaccaaaatattcttctgatgccatatttggaagcggccaatattgcccccggcagcattgtcgaagcgacgggcgaatcgcttagggtcaaagtcggctccgggttgatcggacaagttgtcgatgcattcggcaatccgcttgacggcagcgtgcttccgaaaggtctggctcaagtatcgacagaccaggcgccgcctaatccgatgaaaaggccgccgatcagagaaaaaatggcggtcggcgtcagatcgatcgacagtctgctgaccgtcggaaaaggacagcgtgtcgggatattcgccggaagcggcgtcggaaaaagcacgcttatgggaatgattgcgagagagacggccgcagacttgaatgtcatcgctcttgtcggagagcggggccgggaagtcagggagttcatagagaaagatctcggcgaagaagggctgaagcgaacgatcgttgtagtggctacatctgaccagccggcgctgatgcgtctgaaagcggcctatacagcaacagcgattgccgagtacttccgcgacaaaggacaaaacgtcatgttcatgatggactcggtgacaagggtcgccatggcccagagggaaatcggcctggcgacgggcgaaccgccgacgacaaaaggttatacaccctcagtgttcgctattttacctaagctcttagaacgaacaggaacgacggaaagcgggtcaataactgctttctatacggttcttgtcgacggcgatgatatgaatgaaccgatcgccgatactgtaaggggaatcttggacggccatatcgttcttgaccgagcccttgcgaataaaggccagtttccggcagtcaacattttaaaaagcatcagcagggtgatgtcgaacatcgccgagaaagaccatatcagagcagcgaaccggttcagggaaatgctgtcaacctatcaaaactcagaggatctgatcaacataggagcctataaaaaagggtcttccagagaaattgatgaggccatacaattccaccctaagctgatcagcttcctcaagcaggaagtggatgaagcggcatcgctggaagagagcatttccttattaaagagtcttacaggaagagaggattaagaatggcttattcatttaaatttcaaaagctcctcgagcttaaagaaaatgaaaaagaccaatcatttgctgaatatcagcactcagtttccgaattcgaaaaggtcgcggaaaagctgtatgaaagcatgagccaaaaagaaacgctggaaaaaaacaaggaaatcaagatgcagacggggatgagcgttcaggaaatgcggcattatcagcaatttgtcacaaatcttgaaacgacaatctaccattatcaaaagctcgtcatgatgaagagaaatgaaatgaatgaaaaacagcacgatttgacggagaaaaatatcgagctgaaaaaatttgaaaaaatgaaagaaaagcagtttgaaatgtattcgctgcaaaacaaagcaaatgagttaaaggaaatggacgatatctccattgcccagtacataactcaaggaagctaggggtagaaaaacgatgaccgaagaaaaaaaagccggtaaatttcagacatttttgtttgtcatcgtcattccgctgatctttttaatcgttgtagcgttcgtcggcatgtggcttttgggcgtcaattttcaggatgtagcctcaaaaattcccgtcgtaaaagagcttgtgaaaaacggcgaggatcaggacatagatcacgcaactaaacagcaggagaacaaagcagaaaagctccaaaagacgatcgatgaacaaaaaagcgaaatcgaaacgctgacgagtgacttaaaaacgagtgatcaagagattaaaaggctgaaacaaaaaatcagctcgctcgaaaaaacggaaaaagatgaaaaagagcaggataaaaagaacgccgaaggtcaaggagacggaaaagtcgtcaaaatttatgaaagcatgcaaagcaataaagctgcaaaaattttaagcgaattaaaagaggaagaggcaatcaatattttagattctttaagcaaaaagaaagtgactgagatcctctcaaaaatgtctcctgataaagcggctgtattcacagaaaagcttgtgaaaaacgaggcgaaaaacgaagcgaaaaaagaagggggggaatagcttgaggctttttgacgtaatctcctttgatgccaaacctgcggtggacactgcacctgcaaaaacgagcaggacgccgttgggcgcgctctttcagaatgtgctccagaaggaaaacagctcactttccccttttcaaaagggagaagagccttctcaggatacgccgttggaagggcttttgcatgaactgaagcaatggctttcaaataaggaagacagctctttcaatgaagactggctgaattcccttcagcagcttgaagagctgaatgcatctccggatgaactggcattggcagaacagctgctgcaacaaataaaagagctgcttgaaaaagccgccctgcctgaacaatcaggcaaaacggctgatgctaaagctttgcctgccgacgaaagcgggacagaagagccgaaaaagcccgacctgcaaattctcggccagattcagcagctgctagctgcgattgtaaatgaaaatcaaccgtcactcaaaacttcgcaaatcgcagaattattgaaacaggcgccggaatttctcgccgctcttcaaacaaaggcgggagcagaagggctgattgatgagcttaaacgtcaatttttcacgaaagatccgagccaatcgcagcttttgtccatgtcaaacaccgagctgaaaagcttgaaaagcttaatggagcagatgatgaacgcaaacgctgaaccggatcaaaaagagtggaaaatggccgaaagcgaactcaaggcaatgctcatgagcaagaaaaccgatgtttctctttctgagaagccgttgtcctttgttttgaacagaagagaaattcaaactgaaggaaagcaaggccaaaaggaacagccgattcaatcctctgtactggccaatcatcggacaggcacagcgctgatccagggtctccagccttcggcggcagaggaagcttccgctcagccgaaaagcttttcagaacaaattctcagctcatggaaacagatgaagtatacgccgttcggcaggtcgacaggcagtttcacgatccgcctgaatcctgaaaatcttggctttatcacgatcaagctcgtcaaacagcacgggatgttttcaagcaaaatcatcgcatcgacccagtcggctaaagagctgctcgaacacaatctcgcgcatcttaaacaggcgctgcccaacatgtctgtgcaaattgaccgcttcggtgttccgcttcaaaacagcgatcagactttcggacagctggcggacgatgagaaaaaccagcatcagccgaagcaagatcagcaaagtaagcaggaaaatgaggattttcaggagtttctggatgagcttatcgagactcgatcacaggacagcgaggaggagatctaatgtctgatacttcaattgataccagaaccgccttaggaacaacaaacacgaaatcgacgacatccgattttttatccgaggcaaaaaaagccgagaaagcagggagcggctccaatcttgggaaggatgaatttttgaaactgctgatgaaacaactgcagtaccaagatcccttaaatccgatggaagaccgcgaattcattgcgcaaatggcgaccttttcaagcctagagcagctaacgaatctgaacacaacgatgtcgacgttcgtcggacttcaggacccgatgacgatgtatgtcagctggatcggaaaagaagtcacctatgaaggcgaagacagcgaagaaaaaacggcgctcgtcaaatcagttaaaagctcagacggacagtatctgcttgtccttgacgatggaaccgaagtcaatccgtggaatgtgacggcggtaagccattctgataaataaaaacagacaattcagggaggaataattatgttacgttcactatactcaggaatcagcggcatgaaaaactttcagacaaagcttgatgtcgtcgccaacaacatctcgaatatcaatacggcaggctataagaaaagccgggttacgtttaaagatattgtcagccagcagctttccggcgcgtcgtcgtctactgcaaaccgcggctctgtaaacggccagcaggtcggactcggtgcaacgatcggatcgatcgatatcattcacacaaacgcagcgccttcgacaacaggccgccagcttgacatgaccattacaggagacggctacttccgcgtcggatcaggagatgaagtgtactacacaagatcaggaaacttctaccgatctgatgaaggtgacctcgtcactgttgacgggctgttcgtcttaacggccaataatggaagaatcaacattccgcaagacgcgcaaagcttcagcatcgctcctgacggaaccgtttcttatgtcgatcaaaacaacgagaaccagaccgccggccagatctcgcttgcgacattcagcaacacatccggattatcaaaagctggagacaacctttaccgcgaaacattgagttcgggagatccgcaagtcgttgtacctggggaaggcggctcaggaaaaattcaaacgagtgcgcttgaaatgtcgaacgtcgacctttcagaagaattttccgaaatgattatcgcgcagcgcggcttccagtccaatgcgaaaatcattacaacctctgatgaaattcttcaggaactcgtcaatctgaagcgataggagggaaggaggcgccctcgtgaaggcgcctcttgataacacatgatcaaagttacgcgattaaacggacagccctttattctgaatgcactattcattgagcaaattgaatgttttccggatacgacaattacgctgtccaacggaaaaaagtttgttgtcaaagaagatgaagatacagttgtggatacaatcgtgtcattctatcaaaaaatccaaatactttcttgtgaccaaagaattgaggaatctgaatgaataaaaaacttctaggaattatgatgacgattattttggcaattgctgtgttgggaaccgctgcgttctttgtcatcaagggaagcgcaagtgaaaaagatcaaaacgcagaaccttcgatcgatgaagtggtcgaatcttcagttgaagtcgccgaaatcacgacaaacttgaaatcagacaatgtagtccgtttgtcaatcaagcttgaaaccgattcgaaagaggcgaaagaagagcttgaaaagcgggatttccaaattaaagattcagtcatctcccttttggcgaacacgaacgcagatgagcttgaaggacaaaaaggaaaagaaaaatttaaagaacagctgaaagaaaagctgaacacgaactacatgaaagagggaaaagtgaaaactgtgtacattacctcctttaatctgcagtaggaacatagatgacagaaccatggaggtgaaaacagatggcaggagaagtgctctcccaaaatgaaatcgatgcactgctttcagcgatatcgaccggtgaaatggacgccgacgagctgaaaaaagaagagtccgttaaaaaagtaaaagtctatgactttaaacgggcgctccgcttttcaaaggatcaaatccgcagcttgaccaggattcacgataactttgcaaggctgctaacgacttatttctcagctcagttgagaacctatatccaaatctcggtcagctcggttgatcaggttccgtatgaggaattcatcagatcgattccgaatatgacgatcctcaatctgtttgaggttcgccctcttgaaggaagaatcatgatggagatcaacccgaccatcgcctatacgatgatggaccgggtgatgggcgggatcggctcgagccacaacaaaattgacagcatgacggagattgagacgaaaatcatgtccaatttattcgaaagctgtctcacgaattacaaagatgcgtgggaatccatcacggaaatcgagccggaaatgtccgattttgaagtgaatccgcagtttgtgcaaatggtatcgccgaatgagacggtcgttgtcatttcgctgaacacgcaaataggagacatcagcggggttatcaacctgtgcatcccgcacgtcgtcctggaaccgatcattcctaagctttccgttcactactggatgcaatcagacagaattgaaccaaaaccggaggaaacaaagtcgatagaaaagcggattttgacggcgcaaattccaattgtcgcagaactcggatcatcggaattaaccattgaagagtttttaaatttagaaattggagattgtatcactttggacaaatcagtagcagaacctcttactgttttggtcggagataaaccgaaatttctagcacaagccggccgaatgaatcgaaagactgcgattcaaattctagatcacgacataagaggtgaagaatatggagaataacaataggttatcacaggatgaaattgatgcgctgcttaaaggcggcgatgatacggctcaagagcagccagaatcagggttgtccctgatggaacaggatacgatcggggaaatcggaaacatttcctttgggagctctgcaacagctttgtccactttattgaatcaaaaagtcgaaattacaacgccgactgtttcggtgattgaaaaaagccatttaaatgatgagttcccgcacccgtatgtttcaatcggtgtgagctatacagaaggtttttcaggaaacaatcttctcgtcatcaagcaggaagatgccgcgatcattgctgacttgatgatggggggagacgggacgaacgcagatccgtcgcttggcgaaattcatctaagcgccgttcaggaagcgatgaaccaaatgatgggttccgctgcgacatcgatgtccaccgtcttcagcaagaagatcgatatttctccgccggaagttgacctccttgatgtgaaagaaggggaagggacagagcaaattccgaaagaggacccgctcgtcaaagtatctttcagactaaaagtcggagatctgatcgattcgcatattatgcagctttatccgctgacctttgcaaaagatctgattgatgaattaacaaatcaggacggcggagaagagcctgtgaagactgaagaggtacagacgcccgtacaggaaaaaccggcgcctaatccgaattcggcacctgctcagacacagagacaggagcctgcgcctaaacggcaagggacggcaaaagtttcagagcctgtgcaggtggcaccggcagagtttcaatcctttgcccctcagactgaagcgcagccgcaccttcaaaaccttgacatgctcatggatattcctttgtccgtcacggtcgagctggggaggacaaaccgcagcgtcaaagaggtgcttgaactgtcaaccggcagtatcattgagcttgacaaactcgccggtgagcctgttgacatcttggtcaaccagcgcgtcgttgctaaaggcgaagtcgtcgtcatagacgaaaacttcggcgtcagggtgacagacattttgagtcaggctgaacgaatcagcaaattacgataataacagattgattggagagattaataatggcttacaagattttagtagttgatgatgcagcatttatgagaatgatgattaaagatattttggtgaaaaacggctttgaagtcgtcgcagaagcgcaagacggggcacaggctgttgaaaagtataaagagcattcacctgatcttgtcacaatggatatcacgatgccggaaaaagacggaatcacggctcttaaagaaatcaaggaaatcgatccgcaggcaaaaatcatcatgtgttcggcaatgggccagcaatcgatggttatcgacgccatccaggcgggagcgaaagactttatcgtcaaaccgttccaggctgaccgcgtcatggaagccatcaataaaacgctaagctaaagggtgtacaacttgtttaagaaacctcttattttcatagccggcctttgtctatgcgcctttctcgcattgccgtacgctccggctctcgcagaggaatcgggggaccagaccgttgatcatctgtttgagcaaaaaggtgcgggcaaagagaaagaaaaagcaaaagacaaagacaaaaccgaggaaaaaagttctctaaaggaagaggcggagaccgaacccccgtctccttccgtttccatatttgattttgtgaaaatgatcggcgcgttactgttcgtcatttttctgatctatgctttggtcaaattcatgaataaacgcaaccgtttgctaaaacccttccagtatgttgaaaacatcggcgggacttcactcgggcaaaacaagtccgtacagctgattaaagtaggaaacagggtgctggtcgttggtgtcggcgaaaatatccagctgctgaaagagatcgatgatgaaaaggaatataaagaaattctcacgcagcatgaagctgcgatgaacagcaagattgaatggcagaaatggatggatcaagtcaaagttccaggcgtgcaaaaacaaagcggcacggcatctttttccgagtcgttaaaagcacagcttgcggaactgaaacaaaatcgcgcagaaggcagaaagaaaggccaaaatcaacatgaatgagtttatggatttatttaattcaagcgatgcggcaaatgtcagcgccagcgtccggctcttgctgcttttgacagtattttcgatcgctccgggtatcttgatcttgatgacttgtttcacaagggttgtcatcgtcctgtcctttgtccggacatcgctggcaacacagtcaatgcccccaaaccaggtgctgatcggacttgcactgttcctgacatttttcattatggggccgactttttcagagattaataaagaagcgctgacgcctttaatgaacaataaaatcaccttggatgaagcttatacaaaagcggaagccccgatcaaaacatttatgagcaagcatacaagacagaaagatctggctttatttatgaattacgcaaagatggaaacgcctgagtccatcaatgatattccgctttcaactatggttcctgcgtttgtcatctcggaattgaaaaccgcgtttcaaatgggatttatgatatttataccgtttctgattatcgatatggttgtggcaagtgttttgatgtcgatggggatgatgatgcttccgccggtcatgatttcactgccgtttaagattttgctgtttgtgcttgtagatggctggtatttaatcgttaaatctttgctgcaaagcttttagagtaggtgctaatacatgaattcagaatttgttatatcgatggctgaaagggctgtatacgttacattgcttatcagcgggccgcttttggcgctcgctcttctcgtcgggctgatcgtcagcgtttttcaggcaaccacccaaatacaggaacagactcttgcattcattccgaaaatcgtcgccgttttggtcggactcgtcgttttcggcccgtggatgctgtcgacgattttgtcattcgcgactgagctgttctctaatttaaaccgttttgcagggtagttttaacatgtcaataatcgaatcatttccagcctttttacttgtgtttgtcagaatcacagcattctatgtaacggtgcctctattttcttatcggacaattccggccgttcataaaataggttttgcattttttcttgcgctcgtcagttttcaagcgattgaaaagcctcctcaccttgacgttgacggaatttacatgatgttggccatgaaggaagcgctcatcggacttctgcttgggctgatcgcttacatgatgatctcagccgttcaaatcgccggatcgttcattgattttcaaatgggatttgcggtggcgaatgtgatcgatccacagacaggggcgcaaagcccgcttgtcggccagtttttatatacgatggcgctgcttctcatgctgagcctgaatgcgcatcatctcctgcttgacgggatctattacagctatcaatacattccggtcgacaagatggcgctgtcgtttggaagcgaagaatttgccgagtttatcgcaaaaagcttcaatacgatgtttattacagcatttcaattgtctgcgcctgttgtggcttgtttgtttttagtcgatctggcattggggattgtggcgagaacggtgccgcagctcaacgtgtttgtcgtcgggcttcctttgaaaatcgcgatcacctttatcatgctcatcatctgcatggccgttatgttcagcatgatgcagcacgtcttcgaatttgccattcggacaatgagagatctattaactttgcttggggtggcatgatgaagctgacgttggatttgcaatttttcgcaggtgaaaaaacggaaaaagcgacgccgaaaaaacggcgggaaagcagaaaaaaaggtcaggttgccaaaagtgcagatgtcaatacggcggtcactcttctcatcgtgtttttatcctttttattcatcggaccttttatgagagaccgcctgctcggcctgatcgaaaagtattacaaagaattaatcacgatgaaggtgtcagtcgccaatattcccggcctgtttcaaagtgttgtgcttgaatcgggcctcattatggcaccgcttttgctgacagccgtcgtctctggggtattgagcaactatatgcaagtcgggtttttatttgcccctgaagcgatcaagcctgatttgaaaaagcttgacccgcttaatggattcaagcggatttacagcatcagggcgatcgttgaactgcttaaatcgattttaaaaatcgtgattgtcggaggcgtgacattcgccgttttatggctgaactttgacaaaattctcagaatcccggcgctgtcggctggcgaggctttgtcatatgtcggctggctcacctttttaatgggggtttccgctgcagtcgcattaatttttctcgcggtgctcgattacctctatcaaaaatttgactatgaaaaaaatattcgcatgtcaaaacaggacatcaaagacgaatacaaaaaaaccgaaggcgatcctctgatcaagtcgaagatcaagcagaagcaaaaggaaatggcgatgcgccgcatgatgcaggaagtgccaaaagcggatgtcatcatcacaaacccgacccattacgccgtcgcattgaaatacgacgaaaacaaaatggatgcgccgtttatcatcgcaaaaggggtcgatctaatggctctgaaaatcaggcagatcgccaaagaacacgatgtcatgacggtcgagaacaggcctttggcaagggcgctctatgaccaggttgagatcgaccaggccgttccggaagaattctttaaggccgtagccgaaatcctggcctatgtttacaaaacaaagcaaaaaatctagtgaatttttcagttttaaaaggagagaaacagcatgtctgcaagagatttatctattttatccggcgttgtcctcattgtggcaatgcttatcataccctttccaacatggatgttgagcatcttaattatcgttaatatttctcttgcgttaatcgtgcttctcaccacaatgaacatgcaagaaccgctgcaattttcgatttttccttctttgctgctcctcttgacgctgttccgccttgggctgaatgtatcgacgacgcgttcgattctgtccaacggtgatgcgggaaaagtagtcgagacgttcgggtctttcgttgtcggcggaaacgttttggtcggtctcgttgtctttatcattttgatcattattcaatttatcgtcataacgaaaggggcggaacgggtatctgaagttgctgccagattcacgctcgacgccatgccgggaaaacagatgagcattgatgccgatttgaatgccggaatggtgaccgagcaggaagcgaaggtgcgccgtgagaaggtggcccgtgaagccgacttctatggagcgatggacggagcgagcaaattcgtgaaaggggatgcgatcgcagggatcatcatcgtccttatcaacgtcattttcggaattgtcatcggcatgctgcaaaaacaaatgagcattcaggaagccgcttcacactttacactcctgtctgtaggcgacggaatcgtatctcagctgcctgcgctcttgatctcaacggcgacgggtatcgtcgtgacaagagcggcgtcggacggaaacctcggccacgatattacaggccagctgtttgcctatccgaagcttttgtatgtcacggcgggaacgattttcctgctcgggattttcacgccgatcggcattctcctgacaggccctctggctcttcttctcgccgcaggcggctatatgctctccaaagccggtgaagagaaggaaaaagtggaggatatccttgaggaagaagctgaagtggatgaattaaaaagccccgaaagcgtcgtccatctgcttgatattgatccgatcgagtttgaattcggctacggattgattccgcttgcagatgcaaatcagggcggcgatctgttggacagaattgtcatgatcaggcgccagctcgcgcttgaactcggacttgtcattccggtcgtcagaatcagggataacatcgctcttcagccgaacgagtacaggctcaaaattaaaggaaacgaagtcgcgaaaggcgagcttctcctcgatcactttctggcgatgtctccgacaggcgaagacgatcagatcgaagggattgacacaatcgaaccgtccttcggtcttccggctaaatggataccggaatctcagaaagatcaggccgaaatgctcgggtacacggttgtcgatccggcttcagtcgtatcgacccatattacggagcaggtgaaaaagcacgcccatgagctgatcggaagacaggaaacgaaacagctgatcgactacttgaaagaatcttatcctgtactggtcgaagaggtctcgccgaatccgctgtctgtcggtgacattcagaaagtgctggcaaaacttctgaaagaaaaagtatcgatcaggaacttggtgacaatctttgaaacgctggccgactacggaaagctgacgacggattcagatatgctgaccgagtatgtcagacaggctctggccaagcagatcaccgcccaatatgcgaaggaaaatgagacgctgaaagtggtgacttgttcgggccgcgtcgaaaaggccgtggcggaaggaattcagcagactgaacacggcaactttttatctcttgaaccaacattatccgaaaatatcattcaatctgtagcaagagaaatcgaacagctctcattgagacaggaagtgccgatccttctatgttcgccgcctgtcagaatgtatgtcaagcagctgcttgagcgctatttccctgatctgccggttctttcctataacgaattggaagccaatgtagaagttcaaagcatcggagtggtggatattcaatgaaaatcaaaaaatttgtagctggttctatgcaggaagccacaaagcaaattatacaggagctcgggaatgacgccgtaatcttgaattctaaaaaaattcaaaagagaaaatttctcggctttgtgaaaaaaaccggggttgaagtgatcgcggtcgtcgaccaggacttttccgacgcaaggaagcaagagcgtcaaaagcccgttttccgggaacaaagcccttcgcctgtcccgcagccggaccatcttgatttggcaagccaagtgaaagagctgaaagaactgctggaaatgcggcatcatgagcagcctgttgatgtgctgcctgaaccgctgaaaaaggcggaccagctcctggcaaagaaaggggtatcgccggccatccgtacgaaagcgctcggccggttgatcagcacttctttaagagacggcgaagagtggacggatgaaaagacgctggcgcacttaacagatgctttggccgatcttcttcccgataatctggaacaggacgtggcgattcattcgcaatatgtcgtgctcttcggatcgaccggagtcggcaaaacgacgacattggcaaagctcgccgcttcttctgtactggaaaagcagaaaaaaatcgcttttatcacgaccgatacgtacaggattgcagcggttgaacagctcaggacatatgccgagcttctgaatgcgccgcttgaggtgtgctacacgaaagaagagtttaaagctgcccagcaaaagttcgccgattttgaccacgtcttcattgatacggcgggccggaatttcaaagacgggcaatatgtcagggagctgaaggaaatcattccgtttgagcgtaagatacaggcgtttctcgtcatgtccgcgacgagcaagtacgaggatatgaaggagctcattaagcagttctcaagcattccgatcgatcagttgatattcacgaaagtggatgagaccgattcgttgggaagcgtcatgaatctgctcgccgaatcgagaatcggcctcggctatattacaaacggacaaaatgttccggaggatatccgctacttgtcaaacgcagcatttgtcagactgcttacggggtgttgaacatggatcaggcagaaagcttacgaaggcggatggggcaacgctttgccgaaccgcccgccgctatcgctcatccaaaagcgaaaacgctcgctgtcatgagcggaaaaggaggcgtcgggaagtcgaatgtatcgctgaatacggctctcgccattctggaaaaaggaaagagcgtgctgttgatcgatcttgatgtcagtatggggaacattgatattctgatcggccggcaatcgctctacacggtgatggacctcctccagcaaaaaatgccgtttgagcgcgccttgtcagccggcccgcgaggccttcaatacatttcgggcggaaccgggctggatgcaatgttcgaattgaacagggaaaactgggcgttttttctgaaggaattgacgcgggctttgacaagcttcgactatgtcatatttgacatgggagcggggctgtcaaaagatcagctgcctttcgtcctgtcagcggatgaaattctggtcgtcaccacgccggagccgacatccatcatggacgcatacagtgcgatcaagcatttggcattaaccggacgcgatcttcagctgaaagtcgttgtcaatcgctgtacaacccaaaaagacggaatttctgcttttctccgcctttccaacacggtaaacgcttttttgcagcaaaagcttgcatatgcagggccgattcctgaggatcccctggtctcaagagccgttgtggagcagcagccgtttctgataaagagtccgcgttccaagccgagcagggcggtttacctgctggccgaatcgctgcttcataacggcagaacggaaatgggcgaaaaccggtcctttatcgaaaaattatcttcattcctgaggaggggcaatacattatgattcgtgttcttgtcgttgacgactctgcttttatgagaaacatgatcaccaagtttgtaacatccaatcacgagattgctgtagcaggaacggcaagaaacggcgaggaagcgctccaaaaaatcaaggagctccgtccggatgtgatcacattggatattgaaatgcctgtgatgaacggaaaagaaacgttgaaaaggattatggcgagcgatccgcttccggttgtcatggtatcgagcctgacgcagcagggagcagatatcacgatcgaatgtctggagcttggggcgatcgatttcgtcgcgaagccgtcgggttcgatttcaatagatttatataaagtaagagacatgctgattgagaaggttttgacagcaggacgggtgaaactgaaaggccggcaagttccgatctcaaagcccgccatcgagacggcgaagcagccgattgtgggcggcagcgattcagtccgctttcgggctggaaaacagctcatctgcatcggtacatcgacaggggggccgagggcgctgcaaagagtgcttcccaagcttcccaaaacgttgaaggcgcctgtttttatcgttcagcacatgccaaagggctttacggcctcattagcgaacaggctgaaccacctctcagaagtaaccgtgaaggaggctgaaaacggtgagagagcgaaagacggctgggtttacattgcacccggaggaaaaaacatggcggtcggccttgaaaagggcgaattggtgatcacgctcgatgaccgcgacacagaaagccgccacaagccttctgttgactacttgtttcaatccctggcctcacttcgggagtttgaaaaaatcgccgtcattatgacggggatgggaagcgacggaacagaaggcgtaaaaggccttttgaaacatgggagcggaacggtgatcgccgaagcagccgagtcgtccgtcgttttcggaatgccgaaatcggtcattaacaacgggcttgcaaacgacatcaagcatgttgatgagattgccgcagccattatgacgtatatgaaaaaagagagggcgtgactcatatggatatgaatcaatatttagacgtctttattgaagaaagcagagaacatttgcaaacctgtaacgaaaaattgctcgaactcgaaaaaaatccgacagacttgcagcttgtccatgatattttcagagcggctcataccttgaaagggatgagcgcaacgatgggctatgaagacatggctcatttaacgcacagtctggaaaacgtgctggatgcgattcgaaatgaagaaatgaccatcacgtcagagtggatggacgtcatgtttgaagcgctcgatgaccttgaagcaatcgtcctttcgatcatcgaaggcggcgacggcaaaagagatgtttccgaagtctgcgccaagcttgatgtgacaggggcaaacaaggaggcggcagcagcggcagaagcgcctgaagcggcgtcttccgaaacgaaatggtcctatgacgaatttcaacgaacggtcatcgccgaagctgaggaacaaggctttaaatgtttcgaaatcaaagttgcattgaaagaggactgtctgttgaagggcgttcgggtgtacatggtatttgagcagctgaacgaggtcggcgaagtcgttaaaacgattccggaaacagaagtccttgaatcggaggattttgattccgaattcgtcatctgctttttaagcaaacacggaaaagaagagattttcaacaaaatcaacggcgtatctgaaattgaaaaaatagaagtgaccgagctgaaaaacgatttttcggcacaagaagaagcgaagcccgccgcatccgaaaaagaaaccgcaccgaaagaggcggagaaaaaaccggctaagcagccggacggcaaaaaagacgcggcgaaacctgcggcaggcggcggaacgaagacgatccgcgtcaacatcgaccgcctcgattcattaatgaacctgtttgaagagctggtcattgacagggggcgcttagagcagatcgccaaagagctagaacacagcgaattaacggaaaccgtcgaacggatgactagaatttcaggcgacctgcagtcgatcatcctcaatatgagaatggttccggtagaaacggtgttcaaccgattcccgcgcatggtccgccagctgacaaaagaattaaataaaaagatcgagctgtcgattttcggagcggaaacagagcttgacagaacggtaatagacgaaatcggcgacccgcttgtccacctcttgagaaacagccttgatcacgggatcgaggcgcctgaagtcagggtgaaaaacggtaaacctgaaaccggtcaagtccgcctgaaagcataccacagcggtaaccatgtctttatcgaggtggaggatgacggcgccggcatcaaccgcaaaaaggtgctcgaaaaagcgcttgagcgcaacgtcattactgaacgcgaagccgaaacgatcgaagatcatgaaatcgacgcgctcatttttgcgccgggattctcaaccgcagatcaaatctcggatatttcaggacgcggagtcggcttagacgttgtcaaaagcaagctggaatcgttgggcggttctgtcagcatcaaatcgagcgaaggcgaaggttcgcttttctccatccagcttccgcttacactgtcgatcatttccgtgctgttagtcaaacttgaaaatgaaacgtttgcgattccgatttcttctattatagaaacggctgtcatcgataagaaagatattcttcaaacgcacgaccgcgaagtgatcgatttcaggggccatatcgtaccggtggtttacctgaaagaacagtttaatgttgaggattcttcagatgatcttgatcagcttcacgtcatcgtcgtgaaaaaaggagacaagctgacggcatttgttgtcgactcctttatcggccagcaggaagtcgtattaaaatcactcggcgattatttaacaaacgtctttgccatttccggcgcgacgattttgggagacggacaagtagccctgatcatcgactgcaacgcccttattaaatagaaagcgaaaggagagcgatcctcttgaccacacagactaccaccggtgagaaaatgattgtgttcaaagtgaatcataaagagtatgccatctctgtatcagaagtaatgtccattgaaaaatggcagcagccaacaagggtgccgggagtggaaccgtatatttgcggcgtcattaatttgagaggtgttgtcacacctgtcatcgatttaagaaagcggattgaagcgcctggagacacgattactgatgaaacgagaatcatcatcatcacccatcaggacattgaagtcggctgggtggtggatgaggcgaacgatgtcatcacagtcgaggaagaggaaattgaatcggctcccgaaacggtaggaaaagacggcaggcaatggattaaaggcatcgtcaagcaagggtccagacttctcaatctgattgactctgaagctgttttaaaccggaagtcgagccttgccgccgcttctgaaaatgtgaagaaataaggagccaatgatgagcgtatttaacggaattagagaagagcatcttgatatattgcgggaagtcgggaatatcggagcgggccattccgcttccgccctggccctgttgctgaacaggaaaatcgaaatggaagtgccgtttgtcaagctgatgtcgtttgatgagcttgtcaacctattcggcggtgcagatcttcctgtcgcaagcatctttttgcgcatggaaggggattttccaggttctatgttcgtgatcatgcctttttcagaggccgagcagctgatcagggagcttgtcggcaatccggaattcgagattgacagcatgacgccgaacgatatcggagcctctgccctgcacgaactcggaaacattatggcgggatcttatttgaccgctctcgctgatttgacaaaccggcaaatgtacccgagcgtcccagaactgacgctagatatgttcggagccgtcatcagcgaagggctgatcgagctcagccaagtcggagatcaagttatcgtgatcgacaactccatttttgacgaggagcacaaccggaaagttaaagcgcatttgttccttctgccggactatgattcttttgaaaagctctttcatgcattgggtgcagcgctatgaaaatcttagaaaaagaaacatcgattatcagagtgggaattgccgatgtaaaaatcgtccgcactcccgacaagatcagaacatcgggtctcggttcgtgcgtcgggctcgtgctgtatgatttggaagcaaagacggccggtctcgtccacgtcatgcttccggactcttccttatccaagacgccggacatcaacgtggcaaaatacgcggacacagccgtcgaagcgacggtcaagatgctgcttgaagccggatgccgaaaatacgctttgaaagcgaaaatggccggaggagccgaaatgtttaaatttaagatgacaaatgatttgatgaaagtcgggccaagaaatgtgcttgcgattaaaaaacatctatctctcttaaacattccgattgtaagcgaggatacaggcggaaacagcggaaggacgatcgagttcgatccgcaatcagctgaacttgtcatccggacagttaaacaaggtgtaacaacgatttaataagcaatatagggggataaagatgcaatccttgaactatgaagatcagatgctttggtcgcggtggaaagaatggaaagatcctcaggcaggcgatgatttaatccgccgctatatgccgcttgtgacatatcatgtcggccggatagccgtcggcttgcccaagtccgttcataaagacgatttggtcagccttggcatgctgggtttgtatgatgcccttgaaaaatttgatccgggaagggatttgaagtttgatacatacgcttccttcagaatcagaggcgctatcatcgacggtcttcgcaaagaagactggcttccgagaacgtcccgtgaaaaaacgaagaaagtggaagcagcgatcgaaaagctcgaacagcgttacttaagaaatgtttcgccgagcgaaatcgcagctgagctgggaatgagcgaacaagacgtcgtgaccacaatcaatgaaggtttctttgcgaacctcctttcaattgatgagaagcttcacgaccatgaagacggggagaacgtccaggtgatgataagggacgacaaaacgagcacgcctgaagaaaaaatgctcaaagacgaactgatctcccagcttgcggaaaaaataaacgagctatcagaaaaagagcagctcgtgatcagcttattctataaagaagagctgacgctgacggaaatcggacaggttttgaatttgtcgacttcccgtatttcacagattcactccaaggcgcttttgaaattgaagcatctgctggataaagtggtacaatagcatgtaagctgccggcatgaaaccggcagcattttttaagcgtccgacgggaagtctttttttgattaaatttcatggttagcgagtgaaaaatatgtcaacaatattatggcttgtgagcttcacgctccacggtatattgatttatttcgtcatcattttgaatacgaggctcagcgctttcaaggcagcggagaaagagcaaaaacagcttttggaagaaaccgagaatacattgaccgcttttttgatggagttaaaagacgaaaatgaaaaactcgttcaagagattcgggcgaatgccgaaaaagagccgcaaagaccggaaacacagcctgaaattcccgctcaaacccccgtccttccggaagcggacgaatcgcgcgatctgccgcttcacatcgaagcgatgatcaatgaggtggagcaggaagaggatgagctcaatcaaaaggagcaggaagcatccatatcctatgaagaagaagctctcgcattatatgaaaaggggctctctccggaggaaatcgcaagacagctgaaaagcgggaaaacagaaatcgagcttttcttaaaatttcgcggaaagctcaaaaacgattcttgattgtcgagaaagcttatgttatattatttcttggtgttaattacacacgcttaacgatttatgcaagcggtgctgtgcgattctcgcgtgcagtcctgcataaaaatgacctaagcggaggaaaaaaaccattatattaggaggaaataacacatgtcagtcatttctatgaagcaattgcttgaagctggtgttcacttcggccaccaaacgcgccgctggaacccaaaaatgaagcgttacatcttcacggagcgtaacggaatctacatcatcgatcttcaaaaaacagtcaaaaaagttgaagaagcatacaacttcacgaaaaaccttgcagctgacggaggaaaaatccttttcgtcggtacgaaaaagcaagctcaagactctgttaaagaagaagcggaacgttctggaatgtactatgtcaaccaacgctggcttggcggtacattaacaaactttgaaacgatccaaaagcgtatcaaacgccttaaagatatcgaaaaaatgcaggaaaacggcacatttgacgtacttcctaaaaaagaagtcgttcaattgaaaaaagaattagagcgtcttgaaaaattcctcggcggaatcaaagaaatgaaagagcttcctgacgcactgttcatcatcgatcctcgcaaagagcgcatcgcggttgcagaagcgcgcaaactgaacattccgatcatcggaatcgttgacacaaactgcgatcctgatgaaatcgatgttgtcatccctgcgaacgatgacgccatccgcgctgttaaattgctgacttctaaaatggcagatgccatccttgaagcaaaacaaggtgaagaatcagttgaaacagaagcgaaagaagcagaaacaactgaaacaacaactgcttaacctggtcaaaaggtgataagggggtctgccttttatcaccttttttttcaccagatcaacatttacatattttgtttgatatataaggaggaaatcaaaaatggcaattactgcacaaatggtaaaagagcttcgcgaaaaaactggcgcaggcatgatggactgcaagaaagcgttaactgaaactgacggcaacatggataaagcgatcgatcttctaagagaaaaaggaatcgcaaaggctgccaaaaaagctgaccgcatcgcggctgaaggtttgactttgatcaaaaccgacggcaacacaggcgttattcttgaagtgaactctgaaacggacttcgttgcgaaaaacgaaggcttcaaggagcttttgaacgacctggctgaccacattctggctgaaaagcctgaaagcgttgaagctgctatgggtcaaaaaatggctaacggttcaactgtagaagaatacatcacaagcgcggttgctaaaatcggagaaaaaatcacgcttcgccgcttcgctgtcctgacaaaaggcgatgacgctgcattcggcgcatacctgcacatgggcggaaaaatcggcgtattgactgtccttaacggcacaactgacgaagaaacagcaagagacatcgcaatgcacgttgcagctgtaaaccctcgcttcatttcccgcgaccaagtgtcagaagaagaagcgaaccgcgagcgcgaaatcttgactcagcaggcgcttcaagaaggcaagcctgaaaacatcgtcgcaaaaatggttgaaggccgcctgaacaaatatttcgaagaaatctgcctgcttgatcaagcgttcgttaaaaacccggatgaaaaagtgaaacaggtcgttgctgcgaaaaacgcaacggttgaaacgttcgtccgctacgaagttggagaaggtatcgaaaaacgccaagaaaactttgctgaagaagttatgaaccaagtgaaaaaataagattgaaaagccgcttgccataaaacacacggcaggatcttttcaaggaaaataggggacacaatttgtgtccctatttttaaaacagtttactaaacctttttttctcttgcataataaataacggcaagcatgcacttggaggttattatggaaaaaccaaagtataatcgtatcgtattaaagcttagcggagaagcccttgcgggtgaacagggaaacggcatcaacccgaccgtgatccagtccatcgccaaacaggtgaaagaaatcgccgagcttgatgttgaagtggcggtcgtcgtcggcggcggcaacctgtggcgcggaaaaacgggcagcgatctcggaatggaccgcgcaacagcggactacatgggaatgcttgcaacggttatgaattcccttgcgctgcaagacagccttgaaacgctcgggattcagtcaagagttcagacatccatcgaaatgaggcaggtcgctgagccatacataagaagaaaagcgattcgccatcttgaaaagaagcgcgtcgtcatcttcgctgccggtacaggcaatccatacttctcaacggatacgacagcagcgctcagagcggctgaaatcgaagccgacgtcatcttaatggccaaaaataatgtcgacggtgtatacaatgccgatcctagaactgacgaaacagccgtaaaatatgaaaaattgtcttatctcgatgtgttgaaagacggtttggctgtcatggattcaaccgcttcttcactttgcatggataacgacatcccgctgatcgtcttttctattatggaagaaggaaatattaaaaaagccgttttaggcgaacaaatcggtacaatcgtaagggggaaataacgtgtcaactcaagtgatgaatgaaacaaaagaacggatgcaaaaagcgataagcgcttatcagcgcgaattggccactgtccgcgcaggacgtgcaaatccgtcattgctggacaaagtggcagttgagtattacggagcgcagacgcctttaaaccagattgcgtccattacagttccagaagcgcgcatgctcgtcatcacaccatatgacaaaacggcgctcggcgatatcgaaaaagcgattcaaaaagccgacctcggtgtaactccgtcaaacgacggcaatatcatccggatcacgatccctcctctaactgaggagcgcagaaaagagcttgccaaactcgtgaaaaaatattcggaagatgccaaagtcgcggttcgcaacatccgccgcgatgcaaatgacgatctgaaaaaattggagaaaaatggtgaaatgactgaggatgaattgcgctcttcaacggaagacgtacaaaagctgacagatgaatatgtgtcaaaaattgatgagatcacaaaagataaagagaaagaaatcatggaagtttaatgaaaaactctgtacaatagataatagtgaaaagaccctctcatgtttactagggggtttttttgttaatactgttgttatctagaacgatataacaggaaagcaaccttttgggtgatggaggactctcatgctcaatatactcaaaaattggaagaatcagcattcggctgcttccaacatggaatgttacacaaaagaaaatattttaaaaggagaaattcctgaacatatcgccattattatggacggaaacggccgctgggcaaagaagcgggcgatgccccgcatcgcgggtcatcacgaaggcatgaaagtggtcagacagacgacaaagcttgccaatgagctcggtgtcaaagcgttgacgctgtatgccttttcgacggaaaattggaagcgtccaaagcttgaggttgactttctgatgaagctgcctgaagagtttctgggaacgtatctcccggagctggtcgaagaaaatgtccgggtccgcatgacaggcgatagggaaggactgccgccccacacgatccgcgcggttgaaaaagccatccgtgatacggagaacaatgacggacttattcttaattttgcattgaattacgggggacgtgcagaaatcgtcagagccgcaaagaaaattgccgaagaagccaaaaaaggcacattgaataccgaggaaatcgacgaaaagctattttccgattatttaatgacagaaactttgcaggaccctgatttgctgattcgcacaagcggcgagatcaggctgagcaacttcatgctttggcagcttgcctacagcgaatttttatttaccgatgtattgtggcctgattttaaagacgttcacttgcttcaggctatcggagaatatcagcgtcgcgggagaaggtttggcggaatttagaggatggtgcagatgaaacagagaatattgacgggtgtgatcgcggcagcggtttttctgccgctcgtgattttcggcgagctgccgttcaccctgctagtttatgcaataggtatacttgctctatttgaacttttaagaatgaaaggcctgaagctgatcagcgctccgggtatcatcagcatgctgctgttggcggttttgctgtgtccaagccaatacgcggaagacgctgggctgggtataaccaaaggggaggtcgtctttttggcggtccttttgcttttggcatatacggtgctcagcaaaaactcgtttacttttgacgaagcggcattcgtggcgctggcagcagtttatatcggattcgggttttattactttattgaaatcagaaacatcggactcagctatgtcttttttgcgatcggcgtcgtctggtcaacagattccggcgcttattttatcggaaaggcgtttggaaagcggaagctctggcctgaaatcagccctaacaaaacggtagaaggcttttggggcggaattttgacagcggtcgttttttccgcgatttatcaggccgccacaggttttccgcacgcttatctgtttgtgctgatcattaccgtgcttttgtcaatcgtcggtcagatcggcgatttggccgagtctgcgttcaaaaggcattaccaggtgaaagactcgggccggatcctcccgggacacggcggaatgctggaccgctttgacagctttttatttgtcatgccggttctgtacttcctgcttgttctttttcagccgttcgggctatgatagaaaagggtactgatagctagaaagaaacagaggtgcggcaattttgaagaacatatgtctattgggagcgacaggctccataggagaacagacgcttgatgtcatcaaagcgcatgacgataagtttcggctgaccgccatgactttcggcaaaaacgccgaaaaagcggcagaaatcattgaaacctttaaaccgaagtatgtaggcgtcggggatgagcatacatatgaaacattaaaacagcattctttctcctacacctttaaaacagggatcggggaggaagctttaatcgaagcggccgttatcccggaagcggatatcgtcgtcaatgctctcgtcggcagcgtcggtcttcttccgactttaaaggcgatggagcataaaaaaacaattgcgcttgcaaataaggaaactctcgtgacagccggtcatatagtgaaagaacacgcccaaaaatacgatgtcccgctcctgcccgtcgacagcgaacattccgcgattttccaggcccttcagggggaaaatccgaagcatatcaaacggctgatcgtcacggcttcaggcggcagcttcagggacagaacaaggcgggaacttgaaggcgtcacagtggaagaagccctcaatcatccaaattggtcgatgggtgcaaaaatcacgatcgattcggctacaatgatgaataaaggactcgaggttattgaagcccactggctgtttgatctgccctatgaccagatcgatgtcctccttcacaaagaaagcattattcattcaatggttgaattccacgaccgcagcgtcatcgcccagcttggcacacctgatatgagagtgccgattcaatatgcgctcagccatccggaacgcctgccgtttaatgaagcaaaatccctcgatctctgggaagtcggacagctgaattttgcccaagctgattttgaaaggttccgctgcttacaattcgcttatgaatcaggtaaaataggcggtacaatgccgactgttttaaacgcggccaacgaggaagccgttgcggcatttctttcgggcaggatttcctttctcggaatagaagacatcattgaaaaggctttggaacgccatcaggtgatcgcaaagccgagccttcaagagatccgtgaagtggacaaagacgccagaaagtttgtccaaacattactcacataaggtggtatgttcgtgaatactgtgatcgcgtttattcttatttttggaacgctcgtatttttccatgagcttggtcatctcatccttgctcaaagagccggaatactgtgccgggagtttgctatcggcttcggtccgaaaatcttttcgtttaagaaaaatgagaccgtttatacgatcaggcttcttccgatcggcggctttgtcagaatggccggcgaagatcctgagatgattgaagtgaagcccggttatacggtcgggctgttgttcgacagcgaaaacaaggtcgaaaagatcattatcaaccaaaaagaaaagtatcccgacgcattggtcattgaagtggagcaggccgacctggagcaccagatgaggattacgggctatgagcacggcaatgaagatcatctctcttcattttctgtcagtgaaacgtcctttttcatcgtagacggggaagaagtccagatcgctccttacaaccgccaatttcattcgaaaacggtttggcagcgcatcaaagcgattgctgccggaccgatcatgaactttattttggcttatgtcatactcgtgatgctcggactgatgcagggagtgccgtctgacgagccggtgctcggcaagttgatagacaacggacgggcggcggaagcaggcctccaggagggagaccgcattcaaacgatcaacggggagaacatgaggtcgtggacggatattgtcaacacggtcagagaacaccctgaaaaagaactgaaaatcgttttgatgcgcgacaatgtcaagctgacgaaatacgtaacacctgaagctgtcaaggcaggggatgaaaccgtcggcagattcggcgcttacaatcctgtgaaaacaggcgttctgacatcgatttcctacggtgcgaccgaaacggcgacagtggcccagagcatcgtcaccaatctcggaaagctcgtcacaggacaattctcaatcgacatgctggccggtcctgtcggcatttatgacatgacagaccaagtggccaagacaggcgttatcaacctgctgaagctggccgcatttttaagcatcaacctcgggatcgtcaaccttctgccaatccctgcgctggacggcggaagactgttgttcctgtttattgaagcgatccgcgggaagccgatcaaccgcgaaaaagaagcgtttgtcgtctttatcggcgtcgcatttttgatgctcctaatgcttgtcgtcacatggaacgatatccagcgcttatttctgtaaaaccaatcgccttttttaagtgcagccaagccttttaaaaggctcttttttagggacaccgttcccgactcaaaaaagtaaccaactgaaacaaatgaggtgcgaatgaatgagacagagcaggactttaattcctacgctccgcgaagtgccggctgatgctgaagcgaaaagccatcagcttcttctcagagcagggtttatcagacaaaacacaagcggtgtatacagctatatgcctcttgccaataaagtcattcataaaatccagagcattgtccgcgaagaaatggagaaaatcaatgccgtcgaaatgctgatgccggcgctccagcaggcggaaacttggcaggaatcgggaagatggtatacgtacggtcctgagctcatgaggctgaaagaccgccacggccgtgaatttgccctaggcgcaacacacgaagaggtcatcacaagcatcgtcagagatgaagtgaaatcgtacaagcgccttccgctgaccctttaccagatccaatcgaagttccgcgatgaaaagcgcccgcgcttcggtctgttaagaggccgggaattcatcatgaaggatgcgtattccttccattcctccgccgaaagccttgatgaaacgtacaatgatatgtatcaggcgtatacgaatgtgtttacgcgctgcggcctgaatttcagaccggtcattgcagactcaggcgcgatgggcggaaaggatacccatgaatttatggcattgtccgatgtcggtgaggatacaattgcgtattctgatcagtcttcatacgccgccaacattgaaatggctgaagtgaaggaaacagatgccggcgagcaggcagaaatgaaagagctgcaggaagtccacacaccttcggtcaaaacgatcgaagaggttgccgcatttcttggcatatccccgtcagactgcattaaatcaatgctgatgaaagcagacggacgttttgtcctcgtcttgacgagaggggatcacgaagtcaatgatgttaaggtgaaaaacctgcttcaagcagaaataatcgaattcgcgagcgccgaagaggttgcagagataacaggcactgaacccggttttgtcggaccggtggggctcgaccgcgaaatcgaaatctttgcagactttgctgtgaaggcgatggcaaacgcagcagctggagcgaataaaacagattaccattatcaaaacgtgaatatcagccgggatgcgcacaatgtgacattcgccgatctccgctttatccaggaaggagacccttcaccggatggaaaaggaacgatccgttttgcaaaaggaatcgaagtcggacaagtctttaagctcggcacccgctattctgaagcgatggacgccacataccttgatgaaaacggacgcgctcagccgatgctgatgggctgctatggaatcgggatttcccggacgctttcggccatcgttgagcagcatcatgacgataaaggcttgatctggccgctggaagtgacgccgtatgacctgcatatcctcgcgcttaatatgaaaaatgacgcgcaagttcagcttgccgaaaagctgtatgaagaatttaaagcgaacggctatgacgtactgtttgatgaccgtgccgaacgggccggcgttaaatttgcagattccgatttgatcggtctgccgatccgcatcacggtcggaaaaagagctgacgaaggagttgtcgaagtgaagatccgcaaaaccggagaatcctttgaaatcgctgctgatgagctgtttgactttatcgaaaaacaagtcaagagcttatcttctcactcttaaaacatggtaaactagagtaaaggaaggtacctcgggaatcgtcccaaggtaccttcaattatgattttcttttagggaggaatctgtcttggaagaccagctttctgtcaacagaagacagtttcaaattcttctgcagcagctgaatgtaacggaagatacgatgatccgccaccttgaaggcggacaaatcataaagctgaccgttcataaaaacaagaagacatggcactttcactttaaattgagaaatgtgctgccttatcaaatcttcgaacggtttcacagccagctgacccgcaccttttcccatatcgcccaggtcacctgttccatcgaggcggaaaacccttcgattgacgagcagcttgttcaggattactggacgcgctgcattcaggaactcgatggtatttctccgccgatcttggcgcttttgaacgaccaaaagcccaagcttacgggaaacaaaatcctgcttaaaacgaaaacagatacagaagcgtccgctttaaaaaagaaatacagctcgctcatccagtcaagctaccgcacattcggctttcctgagctccagctggacacagaaatttttgtatcagatcaagagattcagaaattcagagagcaaaaaatggccgaagatcaagagagggcccttcaggctttaatcgaaatggagaagcaggataaggaagcacaagacgatgaagcgccggcaggccctcttcagatcggctaccagattaaagactctgaagaaatcagaacgcttgacagcatcatggatgaagagcggagaattacggtgcaaggctatgtattcgacgctgaaacaagagagctgaaaagcggcagaacgctttgcatctttaaaataaccgactatacaaacagcattctcgtcaaaatgttcgcccgcgaaaaagaagacgctgtattgatgaagtccctgaaaaaagggatgtgggtcaaggcgagaggaagcatacaaaacgatacattcgtccgcgatttggtgatgatcgccaacgatgtcaatgaaatcaaagcgaaaacccgtgaggatacagcgccagaggacgaaaaacgagtcgagctccacctccattcaccaatgagccagatggatgccgtatcaagcatcggcaagcttgtcgaacaggcgaaaaaatgggggcacccggctatcgcgctcactgaccatgccgtagtccaatcgtttccggatgcattcgcggcaagcaaaaagcatggcgtgaaaatgatctacggacttgaagccaacctcgtcgacgacggcgtgccgattgcctacaatcccgtgcaccgtctgcttgaagaggaaacatatgtcgtgttcgacgtcgagacgacggggctgtctgccgtctatgatacaatcatcgagctggccgccgtaaaagtaaaaggcggggaaatcatcgaacgctttgaaaggtttgccaacccgcatcgacctttatcggctacgatcatcgagctgacggggattaccgatgatatgctgaaagatgcgcccgaagtcgaagaggtcatccgcgattttaaagaatgggtcggtgatcacacgcttgtcgctcacaatgcaagctttgacatcggcttcatcaatgtcgcctataagcgcctgctgaattcggagaaagtgcagaacccggtcattgacacgcttgagctgggccgttttctttatccggaattcaaaaaccacaggctgaatacgctttgtaaaaagtttgacatcgagctcacccagcatcacagggcgatttatgataccgaagcgacgggttatctccttgtgaaaatgctgaaagatgcggccgaaaaaaatatcctgtaccacgatcagctgaatgaaaatatggggcagtccaatgcctatcagcattcaaggccatatcacgcgacacttttggcggttaatgagacaggcttgaaaaaccttttcaaacttgtttcgctgtcgcatatccattatttttacagggtgccgaggatcccaaggtcacagcttgaaaagtacagagaagggcttttaatcggttcggcgtgcgacaaaggcgaagtatttgaaggcatgatgcagaaatcgccggaagaagttgaagacatcgcttcattttatgactaccttgaagtcatgccgcctgaagtctaccggcacctgcttcagctcgaactcgtcagggatgaaaaagcgttaaaagaaatcatcgccaacatcacaaagctcggcgagaagctgaatatcccagtagtagcaactggaaatgtccattatctgaaccctgaggacaaaatttaccggaagattctagtttcctcgcaaggcggcgcaaatccgctcaacaggcacgagctgccgaacgttcatttccgttcgacggatgaaatgcttgaggccttttcatttttgggtgaggaaaaagcgaaagaaatcgttgtcaagaacacccgcatgatcagcgagcgaatcgaagaaatcaagccgatcaaagacgatctttacacaccgaagatcgaaggcgcagatgacgaaatccgccgcatgagctatgagaaagcaagaagcatttacggcgaggacctgcccgaaatcgtcgaaaaacggatcgaaaaagagctgaaaagcataatcggccacggattcgccgtcatctatctgatctctcataagcttgtaaaacgctcccttgatgacggctatctcgtcggttcgaggggatcggtcggttcttcccttgtcgcaacattgacggaaattaccgaggtcaacccgctgccgccgcattacgtctgtccggattgccgccattccgagtttttcaacgacggatcggtcggttcgggatttgatttgcctgacaaagactgtccgaagtgcggagcggcctacagaaaagacggccacgacattccgtttgagacgttcctggggtttaaaggggacaaggttcctgatatcgacttgaacttctcgggcgaataccagccgcatgcccacaactatacgaaaatcctgttcggagaggataacgtctaccgtgcgggaacgatcggaacagtcgccgaaaaaacggcttacgggtatgtcaaagggtatgcaaacgacaacaatttgcatatgcgcggggcggaaatcgaccgacttgtccaaggctgtacaggcgtcaagcggactacagggcagcacccgggcggaattatcgttgtgccggattatatggatatttacgacttttcaccaatccagtttccggcggatgccacagattccgaatggaagacgacgcattttgacttccattccatccatgacaaccttctgaagcttgatattctcggacacgatgatccgacggtcatccgtatgctccaggatcttagcgggattgatccgaaaacgattccgaccgatgatcctgaagtgatgaaaattttccaagggacagagtctttaggggtaaccgaggaacagatcggctgtaaaaccggtacactcggcatccctgaattcggaacccgctttgtcagacagatgcttgaggacaccaagccgacgacattttccgagctcgtacagatttccggcctgtcacacggtacggacgtatggctcggcaacgcgcaggagctgattcacaacaatatttgtgaactgagcgaagtgatcggctgccgtgatgacattatggtgtacttaatctaccaggggcttgagccatccctcgcctttaagattatggagtttgtccgtaaaggaaagggactgacgcctgagtgggaagaagaaatgaagaataataatgttccggactggtatatcgattcctgcaaaaaaatcaaatacatgttcccgaaagcccacgctgcggcatatgttttgatggcggtcaggatcgcttattttaaagtccatcatccgctgctctactacgcagcatacttcaccgtgcgggccgacgactttgacatcgaaacgatgatcaaaggatcgacagcgatcagagccgtcatggatgatatcaactctaaaggccttgacgcttctccaaaagagaaaagtttgctcacggtgcttgagctggcgcttgaaatgtgcgaaaggggcttctctttccaaaaagtcgatttatacagatcgagcgcttcagaattcatcattgatggaaacagcttgattccgccgtttaattcaataccggggcttggaacaaacgccgccttgaatattgtcaaagcgagggaagaaggcgaatttctttccaaagaagatttgcaaaaaagaggaaaggtgtcaaaaacgatcatggaatacttggagcgccacggctgtctcgagtcgcttccagatcagaaccagctgtcattattctagaaactgcctgcttaaagcaggcagtttttttatctgttttacggcataaagagcgttttttcggaattgggtgacaaatgccaggggagaaatgatcacaaaaaaataaagggctgtcagatctgttgacaataaataaacatcaatgttagaatttccaaaatataacacttcgtttggaatgtgctgtctattagatttctactctcataacttagtttattgaacaaataaactaagttacttatcaaattcctcgcttgcagccgtgtgctgatttaatgtgcaatcaatatcttcggtttttcaactttggccttgttttgttcgccggcaaatctaaaaggaggtgagcatgttgtagacagatggagttgcttgatcttaacgaacatgatggggaggaagcagtacgtgaaacagaaagtatttttaaaaatgaaagcgctttgtttggcacttttagtgatcttctctatgagcatagcgtcgttttcagaaaagacccgtgcagcttctgctgaagaatatcctcataattatgctgaactgctgcaaaagtctttgttattttatgaagcacagcgctcgggaagacttccggaaaacagccggctgaattggagaggagactccgggcttgaggacggaaaagacgttggcctcgatttaacgggagggtggtatgatgccggcgaccacgtgaagttcggtctgccgatggcttattctgccgcaatcctgtcatggtcggtctatgagtaccgagatgcctacaaagaatcgggtcagcttgatgcggcgctggacaatattaaatgggcgacagactactttcttaaagcccatacggctccttatgaattgtggggccaagtcggaaatggcgctctagaccacgcatggtgggggccggccgaagtaatgccgatgaagcgccctgcctataagatcgatgccggctgtccggggtcagaccttgctggtggtacagccgcagcgctagcatcagcatcaattattttcaagccgacagattcttcttactctgaaaaattactggctcatgccaagcaattgtatgattttgccgaccgctaccgcggcaaatattcagactgcattacagacgcacagcaatattataattcgtggagcgggtataaagatgaactgacatggggagctgtctggctctacttggcaacagaagaacaacaatatttggataaagcccttgcttcggtctcagattggggcgatcccgcaaactggccttaccgctggacgctttcctgggatgacgtcacttacggagcacagctgctgctcgctcgtctgacaaacgattcccgttttgtcaaatctgtcgaacgcaatcttgattattggtcgacaggctacagtcataatggaagcatagaacggatcacgtatacgccgggcggtttggcctggcttgagcagtggggatcattgcgatacgcttcgaatgccgcttttctcgctttcgtttattccgattgggtggatacagaaaaagcgaaaagatatcgggattttgctgttcggcaaacggagtatatgctaggagataatccgcagcagcgaagctttgtcgttggatacggtaaaaatccgccgaaacatccgcatcaccgtacagcacacggttcatgggccaatcagatgaatgtgcctgaaaaccatcgccataccctatacggcgcattagtcggcggtccgggaagggacgattcgtaccgagatgacataacagattatgcgtcaaacgaagttgcgatcgattataatgccgcttttaccggcaacgtagcgaaaatgtttcagctgttcgggaaaggccatgttccgctgcctgattttccggagaaggaaacacctgaggacgaatattttgcagaggcatcaatcaacagctccggaaacagctatactgaaatccgggcgcagctcaataaccgttcgggatggccggcaaagaaaaccgatcaattgtctttccgctactacgttgacttgacggaagctgtagaagcgggatattccgccgaagatataaaagtcacagccggctataacgaaggggcctcggtatcagagctgaagccgcatgacgcttcaaagcacatttactatacagaagtcagcttcagcggggttttgatttatccaggcggtcaatccgcccataaaaaagaagtgcagttccgcctttcggcaccagacggaacgtctttttggaacccggaaaatgaccactcttatcagggtctgtcacatgcgcttctgaagacgcggtatattcctgtttatgatgatggacggctcgttttcggacatgagcccggttactagatattgaacttctagaggaggaacatcatggataataaaacacgttttatgcagctgtatgagcaaattaaaaatccgaacaacggttatttctcacccgaaggaattccctatcactcggttgaaacgctcatatgtgaggcgcccgactacggtcatatgacgacatctgaagcgtacagctattggctgtggcttgaagcgatgtatggccggtacacacaggactggtcaaagctagaagccgcctgggacaatatggagaaatatattatcccggtcaatgaaggagacggaaacgaagaacagccgaccatgaactactacaacccctcaagtccagccacttatgctgcagaacacccctacccagatctgtacccttcagcgctgaccggacagtatccggcaggaaatgacccgctcgatgccgagcttaaagcgacatatggaagcaacgaaacgtatttaatgcattggctgttagatgttgacaactggtatggcttcggaaatcttctgaacccttcgcacactgccgtttatgtgaacacttaccagcggggcgaacaggaatccgtttgggaaacggttccgcatccgtctcaggataatcagacgttcggaaaaccgaatgaaggtttcatgagcctttttacaaaagaaaatcaggctccagcaccgcaatggcgctacaccaatgcaacggatgcagatgcgcgcgccgttcaggcgatgttctgggccaggcaatggggctacagcaatactaattatttagaaaaagctaaaaaaatgggggactttctccgttacggcatgtatgacaaatactttcaagagattggaagtgccgctgacggctcgccttcccgcggtgctggaaaaaatgcatgtcattatttaatggcgtggtacaccgcttggggaggcggattgggacagtatgcaaactgggcgtggcggatcggtgcgagccatgtgcatcaaggttatcaaaaccctgttgcctcttatgcactgtcaacggctgaaggcggattgattccaaattcatccacagcgcgaagcgattgggaaaaggcgctgaaaaggcagctagaactttacacatggctgctttcttcagaaggagccgttgccggcggcgccacgaacagctggaacggcaactacagcgcatatccgcagaatgtcagcacattttacgaaatggcctacacagaagcgcctgtatatcacgatcccccttctaacaattggttcgggatgcaagtctggccgctggaaagggtggcggaactgtattatattttcgcagagaaaggtgacaaatcgtctgaaaacttccacatggcaaagcatgtgattgaaaaatggatcgcatattcacttgattatgtgtttgtgggcgaacggccggttactgacgaagaaggctattatttaaatgatgcgggagaacgcgtccttggcggccaaaacccgcagatcgccgtacaatccgacccaggcgagttttggattccggcaaaccttgaatggagcggccagcctgatccgtggaagggatttgattcatttaccggaaatccgggactgcatgtcacgacgaagaatccttctcaagatgtcggcgttctcggcagctatattaaaacgctcgtcttctttgcggccggaacaaaagccgaaaccggcggctttaccgctcttggaaacaaagccaaaaatctggcaaaagaactgcttgatgcagcatggagtaaaaatgacggaatcggtatcgcagcagaggaagaacatgaagattatatccgctactttacgaaggaaatctactttccgaatggctggagcggcagaaacgggcagggcaataccatccctggccccaacactgtgccgtctgatccggcaaaaggcggtaacggcgtctatatcagtcatgcggagctccggccgaaaattaaaaatgatccgatgtggccttatttggaaaacaaatatcagacctcgtggaatccgaatacgggcaaatgggaaaacggactgccgacctttgtatatcaccgtttctggtctcaggtcgatatggcgacagcttatgctgagtatgaccgtttaatcggaaatgcataacaatcaataggagaatattagatgcgcttggccgtttgggcaaaggcggcgttcagccgccttcttttttaaaggcaggatttaggattttagcgagtgttttacacgattatctaaaaaggagatcaaaagtttgagagaaaaatggttagccttatgtttaaagtcgatcattctgttcgttttgatcatgggaaccgttcttttatccgcagttccgaaagcttcgggaacaagcgggccagcaaagcaagaaaagcagagcatcatcaccccggctgatcttttggaaaacatgagccctggatggaaccttggcaacacgctggatgctgttccgacagaaggctcttggaacaatccgccggttcgcgagcatacttttgatgatattcgcgatgcggggtttaaaagcgtccggattccggtgacatgggattcccacatcggcagcgctccagagtatccgatcgataccgattggatgaaccgggtagaagaagtgacagattgggctttggaaagagagttttacgtcgtgttaaatattcaccacgattcttggctatggatcagccggatgggaaacagccagcaggagacattagataagctggggaaagtctggaagcagattgccgagcgcttcaaaaacaaaagtgaacgcctcctgtttgaaattgtcaatgagccgaccggaatgagcgcatatcaaatgaatctgcttaaccgagagatgctgaacatcatccgttcgaccggcggcaaaaacggccagcggctcgtaatcgtcggggggcttgaagataacaaagatgaattgcttcattcatttgaaccgcctgatgatgaccggattgtcctcacatatcactactattctccttgggaatacgtatcaaactggtggggccggacgacttggggatcggcagccgaaatctccgagatggaggaggatatcaaaccggtttatgaaaaatttgtaagggaaggatacccggttatcatcggtgaatacggtaccctcggcgccaatgaaaagcattcaaaatggctctatcatgatacgtttgtccgccttgcccacaaatatcaaatggtcccgatgtggtgggacaacgggaatgaccagtttgaccgggctgagagacagtggcgtgatcctgttgttaaagagattgtcattcaggcgggacgcggcgttcccaatgcgatcatcaaaccggcagatctttttatcaaaaaaggtcaaagcatcagcgatcagacggtggacattcagctgaacggcaatgtgctgactggcatttatcagaaatctgaaccattaaaggaaggcagtgattatacagttgacaatgccggaaaaacggtctctattaaggcatcctgcttggcaaagctgctgaacggggcggggcagcctggggtaaaagcgcagctcacttttacgtttcataaaggagccagccaggttatggatatcattctttatgatgacccgaagcttgaaaaaagcgaattcaccatcagtcaatcggcaatcagcggtgatctcaaaatcccggcgtcactgaacggaacgaagctggccacggttaaaggagtcgtcgattctacaggaaggccggttcttgaagaagtatggtcatggacgccctacttgaactatgacgaagatttttacgaaaaagacggggatttgtatttgaaagagcgggttttaaagtatttgaaaagcgattccacctttacatttgaactgtggccgaaaggcgtggaggcggtcgtgaaggtgaaagtcacgccttgaacggccggctatcctctcaatgacgccgtccatgcatcctctttatgaaagcagggaaaaataatgatgacgaaaaagggtttattgacagtgctgatgccgtttttgcttgcactttccgccattcagtttggcaatccccggcctgcactagccgcgtctccttttgttgagacagccggaacatcgttcactttaaatgggaaagaattttattttgccgggacgaataactattattttcattataaatctaaaaaaatggtcgatgatgtgttcgaagatatgaaagcgatgaatttgaaagtgatccgcatctggggatttcttgacggccagccgcaggaaaatacagtcatgcagccaaggccgggcatatatgatgaatcaggcttttcaaagcttgactatgccatttataaagcggggcagacagggataaaactagtcatcccttttgtgaacaactgggatgatttcggcggaatgaatcaatatgtcaggtggtttcaggcggatggacatgacgccttttatactcatccggacattaaagaggcgtataaaaattatgtatcctatatgctgaaccgagtcaacacatataatggcgtcaaatataaagatgatcccgcgattatggcgtgggagcttgccaatgaaccgagggtccagtctgacaggaccggaaatacacttgtcgaatgggcggatgagatgagcgaatttattaaatccattgatcagaaccatcttgtagcggttggagatgaaggattttatcatatagaagggcaccctgattggcattacaacggcggagagggtgtggattggaaaaggctgaccgctctgaagcatattgattacggcacatatcacctctatccggatcattggggcaaaacggccgagtgggggaatcagtggatcacagaccatatttgcgatggaaaagaaatcggcaagccggtcgttttagaagagtacggctatcagtaagtccagaagggactacgtctacagaacctggcttgaactcatagaaaagcagagcggtgcgggcagccaattttggattttgaccggcattcaggatgacgggaccctttatccggactatgacggttttcggatcgtttatccgagctctgccgcttctgtcatttcagagcacgcggagcggatgaatgaaaaatcagccgcttccgaaatgcttcagactaaacgctgtcatgatttgcaataaaaatatggttatggtatagttttattggaaatgctaacgatagccgaggcgaagagtggggaaacccgctcttttgtattgaacaggcaattttgtctcgacatgttcatcgttttttctaaaatcccctgcttttgaagcagggtttttacgagggagctgatgaatgggagcctgcacaaggaggaaaagtatgagtaacaaagtgatcgataccgtcagcgaaatggtccagcctatactagacaatcttcagcttgagctcgttgacatcgaatttgtcaaggaaggccagagctggtttcttcgcgtgtttattgattcagatgacggcgtagacatcgaggaatgtgccaaggttagcgaagctcttagtgaaaagctcgatgaggctgatccgatcaagcaaaactattttcttgaagtatcgtccccgggagctgagaggcctttaaagaaagaagccgatttcatgaaggcgctcggaaaaaacgtatatattaaaacgtacgaacctattgaaggcaataaagagtttgaaggcgagctttccgcatttgacggtgaaaacgtggaggtcacggtgatgatcaaaacgcgccggaaaacgatcaatattccatatgacaaagtagccaaagcgaggctggctgtttcgttcaattaatttttgactgtttaagggggaaaccataaacatgagtagtgagttgttagatgccctgactgttcttgaaaaagaaaagggaatcagtaaggacattattattgaagcaattgaagctgcgctcatttccgcttataagcggaacttcaaccaggcgcagaacgtcagggtagatttaaaccgcgacaccggttcaatccgcgttttcgcccgcaaagatgtcgtggatgaagtgtatgatccgcgccttgaaatctcgattgaagatgccgtaaacatcaatccgaactacattgtcggagatgtcgtggaaatcgaagtgacgccgaaagatttcggccgcatcgctgcccagacggcaaagcaggtcgtgacccagcgcgtccgcgaagcggagcgcggcgtcatctattctgaattcatcgaccgcgaggaagatatcatgacaggcatcgtccagcggatcgacaataagttcatctatgtctctttaggaaaaatcgaggcgcttctcccggttgcagaacagatgccgaatgaagtctacaagcctcatgaccggatcaaagtgttcattacaaaagtcgaaaaaacgacgaagggtccgcagatttacgtttcaagaactcatccaggtttattaaagcgtctctttgaaatcgaagtgccggaaatttacgatggaacggtcgagctcaaatccgtggcgagagaagcgggagaccgctcgaagatttccgtccgcacggataatcccgacatcgatcccgtcggcgcctgcgtcggaccgaagggtcagcgcgttcaggcgatcgtcaatgaattgaaaggcgagaaaattgatattgttcactggtcaaacgacccggttgaatttgtcgccaatgcgctgagcccttcaaaagtgctcgacgtcatcgtcaatgaagaggataaagcgacaacggttgtcgttcctgactatcagctgtcgctcgccatcggaaaaagaggtcaaaacgcccgcctggcagccaagctgacaagctggaagatcgatattaaaagcgaaacagatgcaagagagcttggaatttatccaagggagcttgaagaagaggagccggaagagcttttcttggaaagcgaaactccagaatcggatgaataagaggtgacctttggtgaaaagccgaaagaagatcccgcttagaaaatgcgtcgtaacaggggaaatgaagcctaaaaaagagctcatccgcgtcgtccgttcgaaggaaggcgaagtttccgttgacccgaccggcaagaagaacggccggggagcctaccttacacttgataaagacgtcattttaactgcaaaaaagagaaacagcttagcaaatcagcttcaagcacagattgatgatcagatttttgatgaactgctggaactggcggaaaaggagaacagataaatgtcggaatcagaatggttttccttgctgggtctggcgaatcgagctcgaaaggtcgtgtccggagaagacctggttgtgaaagaaatcaggcattcgcgcgcaaagcttgttttgcttgcagacgacgcatcggctaacacggagaaaaaagtaaccgacaaatgcaggcactacgatgtaccggtgaaaaaagtcggtgatcgtgtgcttctgggccgttcaatcggcaaagaatcccgtgtggttgttgctgtcactgatcaaggttttgcgaatacgttgctccgaaagctcgattaattttttttgggggtgaacgaatggctaaaatgagagtttatgaatatgcaaaagccataaatgtttcaagtaaggatattatcgcggtattgaaagatatgaatatcgaagtcaataaccatatggcgatgatcgaagaaaatgcgatcaaacagctcgatcaaaaattcaagaagagcgctaaacctgcgggaaataaaaaggatgccggtacaggcggacaaaagccgcagcaagaagccgcaaaacagaatgccggaagtaagccaaacaaaaatcgagacggaaagaagaataacgtgcagaatactcaatttaacaataaaaacaagaagaaaaacaacaacaacaaaaagaacaaacgcggtaaaaatcatcaatctcctcaggagaagcagttcaagccgaaaaaagaactgcctgaaaaaatcgaatttaccaactcaatgtcggtcggcgcgcttgccgaagagctcggaaaagaaccgtcagaaatcattaaaaaattaatgcttctcggcatcatggcgacgatcaaccaagatcttgacaaagataccgttgagctgatcgcttcagaatacggcgtcgaagtcgaagaagtgatcgtccatgaagaaaccgaattcgaaaaatacgaagagccggataacgaagaagacctcgaaatccgtcctcctgtcgtaacgatcatgggtcacgtcgaccacggaaaaacaacgcttctcgacagcatcagaaaaacgaaggtcgttgaaggcgaagccggaggcatcactcagcatatcggcgcttatcagatcgaggaaaacggcaagaagattaccttcctcgacactccgggccacgccgcgtttacaacgatgcgcgcacgcggtgcggaagttacggacattacgattctcgtcgtagctgcagatgacggggtcatgccgcagacggttgaagcgatcaaccatgcgaaagcggctgaagtgccgatcatcgtcgctgtcaacaaaatcgacaaaccgacggcaaaccctgaccgcgtgatgcaggagctgactgaacacggtcttgttcctgaagcatggggaggcgagacgatttttgttcctctttccgcactttcaggagagggaatcgatgagctgatcgaaatgatcctgctcgtcagcgaagtcgaggagctcaaagcaaatccgaaccgcagggcaaaaggaacggtcatcgaagccgagcttgataaaggtaaaggttctgtcgcaacgttgctcgttcaaaacggaacgcttcacgtcggagatccgatcgtcgtcgggaacactttcggacgcgttcgtgcgatggtcaatgatgtcggcagacgcgtgaaatcggcgggaccgtcaactcctgttgagatcaccgggttgaacgaagttccgaacgcaggggatcagttccttgtgttcaaagacgaaaaaacagcccgttccgtcggcgaagcgcgcgctaccaaacagcttgaagaacagcgcagcgataaagcgaagctcagccttgatgacttgtttgaacagattaaacaaggcgatgtcaaagaaattaacctcgtcgtaaaagccgatgttcaaggctctgttgaagcgctggccgcagctttgcaaaaaattgaggtcgaaggcgtcagagtcaaaatcatccacacaggcgtaggtgcgattaccgaatcagacattattttagcttctgcatcaaatgcaatcgtgatcgggtttaatgtcagacctgacggaaatgctaagagtaccgccgaagccgaaaatgtggatatccgcctccaccgcatcatttataaagtcatcgatgagatcgaagcagccatgaaaggcatgcttgatcctgagtatgaagaaaaagtgatcggcatggttgaagtccgtcaaacattcaaagtctctaaaatcggaacgattgccggaggctatgtaacggaaggtacgatcacgcgcgacagcggaatccgcttgatccgcgacggcgtcgtcatctttgaaggggaagtcgatgtgctgaaacgctttaaagatgatgtcaaagaagtttcacaaggctatgaatgtggtatcaccattaagaaatacaacgacatacgcgaaggcgatatgatcgaagcgtatgtcatgcaagaaattgaaagaaagtgatcggtttcgttgaatgcgaatgcatcatttacgatgcatcatcactcaaggaaaagcgggcggtgctgaagcggatcatcacaagaatccgcgccaagttcaacgtttctgtttcagaaattgactatcaggacacttggcagcgcacaagctttggtatcgccgccgtttcttcctctcgcgtgcaaacggaaaaagagctgcagcgggtcctcgcctttattgactcttttccggaaattgaacggacgatcacgagaacagagtggttttaacgtagaggtggtatggtcatgacgatgagagctacccgtgtgggagagcagatgaaaaaagaacttggtgacattatcggcagaaagctgaaagatccgcgaatcggatttttaacagtcaccgacgtcagggtctcaggtgatttgcaaattgccaaagtgtatatttccgttttaggcgatgaaaagaaacgggaagaaacgctcaaaggcctggcaaaagcaaagggctttattcgttccgaacttggaaaccgaatcaggcttcgcaaaacacctgaaatccattttgagttcgatgaatcgatcgattacggaaaccgtatcgaaacattgattcacgagctgaacgcaaacaaagaagaatcataagctgaaaaaggataggcgggcgactgcctgtcctttttagctccaaatgagaaaggggcgaagaagcacgaatgtataacggagtccttctattacataaaccggtcggcatgacctcgcacgactgcgtcatgaagatccgcaaactgctgaaaacaaaaaaggtcggccataccggtacactggatcccgaggtgtcgggcgttctcccgatctgcgtcgggagggcaaccaaaatcgtcgagtatttgaccgaaaagtccaaaacatatgatgcagaggtcacgcttggctgttccacggagacagaggatcagacgggggaagtcacagaaaagaaacccgtcttagcgccgcctgatgaacagaccgtgcagagcgtcctgagatctcttgaaggaacgattgagcaggttccgccgatgtattcagctgtcaaggtaggcggcaaaaagctgtatgaatacgcgcgggctggaatcgaggttgaacggccgaagcggaccatcaccatccatcatatcgaactgacatccgagatccgccatgagggggataaagcccgcttccggtttgttgtgacatgttcaaaaggcacatatgtcaggaccttggcggtaaccatcggggagaagctcggatatcccgcgcatatgtccaatctggtcaggaccgcgtcaggccctttcacccttgacgaatgcttgacctttgaagacgtcgaaggcttgatcgctgacggaacattgtctgaaaagctcgtccccatcgaacgtgcgcttgatcatttgccgaaatggataattagtgatacattagctaagaaagtggaaaatggagcggtgcttgaaacgcccggcagcttttctcatttgacgagcgaagaccgcattgcggtctttacggaagcaggccggtgcacagccgtctattatccgcatccgaccaaaaccggtttgttgaagccggcaaaagtactcgtgcaaaaaagcgaacaatagaaaaggtgaccgttcttgaagacgatacatatttcccacccacacgacttgaagcgtgaggattttccgacatcagttatggcattaggttattttgacggtgttcacctgggacatcagcaagtgattcttacagcaaaaaacaccgcggcaagagaaggggtcaaaacgtccgtgatgacctttcatccccacccttctgccgtgctcaaaaaaggccgggagccgaaggatttaatcacgcctttgcaagacaaaatcagcatcattgaagatttaggggtcgattttttatacgttgtcacatttacccctgaattcgcttctctatcacctgaggaatttatcgatcaatatatactcggctttcatgtcactcatgttgtagccggatttgactttaccttcgggaaattcggcaaaggcactatggaaaacttccaggagtatgcgaaaggccgtgttaaaagcacgtctgtcgcaaaatattccaatcaggatcaaaaggtaagctccacgaggatccgcagcgttctgggagccggtgacgtcgagtacgctgctgaactgctcggcaggccgtaccatgtgaaaggctttgtgatccacggcgataaaaggggccgcacgatcggatttccgaccgcgaatatcggccttaaagacacatacatcgtcccgccgacaggtgtgtacgccgttaaagccgaaatcggcggcgctgtctacaacggcgtctgcaatgtcggatacaagccgacgttttacgaaaaacggccgggtcagccttcaatcgaagtcaacttattcgattttgaccgtgacatatacggctccgaaatcaaggttgaatggtataagcggctgaggagcgaaaaaaaattcggcagcgttgacgagcttgtcgaacagatttctagagacaaagaagaagcgatccgcttcttcagagagcggaagccggccggaatctagatgtatggaaacggcaatacgcgtcaacaatggtgataaaaaggtaaacttcatcataaatggttgcattagacgcgaacttttagtatcatattgtctgtagctttaaaaccgttcacttggcaaatcgaatcaccggcgtttgctaggtaatcggggctaatattatatggaggtgaaacaggatggcaattactcaagagcgtaaaacacaactcatcaatgagttcaaaacccacgaatctgacacgggatcaccggaagttcagatcgctatcctaacagatcaaatcaacaacttgaacgagcatttacgcactcacaagaaagaccatcactcacgtcgcggtcttcttaaaatggtaggtaaacgtcgtaatcttcttacgtatcttcgtaacaaagacgtaactcgttaccgtgagttgatcaacaaacttggattacgtcgataatcgtaaaaagcgggaggattcccgcttttttatcgtataagaacgaatatccggcaactctaaaacgcgttgttcatataaatgattttaaatgacaccgattcattctttacatagcactttgccattgatatgttcaattcatttcgttcataataggagtaacctaaaaactatccgaagagaggagttcatataagaatgggacaagagaaacatgtcttttccatagattgggccggccgcaagctcacagtagaaaccggccagcttgcaaaacaagcaaacggagctgtcatggtgcgttatggagacactgcagtgctcagcaccgcaacggcttcaaaagaacctaaaaccgtagactttttcccgttaaccgtaaattacgaagaaagactttacgccgtcggaaagattccgggcgggtttattaaaagagagggaagaccgagcgaaaaagcgattctcgccagccggttaatcgacaggccgatccgcccgctgttcgcagacggcttccggaatgaagttcaagtcgtcagcatcgtcatgagcgttgaccaggattgttcgtcagaaatggcggcaatgtttggatcatctcttgcgctgtgcgtatccgacatcccgtttgaagggccgatcgccggagtgacggtaggccgggttgacaacaaattcatcatcaatccgacacttgaacagcttgaaaaaagcgacattcatctcgtcgtagcgggaacgaaggacgcgatcaacatggttgaagcgggagcagacgaagttccggaagagatcatgcttgaagcgatcatgttcggtcacgaggagatcaaacggctgattgccttccaggaggaaatcgtcgccgctgtcgggaaagaaaaatcagaaatcaccctgtatgagatcgattccgatctgaaagaaaaagtgcggggaatggccgaatcgaacctcttaaaagccattcaggttcatgaaaagcatgcgcgcgaggacgcgatcagcgaagtgaaaaacgaggttttggccaagtttgaagaagaggaacacgatgaagaaacgctgaaacaagtgaaagacattttgtcccagcttgttaaaaatgaagtgcgccgtctgattacggaggaaaaagttcgtcctgacggcagggctgtcgatgagatccgcccgctttcttcagaagtcggactgcttccgagaacacacggttcaggactttttacaaggggacagactcaggcgctcagcatttgtacgctcggtgcgcttggcgatgtgcagattttagacggtctcggcgtcgaagaatccaaacgctttatgcaccattacaacttcccgcagttcagcgtcggggaaacagggccgatgcgcgggccgggacgccgcgaaatcgggcacggagccctcggggaacgagcgcttgagccgattgttccgtctgaaaaagacttcccgtacaccatccgcctcgtctctgaagtgcttgaatcaaacggttccacttcccaggcgagcatttgtgcaagcacgctagcgatgatggatgcaggggtgccgattaaagccccggttgccggaatcgcgatgggtcttgtcaaatcaggtgacaactataccgtcttaaccgatattcaaggtatggaagaccatctcggggatatggactttaaagtggcgggaacgtccaaaggcgtcacagctctgcaaatggatattaagatcgcaggcttatcgagagagattttggaagaggctcttcagcaggcgaaaaaaggcagaatggagatccttgaaagcatgctgagcacattggctgaatcaagaaaagagctttctccttatgcgccgaaaatcttgacgatgtcgatcaatccggataaaatccgcgacgtcatcggaccaagcggaaaacaaatcaataagatcattgaagatacaggcgttaaaatcgatattgaacaagacggcacaatcttcatttcttctaccgatgaaagcatgaaccaaaaagcgaagaaaatcatcgaagaccttgtcagagaagttgaagtcggacagctttacttaggtaaagtgaagcggattgaaaaattcggagctttcgttgaactgttcagcggaaaagacggtcttgtccatatttcagagcttgcgctcgaacgggtaggaaaagtcgaagatgtcgtcaaaatcggcgacgagctccttgtaaaggttactgaaatcgataaacaaggacgcgtcaacttatcaagaaaagctgtactgcgtgaacagaaggaaaaagaagaacaaaaatcgtaaaaaaacggtgtctatcttgcttctgtcttcgtcttcaagcaacaggaagcctgggtaacccggcttctttgttttaagccgtgaaaacggtccggttctatcttgtccttttctcacatattttgtggggaagggaggaatacaattgaaaggaacgattgttcggatttccgtttttttctttcttttgctgatgtcctatcagatgatgaaccgtccgtattcacaacattacatagatgcgatgaaaaaagacgcggtcacggttgccgctcaaaaggacgatttgtaccaggagcttttgcaaaaagcgcctgaatatgaagtgaaggcccagaatgcgaaaattgatcacatatggaaagcgatgcccggctacaacggcttaaaagtaaacatcgaaaaatcgtacaaaaaaatgaaacaggccggtgaatttgatgagaaactgctcgtttatgaccaagtgaagcctgacgttcatttagaatccttaaagcctgagccgatctaccgcggacacccggataaaccgatggtatcgtttattatcaatgtcgcttggggtaatgaatatttagaagagatgcttcccgtcttacaacagcatcgtatcaaagccaccttttttctggagggcagatgggtgaagcatcaccccgagctggccaaagccatacaaaacggcgggcatgaaatcggaaaccattcatacaatcatccggatatgagcaaactgacgagagaacgtatttcagaacagctgcggatgacaaatgaacaaatacaggaaacgcttggcgtcaagccgaagtggttcgccccgccgagcggcagcttccgcaaagaggttgtggatcaggctcacaagatggggatgggaacgatcatgtggacagttgatacgatcgattggcagaaaccgcagccggccgtcttacagcaacgggtattaagcaaagtacataacggcgccatgatattaatgcatccgacagatccaactgcaaaaagtcttgccgttttgatacagaacctgcatgaaaaaggctatcaaatcggaactgtttcacagctgatgaatgaaaaaaggcttgttgaagaataggatgtgcggcccgttctttgaataggaggaacaaatttgattaaacggtatacttgtcaaaatggggtaagaatcgtattcgaaaacaatcccaccgtccggtctgtggccatcggagtttggattggaaccggatcaagacatgaaacacccgaaattaacggcatttcgcactttcttgagcacatgtttttcaaggggacaaaaacgcgcactgcaagggacatcgcagagtctttcgatagaatcggcggacaggtcaatgcgtttacctcaaaggaatatacgtgctattacgccaaagtgctcgatgagcatgcaagctatgctctggaagtgctttctgacatgttctttcattcatcatttgacgaagaagaattaaaaaaagaaaaaaacgtcgtctatgaagagattaaaatgtatgaggacacacctgatgacatcgtccacgatctcttgagcaaggcgtcatacggcagccattccctcggctatccgatcctcggcacagaggaaacacttgccgaatttgacggagattcgctcagaaaatatatgaacgaatattacacgcctgaccgagtcgtcatttccatagccggaaatgtgccggaaacttttataaaagaagctgaaaagcatttcggttcatatgaagccaaaggcaaaagaaccggcatgacaaaaccggattttcaccatgagaaaatgacgcgcaaaaaggaaaccgaacaggctcacctctgcctcggcttcaacgggctggaagcaggccatccggaaatctacgatttgatcgttctcaataatattttgggaggaagcatgagcagccgcctctttcaggatgtccgcgaagataaaggtcttgcatattccgtgttcagctaccacacttcctatgaagacagcggcatgatgaccatctacgcgggaaccggcgcaaatcagcttcagctcctgtcagaaacgattcatgaaacactgcgtgcgctgaaaagcgacggtattacaccgaaagagcttgaaaacagcaaagagcaaatgaaaggcagcctgatgctcagtctcgaaagcacaaacagcaaaatgagccgcaacggcaaaaatgagcttttgctcggtaaacaccggacgcttgatgaaatcatcgaaaagttgaatgccgtcagcctcgagcgtgtgaacaatcttgccaaccggattttcaccgatgattactcatctgcattaatcagcccgtcgggtgagctgccgaaataatgcctccttaaaacatgcttgtctttttaggcaggcatgttttttgttatcggttcatacatcataacaaaagggggtttttttcatgaggctgagtgaactttcgggaaaagaaatcgttgatgttaagcgggccgaacggctcggcgtactggggcagacggaccttgagatcaatgagcaggacggtcagattaccgctcttatcatcccttctgttaaatggttcggactaggaagaaaacaggggaatgacattaaggtgccctggtcgcaaattcaaaaaatcggctcggatatgatcattttggatgttccggaaagcagcgtgacaaaagaggagtaagcaaggtggaaacccgcccgtcccatgggggcgggctttttgtttttctggatttcaattcaccgctatttcctttttgtcatatgatgaaattagcttatgaattagatccttatcaaaaaagaaggtgaatgttagagccatgttaaccggattgacgattgcaatcatcggcggcgatgcaaggcagctcgagatcatccgcaagctgacggaacaggatgcaaaggtctttttaatcggttttgatcagcttgatcacgggtttaccggagctacaaaactaaagctgaacgaacttgattttggcacaatagacagcattattctgcctgtatcgggcacatcgatggaaggaacggttgcgactgttttttccaatgaaaaagtggtgttaaaacaggaacatttagaaaaaaccaagccgcactgcgcgatttattcagggatttcaaaccaatatttagacggcatggccaaaggggcgaaccgtcgtcttatcaagctctttgaaagagacgatattgcgatttacaactcgatacctacagtcgaaggtgccattatgatggccatacagcatacagactttacgattcacggctcgaatgtaatggttctcgggctggggcggacgggaatgagcatcagccggacgttctcggcgctcggcgcacgcgtaaaagtcggagctcgcgactccgcccacctcgccagaatcatggagatgggcctcactcctttccacacaaacgaacttgcagagcatgttgaaaatatcgacatatgcatcaataccattccaagcctgattctcgataaacatgtcctctcacgaatgacacccagaacattaattctcgatttagcaacccgtcccggaggcacagattttgattttgccgaaaagcaaggcattaaagcgctgcttgctccaggacttcccgggatcgtcgcgcctaaaacggcgggacagatcattgccaatgttttgtgcaaccttttgtctgaattaacaactgaccgaaaggggctgtcataatgtcgatcaaaggaaaaagaatcggatttggcctaacgggttcacattgtacgtatgatgccgtttttccgcagattgaagcgctgatcaacaaaggggctgaagtcagaccggtcgtgacgcatactgtcaagtcgacggatacacgctttggagaaggggaagaatgggtcagaagaatagaagagctgactggatttgaagtcattgattccattccgaaagctgagcctctcgggccaaaaacaccgctggactgcatggttgttgcgccattgacgggaaattcgatgagcaagcttgcaaacgcccagacggacagtccggttctcatggcggccaaagcgacgatgagaaactcccgtcccgtcgtcctcggcatttcaacgaatgacgcgctcggcttgaacggcgtcaacttgatgaggctgatggcggcaaaaaatgtttactttattccgttcggccaggatgacccttacaaaaagccgaattcgctcgtcgccaaaatggatcttttagtgccggcggtcgaagaagcgctctcccataaacaaatacagcctatcctggtccataatgatcaataaatcttttgaaaataaagatgtaacaaaaaatatcaatcaccacggcacacatctatgttaaaataaaatgtaaaatgcatagtcaaccaatcgtttacgacgattaaggtggaaggagttttacaattgggcagaggattacatgtagcagtagttggtgcgacaggcgctgtaggacagcaaatgttaaaaacactagaagacaggaattttgaactggataaactgactttattatcctcaaaacgttcagcaggtacgaaactgactttcaaaggcgaagagtacacagtagaagaagctcgtcctgagagctttgaaggcgtcaacatcgcgcttttcagcgccgggggaagcgtttcgcaggcgcttgctcacgaggctgtcaaacgcggggcgatcgtcattgataatacgagcgcgttccggatggaccaaaacactccgctcgtcgtacctgaggtcaatgaggaagatttgcacaagcacaacgggattattgcaaatccgaactgttcaaccatccagatggttgttgcgctcgaaccgatccgcaaggctttcggtttaaacaaaatcatcgtatcgacttatcaggcggtgtctggagccggaaacgaagctgtaaaagagctctacgggcaaaccgaagccattttgaacgacaaaccgttcgagcctgagatcatgccggtgaagagtgatgaaaaacactaccaaatcgcatttaacgctattcctcaaatcgataaattccaggaaaacggctttacgtttgaggaaatgaaaatgataaatgaaacgaaaaaaatcatgcacatgcctgagcttcaagtttcagccacatgtgtcagactgccgattgcaacagggcattcagaatccgtctacatcgaaacagaccgtgatgatgtgacagcagaggatattaaaaatctgttaaaagaagctccaggcgtcgttctgcaggatgatccagctaaacaggtctatccgatgcctgcagatgcagtagggaaaagagacgtatttgtcggccgggtgagaaaagaccttgaccgcccgaacggtttccatctgtggatcgtttccgacaacctgctgaaaggcgcggcatggaattccgtacaaatcgcagaaagcctaaaagctttaaatttagtttaagatttctaacgggatgtgagaagagagtgaggcaaaaatgaaggcctgctctcttctgttacgtccgaaatcaacttggagtgaaataaagtgaaaatcatcgttcaaaaattcggcggaacgtctgtaaaagatgaccgcggcagaaagcttgccttaaaccatattaaggaagcggtcaatgaaggatacaaagcggttgtcgtcgtatcggccatgggccggaaaggcgatccgtatgcgactgattcattgcttgatctgctttacggcggacaggatacaattaccgagcgtgagcaggatatgcttttatcatgcggggaaacgatttcctctgttgtgttcgccagcatgcttttggaaaacgggattaaagctgctgctttaaccggtgcgcaagcgggctttttaacagacaacaaccatacgaatgcaaagattctcgaaatgaagccggagcggcttgtcagcatgctggccgaccatgatgcggtcgtcgtcgcaggcttccaaggcgcgactgcaaaaggggatatcacaacgatcggccgcggcggaagcgatacatcggccgctgcgcttggcgcggctctggacgcggaatttatcgatatttatacagatgtcgaaggcgtcatgacagctgatccgcgcatcgttgaaaaagcgaagccgctgcctgtgattacctatacggaaatctgtaatttagcctatcagggggccaaggtgatccacccgagagccgttgaaatcgcaatgcaggcgaaagtgccgatccgcgtgcgttcaacctattcaaacgaaaccggtacgctcgtcacaagccatcacaactcgaaagccggaagcgacgtttttgagcggctcatcacaggcatcgcccatgtgaaagacgtgacacagtttaaagtcccggcaaaagaaggacaatataacgtacagactgaagtgtttaaagcgatggcgaatgcgggcatcagcgtcgatttcttcaatattacaccaagtgaaattgtctacacggtggctggaaacatgacagaccgcgcccacagcatcctgaaggaattgggctatgaaccggccgtgacgagaaattgcgcgaaagtgtcagcggttggcgcggggattatgggcgttccaggcgtcacctcaaaaatcgttaccgctttgtcagaaaaaggcattccgatcctgcagtctgctgacagccatacgacgatatgggtgctcgtgcacgagaaaaatatggcgacggccgtaaatgcgctgcatgaagtgtttgaactgtcaaaataaatatgattgaatcatgatgaggtgaaaaaaatgaatttcggaaatatcgcaaccgcgatggttacgccctttgacaaaaatgaaaatatcgattttcaaaaactgtcaaagctgatcgattatttactaaacaatgggacggattccctggtcgttgccggaacaaccggagaatcgccgacgctttccgaagaagaaaaggtagcgctcattcaatactctgtcaaggaagcggcaggccgtgccccaatcatcgccggcacgggaagcaacaacacgaaggcgtcgatcaagctgacgaaaaaagctgaagaagccggcgctgacgctgtcatgctcgtcactccgtactacaacaagccttctcaggaaggcatgtaccgccatttcagagcgattgcggaggaaacatcgctgcctgtcatgctttataatgtgccgggaagaacggctgcttcgctcgcaccagagacgacaatccgccttgcggagatcccgaatattatcgccattaaagaagcgagcggcgacctagatgcgataacaaaaatcgtagccgaaacccctgaggactttgcagtttattcaggagatgacagcctgacactgccggcgctgtccgtgggagcgagaggaatcgtttccgttgcatcacacatcatcggaccggaaatgcaggaaatgatcaaacattataccgaggggaacacggctcaggctgctttgatccatcaaaagctgcttccgctgatgaaagggctttttgccgcaccgaacccgtctccattaaagacggctcttcagctgaagggtcttgacgtcgggtccgtccggctccctttgattccgctaaatgaagatgaacgactccgtttaagcagcctgatgaacggcctgtaaaaaacaatacggacgaaaacggtcattctcttttggaggggatgaccgtttgtcatatacataatggttcttgttttctaaatttagattcaggtataatagggacaagtgatgatggacgggtacttagattaggaggattacaatttgaaaaaaaatacagaaaatattagaatcatcgccttaggaggcgtcggagagatcggaaaaaacctctatgtcattgaaatcgattcagacatattcgtggttgacgccggcctcatgcatccagaaaatgaaatgctgggtatcgatgtggtcatccctgacatttcttatttaattgaacgatctgaccgcgtaaaggcgatttttctcacacacgggcatgaagaaaacatcggcggcgtattttactgcctgaacaagctttctgtgcctgtttacggaacgaagctgacgcttgcccttttaaaggaaacgctgaagcagtacggtgtaaacaaaaagcccgatttaagagaaattcattcaaaatccgttattacatttgaatcgacaaaggtgtcattcttcaaaacaaatcacagcatcccggattccgtcggtgtcagctttaaaacatccctcggatccatcgtgtgcacaggcgattttaaatttgaccagacacctgtgttaaaccagacaagcgacatcggcgaaattgccaaaatcggcaacagcggtgtgctgtgcctgctttccgacagcgccaatgccgagaagccgggctatacgccttcagaagcactcgttggcggagagatatccgatgtgatgtacaacgccgaaaaccgcgtgattattgccgtgttcgcgtctaactttaaccggattcagcaggtgattgatgccgcgctgcaaaacggcaggaagcttgcagtttcagggaaaaatatttcggcgatactccagctggcgatgaaactcgggtatgtcacggcagatgaagatatgttcatccctgtccaagaagtcaaaaagtatccaaaaagagaagtcgcgattttgacaggggacaaccatggagagccgctcgccgcattgaccaggatcgcaaaacaagggcataagcagcttgacattgaggaaggggataccgtcctgatcgcatcctcccctatcccgggtcaggagcttgtttactccaaagcggtcgatctcttaacgagagcgggcgcccaggtcgtattcgcacaaaaacgcgtccatgtatcaggccatggctgtcaagaagagctgaagctgatgctcaacttgctgaagccgaagtatttaatccccgtaaacggtgaatacagaatgcaaaaagcgcattccaagcttgccgaagaaatcggcatgaaacggagcgacattttcctgattgaaaaaggagatgtcgtggaattccgcggacaaaacgttaaaatcggcgataaagtacactcaggcaatatattgatcgacggactcggcgtcggcgatatcggcaacatcgtgctcagagaccgccgtctgctatcccaggacggaatcttaattgttgtgattacccttgataaaaagaaaaaacatcttgtttcaggacccgaaattatcacgagaggttttgtctatgtcagagaatctgaacagctgatcgttgaagcgacagagcttgtcagggaactcgtcaacgaaagcacagaaaacgccgtcgtcgaatggtccgccttaaaacagacgatgcgtgaggcattaaaccagttcctatacgaaaaaacgaaacgaaaaccaatgatcattccaatcatcatggaagtataaaaaaccaagagactcctcttggttttttttcatgccttttgcgttgaatgaaaaaaacgccattgtccataatacaaaagaaactcgagaaagaggtgagccagatggattcaaaccggatacaaaacggggacagccaaggggagcagccggctaagcaggacgcaaaagacagtctcgtcaacaaaatccagcagctcggcgaaacgacactcccgcagatggggcaggacaccaacattcactgcctgaccattatcggacaaattgaaggtcacgtccagcttcctccccaaaacaaaacaacaaagtatgaacatgtgattccccagatcgttgcagtagagcagaatcctaaaatcgaaggtctgctcatcatcttaaacacggtcggaggagacgtagaagcgggccttgcgattgcggaaatgctggcgtccctgtcaaagccgacggtctctatcgtactgggcggcggacattcaatcggagttccaatcgcagtgtcctgcgaccacagctatatcgctgaaacagctacgatgacgatccatccggtcaggctgacagggcttgtcatcggtgtgccgcagacatttgagtatctcgacaaaatgcaggaaagggtcatcaatttcgtgacaagccattccaacatatcggaagaaaaatttaaagaactgatgttttcaaaaggcaatttaacccgtgacatcgggacgaatgtcgtaggaaacgatgcggttaaatacggattaatcgatgaaaccggcggagtcggacaggcgattcaaaagctgaatgaattaatcgaacaaaacaagggcgcccaggaagggatgatccaatgattctgtatacgacaatgccgcaggaaatcgtgttcgcagggcaggcggaaaactcgaacttaaaacagatcgatgtaaacggcgtgccccttttagtcgagatgaacggagaggaagcaagggtcgttcaggttctcagcacgaacccgatggattttttaaaacaagaaacggcccctgggcagacgcttaaactgacattttataaatagctggagtgtctcaaggataaatatgctataataggggaatccagaggaaaatcgcagccgaaaaaaggctgctttctctttgtttttacattttttaacacgcagtaaggtgatggaacatggcaaaaagaaaacgaaaatcaacaaagaaacaaaaacaaggaaaaaaacggatccatcttaaatttgaattgtacggattaatctgtatcgccatctcgattattgcggttttgcagcttggcgtagcagggcaaacgttcatttacatgttccgctttttcgccggtgaatggttcatcctttgccttctcggcctctttttaacgggcttgtctttattttggaaaaagaaaacacccagttttttgacgaggagaaaagcgggcctttactgcatcattgcaagcatgctgcttctttcacatgtccagctgtttcagcatttgaccgaaaggggaatggttcagtctccgagcgtgatccaaaatacgtgggagctgtttctgatggatgtaaaaggcgagacaggatcgcctgatcttggaggcggaatgattggagcccttttattcgcggcgtcatattttctgtttgcatctgcaggatctaaaatcatcgccgtcttcctgatcttgataggccttcttttgattacggatcggtcgcttcaggagacgctgatcaaatggatgaccccggtcgcctccttcatgaaaaaccagtggcaggcctttttagcagatcttaaacaattgaaaaacagctcgccgaaaaagaaatccggaaaaaaacaaaagacgcagagaaaaccgaaagtgtctgaagagcctgtacaagaagcggaccttgatccagatccggttattcaatcagaaccgattatttcaagcttttccgaccgtgatgaaaagcccgaagttcaagcttacgaagctccggcggctcctgctgaacctcctgctgagcccgaaatcggtgaggaaatgcaggcctccggcgcgcccgaaatcacgtttacagagctagaaaacaaggattaccagcttccgtcgattcaattgctggatgatccgaagcacacagggcagcaggcggataaaaagaatatttacgacaatgccaggaagctggaaaggacgtttcaaagcttcggagttaaggcgaaagtcacccaggttcatctcggcccggccgtcacgaaatatgaagtctatcctgatgtgggcgtcaaagtcagcaaaattgtcaacttaagtgacgacttggctttagcgctcgcggccaaggatatccgcatcgaagccccgatccccggaaaatcggcgattggaatcgaagtgccgaatgcggaagtggcgatggtttccttgaaagaagtgcttgaatcgaaactgaatgaccggccggatgcaaagctgatgatcggcctcggccggaacatttccggagaagcggtattggcagagctgaacaaaatgccccaccttcttgttgcaggagcgaccggaagcgggaaaagcgtctgtgtcaacgggatcattacaagcattttgatgagggcaaagccccacgaagtgaagatgatgatgattgatccgaaaatggtcgagctcaatgtctacaacgggattccgcatttgctcgctcccgtcgtgacagacccgaaaaaagcatcgcaggctttgaagaaagtcgtcaacgaaatggagcggcgctacgaattgttttctcacacgggaacgagaaatatcgaagggtataacgactatattaaacggatgaatgccgcagaagaagcaaagcagccggagcttccatacatcattgtgattgtggacgagcttgccgacctgatgatggtcgcttcctctgatgttgaagactcgatcacaaggctttcgcaaatggccagggcggcgggcatccacctgatcattgcgacgcagaggccttcggtcgatgttatcacaggggtcattaaagccaacattccgtcaaggatcgctttcagcgtatcgtctcagaccgactccaggacgattcttgatatgggaggcgctgaaaaacttctcggcagaggggacatgctgtttctccctgtcggcgccaataaaccgctccgcgttcaaggtgcctttctgtcagacgaagaagttgaaaaagttgtcgatcacgtcatcagccagcaaaaagcccaataccaagaagaaatgattccagaagagacgcaggaaacggtcagcgaagtgacagacgacctttatgacgaagcggtcgcacttgtggtcagcatgcagacggcttctgtatccatgctgcaaaggagattccgcatcggctatacaagagcggcgcggcttatcgatgccatggaagagcggggaatcgtcggcccatatgaaggatcaaaaccccgtgaagttctcttgtcaaaagagcaatacgaagaactctcttcttgagaagagagttcttgtttaacataatttcattatgtaaactaaaaaacatctatctatttatttatttgacaaaacatgatatagttatcctcaattaaagataatttgaatctgatctgtcagacggagggaaaacatgtcgataaaagctgacaatcaacggttatgtttaaaggtgattgatcggataaaagatgatattcaaaatggggtcttttgcgaaaatgaacggctcccgagtgaatttgagctgtcaaagatgcttggtgtgagcagaacggctttgcgtgaggcgcttagaatactggaagaagaaaacgtcatcatcagaaggcatggagtcggacattttgtaaatgccagaccgttatttctatcaggtattgagcagctgaacagcgtcacaaaaatgatcgagcaggcaagcatgacgccgggaaccatttttatgtcctcacaggttaccgctcccactgaagaagatatgctccggtttcaatatgcggaagaaaccgagatctttttgcttgagcgggtgagaacggcaaatggaatgccggttgtctactgtcttgataaaatacctgtggacattctcccggaaggcttttcacacgagcaggaatcgatgtttgaatggcttgagaacaaatccggcgccgtgatcagctacgctgttgccgatattgtgccaatcggatatcatgacaccatttcccaaattcttgaatgcgatcctgaaacgtctttgctgctgctcaaacagactcattatgaccaaaacgataagcccgttttatattctttaaactattttagggccgataaattcagatttcatgtcgtcagaaaacgtttttgatatgcgggcgctctattaggagcgtgttttttttgcccgcttgagcgcctatacataaataagcccgcatcatggaacaataacagatggaaatactgatgaattgggtgaaaaaagttgagcagaaaaaaagacatgaaaagcatttttgcgctgtcttcggtcccgctcgtgatgacgctcggcaattcgatgctgattccggttttgccggtgatcgaaaaaaaattaaacatttcttcgtttcaggtgtcgttgatcatcacggtttattcaattgtggcgattgtatgcatcccgattaccggctatatgtcggaccggttcggaagaaaaaagatcatgctcccatgccttctgattgcgggagctggaggagcgttagcaggtttggcttcaacttttttcaatgatccgtttgcgatgattttagcaggtcgcgtccttcaaggaatcggctcagccggcgcagcgccgatcgtcatgccgtttatcggcgacttgttccaaaatgatgaagaaatcagcgcgggactcggagatatagagacagcaaatactgccggcaaagtattaagcccgatattaggggcttttttagcatcttgggtttggtacatgccgttttggtttatcccggtcgtgtctcttgccagcttttttctcgtcttgttttttgttcccaaaccgaaggacaaagatgatgaaaagcaaacgttaaaaaactttgcaaaaagcgtacaggaaattttcaaacgggaaggtcggtggcttgtttccacttttgtcatcggcggaattattatgtttcttttattcggagtgctcttctacctgtctgatactttggagaagaagcatcaaattgacgggattgcgaaaggagcgcttctcagcattccgctgctttttctttccgtcagttcctaccttgccggaaagctgatcggaaacgataagatcagaatgaggatctgcgtgctgttcggcatgatcctgctggctttgtcgtttgccggtttgtggtggaaccacagcttttacccgttatttttgtttatgtccatcggcggcatcggcatcggaattgcgctcccttctttggatgcgctgattaccgagggaattgaaaaagaagagcgcggcacgatatcttcgttttacaacagcatgaggtttatcggtgttgcgctcggaccgccggttttcgcctatatgatgacaaatgcggggtggctgattttcatcgtatcgcttttgtgcagtttagctgcactagcgcttgtgctgtttaatattgacccgaaagaagacgaaagtgaagcggcaaagacggtgtagatctgcaccgtctttttcataaggttttttagtttccttaaatctcctccagttgatataattacaaccatacagtccaagcgcatatgctgaaatgtggtcataatacataatataaacaaggacgaaggaggttctagtatgacataccttaacgaaataaaaggaaagcaccgcggattgacaagccacattgtcaaaacggaaaaattcaaaaccgtctcgattatttttaaaatgcttgctcctttaacaaaagaggatgtgacaaagagggcgctttttccgcatgtgcttttgcggggaacgagcacccgccccaaaacggccgaactcagatcgtatcttgatgaactttacggcacttccgtatcatgcgatctctccaaaaaaggggaaatgcatgtcatcacattcaggctcgatatcgctaacgaaaaatttttaaaggatcagacaccgcttctggaaaaagggcttgagcttttgtcagagatcattttttcgccggcgcttgaagacggggcctttctgccgctgtacgtgtctcaggaaaaacgcacactaaagcaaagaatacaggcggtctataacgacaaaatgcgctattcaaatttgaggctgattcaggagatgtgcaaagatgaaccatacgcgcttcacgtcaacggagagcttgatgatgtggacggcatcacgcctcaaagcctgtatgaagcttatcaaaaagcggtcagcgaagaccagctcgacatttacgtcgttggggatgtggatgagcagcaggtggattcgtacatttccaaatactttgaagcaaacgagcgggagctgagacctgttcccgagcttgagcaaacccgcacaagggagcctcaggaagtcatcgaggatgctgatgtcaagcaagggaagctgaacatgggatttcggacgggaacgcattttacggatgacgattatccggcgcttcagctgtttaacggcttgtttggcggattttcacattccaagctgtttattaatgtcagggaaaaggccagccttgcctattatgcggcttccagaatcgaaagctttaaagggctgttgatggtgatgtcggggattgaagtcggcaattatcaaaaagccgtcgacatcatcaaggagcagtttcaggaaatgaaaaaaggcagctttacagaagaggcaatcgaccagacgaaagccgtcattaaaaaccagattcttgaaacgcttgatacaccgtacggtttagtcgaatttatttatcagcaggctgccgcccaaaccgaattttccttggaagactggctgggacgaatcgacaatgtcacaaaagaagacatcatcgaagtcggaaagaaaatcgatttggatacaacgtactttctcaaagggacggagggagcatcttgacgaaaacgatcgaatttgaacagctgaaggaaacactatattacgaaaaaatgcctggcggcctcgatgtctatgttcttccgaaagaaggatttaacaagacatatgcggtctttaccacaaaatacgggtcgattgacaatcagtttgtcccgctcggaaaagatgaaatggtccgcgtgcctgatggaatcgcacactttctcgaacataagctctttgaaaaagaagacggcgacgtttttcagcaattcagcaggcagggagcttcggcaaatgcgtttacctccttcacaagaacggcctacctgttttcaagcacgtcaaatgtggaagaaaacctggaaacgctcgtcgactttgtgcaggacccttactttacagaaaaaacggttgagaaggaaaaaggcatcatcggacaggaaatcaacatgtatgacgacaaccccgactggcgcctgtttttcggcctgatcgaaaacatgtatcaagagcaccctgtccggatcgatatcgcaggcacgatcgaaagcatctctcatattacaaaagaccttttgtacgaatgctatgagacgttctatcatccgagcaatatgctgctgtttgtcgtcggtccggtcgatcccgaagcgatcattcgccaggtccgcgaaaaccagcagaaaaaaccgtatacagaccagcctgaaatcgtccggaaagaagttaaagagcctggggccgtatttaaaaaagaacaggaaattaaaatgaatgttcaaagctcaaaatgcctcgtcggtttaaaaagcgctcatccgatgaatacgggagaagccctgctgaagcatgagctgaccatcaacctcatcctcgagtgtctgtttggcaaaagctcaagcgattacgaaagaatttatgaaaaagggtatatcgatgagacattcagctatgactatactgaagaacacggatttggcttcgtctctgtcggcggagatacgcctgagcctgacaagctggccgaagagctcaaacaagtgctgttcaaagcgaaagaaacgatcacagccgaaaagctggaactggccagaaagaaaaaaatcggcaatttcctgaaatcgatgaattcgcctgagtacatcgccaaccagtttacacggtacgcttttctggagacgagtctgtttgatatcgtcaccgtactcgaatcgattacgcttgatgacgttcaccgcgtcattgaggaagaagttgaggaagacaggatcaccgtctgcaaagtcgttccaaaatcataaagcaaggtctgaaagttcagcgtgcagggatatttccgatgcacgctgaacctttcttcttttttaacggaaaggtggaaatatggtatgacaaaactcgctctcatcaccggcgcaagcggcggaattgggcaaagcatcagcgaaaagcttgcgcaaaacgggtatgatcttctcctccattatcatacaaatgagaaggcggccgcttcacttgcagaaaggctgtcacatacatacggcattcacgctgaaatcattcacggcgacctgtccgaccccggaggtgcaaaagccgtttccgcttccatcggcggacgggcgctagacggcatcgtcttgaacagcggacaaagcttccgcgggcttgtgacagatatgaccgatgaagctgtacaggacatggtgcagctccatgtctcaagcccgtttctattaacgaggaatctgcttccggcgatgatcaggaaaaagtccggcgctattgtagccgtcagctctatttggggtgagacaggggcgtcgtgcgaagttttatacagcatgacaaaaggcgcgcaaaatgtgtttgtcaaagcccttgcaaaagagcttgcgccgagcggcatcagagtcaacgctgtttctccgggcgctgtaaaaacaaagatgatgagctcattttcaaaagaggaagaagagatgatcgccgatgagattccgatgggaaggctcgccgaagccgaagaggttgcagacgccgtcttgtttctgctctcggcgaaagcatcttatatcacgggtcaaattttgtcagttaatggcggctggcattgttaaaaacatgtatagtttacgattcccaagagaataataaggctgtaacttcaagagaatggaggggcctgatatgtccgtactggataattgggatcagtggaaaaactttttgggcgaccgtttgaactatgcccaagaacaaggaatgtcaaaagaaaccatctcagatcttgcatatgagatcggcgattatttggccggtgaggttgattcaaaaaaccatcaagaacgagtgctcgcagacctttggagcgtggcttccgaagaagagcagcgcgccattgcgaacgtgatggttaagcttgttgaaaacaacagctcacattaaggagagagtgtgttcactctctctttttttataggcgcgggtttttgccctgcggcaccgcttttatcgtttgcttttcgccccgacagggtaaacagcattcaggcgccgatacagcaggtttttcccgattttgggaaacggacgtttttcttatttaatcacaacattctgctttctaattaagacaaaatgctttatgataaaggaaggtaaatttttgccacgatgatgggtagggaggttatcatttggcaaagctcgaatggtacttagaatatgaaatccaagtcaaccgtcccggacttctgggagatatatcctctttattggggatgctttcaattaatattgtgaccattaacggcgtcgatacacaaagaagaggcctcttgttaaaatgccgtcatatagatcagattaagcgattggaatcgattttgaacacgatggatacgattaaagtgacgaagctccgcgaaccgaagcttcgcgaccgtctcgctgtaaggcacggccgctatatccagcgggatgcagacgataaaaaaacgttccggtttgaacgcgacgagctcggcttgcttgtcgattttatggctgagctgtttaaaaaagacgggcacaagctgatcgggatcaggggaatgccccgcgtcggcaagacggaatcaattgttgcttcaagcgtctgtgcaagcaaaaggtggctttttgtttcttcgacgctgctgaagcaaacgatcagaagccagctgattgccgatgagtacagtccggaaaatgttttcattttggacggcattgtgtcgacgagaagaggatctgaacgccatttgcagctcgtcagtgagattatgcgtctgccggcgaccaaagttgtcgagcatccggacattttcgtgcaaaatacggaatatacgatggacgattttgactacatcatcgaattgcgtaacagccccgatgaggtgattacatatgagcacgctgaagaaccgcagatgtttgaccattcaggtttttccggctttgatttttaaaatggaaggtgtttgttgtgactgaactaggaaatcggctgaaagaagccagagaggaaaaagggatgtcattggacgaccttcaggcggccacaaagatccaaaaaaggtatttaacggcccttgaagaaggaaactatgatatcattccggggaaattttatgtgagggcttttatcaagcagtacgccgaagctgtcggcctcgactcggagcacttgtttgaagagtttaaaaaagatatccctaattcttacaatgatgaggtttctgagaagctttcttcaatcaagccgcagagggagcttcccaagtctgcctcaaaagcgcttgaacttttgcccaccttgcttgtggcagccggcgttatcgttgtgatcgcgatcatttacgtcattgttcaggctgtaaacggcggagggaatcagcaggctgaagggcctaaaacagaggaatcgcaaagcaagtacgacgtctcaaaagattccccgctgactaaggaaaatcaacagaacacggatgcgcagaaagacagcgctgaaagcgacaaagaaaaaaaggatcagcagtctgatgagaacgacaagctgaccattaaagcgaccgcaagcgaaggctcttccacaacctatgaagtatcaggatccgacaagctggagcttgaagtaaaggcaagcgaaaactcatgggtcagagtgcgcgacgagaaaggaagctctcttaaagaaggaatgatgaaaaaaggggaaacctttcaaaagaatataaccgatcaatcgcaaattgatttgcggatcggatatgcgccgggcgttgaaattaaaatcaacggagaagttctttcttacaagctcgatcctaagactgtgatgacacaaaacataacgattcaaaataaaaaggaggaaaagtcatcttaattgcacagatgactttttcttgcgttcatcatcattaggaaaacatacatatatggaggaacctttatgtttaatttaccgaataaaatcacgctttctagaatcgcattaattcctgtttttatggtcatcatgcttgtgccgtttcagtggggggctgtctccttcggcagcgagtcgattccggtcacccatttgatcggcgcactgctgtttattttcgcttcggtcaccgattgggttgacggctattatgcaagaaagctgaaccttgtaacaaactttgggaaattccttgacccgcttgcagacaagctgctcgtgtcttccgctttgattattctggtgcattaccatcttgctccggcctggatggccattgtcattatcagccgggaatttgccgtaacgggactgcggctcgtccttgcgggaacgggggaagtcgtcgcagccaacatgcttggaaaagtgaaaacatgggcccagatcatcgcgatctctgcccttttgcttcacaatctcccatttgagcttgtatccttcccgttcggctctcttgctttatgggtggctgtctttttcacagtcgtatccggctgggattatttcgctaaaaactgggatgctttaaaaacatcgaactaaacgtagggaagtggaaacaatgaagttggaaagaaaagcggaaattatcgctgtcggctctgagcttctgctcggacaaatcgttaatacaaatgctcagtttatcagcaggcatttggccgaaatcggcattaacgtcttttatcacacggcggtgggagacaatccggcacgccttaaacaagtcattcagacagcgcagcaaaggtctgacttcatcattttttcgggaggcctcggaccgacgaaagacgatctgacaaaagaaacgatcgccgaagttgtcgggcgccctcttaagctcgacgatgaagccttcgaatcgattcaggattacttcaaaaaaacgaaccgggagatgtcgccgaacaaccgcaaacaggcgctgatcctcgaaggatccgatgttctgccgaaccgcttcgggatggctccgggaatgctgcttgagcatgaatcgcgcttttatatgcttctgccgggacctccgaaagagctggagccgatgtttgaaaacgaagcgaagccgctgattttggaaaagctcggctcgagggaaaagatcgtgtcaagggtgctgcgcttcttcggcatcggtgaatcccagcttgaaaccgatttggaagatctcatcgatgcgcagactaatccgacaatcgctccgcttgcggcagacggggaagtcacgctcaggcttacggcaaagcatgcggatccggaggagacaaaccgcttgttaaaagaaacggaagaccgcattttggagcgggtcggagaattcttttacgggtatgatgatacatccctcgcagaagagcttgcgaaagcatgccggagcaagggtatgactctggctgctgcggaaagctttacaggcgggcttttttccagctggctgacggaaatgagcggcgcttccgaatatttcaaaggcggcgccgtctgctacacaaacgaattgaaagtgtcagcggccggcgtttcggaagacacgctgcagcgctatggtgcggtcagcgcgcaatgcgctaaagagctcgccgcaggcatcagagtcaagacaggaagcgatatcggcatcagcttcactggagtagccgggccgaatacgcaagaaggccatccggctggaaaggtgtttatcggcatctccgtgaaggaccaggctgaggaagcgttcgaatttcagttcgccggatccaggtctgcggtgcggaagcgttctgccaaatacggctgccatctgttgctgaaaatgatggaaaaataagcggaaaccggattttcggaatatctttctttcgaaaaaggccattccattttaggagatcgatttttcctcttaaaaaaatcgaatatgcgttcgcttttttcttggcaaatccgcataaacaaggtatagtagatatagcggaagtgataaaggaggaaaatagaatgagtgatcgtcaggcagccttagatatggcgcttaaacaaatagaaaagcagtttggtaaaggttcgattatgaaactcggcgaacaaactgaaacgagaatttcaacagttccgagcggttctttagcgctcgatgcggctcttggagtgggcggatacccgcgcggccggattattgaagtatacgggcctgaaagctccggtaaaacgacggtggcgcttcatgcgattgccgaagttcagcagcagggcggacaagcggcgttcatcgacgccgaacacgcgcttgatcccgtctatgcacaaaagctgggcgtcaacattgatgagcttttgctgtcacagcctgatacgggcgagcaggcgctcgaaatcgctgaagcccttgtcagaagcggagcggtggatatcgttgtcatcgactctgtagcagcgcttgtgccgaaagctgaaatcgaaggagatatgggggattcccacgtcggtttgcaggccagactgatgtctcaggcgcttcgcaagctttccggagcgatcaataaatcgaagaccatcgcgatctttatcaaccagattcgtgaaaaagtcggtgtcatgtttggaaatcctgagacgacgccaggcggaagagcgctgaaattctactcttctgtccgccttgaagtgcgccgcgcagagcagctgaaacaaggcaacgacgtcatggggaacaagacgaaaatcaaagtcgtgaaaaacaaagtggcacctccattccggacagccgaagtggacattatgtacggggaaggaatttcaaaagaaggggaaatcatcgacctcggaacagagcttgacatcgttcaaaagagcggtgcatggtactcttatcaggaggaacgccttggacaaggccgtgaaaacgccaaacagttcctgaaagaaaacaaggatatccttttgatgattcaagagcagatccgggagcactacggtttggatactggaggcgctgctcctgcacaggaagacgaggcccaagctcaggaagaactcgagttttaatcatgaaacgtgtgaaaggctgccggcccgatcggcagccttttactttattcttcgctttcaggcgcttctcttccatccattctcttaatgagggcagtttgaaaggcgtttaatccagaaacgttaagaccgtaagcttgacaagtatttcccacacaattacaatgaaattgtatcacttgtttttcttaacatgattgataaacatttaaacttgacaagggctgtgaatccgcttcactccctgtgaaggttctgtatgttgagaagaagtacaatgtacatgccgacacttacttttagcaagacaagttcatagcaagaggaggtgaaagttatgagtcctttagcaattctcatctccattttgctgagcctattctgtttagttgttggctactatgttcgtaaaatcattgccgaagcaaaaatttcaggtgcgcgaaatgcagccgaacaaattcttggagacgcaaagcgggatgctgaagcgttgaaaaaagaagcccttcttgaagcaaaggacgagattcatacgcttcggatagaagctgaacaagaagttcgtgaaagacgaaatgagcttcaaaaacaagaaaaccgtttacttcaaaaggaagagaaccttgaccgaaaagatgaatcattagataaacgggaagcgatgttggagaagaaagatcattctctgaatgaacgacaacaacatattgaagagatggaaagcaaagtggatgaaatgattcgtatgcagcagtcagagttggagcgtatttcaagtctgacgcgagatgaagcgaagcaaatcattctggaacgggttgaaaacgagctttcccatgacatcgcgatcatgatgaaagaaagtgaaaatcgagcgaaagaagaggctgataaaaaggcgaaaaatattctttcattggctttacagcgctgtgcggcagatcatgtggccgagacaacggtttcagttgtcaaccttccaaatgatgagatgaaaggccgcattatcggacgtgaaggacgtaatatccgtacattggaaacattgacggggatcgatctgatcatcgacgatacgccggaagccgttatcctttcaggatttgatccgatcaggcgtgaaacagccaggatcgctcttgataaactcgttcaggatggccgcattcatcctgccagaatcgaagaaatggttgagaaatcccgccgtgaagtggatgattacatccgcgaaatgggtgaacagacgacgtttgaagttggagttcacggtcttcatcccgatttaatcaaaatcctcggccgcttgaagttcagaacgagctacggacagaatgtactgaaacattcaatggaagtggcgtttctgacaggcttgatggcttcagagctcggagaagacgtaacgctcgcaaaaagggcaggacttcttcatgatatcgggaaagcgattgaccatgaggtggaaggaagccacgttgaaatcggtgtggaactggccaccaagtataaagagcatccagttgtcatcaacagtatcgcatctcaccacggagatcaggagccgacttccatcatcgccgtgctcgtggccgcagccgatgcgctgtctgccgcaagaccaggcgcaagaagcgaaacgctcgaaaactatattcgcaggcttgaaaaactggaagaaatctccgaatcatacgaaggtgttgaaaaatcattcgcgatacaagcgggacgagaggtgcggatcatggtcaaacctgactcaatcaatgatcttgaagcccatcgtttggcgcgtgatattcgaaaacgaattgaggacgagcttgactaccctggacacatcaaggtaaccgtaatcagggaaacgagagccgttgaatacgcaaaataaagtggtgcgaatgcgccacttttatttttttgtttccttgtgtaacactataattaaaacctaatttaaaaaaagaaagggtcaaattatgagaattttatttattggagatgtcgtcggttcgcccggcagagacatgatcaaaacctatttgccgaagctgaagctcaaatataaaccgaatgccgtcatcgtcaacggagaaaacgccgcacacggaaaaggcattaccgaaaaaatatatcaccagctcattcaagctggagccgacgttctcacgatgggaaaccacacatgggataaaagggaaatatttgattttattgatgatgcgccacagatcgtcagacccgccaattttcccgagggcacgcctggaaaaggcatcacatacataaaaacaaacggttcgaaggaactggctgtgatcaatttgcaaggccgcacttttctgcctgcgatcgattgcccatttcgaaaagctgatgaattaatagaagaagcgtcaaaaagaacgccgttcatctttatcgattttcatgccgaagcgacaagcgaaaagcaggcgatcggctggtatacggacggccgcgtttcagcggttgtcggaacgcacacgcatgttcagacagcggacaaccgcattcttccgaaaggcacggcatatataacagacgtggggatgactgggccttacgacggtattctcggcgtcgaccgcgagacgattatcaagcgttttaaaacgagcctgcccgtccgttttgagattgccgaaggccgcacaactctgagcggagttgtcatcgacatcgacgaacagagcaagaaagccgttaaaattgaccggatattaattaatgacgaccacatgttttttgaataactaaacagaaaatcattttagaaaaatattaaaaggaaagcaggaatatcccggtcctatcgtgaatatagtaaaaatggaaggtaccctgctatttttgaaaagcaattaaaaggggatggctttgaaaatagcaacatctaataatgattgttctaatgaacactcacttatccattgtaaacttaagggggagcaggaatggaaatattaaaggtttcagcaaaatcaaatccaaactcggtcgcaggtgcgctcgcaggagtcttgagggaacgaggggctgcagaaattcaagcaatcggagctggggcattaaatcaggctgttaaagcggtagcgattgcacggggatttgtagcgccgagcggagtcgatctgatttgcattccggcgtttacggacattcaaattgacggtgaagaacgaacagcgattaagctaatcgtagagcctcgctgatagaaagatcactctttttcaaatgcttcaacctgcttacttttacgtaagcgggttgtttttggtttgtccgtttttgaaaaatcagccgggagaggatcaacatgaagatttttgatgcccactctgatttgctgctgaagctctggaaaaatccgaagctcaatgaatacagcgacccgtcgcttcaaacgccggtccaagcgcttttaaacggaaaggcgaaagtgcagtgtctggcgatttttctgcctgaaaccgtgccagacacaataaggcttgaaatggcgcttgtgcagatccagctgtttcacgaaaaaattgcaaagtacaagcggatcaaactgatcaaaaataaagccgatatcgacaagctcaaaagcgatgaaaccggcatcattttaacgatggaaggctgtgagccgatcgcaaaaaacttaaggctgtttgacatcttttttcagctcggagtcagaagtttcggcctgacatggaactgggccaatacgttcgcagacggcgctttagaagaaagaaacgccggcttgacttcttacggggaaaggctgattcgcaaggcgaacaaaaaccgggcatggacagatctctcccatttatccgaaaaaagcttttggggtgcgattgaaacggcggcgtatccaatcgcctctcattcgaatgcccacagcctttgccctcatccgagaaatttaaaagacgatcaaatcaaagcgcttattgataagaacggcgtcatcggcttgacatttgtccctgaattcgtgagaaacggaaaaacgcctgtgatcaaagatatcctctcgcatattgaccatgtctgctctttaggaggcgagcggcatatcggattcgggtctgattttgacggcatcgaccgtgtcattccgaatcttgaagcccacaaagattacgggaatctgatcgaagcgctgcagcgctcatatacaccaagtcaagtcgacggatttctctttcaaaatttcatcagccgcatcccattttaaaaaaatatcatacatttttcagagggtgttcatctgttttctccagaaggacactggtgtttaccaagactgattatcgtgctacaatccttttgtaaagcgattttacaaaggggtctgttcatcttggacggaaatatgaaagcgcttatcaagaagccgggggagccgggcgccagcttcgagctcgtcccgattccgaagatcgacaaacacgaggtcctgatcaaagtcaaagccgcatcgatttgcggaaccgatgtccatatttataattgggatgaatgggcgaaaagcagggttaaaccgccttatgtgttcggccacgaattttccggcgaagttgttcaagtgggggaaaatgtgactacggtaaaagaaggggagtatgtttcggcagaaacgcacatcgtttgcggaaagtgcctgccgtgtttgaccggaaaagagcatgtctgcaaaaaaacgctgattctcggtgtcgatacagacggctgttttgctgaatatgtcaaaatgcccgccgcaaacatttggaaaaacccggccggcatgcctgaggatctcgcttctattcaagaaccgctcggaaatgccgtgcatacggttctgacgggaatgacggctggagtgaaagtcgctgtcgtcggctgcggaccgatcggactgatggccgtggcagttgcaaaagcgtctggggcggcgcaggtgatcgccatcgataaaaatgaatacaggctcgaccttgcattgcaaatgggggcaaccgatatcatctccgttgaaaaagaagatccgctcaaaaatgtaagcgctttaacaaatggtgaaggggcggacttggtttgcgaaatgtcaggccatccgacggcaatccgccaaagtttaaaaatggcggcaaacggaggacgggttcatgtcttaagcttgcctgagcatcccgtatgcatcgacatgacaaatgatatcgtctttaaaggattgacggtccaaggaattaccggccgcaaaatgtttgaaacgtggagacaggtcagcggtctcctccaatccggcacgattcaaatcaagcctgtcatcactcaccgtttcccgatggaagagtttgaaaaaggctttgaactgatgagaaaagggcaatgcggcaaagtcgtactgataccgtagaaaggagagattaatatgaaagaattcaattttttagcttccgagcttaatacaatgaaagaaaacggaacttttcaagagctgccgatcatcgaatcaatgcaaggatcaaccgtcaaaatgaaaggaaaagacattatacagctttcatccaataactatctcgggctgacgtctcatccgcgcctccaaaaagcggccgaagaggcggtcaaacggtacggagctggaaccggatcggtccgtacaatagccggaacattcaccatgcatgatgagctcgaaaagaagcttgcttcatttaaaaacactgaagcggcactcgtattccagtccggatttaccgcaaatcaaggcattctttcaagcattctcaccaaagatgatcttgttatctcagacgaattaaaccatgcttccatcattgacggcatcagactcaccaaagcgggcaaaaaagtatatcagcatgcggacatggaagatttagaaaagattttgaaaaagtcgatgaactacagaatgcgccttatcgttacagacggcgtgttttcgatggacggagacatcgcgccgctgcccgaaatcgtccggctcgctgaacagtatgacgcatttgtcatggtcgacgacgcgcacgcgtccggcgttctcggcgaaaacgggcgcggaacggttcaccatttcgggctggacgggaaggttcacattcaagtcggcacactcagcaaggcgatcggcgtattaggaggctatgcggccggatccaaggtgctgatcgactacttaaagcataaaggaagaccgtttctcttcagtacttcccatccgccggccgtcactgcggcatgcattgaagcggtcaatgtgctgatggaggaaccttcattgattaaaaagctttgggacaataccgcgtacttcaaaaaagagcttgaaaaaatcggccttccgctgattaagagcgaaacgccgattacgccgattttgatcggtgatgaagctgcggcatgccgcttctcaaacacgctttttgagctcggtttatttgcccaggccattgtatttccgaccgtcccgaaaggcaaagcgcggatcagaacgatcatgaccgcccagcattcgaaagaagagctcgataaagcgcttgaaatcattcaaaccggcgctaaaaaagcgggtctgctttaaactcatcgatttctttttgaacaaagcaaataaccattgataatcattttcagttagtgtacaatgatgggttctgggttgtgctgacaaccgagaacctttatactgaagagtggagctttgtttgaaaggagatcaaaaacatgaatgagaaacagcgcattgaaagcggacaggtcaatccatcggacaaaaaatccgagaaggattacagcaagtacttcgaagctgtttatgttccgccttcattaaaagatgcgaaaaaacgcggcaaagaagaggttaaataccataacgattttaaaatctcagagcagttcagaggcatgggcgaaggacggaagttttacatccgcacgtacggctgccagatgaatgagcacgataccgaagtgatggcagggattttcatggcgctcggctatgaaccgaccgactcgacggaagatgcaaacgtcattttgctcaacacgtgtgcgatccgggaaaacgcggaaaacaaagtgtttggcgaaatcggccatttaaaagctttgaaaaaagacaatccggatttgatcctcggagtctgcggatgtatgtcccaggaagaatcagtcgtcaaccggattttaaagaaacatccgttcgtcgatctgattttcggtacacacaatatccaccgcttgcccgaacttttgtcagaggcttatctgtcaaaagaaatggtcatcgaagtgtggtctaaagaaggcgatgtcattgaaaaccttccgaaagtccgcaccggcaaaattaaaggctgggtcaacatcatgtacggctgcgacaagttctgtacgtactgcatcgtgccgtacacaagaggaaaagaacgaagcagacgtcctgaagacatcatccaggaagtgagaaggcttgcggctgaaggctacaaagaaatcacgcttctcggacagaacgtcaacgcctacggcaaagattttgaggatatggaatacggactcggccacttgatggatgaactccgcaaaatcgacattccgcgaatccgcttcacgacaagccatccgcgcgattttgacgaccatctgatcgaggtgctcgcaaaaggcggaaaccttctggaccacatccatctgcctgtccagtccggaagctcggatgtcttgaaactgatggcgcgcaaatacgaccgggagcgctatcttgagcttgtcgccaaaattaaaaaagcgatgccgaacgcatccttaacaacggacattatcgtcggcttcccgaacgaaacagacgagcaatttgaagaaacgctctctttatacagagaggttgaatttgacagcgcctatacgttcatctactcgcctcgcgaaggaacgcctgctgccaaaatgaaagacaatgttccgatgcgcgtgaaaaaagaacggcttcagcggttaaatgaagtggtcaacgaaatttccgcgaagaaaatgaaggaatatgaggggcaggttgtcgaagtgttagtagagggtgaaagtaaaaacaaccctgatatccttgccggttatacacggaaaaacaagcttgtcaacttcaaaggaccaaaagaagcgatcggccagcttgtcaacgtgaaaatccaccaggcgaaaacttggtcgcttgacggggaaatggtaggagaagcaatcgaggtgaagtaaagtgacgctttatacgaaaaaagagattgttgcaaaagcgcgggagctcgcaaaaatgattgcagaaacggaagaagtcgactttttcaaaaaagcggaggcacagattaatgagaatgccaaaataacgggcataatcaaccaaatcaaagccctgcaaaagcaagccgtcaactttaaacattacgaaaagcacgaagcgcttaaacaaacggaagcaaagattgacgcgcttcaggaagagcttgacgagattccgatcattcaagagttcagagactcccaaatggaagtcaacgaccttcttcagcttgtcgcgcatacaatatcaaaccaagtgacaaacgagatcatcacatcgaccgggggagacctgctgaaaggcgagaccggttcaaaagtgaaaaattcatcaccgagctgttctctataatttggcggcgccttttaaggcgccgttttttttgaattcaatttcccgccgcgacggcttattgaaaagattcgtttttcggctgtctttttcttttctgatttaagtcaagtttatccttttacctgcatacacttaaacagattcattatatgggaatttattttgatttctcaaggaacgcacattagacgaatgcccagcataggataatacgaggaaaaacaaggaggcatgaccgaatgtctgaatacagggaaattatcactaaagcggtggtcgcgaaaggccggaaattcacccagtccactcatacaatctccccttcgcaaaagccaaccagtattttaggcggttggattatcaatcataagtatgacgctgaaaaaatcggaaaaaccgtggaaattgaagggacatatgatatcaacgtctggtattcatatgcggacaacaccaaaaccgaagttgtgacagaacgcgtttcctatgttgatgtcattaagctccggtatcgcgacaaaaattacttagatgatgaacacgaagtcattgcgaaagtgcttcagcagccgaactgccttgaagtgaccatttctccgaacggaaacaaagtggttgtacaggcggaaagagaatttttagcagaggtcgtcggcgagacgaaggtcgtcgttgaggtcaattctgattggacggaaagcgatgaagaagaagcgtgggaagaagagcttgatgaagaacttgaggatatcaatcccgagtttttggttggagatccagaagaataaaaggaagctagggaaacaccgccctagtttcttttttttcagcacgaatctttatggtataatgagtgttggaatcaatagaaacgtttatacatagtgagggattaaatatggcaggctacacgcctatgatacagcaatatttaaagattaaggcagagtatcaggatgcctttttattttttcgtcttggcgacttttatgagatgttttttgaagatgcaaaaaaggcgtctcaggagctcgaaatcacgctgacgagcagggacggaggatcaagcgaaagaattccgatgtgcggggttccttatcattcctgctcttcgtatatcgaacagctcattaaaaaaggctataaagtcgcgatctgtgaacaggtggaggaccctaaatcggccaaaggagtcgtcaaaagggaagtcgtgcagctgatcacacccggcaccgtgatggacggcaaagggattcatgaaaatgaaaacaactttatcgcctctgtcagtaaatttcagcatacatacgggctcgctttttctgatttgacgacaggcgagaatttagtaacggctatcgaaaggcttgatgatgtcgtttccgaaatttactctgtcggagcaagggaaatcgtcgtcagccgcaaccttgacgagaaagacgtcgcaatgctgaaagagcgctgcggcgccacgatctctttcgaggatgaacaagcggatgaagtgcctggcattgtgaacggactggggtccaaagagcttgtcgatacgtttatgaggctttacgtctacttgaagcggacgcagaaaagaagcctcgaccaccttcaaaacgttcaggcctacgagctcgaagaagcgatgaaaatcgatttgtactcgaaacgcaatcttgaactgacggaaacgatccgttcgaaaaacaaaaaaggctcgcttctttggcttttggatgaaacgaaaacggccatgggagggcggctgttaaagcaatggatcgacaggccgctgatcagaaagggacagatcgaagagcgccaggaaatcgttgaaacgctgatcgcccatctgtttgagcgggaagatttgcgcgaacggctgaaggaagtatacgacctcgagcggctcgccggaagggtcgcatacggcaacgtcaacgccagagatttgatccagctgaaggaatcgctgaaacaagtcccggccatcaaacagcttgtcggctccctcgaccatccgaaagcaaaagcgcgcgccgagaaaatcgatccgtgcggcgatcttttgaatcttttggaagacgcgctatacgagaatccgcctctttcattaaaagaggggaacttaatcaaagacggctaccacgcgaaactggatgaatacagggacgcaagcaagaacggaaaagactggatcgcaaggcttgagcagcaggaacgcgagtacacgggaatccgctctttaaaagtcggctttaacaaggtgttcggctattatattgaagtgacgaaagcgaacatccatctgcttgaagaaggccgctatgaacggaagcagacgctgaccaatgcagaacgctacatcacgccggagctgaaagaaaaagaagccctgattctcgaagcggaaaacaatatttgcgagctggagtatgagctgttttccgagcttcgcagcaaggtgaaggaatatatcccgcgcttgcagcagctggcaaaaatgatgagcgagcttgatgtgctccaatgttttgcgacgatcagcgaaaaccggcactatgttaagccggagttttccgatgatgtcgttcaggtgatcgacggacggcatccggtcgtagaaaaggtgatggacagccagtcttacgttccgaacagctgtgaaatgggcaaaggcaggcagatgcttttaatcaccgggccgaatatgtccgggaaaagcacgtatatgagacagatggcgctgatctccattttggcgcagatcggctgctttgttcctgcgaaaaaagcggtgctgccgatctttgatcagatctttacgagaattggcgcagcggatgatcttatatccggacagagcacgtttatggtggaaatgcttgaagccaaaaacgcgatcgtccatgcgacgaaaaacagcttgattttatttgacgaaatcggccggggtacgtccacttacgacggaatggcgcttgcacaagcgatcatcgagtacgttcacgagcacatcggcgcgaagactttattttccactcactaccacgagctgacgtcccttgaagaaaagctggacgatttgaagaatgtccacgttcgtgcggaagaatacgaaggaaaggtcgttttccttcaccagataaaagaaggagcagcagataaaagctacggtatccatgtcgcgcagctggctgaattgcccgacggtttgatcagtagggcgaaaacgatcctgaaagaacttgaatccggcgcaaaagaagccgctccatcaacggcaccgaatatggtaaaagaggcggcggaagaagccgcggcgactgttgcagatcaaccggcccagctgtcattttttgagacggacaagccaatagaaaaagagacgaagctctccaaaaaagagcaggctgttttagccgaatttaaagcgatggatctgctcgatatgacgcctatacaagtcatgaatgaactgtacaggctgcaaaaaaaattaaagtaacaaagaggtgagccaacttggcaaaaattgttcagctgcctgacgatttatcgaataaaatcgcggcgggtgaagtagtggaaaggccggcgtcggtcgtcaaagagcttgtcgaaaatgcaatcgatgcgaacagctccgtgattgaaatcgatgttgaagaagcgggtctcgcctcgattaaagtgcttgacgacggcgaagggatggacgcagaagactgcagaacggcttttttgcgtcatgccacaagcaaaatcaaagacgaaaacgacctgtttcgcgtcagaacgctcggatttcgcggagaagctttgccaagtatcgcgtctgtctcacacttaagcattaaaacgagcaccggagaaggggcaggcacccatttgacgctgcaggggggaagaatcatttccgagcaaaaagcgccaagccgcagaggaaccgaaattacggttaccaacctgtttttcaatacgccggcaaggctgaaatacatgaaaacgattcataccgagcttggcaacatcacagatgtggtcaacagaatcgcccttgcccatccggaagtttcgatcaggctgcgtcatcaagggaaaacgcttctgcagacaaacggaaacggcgatgtccgccacgtgcttgcggcgatttacggcacggcggttgccaaaaaaatgctcccgcttgaagcgagatctcttgactttgaagtgaagggctatatcgctcttcctgaaattacgcgcgcctcgcgaaattacatgtcatctgtcgtcaacggcagatacattaaaaacttcccgctcgtaaaagcgatccacgagggctaccatacgcttcttccgatcggccgccatccgatcacgttcattgaaatcaacatggacccgctccttgtggacgtcaacgtgcacccgtcaaagctggaggtcaggctgagcaaagagacggagcttcacgagctgattcgcgacgccatcaaagacgtctttaaacagcagcagctcattccaagcgtgcaggtcccgaaaaaaaccgcacctctgatcaataaaccagagcagcaaaagcttgatttcgaccaggtacgagaaccggcacctctttctgattctgatgttgaaagagagtataagccggagccttcgttttcggcgatgaaattaagctcgcttgtcaaagacccgccgccttccgctcccgaagagcgcgaagaaaacgtaatgcaggacaccgagcctgaatggcccggagctgaagagtatacgcctgaagccgcgccggccgtacaagcagaaccggaacaggcaggagagaacgtccaggacgaagagacgccaaaagaaagggtgccgatcatgtatccgatcggccaaatgcacggcacctacatacttgcccaaaatgaaaacgggctgtacatcatcgatcagcacgccgcacaggagcggatcaaatacgaatatttccgtgaaaaagtcggggaagtcgaatcggaagtccaggacctgcttgtgccgctgacattccattattcaaaaaatgaagcgctgacgatcgaccagcacttggacgatttagccaaagtcggcgtctttctcgaatcgttcggcgccggcagctatatcgtccgatgccacccgacatggtttccgaaaggggaagaaacgacgatcattgaagacatcattcagcaggtccttgatgaccgcacgatcgacatcaaaaaactgcgcgaagaagccgcaatcatgatgagctgcaaaggctccatcaaagccaatcatcacctgcgggacgacgaaatcaccgccctgctcgatgagctgcgcagaacatccgaccctttcacatgcccgcacggtcggccgatcatcatccactactccacctatgagatggagaagatgtttaagcgggtaatgtaatttttaatcgctcacaacctttggtatatcaatggctgtgggcgattttgattttattgaccacattttgaccgcattaacactagacggcctgctttaaatcttgccgtctgtaagaagacaattaggaagcggcacgtatatcgtccgggtattctgttttatggatgattgtaagctataattctaagaaaatttggataaccaaaagagggcttctctttgagatcaggtctcataggcaaccattagtcagatttcgcagctgttttcatttttctagaaaatgttataatgaaaagccacgaaatgacttgaagagggggaattttgatgcattacataacggcatgcttaaacatcatcagcgataaagaccttaatgaaataatgaaggaattcaaaacacttgaggaaaaaacgaacaaagaagaagggtgtattcaattccatgcttatccgcttgaaccgtcggagcgcaaaataatgctctgggagatttgggaaaacgaagaagctgttaaagcccatttcacgaaaaaacacacaaaagatgttcaaaatcaacaattaacagaagtagaatggttaatcaaaagcaatgtgaatgattaaagcgcgaaacattcaatgacgaaaaattaacccccgtaatcgagtggaaaattgttggaggattgttgtccaacgctgccaacagtcatcattttcatttagaaatcatcagattattcatagcagtgattagaaaatttttttgtccgaggtactgtaatgatttgattcactgcatgatatgaagggatacaaaaagctcggttctgtcgatgtcaccgatgaaatcggtacaggcaaggacttcatcggcggttcgtacatgctttattcaaacggtcaaattgtccgaaaatacatatccggcggtgaagtgaaatacgaacttgtcagtcgcataccggaaagcagagtgaagaaaagcaacattgaaaaagctcttgattgggctaaagacacagttggggaattgtccggtggttatgatggttatagagcgataacaggtgttgaccctgtgactggtgaaaaactaaccgtcactgaccgtatcctgtccggtgtttctgtcatacccgctactaaagtagtcaaggtagggaaatatgctttcaaagccactaaaggtgcgaagacggcgaaaagggtttcgaatgccgagagaagtgctaatgctacgcctaaaattaatagaaaacaagctctcaatcaggcaaaagacttagctggcaacaacctacacgtcaatggcaggttggcgatgatataactaagaagggtgtagactataaaaactataaatatagttcaaatccaacccatcatggacgttactatgagtacgaaactcctgaaggattaagagtggttgttacccatactaacgataacagattacacgcacatgcaggtaagcctgacaaagaggcaaatcaattcaactatgactttaagaaagagagatatactaatatatacggtcctaatggagaccaccatatatactataaataaaaggtgaggaagttatgtcgtctcgtaatgaaattattaaacaaaaaaaagcgataatgaatgcaaggaaatcgatgaaggaatttacttgcttagaactattagattttgaagagtttgattctccttggatagacttgttcgagccattactaaaacaatttcgaagaatagattccaaaccaacttattataaattaattggggattctaaagaaaacaatattttatggatagaaaattccctaagtttccttaaacaaaaaaaagagtggtttatcgttgttcccaaatgtttacaaccagtgtgggcaaatgttcgagttttagactattctaaagcaattcatgagctttgggaaatgtcagaacctgataatttcctaattgctgataaatctacaggaatgattgcaaaaattttttttgaagaacaacaatacgagatccatattggaaaatgtagtcttgataacattaaaaagaataactaagagaactatttaaacaccttgattggcaactgcctatcaaggttttttcatattcaaatccgacaaaaagggggataaaatgggggactttttctattccactttgtcatacgatagagacaagaaaaacgaacgtgaatatcgagtccaagaaggagagcctgcggacactgaccttttgcatatggatgttgtgcagctgattggtggccgcttttttattggccagaatgggagacgcacctttcccttatcaagtgtgaactcggatgtatcgaatgatgatgaaggtcgtcagcttcacaggaggaacggctggaggctggagtctatgcaggattgcgcgcgatagtcaggggacgcagggaagtccttataagaacaaaaagaaaagcaggcaaataacctgcttaaaaactgattttgcccttgaaatagactcgcaaaatcaaatctcgggtctttctgttaagcaaagagagagccaacaaagcgagaaagagttactttgcgatgcaatttttaaattgccgctccagttcctctttgtccaagtcctttccgatgaaaacaagttcgctttgttttttctcgttttcgttccacttccggtccggacgtcctgaaaacagcatatgaagcccttggaatacgattcgatattcttcgcctttaatataaaggatccctttataacgcaataaatcttctcctttttcccgtacgagataactcatccaatgatccacctttgccaaatcaagaggcttctcttcccgaaaagcgatagaagacactttatcatcgtgatggtggtgatgatgatcttctagaaaatgaggatcgatttcaatttttcgattgacgtcgaacgtattgatccccagtatatctcttaaattgaccttgcaatctctggcatgcagcctcttagccgtaggattaatgttgacaagtctttgctccaaggatttcagctcgttattcgatactaaatctgttttattgaggatgatgacgtcagcaaatgcgatttgctcttgcgcttcatcctgatcatccagatgtctggtgacatgcttgctgtctactaccgtgacgatgctgtcaacttcaaatatttcggatagcagttcatccatgaaaaacgtctgggcaacgggggcaggatgagccagtcccgttgtttcgattaaaacgcgatcaaatgcaactttcccttgatacattgagaatacaagcgttctcagaatgcgaatcaaatctccgcggaccgtgcaacagatacagccgttgttcatttccaaaatttcttcttcagaatcaacgacaagctggttgtctatcccgacttctccgtactcattgacaataaccgcgatcttttgattgtgcttttctgtaagtattcgatttaaaagtgtggttttcccggcgcctaagtacccagtgagaatagcgacaggaattttctttttagttataggcatgatcattcgactccatttaaaattttttcgatactttgattactttttcttttggaactacggagatgaggccggatgaacgttcgaagcgttggccgtcatacaaatggcttgctttttctttataatcttcattggtacaaagcgagtcaatcaggagggggacatcctcaggtattaaatctctataccaagttcctctcgggtaatggatggccacgcacttatcttggcatcttccattacaccgcgtgcgcgttgtatgaatgacatcgtcaagctcccggtccgagatttcttgcagaatcacttgagtcagttcctcagctccggcccgattgcagctgctgccgttgcagataaaaatatgatgtttcatattacttaaatcccatgtcgccatatgtatcttccctccaaataaaacagaattattccgatttgtaagcgataaaatgataaagaactgagaatgaatatagaggcgccccggtcgatcactgtccgaaaggtgatactcataacggggagacggccccggcaacatccgcagtatttcactcctttcgaaaagctccatatatttcagccttcttttgcgcctttggttatttcaatactacaacaaaacgtaattattacgatttgaaaatcattttatctctttttcaagtcaaacgcaaatagaagaggttaaacggtgccaatgagatctgtgcagcttctttatccagccgcaccttggcgcaaaaaccccttgagcaatcaaggggttttttatctatagcaatttttccattgccattacatcgataaaacgtccatctaaaattccttgatttttaaagatgccaacttgcctgtagcccattttattgtataggttttgcccaagttcgttaaagggaaatgtaaagaggacgattttataaaaactattctctttagctgttttttctagagcttgaagaaggaggccgcctattccttttccgcggcatgcacgatcaacatagacagaaaggtcggcaacaccttgataagcacaacggtgggagtacgggttcaaagaagcccagcctacaatttctccttttgattcggccacaaggacagaatagcgcccttgatgttcctgaaaccatatttcgatatcgctcatttcctttaaatcttgctccagagtcgcaattcgatcttcaatgccctgattataaatagttaagataaatggcaaatcggcagaaatagcttttcgaatgtttatgttatgcatgagttcctccgtagaaggacttcgagtgcagcatcatatgataagttggtcactaaattgtccgcaagtttttgaaagcgcgttcgttattgtttgcttgacggatctaagcggaattggcaacagacagggtaaaagagagcaggcctaagctttgctctctatttttttgacacttcatctttgaataaatgtttcaatttcccgttacttgatatcgatggccgaagctttattgtcccaatcagaagccatattagcagttttgccgtaccaatcggaatgtctaaacaaaacgcctttgccgtatccttgagttgaagtatgctcccacagcgtcgttgaatagcttgatgaaggagacgccgtacttaacgatgaaattctgtcattccagctggatggcaagtttttaaatccgtctctccagtaaatatactgcccgcctttatttttatattcatagaaatcggtacagcagggaccgctggcagaaggtttgaattgcttctcaagcctctgcttgtctttcgcgataaaggcttctaaagtaaccttgctcgtaaatccatacgcaagcaaatcgccgttcttattctgcttgggcagaaccatggttactttgacatctctgacggatttggcgttggcttgagccggcgaatccacattttttccgtcaacggttaagtagtggaaagatttgaccgtatattgattccgctgctgatcgtccagtttcactttaacatcgctttcattttgcgacgcagcgcttgccgtcgacgcggaaatcaaacaggcagcggcaacgagtccaatcccaattgttttcttgaacttagttttaaacatataacaacactccctctcttaattttcctatttattaataggatggaaaaataatagcattaatagaatgaaaatcatgtctctttttgaaaaaaacattaattttctattaacattcagcagcaggagaggttcggtatctgtattgcattaaaaaaaggctcttttttaaaaaagagcctttcatgatggagtcaacaacggtaagcaggaggagaacatgtaaaataaggagaaggtcataagttattgctgacttttaaaacgaactttttagtagcctccatatccaccgccgaaccagctggcgccgatgatgattaagagaatgaacagaacaacaattaaagcaaaaccgcttccgtgtccgtaacctccgctcatatgtttcacctccctaaagagacatagtttatcctatgtcactttataaatttggtataggatattgatttacatttttaagaaatagttgaaccaacttcaccctcatgcgagtctcagatgaagagccgactatcatgaggacttcgtgcagagaggatgaaaatggtgattggcgtcctttaaacggaatataatgcaataaatccaccgaaaagggcgctgaataaattgaattttcaattaactgaaaaagacatgcttcgtatcatcaggaatggtcttcaaacggcacagtaccctaagcatatgatgatcgttggtgccgggttgtccggacttatcgcagcgtctttattaaagaatgccgggcatagagtgacgattgtggaagcaaatgacagagcgggagggcgtgtttttacttcccgtgcgccctttagcgaagggttgtatttcaatgccgggccgatgcgcatccccgatatccatactttaacgatggaatatattaagaagtttaatctgcctgtcaatgtgtttatcaaccgaacccccatggatattctttacgtcaacggcgtgaaaacccgtcttcatgagtttgaaaaaaatccgggcgttttaaggttccctgttgctccccatgagcagggaaaaacggcagaacagctgatgctttctgctttgcagcctatcctcaattttatcagccaagatccggcgagaaattggcgtattgttgaaaaacaatacaggaacgaatcgttaggatcttttctcaacactcatttttcaagcggttccatcgatatgattggtgtgcttttggacatggaagcgtacatgggattgtcccttgtcgaagtattgcgggaatcgattttttttacatcgccgactcgcttctatgagattacaggcggcatggacctgttgacgcaagcttttcttccgcaattaaaatggaatattttattccgtcaaaaattgatgaaaatgtctcaaactaaaaacagtgtaacagcccattgcattcaccagcagtcggcagaacattcagcggtgacaggtgacttcgcgatcgtaacaatacctttttcagcattgcgatttgtggcatttgagccgtttgaatccttttcctaccaaaagcggagagcgattcggtagcttaactatattgcggcgacaaaaataggaatcgaatttaagagcaggttttgggaaagagtcggacagcgcggcggcagatcgattaccgatttgccgattcgcttttcatactaccctagcagcataggaggacacgggcatgctgtcattttagcgagctatacgtgggctgatgaagcgctaatatgggacagtcagcctgaagaagagcggatccgctatacgctgaaaaatttagcgaaaatatatggagatatcgtgtattctgagtttgtatcaggcgcttctttcagctggacgcaaaatcctttttcagccggagcatttacagctttcgaaccagggcaggaattagagttgtatccttatattccgatgcctgaaggaagggtgtatttcgccggggaacacgcttccctcactcatgggtggatgcagggagcgattgaatcgggaatacgggcggcgtatgaagtaaatcaggcctcccgcgtataacatgaactttgcaagtattttaatagaaagaaccgattttaggggatggggaagagtcgctgttaaaaagcggcttgttcgtttttattgagttaaacagacggatcttccaataaactccgccttctgaggggaggtaaatttgtttttgcttcctcaacagtaagaagtgtttccattcgtaaaaacaagtttttaagaacttcatttataaaaaattttaatgcttatgatacaattgaattgcagatgtaactcgacgagcaaaaaagtgttttgctgaggtgaatgatcggattgcccgcattttttcgttaagaaccctcctttttcttacaacaaaaaaagcccccaaaacgagttttcccttaggaaaggctcatgacataccggatggaatgacttaacattctgccgggcagaatagctaagaaaggattgaatcacattgaatgctgctcgtgatcgaaacatcatgcttttgcttctctgtttgacagcaggtattgtagatgtgattgggtacttaagtatcggtcacgtatttaccgctaatatgaccgggaacatcgtactgttaggattatcaatcggcaattctcttcatgcgaccgccgtgtactcgctgatcgcactgttcggatttatcatcggcgtgattatatcagcagccattgtcggaaaacaggaaaaatcgttctggccgacaggcgtcacgattgcacttgctgtggaagcagccgtattgcttctatttgcctgcctgactttctttgaaagttcgccgcaccttttaatcttgctgttaagcattgcgatggggcttcagactacggcagccagaaagctcggcattgcagggatttccactactgtcctaacggggacgctggcaaactttttcgaagatgtgacaaaacgattcctcagtaataacaaccaaaaggtcatccataaggacgcatggcttcgcgctttgacgattgtgctctattgcctgggggctgtcattgccgcacttgctgaacctgagcatccgtttgttgtgatttggattccgatcgttatcattatcggtattattgcggttgcaggcacaaggtttcacggaaagagtgagggatgaccagatgaaggacggttctatacaccggcattcgtgaaccatcgattgttacatatgttttatgaaggtgcaagtccgggtaataggacggggaaaagcaccagtatcgcttaagattgggaggaggataaatggttggaacacattaatatggagcagtttattttattagcggccttattgctgattatcggtgtactgacaacgaaattttcgactaggctcggagtgcccgcccttgtattgttcttgattgtcgggatgatcatggggagcgatggtctcggaattatttattttaataatcccgagcttgcccagctgattggaattatcgcacttgtcgtcatcctttttgaaggcggtttgcaaacaaagtggtcttcggtcaaagcggtcgccgttccttcattgtcgctcgcgacgattggcgttttgctgaccacctgcgtggttgcggttgccgccaagctgatttttaatgtttcttggatggagggctttttattcggagcgattgtcggctctacagacgcagccgcgattttcgccgtattgaaaggccagaatattagagacagattgagctccactctagaagcagagtcgggtacaaatgatccgatggcgatgtttttgactttatcgctcatccagctgctgacggctgaccattcatcttatttcatgcttgttatttcatttttctggcagatgggaatgggacttttgctcggatatttactcgggcggttcgccagctttgccatcaataaaatcaacttggattcgagcggactttatccgatcttcgctcttgcttttgcgcttcttacctacagtcttacagatgtcatcggggcgagcggcttactggccgtctacattgccgcgcttgtcatcggaaatcaagatttgacttaccgacattccattttcaggtttaatgaaggctttgcctggatgatgcagattttgatgtttatcattctcggattattggtttttcctgcccaatttttatccttcgatattattttcaagggcttcttgctttccctgattttaatttttatcgcccggccggttgccgtttttctgtcgaccatcaaaatgggctttaattttaacgaaaaaatcttcttatcatgggccggattaaaaggggcagtcccgatcgttcttgcaacatttccgatgacgatggggcttgaaaacagccaattgatctttaatgtcgtattcttcgtcgttttaacatcggctttgatccaagggtcaaccatatcggtcttcgcagaaaaattgaaattgaacggaccgcagaaagtagaagcgccgcattcgctggagcttgtttccatcggcaaggcgaacgccgaaattatcgaatttgaagtcgatgaccaagcagccattaccaggcagatgctgaaagacatcagctttccaaaagatgccctgatcaatgcgatcatccgaaatggggatttggtcacgccgcatggagaaacgaaaattaaaccaggcgatattttatatatcctcgtatcgaaaaaacaaaagaaggaactgaaaaaatttttaaacagagaatttgattaagccgtcggaaaagcacagtacaaggcaggcttgctcagtatgtcacgaataaaggtcaatgaagggtactgcaccggtattcttcattggcctttttttgccatgtggaagttcagctatatgataagtgacatttagacctttgttgatcaattgctcatatccatttataatttaaaaatcaaatattaggaggcgcatgaatgatgaagtgcaaaaaaataagtgggttaacattcgaggggaaagcgcatcattaaccctataaactgcgtgattcccctttaattttgggggtatcattcaattgaaaaacagtaaaatacaaacctttaaacatcaaaagaaggcattttggtggcttagctttgtcgctttcttcagcgtgatgaacgaaaccgtatttaatgttgcattgccggacataaaaaatcaattcggcgtgtcgcctgcggcggcaaattgggtgaatacgagtttcatcatttcctttgctgccggttcagttgtttacagcaggctttctgatatgtacggcgtcaggaagctgtttgtggccggactgttcatctatggaggaggctcatttatgggtttgttggctcaagcttatttcccggctgtgatctttgcgcgctttgttcaaggatccggggcttccgctgtacccgcgcttatcctggtcatcatcacgcgctatgtccgtccggagggccggggcaaagcattcggcattgtcggatcactggtggcaatgggcgagggaataggtccggccatcggcggaatgattgtacattatattcattggtcgtttctgtttattctgccgatggcagtgctgatggcgattcctttcttctttagaaatatgcctgatgaagccgctgcaaaagcaaacctggatatcattgggatcggactgctgacaatcagcattgtgatgttcgctgtatatatatcgctgtatcatgtcttttatttactggcgggcattttttgcttgattggagctgcagttcatacccgacatgcagaacatccgtttattgaccgttctttaataaagaatcgccgatatataggagtcgttttggcaggatgtactgtattgggaagcgttgcgggaatcgtctctgtcgttccttatatgatgagagtcttgtttagcttaaatgccgatactatcgggagcggcatcttacttccgggcactgtgggcgttatctttttcggcgttgcgggcggagcccttacagatcgcttcggcagccggtttgtttttactcttggatggttattgatcttgtcaaccatggcagccgcgtcacaggtcggcgaccggacaccatggttgatgacgattatgctcgtgtttatatttggcggtctttcatttgtgaaaacggcaatttcaaacagtaccgcagaaagcttggaagaaaaggctgcaggcgctggaatggggatgctgaactttgcctgttttttatctgaaggaataggcgtcgcattagcaggaggcttgatggcagtgcacgggtttggctattctgcgcttccggcaatgaacgatgcctggagtgctgtattcagccgctcgtttgccatattcacagtttttgtattggctggcggattgctatatttattgacttgcaaacgcaaaaaatcttaggatattcgagtggttgggcgggaaagcccagccgttttttatgctgactcgattttctgaaacataatgaaaagaaaatcgtatttgatgtaaagcttcttgagaggatgaaaatgatgaaaagaagcatcggcacctttgaaattgacggactgacaattgaatattcgcgagtaggtgaagggaagccgattcttgtgatgcacggaggtcattcgaattgccgcgaggaatttgggtatcgagatctttatgagagccgattctctatcatcacgccttcccgtgcagggtatggccggacatcgaaagaaatcggggacagtttggaacttgcctgctattactatatgaaactgcttgatcatttaaatatcaagaaagttcatgtggttgcggtgtcagccggcgggccaagcggaatatgttttgcatccaaatactcggaaagagtagaatccttaattttgcaaagcgctgtcacaaagcagtggctgacagcgaaggatattgaatataaagttggtcagatcatctttcggccgcctgttgaaaaggccgtatggaagctgatatcggcgcttaacaatcgatttccggaatggatctttaagaaaatgctatcctcctttactacacttcctgctgatcaggcgatgctgaaagtcacggagggagatattgaagaaatgagaaaaatgaacaacagacagcgttcaagtcgagggttcttgcttgatttaaaaaatatagacgatttatctttccatcatttgaaggagatttcttgtccggtattaattatgcattgccgatatgatcgtgttgttccagccgagcatgcttttcatgcaaaaaaactgattcctttttcagaagtctatcaggcagacagctggggtcatctcatttggctgggaacagagggtaaatctgtctcacagaaggtcatcagctttttaaaaaccacatcatcttgatcataagatgaataaaattttaggatcgcagcctacccgcaaatgaagtagtgcaattttttaatcaagagcagaatgatctttccgaacagaactgatgaacgtcgtacaagacttgcaaataagatgaatgagaaatcctccctggccggttttcggagcacaagggaaacttatgtataagaatctattccgatagagggacaggtacgggatgaatcattgattaccgttgcctgcgatttcccaggggggagagagttggtaaacttgatatcatccgcgggtttgctttgcttggcattcttttagcccatagggaagtcgtctttggctgtggatatttcaatttgggcctgctgaatggatatggcgcagtttggcttgcggcaagcggcagcttcttcctaaactcgcgattgaaacgatgcggctatgcaatatggtgaaacgttgcatgaaaaacttaacattttaaaaatccagccgatatgatgaataaataactgcacgcttccggcaaatgtggtatggtagctagtaagtttaggaaaagggaggatattgatgatcatcgtcacaacagatacaatcgcaaatcaaaacattgtcgaagtcaaaggcttgtcacaagcagcatcgttcagtcgcggaatatcggaaaagatattctgtcagggttgaagtcagtcattggcggagaattaaaaaattacacccaaatgcttgaggattcgaaaaaagctgtgagggaacggctcgtgaatcaagctgaagagcttggagcaaacgcgatcgtcggtctaaggttcgaactgtctgcaggccagggaacctccgaactcatcggatatggtacggctgttgtaatcggctagcttgcaatcgaaaacgaaggaggcggctctcgttgccgcctcagcgagtcaagaaggcttccctgtctgtttcgtctctttatgtttttgagtcagatggggatactttctgtagatgacaaacgctatgatcgccatatataagccgtagacgccgacagagagcagcttgttttcgctgaaattggcacctgcgatagagacgacgagaacgttggggacttttccaagcgtcgaagccgcaaaaaagacagcccatttcaccttgcttaaaccgcagacgatattcatgacaacggctgggataaccgggatcagcctgcccaatagtacggctgtaaaagcattttggttaaaatacgcttcatattcgctcattttcgggtatttcgttaagtgtctgcgagccatgtctctgaatccgtaacgtgagaggaaaaacaagagcatggtgccgagcatagaccccgtcagcgtgatcagcacgccgtttgcgattccgaacaaggcgccgtttaatccggcaatgagcgcaaacgggacgatcgggaaaaatacacaggccgccacaagcagcatgctgaataataccgaataaacgcctccgtccctgatgacgtcgagccaggaatctttgcagacgaatccgaccgcgatgatacttgccatgatgatgatagtgaatagttttctgatcataccgctcccgctgcctttctttgtctttagcttctacatttgcaataaagcttcttctaagtgtgccaaaatctcgtcagtttttgagaggttgcaattgctgagcataatcagcacttttttctcatccatgtatcggttaattgagctgataaaaccgtggatttctccatcatgccatattttatacttattttgatgattaataaaccatccgtatccgatcgaattgttttgaatgagcgccggagaagggccttcggctgcaaaagcctgctttttgacgcggctgtaaagggcttctttcaaagcatcttttgagacaagcttctcggtgtaaagcgccctgtcccataagtacaagtcttcaacggttgaatacagcccgctttccccgtagccgtatacgataggcgctttgatcatttcacgattcaggcataaatatccgactgtaggcgaaatatcttccggagaagagaaaaaaccggagtttttcatgcctaaagggtcaaagatcaattgttgaataacgtctccataagcttcatttgtgatcgtttcaatgatttttgtaagcagtatgtatcctgaattactgtaattgaacctttgtcccggccgaaattcaagcggcttgtcaataaaacgtctgataaattggtccaacggtgcgcgctccagctcaatatcgagcaattcttcctctagaaaatcaggaattccggacgtatggcttaataaatgtttgatggtaatgctgtcgccgttcggatagccttctaaatagttttgtaccgggtcatctgtacgaagcagccccttttcttgcagctgcatgaccgctatagctgtgaattgctttgtcagtgaggcaatttggtagcgtgtagacggttcattcttcaccttgtccttacaattggcataaccgtatcctttcgataacagtataccgtttgaatctgccagcaaaatgctgccgtgaaaatgattgttggatgcttgttccattaaataatcatcaagatgttccgctgtatataccaataacaacagtcctttcatatctaattatgataagaagaaaacaataaacgatagttttgaaaggaaatgaagcaggaagcgcgaccaaaataacattataaaaatttttttgtattttccatcatttgcagaataatttaagctaaatttaaaataaggcaatttcatgacatccgttaaaacgagtgctgttttgacggatgttttttattataaaacgattgaaatataagtcggcagtaacgaaaaggggaataaagtcgtacacagccttaaactaagggctaaagttctgtgtttttttgcaaggaaaaggactatattagtattttttaattttaatttaattttgaagggtttttcctttatgatctataatatgttatttaacatagtgaaagagatttttaaatcttcggtgctgtcatgaagcaaaaataacgggaggttaagaaatgggacaaaaacatatcgcgatttttaatattccggctcacggccatattaatccaacgctagctttaacggcaagccttgtcaaacgcggttatcgggtaacatatccggtgacggatgagtttgtgaaggctgttgaggaaactggggcagagccgctcaactaccgctcaactttaaatatcgatccgcagcaaattcgggagctgatgaaaaataaaaaagatatgtcgcaggctccgctgatgtttatcaaagaaatggaggaggttcttcctcagcttgaagcgctctatgagaatgacaagccagaccttatcctttttgactttatggccatggcgggaaaactgctggctgagaagtttggaatagaggcggtccgcctttgttctacatatgcacagaacgaacattttacattcagatccatttctgaagagtttaagatcgagctgacgcctgagcaagaggatgctttgaaaaattcgaatcttccgtcatttaactttgaggatatgttcgagcctgcaaaattgaacattgtctttatgcctcgtgcttttcagccttacggcgaaacgtttgatgagcggttctcttttgttggtccttctcttgccaaacgcaagtttcaggaaaaagaaacgccgattatttcggacagcggccgtcctgtcatgctgatatctttagggacggcgttcaatgcctggccggaattttatcatatgtgcatagaagcattcagggacacgaagtggcaggttatcatggctgttggcacgacaatcgatcctgaaagctttgatgacatacctgagaacttttcgattcatcagcgcgttccacagctggagatcctgaagaaaggggagctgttcatcacccatgggggtatgaacagtacgatggaagggttgaatgccggtgtaccgctcgttgccgttccgcaaatgcctgaacaggaaatcactgcccgccgcgtcgaagagcttgggcttggcaagcatttgcagccggaagacacaacagcagcttcactgcgggaagccgtctctcagacggatggtgacccgcatgtcctgaaacggatacaggacatgcaaaagcacattaaacaagccggaggggccgagaaagccgcagatgaaattgaggcatttttagcacccgcaggagtaaaataaccatttaaacgaacccgggaatccccgggttttttgttgctgccgtaaggaagcgggaaaagtatacagcggcgctttttgaacatactaccttctattaaatgtattaaaaaggaggaagtgttttgtcaaatcagggcaatttcaaaaaaacgatctctctgcttgacctgattttgatcggcatgggtgcgatattcggatcggcttggctgtttgccgtcagcaatgtcgcttcaaaagccgggcccgctggaagcttttcgtggattatcggcggcgtcattatccttttaatcggcctcgtttatgccgagctgggagctgcgttgccgcggacgggcgggattatccgctatccggtgtatacccacggccaccttgtcggatatttgatttcatttatcacgattgttgcctatacaagcctgatttcgatcgaagtgacggctgtcaggcaatacgtagcctattggtttcccggtttgacgataaaaggttctgaatcgccgacgattatcggctggcttttgcagtttgcgctgctttgtttgttctttttactgaattattggagtgtcaaagcgtttgcgaaatcaaatttaattatttcggtttttaagtattttgttcctttgacaatcatcatcgtgttgatattccattttaaatcggcgaactttgcgggagaatttgcgccgtttggctttggcggggttcagacatccatttcgaccggcggggtgatgttcgcatacctcggtctacatccgatcgtttcggtcgccggcgaagtgaaaaatccgcagcggaacatcccggttgctctgctgatttgcatcattgtttcggcttgcgtctatacgatactgcaagtggtgtttatcggagccataccgactgatatgctaaatgacggatggaaagcgatcggcagggaattttctcttccgtttaaagatatcgcggtgctgctcgggatgggctggcttgccactcttgtcgttctggatgcgattttatcacccggcggaaacggcaatatttttatgaatacaacatcgcgcttggtttatgcatgggcgcggaacggcacattgttcaaaatctttgccaaggtgaataaaccaacgggaattccgcgtccgtcgttgtggctgtcgtttgcgctcgccgttttttggacgcttccgtttccgtcttgggacgcgctcgtcaatgtttgctctgttgccctgatcctctcctatgcgattgctccggtttcagcagcggcgctgaatgtgaatgccaagcagcttaaaaagcctctgcaaatcaaaggaatggctgtcatcgctcctgtctccttcatatttgcgtcgtatatcgtctattggtcagggtggaacaccgtgtcatggctgctcggatcacagcttgtgatgtttgctgtttattgcgcgtgtaaaaaatacgttccgcaggacgatgtttcgtttgcacagcagcttaaatcaagctggtggatcgtcggatattatgtgatgctcctgattttatcgtttctgggctcattcggtaacggccttggcctattgagaacgccggtcgatttaatcttgatcgcgctaggatcgattgcggtattttactgggcgaaatatacggcgctgccaaaggcagtcattgattatgatgagaaaaaagaagaaaccgtttaagtatgaaaaccaagctgtatggactgcggggtattcacacgtttttattacagttgcggaagatctttagccgtttcggcagctttggtatcaatctgaatttgttcagataaattcgcaggatggtaataccctttggaaatcatatagtttgtgatctgttcatgggtgtcaatcgcgtcgtttaaatactgcttaagcgtttcgcgcacttctggagaagatgtttccgtgatagctgtggcaatgtttttgacaccggtttttgccgagattaaaaaatcggtggcaatgacttgttcagtcatcgcgcccatgcctgtcatgttttggatgaattcgttcatacggtttcacctctcactgacaatagaccttgtaaatgctcgatctgatgctttgtttgggatgcatcacgctccaagatgtcgcgaagctcttgatcctgaaccattcccgtcattgttgatgactttgtcagacaaaggtttttaaacattaacagctcatgcagctccaatgtttcatggatcgcattattcaatcgcaaacattcctttcaaatttgttattgtgtgaaggacacatctttagtatcaaaattcgttagcgggattattcggtttgttattttacaataaatcacataatgatgtcagacttttcggacgcgaaagaatttggtcaagagccatgttccttgcggaaaactgagtgtgagctgccagacgccgccgccgtcaagtccgtattcggtgatcagctgcagtttttttccgatgctgcgtgcgtcttcaaaccatacgacatgccgtctgccctgttcatcggtgtatctgaaaaaaggggactcagaatttgtatcatattgaatcggtgcctggtgcttcatggcgagctgaacggcgtcttggttggcgattccggggtatacggcaccgggctgatagggcagggtccagttatagccgtaaagcggaaagccgagaacgattttttctttggggacatggcggagagcaaattgaattgtttgccggacttcattgatcggagcaatggggccgggctcgcttgtcccgtggtgccagtcgtatgccatgatgaagataaggtcgctcactgcgccgattccgccatagtcataccctttcagccaggcgatattttcatttgttttcggcggaacggcaatcgtcaacacatagccggacggcttcagccgctctttcaacaggcggagaaaacctgaaaataaatctctgtcttcctccaaaatctgttcgaaatcaatattgacgcctgaatatccttttctggaaatcgtttggacaatattgtcgatgaggcgatttcttacggcaggctgatttaatacgcggtgcgcaagagacggactgaagcctgattcagttagattggtgactgtcatgaggggaggaacgcgccgtctccaagccgtttgtacggccggtgaatcattcagctcgcttaacgatccgtcgcttgaaatgtggtattcaaaaaatgccagatacgtggcgcatggggcaaaattatgaatcaattcctggtctaaccgggggtttctcagtgtgtaatatcctaaagcagtgatcggttttttcggcaattccggaatcatcacttttatccccggcctcatattggaaggggttacagacggatttgctttttgcaatgcttcgacggatacaaacgtccggcgggcaatcgtgtaataactgtctcccggctgaacggtatatgtataaagcggtattaaaagagcctgtccggggacaatgtttgttgcgatcaacccattcgccaatcggatctggtcaatcgaaattccgaacttggcgccgatgacaaatagtgaatctcccggctggactgtataaataaacaactggcacacttccttttgttcctctgtatgttacagggggttttatgctatgtctatgaccgttaaagaaggatcatgcgccgttttttacagctggaatggtgaatagaaccgtgaagcggataattcttgactgaacagtctagaaagtgtatccttcaaataaaggaggtgataggggcttgggaaggagcaaagaatttgataccgctctcgtccttcataaagcgatggaggttttcggccaattcggctatgagggggcgtcgatgcaggagctgctcagccgcctgggaattgccaggcaaagtctgtacaatgcattcgggactaaaagggatctgtttatcgccgcccttacaagatatctagatgataaaaatgcgcaagtgatcgccatgcttgaaagccccggatcagtgaagcaatcggttcggcagatcttccaggaaagcttaaacgttctgaaagaccccgaacgttcaaaggcatgctatatcatcaacagcgcaattgaacaaattccccgcgatccggaggttgccgaatacttcgataagcagacaaagcagttggaaaccgccttttacaaagcgcttgtccgagcacagtcacagggggaactaaagaagggcctccatgatctttcagcagttgcccgttttttgaatcaaacccggctgtcgctcacgtttcaggcgaagttaacgggggattttgatgcccttcaggatctgatcgatgtcagcctgtctattcttgattgatatattgtttgtcatggggagatgggctgctgcccgtttttatcactattttagactgattggtcaaaaaagaatggaggaaagaaaatgacgcgtgcgataaccgatgtgatggaactgtttttgcagtcgatgcttgaaaaggatatggaaaagtggatacagctttgggatcaagatgcggtgtttgagcatccatacgcaccgccgggttttcctaaaaaaatagaaggtaagtccgcgatttacgattatataaaggattttcccgaaaaaatcgatattgtccgctttacagcgccgactattcatcaaacggcaaaatcgggctattcggctgtcgaatttgaatgtgaaggcattgtgtgtgagacgggtcttccttataaccaacagtacatcagccttgtaaaccttaaagcgggcaaaattgtccactacaaagattattggaatcctttgactgtcgtcaaatcgttcggaggacagctgcaaacctttttataatctgacaaggagtgatgaaagtgggaaaaaaatattgattaccggcggaaccggtacgacagggagccgaatcgccaaaaggctcgtgcatttgggtgccggcgtccggatcgcaagccggagaatacctgcaattaccggagcagaacatgtatattttgactggaatgatcaaacaacttacaaagacgcattaaaaaacacggactcattgtatttggttgcgcctgtcggtgtatacgaaccgtcgccaatcgtactgccttttttggaaatggcatcggcattcggcgtccgccgcattgtcctgctcagcgctgcaattattgatgaagatggaccggttttcgggaagcttcatcacgcggtcaggcgatatgttcctgaatgggcggtgctaaagccttcatatttcatgcagaattttgaccatcagcatggcgcttcgattcgggagaaaaatgaaatcgtcaccgcatcaggcgacggcaaagtcgggtttatagatgcagacgatatcgctgaagtagctgtgcgcgcattgcttgatcaaaagccgcataatacgagccatattttgaccgggccggaagccttgagttatgccgaagccgcggcaatcatcggcagagcggcaggccgcgacatcagacatgtcaatgtcgaagtgtccgcgttgagaacaaggtatataaaggcaggattatctcccgattatgccggcttcatgtcggaattagatgagaaaatcaagaacggcaaagaaaaccgcatcacggatacagtggaacgcatcacgggaaaaaaaccgcgttcactggctgatttcgctaatgaacacgccggacgctggcgtctgttttaactcgttcctgaagctgaacggtcttttctcttcatttttgaccgttcagtccaattaataaaatgtttcgtttatttcccatgactcaactgtacagtaggccaagtgagggttcattcccatgcccattaaataagccattgccgctacttcttccatggcatggtgataggaagtggcttgggcttcatttaaaccgtaatgaacaaaaggtgctactgtgcacaacgtcttatgtttcaagtggggaaacaacggacatttaatgtggtgcaaggcggtttcgggatgctgatactgggggatatgcgtatgctgttcgggaaccgccgtctgctgtaaatgttctgcattctccatttctttcgtcctttctcgtacggattttcgttgtattctatgttccgcttatgccctgtgtgttagacagttgtcacggtttgacaggcaaataataagacagaaaggtcaaataccggtagacttttaagcaggataaaaaaaggaggtattttttatggctaaacatcatttttaccttcaggcagactggcctggaaaacgaaacgacatcggaaggattgaaagcgggaatttaaaaaccgaaatttcgataccaaaggaaatggacggcccgggggcggggacaaaccctgacgaaatgctgctcggtgccgctgcgacttgctatatcattacacttgcagcgatgatggaaagaagcggattggaaaaagagagcctgacgatggaatccgaggccgttgtcgatgtgacaggcggggtgtttacgtacgaaaaaatcattcacagacctctgatccgcctcccgaaagaagcggcgcaaaaagaggccgaacttgccgaaagactggctaaaaaagcggagacatcatgcatgatatcaagggcggttcagggcaacgtcgccattgaattagagccgaagattgtcgtctccaaagcggattagatttcgatcgtgagctgagccttttgatccgctgcttcggtgcgctttgaattgagcagaaagacgccgccgatgatcaaagtaagcccaataagagttttgagattaaatggctcctgaaatataaaatgcccgattgcagctgtcaaggccgttccggtgccggcccaagtcgcataagccgctgataaaggcagtgtttttaatgaaaagctcagaaatgtaaaagaagccgcaaaaccgattatcacgccggctgcgggcaggggggcgctaaagccttctgacagcttcagcatcgtgcttccgaatacttcggacaaaatggcagccgccaaaaagatcatgcctttcatgacattcgcctccttatgacaaattgatcagtacaacgcctgacacgagacagataatgccggcgatatttcgccggttcagcttttcttgaaaccacaagacgccgatgattgcagtcagaacggtgcccgctccgctccaagtcgcataggagaggcttaatggaatgacctgcaatgtgagcgacatcatgtaaaatgcgagaccgtagccgattactacaagaaccgacggctgccagcgcgcgaacccgtcagatattttcagcatggcggctgccgccgcttctgacaagatggcgatcagaagaaaaatgtagcctgcaatcatacggaatcctcctctatcgattttattgcatgattcaaaaggagagctttctcttcgtcagccagcagttccaattgaaacattcccgaaagccagatgcaccggatacgagtttgacatgtgcaaaggccggggggcaaactccgcagcgccctctgcgcgcgcttgtacaaagttgaacggtagttttcattcgaatatcataaagcgcagcccataaacgattttaaagtgtttcagcttttattccgaaatcgttatgagcttcttcaagctttccccttttttagacataaaaaaaaccccgcttcactaaccggttggtaaaatccatcttaattgatgcaaaagttctaagtcaagaaaaaagtaatgtaaaaaggcccctgaaagagcctttatctgtcagaaataaggatagtaaggatacggcggatacggatatccccaagggccgagaagcgctccggcagtaaggccgcccaaaaatcctccgaagaaggggcccggaccgaaaaatggacgcgggccgaaaaacggccgcccaaaaggtccgccaaagaaaggcctgccaatgattcgctggctgtcgtcgtatatacaggagcatggtcgaaatgatacataaaaaaatccctccaataataaaatgatacctgactaacatcactgtattctgcccagccgtttttgcctgggcgcccgccggattttttagtgaagcagccctcaaaaaggagtgaacgaaaacatgacgctgtatcagtcggattggtcaaaagcgcctccccatgcccacgcctacagggcgagaacaacgactgccgagggacattaccacctaattgagggtttttcccagccggcaaacgggagcaatacagatgggcacgttcatttttattccggaattacttctttcgacgatggtcattaccataggtattatgcgattacggggccagcgattccgcgggcggacggcacgcactatcatgaaatcgagggcacgacctatttggcatattctgcggctcccccggtcagatatggcggagtcgtttatgtaagcgatggaatgaaggaaaggcaccggcatccttttaagggttacacaagagaaatcgtcggaaatgagccgattggctggtgagggaatgtttggaaaacagtgaaaacgggtaaaatgaaatgggtgtttttgaatgtgaaatggtataatgggaggagcttgtttaaagagagtgatcatcagtgaataaaacgaagccgccggtcatcgttttgatcggaccgaccgctgtcggtaaaacaaaattaagcgtcatgctggccgagcgtttgaacgcggaaattatcagcggagactcaatgcagatttacaaaagaatggatatcggcacagcaaaaatcagagaagaggaaatgaacggggttccgcatcatctgatcgatattaaagaaccgacggaatctttctcggtagctgaatatcaggagatcgtcagacaaaaaattgcagagattgacaggcgagggaagcttccgatgattgtcgggggaaccgggctctatatccagtctgttctttacgactattcattcacagaggaagcaggcgatcctgagttccgggcggagatggaggcgttctctgcgaagaggggggccgaatatgttcatgatcttttgaaagaacgcgatcccgaagcggcaagagccattcatccaaacaataaacgaagggtcatcagggcgcttgaaatcctgcatacaacaggaaaaacgatgtccgaacatatggaaggacagcggaaagagcttttatacacgacggctctcatcggtttgacgatggagcgggaagtgctctatgacaggatcaacagccgcgttgaccagatgatggatgaggggctgctggatgaagtgaaactgctttatgatgaaaacgtaagaaactgccagtctgtccaggcgatcggctacaaagagctttatgcgcatctcgaaggcagagcgtccttggaagaggcggttgagacattgaagcggaattcgagacgctacgccaaaaggcagctgacatggtttagaaatcaaatggatgtcgcatggtttgacatgacgccccctgtcaatatcgagcagaaaaaacaggaaattttcacttacatagcaggaaagctcgaactttaatcgaaacaatatggtatagagaaacaaggaggaccagaaacatgaaatcgataaatattcaagatcagtttttgaatcagattcggaaagaaaatacatttgtcacggtctttttactgaatggatttcagctgcgcggacaagtaaaaggatttgacaactttacagtgttgattgaatcggaaggaaagcagcagctcatatacaaacacgccatttctacgtttgcaccgcaaaaaaacgttcagctcgaactggaatagcgattcacggactaaaagaccatgccttgcatggttttttcagattgcctgacaaaatcctgaaacaggttactgttttgggatttttcgttttcagggcgactttacaatcacctgcggccgttgccggtctttcagaggaaaaaaactttggcaacctgtctaagacgccgccgtcatcacgtcctgtgaaagtccgaggcattcaaatttacaaagcggcatctagtcgctaaactaagtagtgtttacatcaattcagtttgaaaatgaaaaggaatgagcgaacaatgaaacctaagatcgtcatcaaccattgggaagagacgtgtgaagatgattcctgctatgaatacggcacaagtattctcgtaaacggaaaagagcttgtcagggaagcgtcgatcatgacggctgttcagtcggttcttaaggaactcggcatcgaagccgatattaaagaggtatgcgagaacaagtgctgtgacgcttacaaaaaataagcgaaaaagtctagtctactaactcaatttttttcgtgttatgatagatttcggtttgtgagtaggatgagcgaacggctctcattctactcatatttctttggccttaggcctcctaagctgaagcgaattgtgaactttcatcaactcgagcacaatatattgtgttttcttgaatgatagtatactatatattgtgtaaggttcgagtggaagactcggaaacaattttactaggtcgtgataatgatgattcagatcgtatttgattcaaaaacgggaaacgttcagcgctttgtggataagacgccttttcgcaataaacggaaagtcagcacagaggagtatctagacgaaccgtttgttttgatcacgtacacgacagggtttggggaagttccgaaaacgactgagatgtttcttgagaaaaacgcccatcttcttttgggagttgcggcaagcggaaacagagtgtggggagacaattttgcgaaaagcgcagaaaaaatctcgaagcagtatcaggttccgattctcggcaaatttgagctcagcgggacggccaaagacgttgaactgtttactcaggaggtagaaagagttgtcacaaaatcaagtgccaaaatggatccagttaaacaatgagatcatgatccaaaaagacgggaaattccagtttgataaagataaagaagctgtacatagttattttgtagactatatcaaccaaaatacggtatttttccatgatctgaaagagaaaatcgattacttaatcaagaatgactactatgaagaagagtttttaagccgctacacgtttgaagaaatcaaagaagtgttcaaagaggcttacgccaaaaaattcagattcccgtcctttatgagcgcttttaagttttacaatgattatgcgctgaagacaaacgacaagaaaaaaattcttgaacgctatgaagacagaatctctatcgtagctttattttttgcaaacggggataaggagaaggcgaaggaattcgtcagaatgatgatcaaccaggagtatcagccgagcacgccgacgttcttaaatgccggccgcaaacgccgcggagagctggtcagctgtttcctcttggaagtcaatgattccttgaacgacatttcgagagcgattgacatttcgatgcagctgtcaaagctcggcggaggcgtatctttaaacctttcaaaactgcgtgcgaaaggcgaagcgatcaaagatgtcgaaaacgcgacaaaaggtgtcgtcggcgtgatgaagcttcttgacaacgcattccgctacgctgaccaaatggggcaaagacaaggctcaggcgctgcgtacttaaacattttccaccgcgacatcaacgatttcctcgatacgaagaagatttcggctgacgaggatgtccgggtgaaaacattgtccatcggggttgtcattccagataaattcatcgagcttgcaagagaggataaagcggcatacgtcttctatccgcacaccgtttataaagcgtacggcgagcacctcgacgaaatggatatgaacgagatgtacgaccggcttgtggaagatccgcgcgtcaaaaaagaaaaaatccacccgcgcaagatgctcgaaaagcttgcgatgttaagatcggaatccgggtatccgtacattatgttccaggacaacgtcaacaacgtgcatgcgaacaatcatatttcaaaagttaaattttccaacctttgctcggaggttctgcaggcttcacaagtttcatcatacacagactacggtcaagaagatgagatcggccttgacatctcctgcaaccttggttcattgaacattttgaacgtcatgaaaaacaaatcgctcgagcagacagttaagcttgcaaccgattcgctgacgcacgtttctgaaacgacaaacattacaaacgcaccggctgtcaaaaaagcgaacaaagcgatgaaatccatcgggctcggagcgatgaacctgcacggattcttggcacagaacaatatcgcctacgaaagtgaggaagcgagggacttcgcgaacactttctttatgatgatgaacttctactcgattgaacgatccgccgaaatcgccaaagaaaaaggtgggacgtaccatgggtacgaaggttcagcttacgcaacgggtgaatacttcgaaaagtatgttacacaagatttctcgcctaaattcgaaaaagtggccaagctttttgaaggcatgcacatcccgacaaaagaagactggaagcagctgaaacagtttgtcaaagaacacggattgtaccacagctaccggctgtgcatcgcaccgaccggatccatttcatatgtacagtcaagcacagcatcggttatgccgatcatggagcggattgaagaaagaacatacggcaactccaagacgtattatccaatgcctggacttgcgccgagcaactggttctactataaggaagcgtatgatatggacatgttcagggttgtcgacatgatctcgacgattcagcagcacgttgaccaaggcataagctttacattgttcctgaaagatacaatgacgacacgcgatttgaaccggatcgatctttatgcccaccataaaggaatcaaaacactttactatgcaagaacgaaggatacagggcaagaaggctgcctttcttgtgtcgtttgattaaaggagagtatgcgaaagtgacgaaaatttacgatgcagcaaactggtcaaagcatgaagatgattttacccaaatgttttacaaccaaaatgtaaagcagttttggcttccggaagagattgcgcttaatggagatcttctgacatggaagtacttgggtaaaaatgaacaggacacatacatgaaggtgctcgcggggctgacgcttctcgatacagagcaggggaacacgggaatgccccttgttgctgagcatgtggaagggcatcagcgcaaagcggtgctgaatttcatggcgatgatggaaaacgcggtccacgccaagtcctattcaaacattttcatgacgctggccccgacagagacgatcaacgaagtctttgaatgggtcaaacaaaacaaatacctgcagaaaaaagctcagatcattgtcgggctctatgaaaaaatccgccagggcgataaaatctcgctgtttaaagcgatggtcgcatccgtttatttagaaagcttcctgttctacagcggcttctactacccgctttatttttacggacagggcaagctgatgcaaagcggcgaaatcatcaacctgatcttgcgtgatgaagcgattcacggcgtctatgtcggcctgctcgctcaggagatttacaatcagcagacgccggagaaaaaagaagagctgtatgcattttccattgatctattgaaagagctttatgaaaatgagcttgaatatacagaagacctgtacgatcaagtcggcctttcacacgacgtgaagaagttcatccgctacaatgccaacaaagcgctgatgaaccttggctttgaagcttattttgaagaagaagagatcaatccgatcgtgttgaacgggttgaatacgaaaacgaagtcacacgacttcttctcaatgaaagggaacggctacaaaaaagcaacagttgaaccgttaaaagacgacgacttttactttgacgataattaagccgggctaaaagggcgcgccagcgcccaagccctgcccttcagctattgatacacggcaaaatgagagcagaacgaatctgctcttttcactttgaggaggaaacggatacgatgggaaaaatggacgaaatgattctcgtggtcccgcgggaaaacgtatttgcaaatgaaacgctgaccttccaaggcgtcaacagcgacggtgagacgatcgggaagatcatggcgcatattgaacgccacttcagtgaaatgagaaggggagacgccgaggaagatcctgcatttaaacagccgatcccttatgttgtcatcaaaagagaagacgaaatatttgtatatgagcggctcgaaggcggaggggaagcgcggcttcacaacaagctgtcactcggcttcggcggacacatgaactttgccgaagggcttgactttcccgatattctgaagttgaatacagaccgcgaacttgatgaagagcttctaatcgaggaatcagctaaagaaaaaatggtgacgctcggactgattaatgatgatgaaaacagcgtcgggaaagtacatatcggaatcctttcagcgcttgaattaaaaccgggcgcacacgttgaagtcaaagaaaaggagcagattgccggccgttggatgaaagccagtgatctgaaagaaaaaagcgtctatgacagacttgaatcttggtcacagtttgtcgttgatatcttagtttaaattggaaaactcgctgatcagcgagttttcttttcgtatagaaccggtttccattgaaaaaatgagccatgcttttcgatcagcccgaagccgggatatgggaaatgacagccgtggagcaggaactgtccgttataagcctgccgggccagcagtctccttgtcttttctccctcgataggatcatgctcaagcgaaacccgcagcttcggattggagatactttccggaatatgaaatacatcattgatgatctgacagacgccgtcttttgtatgcaattcaatggtcaggtgtccaggcgtatgaccgggcgtatggatcagcttcagtccgggaagcagttcggtgtcttctgtcagcagcttcagaagcggccggacagcggagagaatgtgaaactgaggagacgccggcgtttgttttgcgtacagccattctgcttcactgagcagatgaacagcgtttggaaaagcgggctctccgttttttagaagacctcccgtgtgatctaaatgactgtgtgacaaaatgacatagtctatcgagtcaggcttgattcccgcctgcttcaggtgatgaagcaagtgcccgctttcttgtccgcctgtttccccaaatcccgtatcaatcagtatccgtttgccgttcgtctccagacaggcaaagttcagcgctgcttcaaattcttcaggataacgttctgtttccttggagtctcctcccgccaaaaaaaagtcccttgaaacccgaaatgctccatcagataaaattgtcatttgaaaagactcgagctgcatgcggtatggctccttcatgataaatccttcccccttgtgtttgaccgagctgcctttgaaaaggcagcttcattgtgtcttttcatttgcgatgagatttttgatcggttattattaaatcgtaattattatgatttaatagcggaagtataactgaatccgtttattctttcaatcaaaatatactgtttaaaaggaaaggagcatgattttatgccgacactggaagagctgtatcggtccgtcattatggatcatgcgagatacagacggaactttcgaaaaatcgataaacgcgatgcgtattacgtccattacaaaaatccaacatgcggtgatgtgatgactttgtttatcgacattaaaaatgaaaagatcgaagacgcagcttttatcggagatgggtgcgacatcagcatggcttcctcatcaatcatgactgaactgataaaaggaaagacgttaaaagaagccggactcatgcgggaggcgatggaaggtatgatcaggaaaggagaagaaccggcagatgatctcataggcgatgccgtttccctgatgggggttcatccattgcgggcccgccataactgtgctcttatgccgtggcaggctttcgatcagatcaaggagaacgttcattaaataaacaacgcttcataaatgcaatccgatgctaaagctgctggacaaagaatagcgaaagattcaagggaaaaaaggggcagagacgaaagaggcatggaaataaaaacgaaggtaaagcaggaagcgatggcgcagcttaaacggaaaggcattcgaattacgccgcagcggctggccatctaccattattttttagcggacaggaaccatcccacaatagctgacatccaacagccgcctgagggaagtctatcctgccgtcagtacagcgacgatatacaacaccatccgctattttaagcaacagggccttataaaagaaatggggtttacatatccgcttcgctttgatttagctgaagaggaacatgatcgtgtcatatgcgaagtatgcggaaaaatcgtcgattttcattgtccgcaacttgagaaagtgaaagacaatgcggcgcggaagaccggatttaaagtaacacatcaccgattggagctgtacggcatctgtaaagattgcagacgaaaagaagatgcagaagaggttagatgaaatctaacctctttttgcttgtgcgaaaaaccaaaaaccgatatattggttttatgatgaagaataacattaaacgaatcaaacgaatttcgcttcgggaagaagtgtatcaaacgctgaagcgcgccatcgtacatttggagctaaagccggaggagcgcctgcatgaccaggagcttgcagagcagtttggcatcagccgcacacctgtcagggaggcgctcaaacgactggaagatgaaggccttgttgaagctgtcccgggatcggcaacacgtgtatcaccgttaaatcgcgaggaggctgaacacgcttttacagtcactgcggcgctgcatgcgctggctgtcagactgtcgcttccttttttaacggattccgactttgatcagctggaggcgcataacaaaacgttgcagcaagcgattcaaaaagaagacattatcgaagcaatcgaatcagatgctgcttttcatgacgtgtttttacaagcatcaaaaaacccggaaataacccgggcattggaaaggatttcttcaaaaatttaccgccttgaaatgtcgcagttttcctcgatcggcagcttgaaatctgttgaacagcaccagagcatcatcgatgcctgcagacggggggatcgggatgcggccatcaggcttgccgaggaaaactggctcagtctcggagatcgattggccggacatcaggaaaaggagtgaagggattgtgaggccgattatactgggcgtttttgcagccttcttttttgcttttacattcgttttaaacagggcgatggagcttgaagggggaagctggatctggagcgcatcgctgagatttatctttatggcgcctcttttatttgccattgtttggctgagggggaatgtgaaagagctttttcaggaaattaaaaaagcgccgggcatttgggtgagatggagcatcatcggcttcggtctcttttatgcgccgctctgttttgcggcggcttacgggccgggctggctgatcgcgggaacatggcaaatcacgattatttccggctcccttttggcgccgcttttttacgaaaccatccaaacaaaaacaggtcccgtacagatgaggggcaaaattccctataaggggctcacgatgtcgttcatcattttaatcggggtggcgctgatgcaggctgagcatgcggcacagctttctttgcacgagatgctgctgtacgtcgcgccggttatgttggcttcatttgcatatccgcttgggaacagaaaaatgatggaagcatgcgccgggcgccttgatgcttatcagcgggtattggggatgacgctggcaagccttccgttttggctgatcctctcgctgtacgggctggcatcggcgggtgcgcccagccggggacaagtcattcagtcaggtttggtggctgtcttttccggaatatgcgcaactgtgctgttctttgccgcaaccgatcttgtaaaaggggatatgcgaaaattaggggctgtcgaggccacacaatcgtttgaagtgctgtttgcagccgctggtgaaattttaatcctatcgagtccgcttcccggtgccatctcatggagcggaatggctcttgtgattatcggaatggtgttgaacagccatgcatcgaatcaaaagccggcggttcaaagtaaagctgcaaaagcatgaaaaaagcctgcgatctatacgagacagatcgcgggcttttcttgatgattgtccctattcctggtaaatgaaagcgtcaaatccggcgtttttggcttgctgaacgagcgcttctgcattctctttcgaagaaaaggcgccaatttgcactttgtaaaggctgtccctgtcaattacaatggcatcaaacccttttgctttcgcttgagcggcaagtgaatcggcgttggctttgtccctgaaagcgccgatttgcactttaaaaagggctgtggatttttttgaaaggttaaatgcccttgccagtccgttggcgtggcctctcgcaatggattgaataaacgcggatgacttcagtttctcggcgtcgcttgtattgtctacaaagccattttccgtaagcagtgctggcattgctgtttcccttagcacgtgaaaattggctgttttcttgccgcgatccctgaaatcaaccacttttaaaatctcttcatgcatgatatcccgataggtggtggtaggtgcgccgacgccgggataaatgtaatcctcgaaacctgtcccgcccccggcattgatgtgaatcgatagaaagtagtccgccccccagctgttcgcggcgttcgtgcgttgcgtcagactgacggtttggtcgcttgtccggctcagctggactgtaacattttgatattcattcagaagaatgtttcttaaagccaaggcgatttgcaatgttaactgtttttcttgcaaaccattggctgaagcgcctggatcagtcccgccatggccgggatcgataaaaatttttaccacaagacatcacctcaataaacagtctatgaactgatgtatgggaagggttgtacgattgtcacctgataacggaattttttaaatattcagcttatcatagaacgcaatatgatctttaggcaagggggttgcatgattaatgtttttatcatataatgaattacgctgcattgtacgtaatgataattaagttttaacctttaagctgtaatagggagttttatatcggaaccggaatgtcatgccttcctcgaaaggacgacaggaacgtttctgcagacacccactttgaggagtgtggtttaaaactttcttacttgcatacggcaattgcagcacttaagtcatttgaacaaaatggcttttttatttgcggaaaaatagtttacaataaaaattttatgtaaactaaattgctgtgaaatttgaaataaagggcggtttccgcctttttattcattttaaagcgaattgcgtaatatgaaattaatgcgtgaatgccagccggcagaagatgcaaaaatgactggcgtcaaaaatgctgaatgatcataattcctgtgatcatcaggacgattcctagaatgcgctggacgttcaagcggtgtttggggattccgaaccacccaaaatgatcgatgacgagggcgatgatcatttggccgcttaaagccaaaacaacagtaagagacgctccgacaatcggcaaaagcaaaatattggacgtaataaagacgacgccgagtattccgcctgtccagagccaccacggactgcttgtgacaaaggtttttgctgtttgtaaattgtttaaaaataaccgccgatgctcaatgaacgatgtaagaaaaagaagaacgagcattcccaccaaaaacgaaatcagagaagcgataaaaggtgagtggatagcatttctcagctctgaattaatggatgtttgaatcgggaatgccattccggcaaaaagcccgagcatcatgaaaagaaaaacgtacatagatttgtttttcatctgtgatgaactcccttgctatttaatattttttgatgatgaaaactccggaaataatgaataaaatgccgatgattctaggaaagtttaattcatgaacgggtacgtgaaaccatccgaagtgatcgatcgccagagccatgatcatctgcccaagcagagtgacgacaaccgtcagagctgatccaagacgcggaagcaacaaaatatttgaagttaaataaaaaacgcctaaacatccgcctccaatgaggatccaccagggaatagaaggaacaagtccgatgatagacaaaaaatggcgctctgtcactaaggcgacaatgagcaggagaagcgtcccgacaaaaaaagaaatggccgccgccccgtaaggtgacccgattttcatgcccagccgtgaattaattgaggtttgaacgggaatggccattccggccaaaatgccggctatcagtattaaaatgatcatcatttctaaaaactcctttttgcgttgattggaacgattatttcaaatctgcggaaagccttgctgttttgaaggacaccttgtattttggcgaaaaggagttcatgatgcaagtgttgattgatgaaaagattgcttattgtgatcccctctgcggcttaatgttgagagtgcccccttatgtattaaatagcgcaaatcggtagaacagccaagtgggacaataactttgatttttacgatccgccatacaaaaacctttggtatcccagtcattgtaaagctcacttttgtcttttcttttgcgacctttgccattgcatcctgcacattgaaattcaaagccaatactttcctcaacagccgctttatttctacatatcatttctatatttgtataaaaaatcaagtttgaatcacggcaaaattccgctcacccaattgaacaggcaaatttttggaaaagaattgttaaactgaaaaaagtcctttacactacaagtaatattttgttagggggtgggaacgtgttcaacgaaagagaggcgctccgattaagactggagcaactgaacaatgccgagattcagatcatacgcgaactccaaagtgagcggaaagacatttattccaggctgcggaaattagatcgtcaaaaagtttcttcatcacatcataaaaaaactttattagagttagtcgatgaaactgtaaatctcttgaaaaaatagatcgagttgtagatgaaagaattaacagcagccgatgcttgaccaaaaagaataaaaaagcaagttatacttgtaattgtgcgaaaaatggaaaggttagcaacttgactagaaaaaaaacattgtataagattattcttacaaatccaataggaataaaagccctaaaactgactgacttgtcaatcaaggcttagggtgaggagggaaatacatggggaatacagacacaagagaggaattgctacatatcgcgcttgagctttttgctacgaaaggataccacgcggcaaaaatttcagatatcgtaaaacaggctggcgttgcacagggaaccttttactggcacttcaaaagcaaagaagaaatcgccaaggaaatcataggcagagggaaagataaccttctcgcagccattcatcaaggatacaggcaaacgtttgctcttgccgatgatatgatccaatccacgacagcgcttatgaaaagaatttttacgtttgcacaggagaatagaaacttaatgacatttttattagtcaagggacaaggcgccgatccggaaatcagggaggcaatcgaagaggcgctgatcagtgttgaacaggcatttaaaaagaacattcaaagggctacagaacttggaatgctaaattcctcccataacactgatctgcaggccaccatgttaacaagtcttgtgttgggcacactatcaaaatggctttttgggccaaagcatgatctgaattatgttcctaagttttcagttgatgaaatgactgaagaattggttcattttgaatttttcggactgattggccaaagggggaattaaatttgtctactattcaaaaaacaaatggagagtttgggatttttcatgaagccggtatgcaggcgaaagggtctttcactccgaattcagacggactttcaccgattgagctgttggaagcttcattaggtatgtgcatcaccatttctttgcaaaagatgtttgaaagggatggtatagaggtgctggaggatgagttttccgtttctgtttccgccgctaaagcccccgaaggcccgtcccgtgttgaaaaatgttcggttagcgttaaattgcctgagcatcttccgaccgactataaaaagaaactaatcacctctgctgaaagggcatgtacaatcggcaatacgttaaagcgaggggtaacgattgatacgaatatggtgtaacaacctacatgatgaaacgaaggagcatgaaaatggaaaacaacagtaaaaaaccttcctatacaaacgctgatgattttgctgttacatcagtccctgaaaataaaagaaaatcgatttttaacattacgattacaagctgtgcctggatcatctcattgtcgacgattgtgactggaggggcattaatccagggattgaattttgcacatgccgttttagcagctgtcttaggcatgctgattcttgcggtatatggcttttttcaaggagtaatgggtgcgaaatacggaatatcgactaccgttcttgcccgtcaggcctttggtcgctacggatcgagcctttttggaattgtcttggcgctgacgcttggaatcggctggttcggctggcaggttgctttctttggcacgaccatttccgaaatgtttccgggtgtttggcttgcaaagcctgaggtcgccatcgtttggggcggcattttaatgatccttaccgcgtttataggatatcgcgggcttgccgctttaagctttatcgctgtacctttagtcgtcattttttccatatggggaatcataagtgctgtcaattactcaggaagctggcataacttgctgacatttcacccgacaggggatcctctgacgatatttgccggaattacaattgtcgttggaaatgctgcattgggcgcagttgtttttcctgatgtgacgagatatgcaaaaggagcggtttcaggaggaataggcgcttctgtaggttatttccttggaggagtgttctgtcttgttgcgggagcggcaatggcgattgccgcgaatgttccggatatcgggtcaacaccgaatattcctgccgctatgagcaagcttggcctgggctttttagcatttttaatcatcgtttttgcacaatggacgacaaacgataacaatttgtataccggttcgctagggcttcgcaatgttgtgaacattcctaagaaagcacttgtggcgatcatgggcgtgatcggaattatcattgcattactaggtgtccaaaatatgtttgtgccatttttaacattcttaggcttgtatgttccgccgattgcgggagtcatgatcgccgatcattggatcacagcacctgtcatcaagaaaaaacaatatcaattcggggctggaacaacttattcgaagctgaatgttgcggcgattctttcggtgatcatcggaggttttaccgcttcaaagataacgttcggcatcgggccgattaactctactatacttgcatttttgatttatatcatctttacgtttattttcacaaaattaaatctccgttacgaaatcggagaagcgacagaggaatcgtctggtttttaagcggataaggaggaaaggttttcaatgatgaatgaaaaaaaccaatgggtatttggaattgatgtcggcgggacgtttacagatttagtggcagtcaacaaggacggaaaaatggtttcgacgaagacgccttcaaccccagaccagtctgatggtgtcatgaacggaattaaaaaaatggctgaaatcatcggaatagacgtaaaggatctattagccaatagtccattggttgtccatggaacaacagttgccactaacgccttgctggaatataacggagcaaaggtggggcttctcacaacggaaggctttcgggacgaaatcgaattccgccgcgcgtataaagaaagcgtgttttctccgcgcttggaagctccttatcaaattgtcccaagaaggtatcgtgtggggattcctgaacgactggatcatacaggaaatgtcgtaactaagcttgatgaagaagccgtccgccgggcagtccgcgggtttatccaagagggggtcgaagccgttgctgtctgctttctgttcagcttcatgaatccttcacatgaaatccgtgtcaaagagattattcaagaggaagctcccggcatgtttgtatcgttatcgtatgaagtgctgccgcagattcgggaatttgaacgggtgagcacgaccattgtcaatgcgtttaccggcccttccatgcaaagctacttaaaccatcttgacgaacggcttcgcgaagacggatttactggagaactgtttgttatgcaatcaaacggcggggtccaaaatgtcattcaaagcgggaaatttgccgcgggtggccttttgtcaggtccagccggaggagtgacggctgcttcctttatcggggaaaaatcgggctacgagaacgtcattaccgtagacatgggcggaacaagctatgatgtctcggttatcgaaaaattaaatccggcgatcacgacggaaaattggatcagcagatacagggttgccttgccgatgatggatatccatacgatcggctccggcggcggaagcatcgcctggattgacagcggcggagctttacaagtcggcccgcgaagcgcaggctcaaatccggggccggcctgctacggaaggggcggagaagaaccgactgttacagacgtgaatgtcttcttaggctatatcaaccctgataacttccttggcggagaaatgaagcttgaccgttcgctggctgaaaaagccattcgtacacgaattgccgaaccgctcggaatttcgacagtggaagccgcgcttgcaatctcacaaatcgtcaatagtgatatgtcaaatgcagtccactttgtaacgacacagcgaggccatgatccaaggaacttcgccctgatggctgtcggcggcgccggagccatccatgcaggcaagcaggcggaagacctgggcattaaaaccgttatcgttccgtcccttgctccggtcttttgtgcgctcggcgatgtggcggcaaaccttaaagtaacggagctcaggacgcgctttgaaagtttgaaaaacgttgacctgcaagcgatgaacgccgattttgaaaagatggaacagacggcccgcgaaaaacttggaggccaatcggtcaccaatcaatatgaaacgcgccgctttatcgatatgcgctacgcgggggaagtccatgaagtaaccgtaccggtgaagtcaaggacgcgaaggattacagagttgaatcttgaagcaacggcggcagatttccatgaccttcatgaaagaatgtttgcccataaagaccctgagcacgacattgaaatcttaaacctccgtcttgatctggtgggagtcagagagccgttaaagcttaaggaggagcagtttgaacaagaggatccttcaaaagcgaaaacaggtgaacgcgatatgtattttgacatcgaaccggcgaaaacgcctattttcaacgggtcaatgcttgagccgggcaacctgattgtcggtcctgccatcattgagcaatggggtacgaccattgttgtttacccgggacatgaggctctaatcgattcataccgcaactgtgtcatcgaagtaaagcatgctcaacaggcgacaagaggtggaaatgcatgatccaagctcaaattctttatagaaagctgcaagcgatcggcagagaagtcggggataatttgcagcgaatctcccgttctcctgtgctttcgcaagaccgggcatttgctgcagcgatttttacgaatgagctgaaaatcgcggttcaacatcaatacgagcctgaacatttgttcgcattaaaagaaagtgtcgaaaatctgttcgactatttttcgtttgatatcgcagatggagatgtgctgctggtcgcagatccatacagcggcggaacgaaagggcagtcgctcaccatggcggcgccgctattccttgaaggggagctcgtactcttccccgctatccgcgctcagatgattgatttggccggcgagtatccggggggcttccatcccgatgcatttgaagtatggcaggaaaatatcagaattactccggttaagctttataaacaaggagttctgcagactgatattcttcgttttttattatcaaacagccgggtgcccgcttcttttaaagcggatcttgaagccatgtatacatgtttgcatggtgccaaacagcaattgaaaacgtttcttggcagctacggtcaaaaaacagtggccgcatcgatcaaaagcatgtttgaatacagccaaaaaagggttgagcatcatgtctctcatctgcctgaaacagaaatgagcgctgtccaggagtttgaagttaccaaagggcacaagagtacaattcatgtgcaaatttcaaagaaggagaatgcggttgagatcgatttgagcggatcgtcagagcagtccgtaaagccggttaattcacctgccgctttaacgaaggcgtttgccgtttggccgtttcttgcaaggattgccgatgaaataccgatcaatgaaggaacgcttcaaccttttcaaacgaagacgaggccgggaacgattctagatccggaatttccggcagctacagcactagctccaagcattaccggacatttcgtcgctgcagcggtatttaaagccattcaaaacggacaaggcacaagtgaagaatttccgccgatttatgggccaggtccgcaggccgttttttatccggagcttggcacaggagccgaaacaaaatcaatcgttctcgcacccgggtatccttcagcttcaaaaggcttcggaccgcctgctttatttggccaacggatgcttgtctctgcggaggaattggagctttaccacggttttaaaatggtttcccgggagtggacggacaatggggaggaaatggaagtgtccctgcttaaccaggaggacgatatttatttcaaccttcttctgccttttagcgaaaggggaaaatacgggtctctgtcaagaacgggagaccatgacgaaaccttttatgaaagcacggtacaccaacatgtgaaaaaaggcgacctcctcgtctttacgtactctcaaaaggaggagcagctatgatcaatcaggactttatcttatcacaggtggtcggcggttctcttgatgcggttgccagggaaatgagcgccactgtcacgagaacggcccgttcaccattgtttaacgaagcgcatgattttacgacgggcgtctttgacctttccggcaaaaaatcgcgccttgtcgcgcaggcccccggctgtacgcttcacctttatgcggtcgtaggcgcagtggaccatctattggacgcctttcggtatgatcttcaccccggggatattctcctggtgaatgatccgtatcatggaggctcgcacagccttgactggacgatcgtcatgcctgttttttataatcgcaagccgatcctgcttcctgctgtacgaagccatatggccgataatggcggtccggttgccggagggtacaatccgcgctcaaaagacatttggcatgacgggctgcggattccgccgttaaaaatttatgagcggggagaaaagcgaagggatgtattcgatttaatcgttgcaaacaaccggctttcacattggcttgaaggcgacttaaatgcgatgatcggggcgtgcaaggtcgctgcctcccgaatccagacgatgctggataagtatggcgccgagaaggtgattacagccattgacaaccggattcaatatacagaaaacagggttcgcgatgaaatcagcagctggccggacggcacctatgtcggtgaaacattcgctgatcacgactttcaaggcaaccgcgatattaaggttcgcgcaacggtgaccgtcaaaggcagcgatcttcacattgactttaccggttcatccccgcaagtaaaaggcttcatcaacagcccgctctcaaatacgacttcgtttgcttttgtcggtatttcgacttgctgtgatgaggatattccgatcaatgaaggatatatgaatccggtaacagtaaccgcgcctataggaacagttgtgaacccgcagctgccggcaccgtgcggacacgcgactgcgtgcgtcggagcagaaatagccgaggctgttcttcaggccatttcacaatgtgcgccaaaacgggtcggagtgaacgcccataagcttcctctcgcctattctcacggaaaatacgatgacggcaagccgtgggtgaatctgaatttttacggctataccggcggtgcgggagctgcatacgaaacggacggatgggggctttatcctcctgttatgacaggagttattcttccatctattgaaatgaccgaagttcaatacccgagccgtgtattaaagcatgaatatacaagcgattttacgggtgcgggccgatggagaggcacacccgggttggatgttcaaatccagcacttaaaggaaagccgcacaagcgtcatgatggcagggggccgaaacacaacaaaaggcttctgcggagccggcgattcaccaagcaacaaggtgattgtcgggtatggaacagacgaagccagagaaatcgatgaaacggcttttgaagtcaaaatgcctgcgggcggcatcatccaattttaccgtgcaggcggcggaggctggggaaatccgctggaacgtgaaccggaaaaggtgctggacgacgtcttaaacgagtttgtcagcattgaatcagcattgcaggattatggtgtcgtgattgaccctgagacacttgccattaacgaagctgaaacaaaacgtgtgcgggcatccaggcttccataaataaaaaagctgatctgagaggaattacttttcggatcagctttttttcttttcaagacatctatggtaaaaagaggataattgctttcgagagagaatgtaaacataaccggttttatctttttaaccggcgggtacataacagattagcatgtgaaggaggccaaatcatatgaaaaacaaaaaagcgttttggggaccttttctgttcggcgtcggcatcatcgccatgatcgacggcatcatctttcatcaattgcttcaatggcacagcgtgtacatggacacagaccgctctcaccaaattatgagcgacggactgttccatctgttttcgctcgtcatccttttcatcggcggaatcctgctgtggaacaggggcgaacttggcagcagccggccgcagcacatcttttggggagcctctttgcttggggcgggctggtttaacttccttgaaggcatcatcaaccatcatcttcttcagattcaccacgtcaaccagctaagcccgaaccgcctcttattcgactttgcttatgacgcatcgggccttttgatcattctggccggatggctgatctaccgaaaaggcaaacagggataaaacagtggtttgtccgcacagctacctgaatacaataagaaaatatttctcgggaaagcgcaggtttcaacaagacctgccctgtttttgtcaaaatttgaagaaataaaaaacccccattttaaaaagatgtgatcagtaacagccgcttgaagaagtcgttttatgtaaacaagtttttaaaatgcggcaaagtgcagctgttcacttcaagcaaaaaggggattaaaaaaagatattcagtggaaaaaaggtgttcatatcgtttaacggacatcttttttaaataggaggtttacatataaaatgttaagtgtgctgctgcctaatttgcttatattttctgctatcattttatttttatattacatgatcgtattggtaaaggaaaacaagataaatcgtaaacaaaacgaggaaacccaacagttgcttagggagatattaaaggaagtaaaaaataaagattcaaagtaataataaatgttattaaaggttcaatatttctggctcaatatagtcccaagggcaatatgaagaggtactcacagcaaaaactgttatagaacataacgaccgcatctctggtcgtcttttttaaaacgcggcatgttacttatcttgataggaaggtgtcattctgttgagtagacagggtttttgaccgattcctgtccgatagtaataaaatattcattgacttaggaaggggttgaattcataaagtcttgcaaaatcactaatatccgcttgctttctggatagcattgttagaacgttagaagaataaggtcttggaggaacacatttgttacgcatcctttcactattgaatgctactgaaaatccatattaaaagtactgtaaggctacttaaagtatgacataatgtggagcttcttgatgaatggtattacgttgagtataaaatttcatcaatagagcattacaagagaaaggtctacctttatatcctagtcaaggtgctacagttgagctttgggaaaggaagcttaaacaattggtcgactaatatttaaagtgtttttgttaggaggtaaaacagtattggataagaaagatattaagttcctcgaggagctgctttataatacagataaagacgatctagtaagagtgacgagaaatattgaaaaccctgtgattcttcaagtttttgcagcgaattataattggaatagtggttttgatgttccaaaagcaattcttgagaatgagaattgcgattatggtacggggttattaatgttccattatgcagatggttatcgtatgctcgaaagcccagacaatgtttcagcatctgctttagaagaatggaaagattttttaatccaaacatatcaaaagcttataaatttgcagtttaaatctcaaaatatatcctgaaataacaagggttcaacggtttaagttttaaaaaaataacccgcatattcccgatgctttacttgaaaagtcaccagggaaagtgattgaagttccgaaaatttaacgcgtttttcacccaaagttacccgtggatttcaatccattagaattctcactttaaaatatgaggcatatcatttcccaaagttatgcacccatcagataaaagaaaaaatacttactgatgtataatttgaaatattaacgcattacatttcttcatctgaagtaccgactcgaatgcagcaattaggaagaagtgaaatttaatgagaagtatactgtttagaaagaggtattcgttaaacaaaagcactgcaatggtttattaatttgtaacaagcataaactaaaagacccgactgccgctgacagtcgagtcaagtatacaaaccagctcacaatgggctggctcatattaaaatagactttcccttagaaggatagatctttactttaaaggatgatagattgtgatgaaaaacataagcaaatatgttgtcctgttttttggggtagccctatttttatacttttatgatatgtttatgcctaaaagtgtgctttattttgttgtgggaataccagcattatatattagcacagtccttatcatgaaaactttaaagctacaaaaaatacaaaagattaatccagaattaaaatagaccccttattaaaacagggggtctaattcataaactgcattcttaattggccttttagttcaaaatagacgggagggagctgtgtgttcgaaaatcttcttgtgcaatatttgaatttctttatgatttcaacacctcgatgattttagatgggaaagataataacttcctctcagggcatatatcctaataattaaggcaaacgcgttacacactaatcaattcgatcatagtgaccatgaataacaacggctccactgttattgatcaaccatagcatctttaattttctcaaaacgagcctggttaagaatctttttagcaaattctctattttgaacacattttctaacattagctttttcagattcaataaagagtttttggtatttatcttgaatatcttcgttaatatttttagatttatgaatataaaaaaaggaaaaattgaatttttaaaatacatgtataagaagttggattgtgatttttttaaaccacaaaccatatggctgggctgtgattattcaaagattacggttttattctgaacaaagagagatgtaaaaatggtaaatgtcttaaataatatcttgaaaaatgacagattggatgcatatccattatttaaaaagttttgttccctcaaagaaaaagggttgcgtaagaaatcctttacagcattatcttcctttattgatgaagcaaagaaatgggatgatattgcacaacagaattttgcttgttggctgtttgctttatttgaaacatcagatgatattcaccatgtactcgttcatccattggaaaaggaacttttacagcctttgcttgagagatggatgaagagtgatcctgaagattcaagaccatataggtggtatggggtgtttttaaatcctgaaaaccgtgtcgattatttaaacaatgcacttagacttggtggcgggaatgaacaactatccttattaactctaatcgatattaatttgaacgccctttggtattcatttcatcatatctccgaagatttgtatcttggcgatattaaagaagatacagcacttcttgctaagtcccggcaattaaacaacaaagtagaatgtgaacaaacaaggaaaaacaataacgaagcacttaactattatcaagatctgttggatgactgggtgatgtttaaaaaagaacgatcaaagggatttgttgaatggtgtgaaaataagggtagaacctattattgggtcaaagcttattattacgaaagataactatattatgttcagtaacagaatcatgaagacaaaaaaggcgaatttcatttccttcaaatcaaaaagactttggtgaagatcccgctgtgaaacaggggagagccgagcagcgcctgcagcacatcttcagacagattggctccattccccgaaggacctcatcaatcaccactttctcccgatttgccatgtcaacctgttaagcatttaccaaacaggatgaaaaaattggtttgtccgcacagcttacctgaatacaataaaaaataaagtatttctcggggaaagcgcaggtttcaacaagacctgccccgttcttgtcaaaagcattggattgtgcagtcatgtgggcgtctgtcacggcataagcgcgccatgaataggatataaagagagaatggtgaggtgagtgtgttggaaagggctgttacttataaaaacaacggacaaatcaatatcatattgaacggtcaaaagcaggttttggccaattcagaggctgaagccgaatatcaggccgcactgcaaaaaaatgaagccaaacacagcattctgaaagaaattgaaagggaaatgaacacgctggtcggaatggaggaaatgaagcgcaatatcaaggaaatctacgcctggattttcgttaataaaaagcgcgaagaacaaggccttaaggccggaaaacaggcgcttcacatgatgttcaaaggaaatccgggaaccggaaaaacgaccgtcgccaggctgatcggcaggcttttttacgaaatgaatgttctctcaaaaggccatctgatcgaggcggagcgcgccgatctcgtcggtgagtacatcggccatacggcgcaaaaaacgagggatttaatcaaaaaagcgatgggcggaatcctgttcatcgatgaagcctattcccttgccagaggcggagagaaagacttcggcaaggaggcaatcgatacattggtcaaacatatggaggataagcgcaacgaattcattttaatcctcgccggatattcgcgggaaatggatcattttctttcattaaacccgggccttcagtcaaggtttccgatcagcatcgattttcccgattactcagtcagccagctgatggacattgcaaaacggatgatggcggaaagggaatatcagttcagccctgaggctgaatggaagctgaaagaccatctgatggccgtcaaaagtacggtcagccccgcgaagttcagcaatggccgtttcgtccgcaacctgatcgaaaaatccatccggtcgcaggcgatgagactgctgatgggagactgctacttaaagaatgacttgataaccatcaaaagccaggatctcgacttgaaggaagacgcgccgcacgtataatggcgcgttctttttttattttcgaggatttctggcaaccgctcccttcgtttgttatgatagtactgcttattgactaacgttaagaaaggaacatgatcacttgaacgaacaggaagtcatgaaagagaaagccatattagtcggatgccagcttccgcacgtgtctgatgagcgtttttcatactcgatggaagagctcgccgcgctgacgaaaacggccgacggaacggttgtttccacggtcacgcagaagcggaaccgtgtggatgctgctacatatatcggaaaaggaaaagtagatgaattggcggtgctctgtgaagagctgtcgcccgatgttttaatttttaatgatgaattgtcgccgagtcagctgaaagcgcttgtcacaacgcttgacgtgaaaatcatcgaccggacgcagttgatccttgatattttcgccaaacgcgcgaggacaagggaaggaaagctgcaaattgagctggcacagctgcaatacgccctcccgcggttaagcggccagggaatcaacctgtcaaggcaaggcggaggaatcggaacaagaggtccaggggagacaaagcttgaaaccgaccggcgccatatcagaaaccggattcatgaaatcaatgttcagctgtctaccgtcattcgccacagaagcagatacagagaaagaagaaagaaaaacggtgtactgcaaatcgcgcttgtcggctacaccaatgcagggaaatcgacatggtttaacaggcttacagacgccgacagctatgaagaaaaccttttgttcgccacacttgacccgatgacccgcaaaatgatgctcccgagcggatacagcgtgctgctctcggatacagtcgggtttattcaggatctgccgacaactttgatcgcggctttcagatcgacgctcgaagaggtgaaagaagccgatctgattcttcatatgatcgattcttctcacgaagactacgagggccatgaggagacggtcaagcgccttcttgaggaacttgaagcagacgatattcctgttttaaccgtctataacaaaagagaccggaagcggcctgatttcatcccttcttcagggagagggcatatcatgacgagcgccaaaatagacggagacttgccgctgtttaagcaggcggttgaagactatctgaaaaaggagctgctcgttccgtatgacgtgagaattcccgcttcagaaggaaggctgttgtcgagaatcaagtctgagacaatgacgaacagcaccgtttttgacgaagatcgcgaagcatatgaagtggaaggatatattctccctgaccaaaacattttgggagagctgaagaagtatatgtaggaaaggatactgcaaaacatgtttgagacattaaaacacggagatctactaaagaaaacggcggtggaggctgaaaccgacatcgcacagatccacaaaacaattgatgaaatcagtgaacgaaatgagtggagggtgctcgaaagctacagaaagcacaaagtatcggacacgcatttcacaccatcgacaggctacggctacgatgacatcggccgcgatacgctggaaaaaatctatgccgacgtcttcggcggtgaagcggcccttgtcagaccgcagatcatctcgggaacccatgcaatatcaatcgctttattcggcgttctccgcccgggggaagaacttctttacatcactggcaaaccgtacgataccctcgaagagatcgtcggcgtcaggggcgaggaaaactcggggtctttgaaggatttccagatcggatacagccatgtcgagctgacagaagagggagccgttgattttgaccgggtggcagcttccatcacgccgcagacaaaggtcgtcggaatccagcgctcaaaaggatacgcagaccgtccgtcttttacaattgatgagattgagaagatgattcgctttgttaaagaaataaacgaaaacatcatcgttttcgtcgacaactgctacggcgaatttgtagaagagcgtgagccgtgccatgttggagcggatctcatggcaggctcgcttattaaaaacccgggaggcggcctcgccaaaacaggcggctatatcaccggcaaggaaaaatgggtgaaagcctgctcctacagaatgacttcaccgggaattggcagtgaagccggtgcatcgttgtacacgctccaggagatgtatcagggctttttccttgcgccgcatgtcgtctcccaggcattaaaaggagcagtgttcacagcccgattcctcgaaaagctcggctttaggacgaatccttcatggggcagcaagcggaccgatttgatccagtctgtcgaattttccaccccggagcagatgatcgcgttttgccaggcgattcagtacgcttctccgatcaatgcccatgtgacgccgtatccgagctatatgccgggctatgaagacgatgtcattatggctgcaggcactttcgtacagggagcaagcattgaattatcagcggatggccctataagaccgccttatgtggcgtatgtccaaggcggattaacctactcccatgtgaaaaatgcgatatgcagtgctgtggatgcgctcatgaagcagggattaatgtaaagaaaataaagaatattttcatgtaaagaatccttacatcgagttgacacattatataacatcacatataataaatttatataagaaaggaggaaattgagatgagtgataaaattcgccgctcaatgcccttatttccgataggtatcgtcatgcagctgactgaactgtccgcaaggcaaattcggtattatgaggaaaatggactggtatttcctgcaagaagcgaagggaacagacgtttattttcattccatgatgtagataagctgctcgaaattaaagatttgatcgaacaaggtgtaaacatggcggggatcaaacaaattttcgccaaaacagaaaacgaacaaaaagaagacaaacaagacaagccgaaaaaagcagagaagcacaacttgtcggatgaagaactgagaaaactgctgaaaaacgagctcatccaagcaggccgtttccaaagagggacgacattccgccagggagacatgtccaggttttttcattaatttgttagcaactgcattgctatatacatttaccttttagaggaggagttttacgaatggcaaagtatacaagagacgacattgttaaactagtaaatgaggagaatgtaaaatatattcgccttcagtttacagacattcttggaacgattaaaaacgttgaaattcctgtgagccagctggaaaaagcacttgataataaagtcatgttcgacggctcttcaatcgagggattcgtccgcattgaagaatccgatatgtacttataccctgacttagatacatttgtgattttcccatggaccgccgaaaaaggtaaagtagcccgcttcatctgcgatatttataatccggacggcacgccgtttgaaggtgatccgcgcaacaacttaaaacgcattttgaaagaaatggaagacatgggcttctcagatttcaatcttggaccagagccggaattcttcctgttcaagctagacgaaaaaggcgagcctacgcttgaactgaacgacaaaggcggatatttcgaccttgcgccgactgatcttggcgaaaactgccgccgcgacatcgtacttgagctcgaagaaatgggctttgaaatcgaagcgtctcaccacgaagttgcacctggacagcacgaaatcgacttcaaatacgccggagccatccgcgcttgcgatgacatccaaacgttcaagctcgttgttaaaacaatcgcgcgcaaacacggcctgcacgcaacattcatgccaaaaccgttgttcggcgtaaacggatcaggcatgcactgcaatctatcactcttccgaaacggcgccaacgccttctttgacaaagacgccgatcttcagctgagtgaaacggcaaagcaattcatcgccggcatcgtcaagcacgcaacaagctttacagctgtgacaaacccgactgtcaactcttacaagcgccttgttccaggctatgaagcaccttgctatgtggcatggagcgcgcaaaacagaagcccgttaatccgcatcccggcttcccgcggcatcagcacgcgcgtagaagtcagaagcgtagacccttctgcgaacccgtaccttgccttgagcgtacttcttgcagcaggacttgacggcatcaaaaacaagctggaagcaccggctccgatcgaccgcaacatctatgtcatgacaaaagaagagcgcctcgaaaacggaatcgtcgaccttcctgcgacactcgcagacgctctcgaagaattcaaatcaaacgaagtcatggtcaaagccctcggcgaccatctattcgaacacttcgtcgaagcaaaagaaatcgaatgggatatgttccgcacacaagtccatccttgggagcgcgagcagtatatgtctcagtattaatctaggaatcccttggcaccagcggtgtcaggggttttgaattttggtcaaaagaatgtaaggggtcttctttttggtctttgaccaaattatgaccaaaaaaatgtgaagttataatctaactccataattgcctcgtaatctttcattctattttggtcgctatttactgatatatttgatgtcagcacctgtatttcaagagcaataccacgtgaaaagcgtggtcagcttggaatgccgcggcaaaagtgacctaatgaactaaatactaggtggggtggacatgttatattagggtgaacaataagctgagggaggaaatatttgaatgcttgaattggataggaatataaacaaagtaaacggccttaaagaagagcacgcaaagggaatcctgaagattatttgcggaaaactggataatctaaaacacgcgggtgatcaatatacagagaaagaatttgtcgaagatattcgatcgataattgagaactttccagaattagataataaagaagagaataatgaataaaaaatccttcttgcaagaaggattttttttataaccataccacaccgacgacatatacgatcgatatagttataaacaatttttaaaacgggaggttttgaaaaagcgaaatagtaataactaaagttgataaagagcccaaagatatcaaagatacaatttttcggttgttttgcttttttgaagatttacttagttcataaattaatgcaccccataaaagcatggatgccaaaataataatactcatatacgcataattctcctttttatggttaacattgtcatcaattttaccacatttaggattgagatgtcgatgaaataagcatctttatttcattttaactcttatagatttgatttcttcaggtctatttcattcttttactgaagaacaaaaccgtttattttcaacgcggacattatatttccttcgaagttctcactatgaacactggtattcacttactctctagtatagagttccttattgaaatgtctttattgcttttgttgtcgaaaatgaaatggaaaccttttatagccataacagaaagagactatgcaacaaaaaaggctaacaaaatgaggttgcaagctgcagcctttttagtttgaaaaaagtcagtacaaatggaaagaaatcatccaactcgctgctgtactttaaggtgacaagtgaattaagtgaaaggagagactgtacgtcaggtccaggaaacgttggctgttctgagagcaaggtattgacggctatacggccagaaagcggcgggaccgtctactggtggtatttacgggtctaagacaaaagattaaaaaaattagaaaagttaagtaatacaacaattttaacagaatgaagtatacgtagataaaaattttgaaagaaatctgttgagttgaattggtcttgaggaataaagagctgatttaagagggaaagaaacaataccgctgaaaaacaactattgacatatgtaagtaaatagaataaattattgattgtcaataaaaaacaacttattttatcataacacacaagttataaaaagtcaatgtttttttaaaaaaagatgcttttgaaaggaagagaggtttatgaacttatctcgttttttgaattccattcaattatccccacaatcaaaacctatgatggagctacttgaattaaatgaaaaaacaaaagagcatggcctgatcttaacacccagcgatataaaaatgttaatcgtttatagaaataaagtgcttcatgatcatggacgtatagaactggggattgaagtactaaaggaattaattgaggtgtttgctgcttcaccctatatggatgaggataattatgtcgaaacgttaatcgagcttcaggagattttttattatctcagaaatgaaacagaagataagataggggacatgaaactgattcatcagatgatggagtgttttaacgggccttctgccgggtctttagagatattaagaagtaaaatggaggaactcgcggagagtttcagaagagatacgatgagaagtgagtctttatataaaggtgatgaataacatggacaaagaaaacactttaaatcgctatgatttggtttcaaattttacgattgataaatcaaagttaaagcaaagccaatatatgttgtcgcttctaaaagaaggccaaagtgttggagttattaccagcgagaaagcatacaagatacaggtagagattatgcaaattctgcaacgattggtaggccagtataccaaaggggaaagtatgtcggtgacaacggaaacggcggaagggattatggtttccctcatgtatgcaatagatgcttatgctctccattttgagaaacctgaagagtttatagtacatttacattctgatagtataaaaaatatatatacaaatggtgtcgcattacttcactgttattttgaagaagctaaacaattatatcaagacgtaaaaaaaataaaattagatgtgcctgttgatgcttatactttaaccattgacgaatcgttacctgtatttatgaatcattataatgttatttttgaagctcaaaataccatggcgagcattgactatcctttagccattgacaacatggaactgcaaggtgttttttatattaaacagtatttagagcgactgctgatagaaacgagattctgtcacttttttaaccatcacgatttaatgtatgtcttggcaaactttggaagaatatgtcattttaattatcgcatagaactttttaatatttttgagttaatgataaacaatgctgttttttcactcctatccgggggcgaagccaatcaagtcagaatttctgaagttcaatatgacaggttaagtcgcttgttaagtgattgccatgctgataaaagggcaaacttaattaacaatgcatttgatcggttacagcgggatttaaagacggatcaaacaatttctgattatatcaatttgtatcgcaatgaatttattcaaagggtaaataacgctgcggaaattgatggcttcaaaatgttgatcatcagagaaattgaagagagagaaaaaccaatagcgttaatgttaaatgaaaatgatcgcatgagtgatattgaattgcggaaattggtggattgcatcatggaacgaaaaaacacagcagaaaaaatattgctgatccgcgatcattttgtttcactacatgattatttggatttgctaaattcggggtgtctgtttgacgacgaatatgacgcactttttgctacgtttgggaattttgaattggccatttttgcgaaaattgtattttatgaagaattaagagggggaattctcaatttcattgacattgttgctgactgctctgaagcaaagagcgagtgggaaacatattatatgaaatttattaaacaactagaagatgagcgcattgcaactattggacacctgatcaacgatattgactatgaggagatttcgttttattaagttaaagacgttattataagttcttttaaaaagaagagtctaaagaaagacgaagataaataacagcactcgattaaatgcaatctcatcccgctaaggaaagttttttcaatacaacttaaaagcttaaagtaactctactccaatttgcttagtgaattttacttttattctcttttcttctccaatacttataaccatgaaatcttcaactttcttaatgctagttatgttttgaaaaacacctgtaaatactaagaaatctttataggttatatccaggctacaagttagttgataaacatccagcgttaaaattaacttgaagttttgattatctttaaaagtataaatcaattcgccggcctctggatcatcagctatactgaccggctcgctctcaaaaagttccagtaaatcatattcattatattttataaacatccaactgactccttaaaattatagtgatattaatgaagttaaaaaaacgcagatctttaaagatttcgatcattactgtgcaataagaatttctgtttttcaatcgttgcaacttcaaaagctattcctctcggtattgttgtgtcacttgaggaaagaatcatgcatggaagtgaaaagaaggctgagtatttgttcaattctataaggaaatagcagtataatcaacacctctttaaagggaacaaaatgatgaatacatctactacgatggtcgtcctggtgaaatcaggctagagccgtccggtgcatccgaaaaaaactccggaaagagagggacacttaacaaagtatgaatagtgaaatagacaaatgtatattttgtgaaatagttagtcggaaaatttcaagttttgaggtttataaaactgactatgtgacagcatttcttgatataaatcctgttacaaatggccatacattaatcataccaaataagcatattgaaagactggatcatataaacgatccccatctatctaatgaaataatggattctttaattaaagttcctcaattattaattcagtcaggtatttgtgatgactacacgatactctcagacaacggtcactttgctcagcaagatattaaacacctgcattttcatgtcataccgagacatatgaatgaaaagtttgaattcaaattaaacaccgactttactgcagctaagaagagtaacttactttcgatatggaaaaagattgtagggagatgatgagaaaagatcgtaccagaactttaaaagtggaaagatgagttgatcttttgttttagtgcgggttttgctgaattcatcatttcggcctcagaaattcttccctttgttgtataatggtaaccatgattattaatcatggttgcaagggagtaaattatgttattaatagcttttgtattcgcgtattttatcaagcagccgatattaagttttgggacactttttcttttcatctacggatttagattttcttctaaaggcattaatgctgaaaaatgcgattattatattaatcaatatagacttatattttgcttcgtcatacctttccttaatttttatatgtattggtcaacgataggaggtaatgcaggattcgggtttacgtttagcccgcttaccctcatgcaaaagctgtctttcttgtcacaagttattttgatattcttaccagaaattcgcaaatttttatctcgaaaaaacttcattcatattgatgaaaagaagcaaaaattagcatcggttttgtatccaattgctttaatcctaacaatttgtatggcatattgttaaggatcttaagcaatggcctttactctacatgaaagttgcatccactatactttgaagggggctattgatgaatttcgatccggaaaaactaaggaaatttcttaattgcgcgtcaaacccgtcaagcccaaagaatacaaagattaaaaattactgtgtgaatcaagaatgccaggagtttgtagcctttgatattgattttgaaaatgtagacatcgctctgcgtattgccggcatgttggggaaatccgccacgaaatttacgataaatcattttcttttccctggtacgaacaaaatagattatattcaatttataatttttgaaattaatgattcagaactattagcatttttagagcaactataacagcattcttgtttgaatgcagttctctgggtgaaaataaagcagggatctcccccataagccgcagcaatcataattgtcttagatatttggtgttgcgaacagtccctttgcaagacagcttcgcgggttcatcaggctcagccgattagatggccaatggtctgtgtgaaaggccttggcagaactgccttcaaaaaaaaacaccattataccaatcaggagggcaaaaagtgttttttgcaaagatcatcgatcgtttagccttatatgatttgcacagaaaaagaagtaaagatgaacatttttccgctttttcattgaatccgattgacagagacgaattttataaagcaaaagcggctgatgtcgccattatgctttatgaatcaagaaaaaaccatttggccggacatttcagctatgaatctttaattccatccggggaccctgtcaacgatgctttaaaaggcgaggtttttttaaataaaaatgatatagatcagcctaatgttatttttgtgcacggctggcgaatggattcatacgacagaataaaaaagatatttcatgatcgtattatgaacgaattaggctggaacttgtattactattctcttccatatcattttgaaagagagccggaacattcgctttacagcggagaattgatgataagcgcgaatttgaatcgtacggttgattcgacgagacaagctatcgtcgatttacgggctctgattcattggatcaaagcaaataaaaacggccctgttattatagtgggcgtcagtttaggcgggtggatgacaaatttactggctacccttgagactcaaatcgacatagtggtatcgatattttatgctaatcgtctttcttatgcgatatggaataccatcccgggtaaattcataagagaagaattagaacagcacggtgtgacatatgaggatttaaaaacatattgggaaatcacagatcccagccaagctgcgccgaaaattaacaaagataacattttgctgatttccgccgtgcatgaccaatatgttcacttagaggatgctgataagttgtgggaaagctgggggaaacccgaaagacatctctacaactgcggccatgccggaattgttctttgtcgcaaaaaactggcattagatacaatttctttcatccgaaaaaaattaaagcagcttcataagtaatttcaatttattaataagcgggcaatttccagaatgctaaatcattatataggaggctttttatgtactttgtttccggatttgtttcagttttgcttggtctcgtcatgctatttaccttacggttgttatctgttgctattcctcatgttataactgatgcagctggcaatgatgaagcttcagcttattttcaatcctctgtattattttatcctgtgctgctgcttattttaggcgtagtcttgattatcgttcatttgcgaacaaatgataaggaaaaggattcattcaaaggcgagtaaaaaatggctaatccggaatattgggccaaagtgagcggagtggtgagacagtttgtttcgatctaaacataatatcccaaaagtgaaatttgattataagttcacatctgatgaatcagatatcccaatgaaaatgagaaaaggcccttcagtagcaatgagagtagagggagaacttgaaatcaaaataaatgaaattacatattttaaagaaaatatcgccttattggaattttatgtttctttaaatgagtggattaaaaagaacaagaaaaaaaacaaagttacggagtatagatattacacaatggagtatgaaaagggcgaacccattatttcattgataccatttgattataaggctcgactaacgaccatttggaaaactcaacaattatataatgtattcgaccttgattacatcaccgaacaaatggaaatttcacacaaaaaacttggacgtgatattgaacatcattataggatttcattgaaaagctttgttggtaagatcccattaagaaaatattgatttatcctaaaggctaaaaacaccttatctgcgatgtgaaaatgaaatgcatattctaaaagaagcgggtatatcaatggctatgaacggagaatcacaacaccattgatatggaagcatccaaaaaaggagaataaaacaatgaacttttggcacaagcgctttcaagatgagaactatgtgtatggaactgaaccgaatgcgtttttggcagattcgcagaaaaaacttcaattgtcgggcgatgctttagccatcgcagaaggcgaggggcgcaatgcggtttttttagcagaacaagggatgaacgtcacttcatgggattatgccgaatctggactgaaaaagacgcaaaagcttgctgaaacccgtcatgtatcagtaaagacggagcttgttgatttaaatgaagcgtcttggaatcaagatcagtgggacgagattgtatgtatttttggacattttccagaagagctgcgccgaaaaacgcttctgggagtaaaaaaagccgtgaagcccgggggctttttcgtaacggaagtgtattcgacgcaccaaatcccttacaaaagcggcgggccgcaggatccagaacttttatatacacccgaagaatttttgcaaatcttttcagattggcgtactgtccacttttttatgggagaagtcgttcgtcatgaaggagattcgcacaacggcctgtcccacgtcattcaatttattgggcaaaagcaataaatactgcctgggaaatctgattttaaaaaggcgccgttcacggcgcttttttttgcgtaaccttttcaccctcattactactaatgtagtgaaagcgggggaaacgatgaaaaacaatattagactcaagcggctgctgatgatcagcgcaattttgcttttaatcgtcgggggatatgtcagtgcaatgatctttggaaagaaagtggtgtatgaaggaacgggagaaagcggtctgtggcatgcttcgattgagaaatcggataaaacgtcaatcgggcctaattattttttgaatttatattggaatggcacggaagaagatgcgaaaagaacgatcgtgaaaacaatcaccttatacatagatggcaaaaagtatgatgacagaggagaatacgatctttccgagtatacgggagaggaaatggatggcggaggccatatggaagatcatatcgcgacttttgattttatgcctgaagaggatgttatcgggcatgcattatcagttaaagtggaatggaaaaccggagatgaagaaaacgcggaaacaatgaaattaaacaagattccgtggtataaatgaaacgacgatcactgaatagggaagtgatttaaaatgaacgatattgagatcagaaggccgcgaattgacgacgttgaagagctgaatcagtttttcagaattgtggtcgaggataccttcgctaaagagggaatagccgatctgctcgatgataaagaaagtgaaattgaaagtaagaggcaatacttgaaagcagatttagacagcaaggggaatagccggcacttttttatcgcttcagatcaacgtctgaataaaatcatcggtactatcgaatatggccctgcaagcgaattgatcggcatttgtacggatggagctttaaaggatttatatgaggtaggaacggtatttgtccacccggattatcaaagacgcggaatcgggactttgctgttgaacgtcatgtttttgacttttttgaatcagggagtaaatgaattttgtttggacagcggctatcccggtgcccagagaatatggaagaagaaattcggcgagcctgactatgtgctgaaagattattgggggaagggatacgatcatatgatttggaggagacggacgaaggatatgccgattgatacaagaacatcagtcatgccgtaggtgctgcccatagagggatcacgaacaaaaccatcctttatattccatatatgtgttaaccataaaaagaacttttcttgaatttatttttaaataaattgttaaagttaaaaaagtcctataaactataatagaatcttaattttaggatgtgggagatatgttcaacgaaagagaagcgttgcgtttgagacttgaacagctaggtgatgcggagatccaggtgatgcgggaattgcgaaaagaacgagagggcatttattcgaagctgcgtgaattggatcgggagagtgagcctgcaattaacaaaaaatcttcattaatcgacttggcaagcgctgcagcagaggaattaaaacaatcccagcatgccgctgacaaacatccgcctatcaagaccccatctcatactattttccaatcaaaaacaaccatacagcgtgaggctgccataaacattttaagccgctatgaagagggcttgaaaggcattaagctcaaaactgaaatcgagaaagaaaccggctttccgattaaaaacatgacgacatttatgaagagcttaatgaaacatcgcccagatattaaaaagcctgcccgcggccattatattttgcataaagaaaaagacctttgaggttttcgtcattattccagattcatattgtcataaatcagagcggaatctttaaaaattgaaaccaaacagcacctatatcgtatatttagctaaaactaatgcaagggtgttctacatgttggataaaaagaaatacttcatgattatggtaccggctttaattttagggtttttatttcaattttttgttccctcagaacaaaggtacttggggattgtgtttattttagcaggcggggtgatttattatctttgggtgcatatcgaaaaggacaaacagaaagattgagctcatcctttgagttggaatccactaaaaaaacgtctgtttagacgtttttttagtgatatccattgttagccaacctgctgggcggcaaccgactgagccggtaaacaaatgctcaaacagccgtttctcccagattttatcgatcttttaactttaaggcgtaagctttgaactgttaagagctttgatgcttaagctttaaacgctgaacgctgagctttgagcttttatctcaatatgggcacagcgtctctttggctgtgctgatgatataaaaggagggagtaacctttccctcggaaggtgtttagtttgatcggttttcggttgactaacaatcggccgtcaatcgatggtgattttggtgagtgtattgctctcggacaatgcaaagtcaacttccatttcaaagtcctcgatcttttttgataagcaatcgatcttctcttttagattcagcggatcgatgatttttgcttcattttctgcgaggaaagatttgacgatttcctggttttcagccgcttttactttgccgtcttttccgaaaagtgtctcgagatgcttgtccagtctttccgttactttttgattgacgttctcggcttcgccgactaaatcagcgtacacttccttcagtttatccaaaagctgaatgtcgtagctgatagaggtttttctttcgatggcttcagctacggtcatcttgactccggccacttcgattttggtcgtcgcgttggatacaacaatggcagacttaatggcatttcgccttttgattaaggcttcgattgattggtaatcggctttcgctctggattccaagtcttcggttgtccgaaatccgtttggcagtttttttccgatcatcaagcctccgaatgtggcttcatttacggcccgcttgattcttttatccaacattttgagttcgcttagtgctctggtgatcgtaagttccattctatagcccctttgtgttttttatattgaaaaggtaaaatgcctttatttactcataagagtaatcattatatcatatttattttccaagtgttatattttgagtatatattttcatattgtataatagtccaaaaagattaatagaaatctataggaggtctaaccgtttgcgatttcattgttacgatgaacattgcatttcccttgaagcagaacagggagatcagcaaaaaatttaatatgctcgacaatgaggactggtatcaaaatatcgccaaccgactgggaacctttcagtaaggcgctttatcgcgcaatcggatgctgaaaggatcttaaacggtcatgaagaaaccagtaagttccggattgaatgacaagagcttttagcaaaagaaaagctatgctgagtactttccttaattcctattgtttgtctttgttcgtttcactgcaaaacatacagcgaggacggctgcgataagggaggcagctccgcatgccagcttgatcagcggtttcaacaatatcaactccatctgtttcggtatatgtgtaaattataaaagggattcatatccaaagacagcttatgattaagattttaaagaaattttaaggaaataagtcctatgccgaccggttgacaatgaaaagccgatcatctaaaatgaatgatagtcattcatttttagggaggtctgcatatgtcaaagcaaacgtccgggaaatatgaaaagattttgcaggcggccattgaagtcatttctgaaaaagggcttgataaggcgtcgatttcagatatcgtgaaaaaggcgggtactgcgcaaggcactttttatctttatttctcatccaaaaatgcgctgattccagcgatcgcggaaaatcttctgacacattctttggaccatattaagagcaaggtcgacggaaccatgtctttctggaccgccttggatatcatgatcgatgagacgttcaacatgacggaacttcatcaggatattatcgttctttgctactcaggtcttgcctttgaccattcgatggaaaaatgggaggcaatctatcagccttattattcctggcttgaaggacttattgaaaaagcagttgagaaaaacgaggtcattccggacattaatgtgcgctggacggcccgaacgattatcaactttgtcgaaaacacagcggaacgttattacatcggggcggaaaacgacgaagagctcagtgtgttcaaaaaagaaatatttacttttctgaagagaagcataggaaccaagtaaaaaatgaccggctgcagctgttcattttttatcggactaaaaaatgactgacgttcattcacaataggaagggtgttatcattgagttggctcctcgtaattgctgcgggttttttggaagtggtgtgggcctcaggtcttaaacatgcggattcattcgtcgattggctgatgatctttgtactgatcgcggtaagctttattatgctgatacgatcttacaggaacattccgatggcgtcggcttataccgtatttgtcgggatcggaacggccggcacatatgtgacgggtatttttatgggcgagaccttttcaggagggcaaatattctttttgatcgtgctgttgggaggcattattggcatgaagatgtttacaaaagagaacaatgcccagtcaggaggtgatgaatgatgccatggatgtttttagtgatttccggaatcgaagaggttattgccgccatcgctatgaaatatgtagacggcacaagaaaaaaatggccgattatcgtcatggtgttggggtttggcttgtcttttttctgcctttcaaaagcaatgcagatgctatcagccggtgttgcatatgccgtatggaccggaatcggcagcatcggcattacggcagtcagtttattttggtttaaggagcgtattcgtgctccgcagctcatctcgcttggctttattataatcggggtgatcggcctgcgccttacatcatcttaaatttttaatttgcattggaggttgctgatatgattaatcagcttaaattgcgtccgcttgaaagagaagaccttccgtttgtccaccgtcttaacaacgatgcgaaaattatgtcatattggtttgaagaaccgtacgagacttttgttgagctgcaggatttatttgacaaacacattcacgaccaaagcgagcggcgctttatcatagagaaagagactgagatgatcggattggtagagctggtcgaaattgattatattcacaggcgggcggagtttcaaatcataattgatcccgagcatcaagggaacggttattcgtcaagcgcaacatatttggcaatgaactacgcattttccgtcttgaacttgcacaaattgtatttgatcgtcgacgaagataatgcaaaagcgattcacttgtataaaaaggcagggttcactatcgagagcgagctgcaggatgaatttttcgtcgacggctattatcgtaacgccattagaatgtgcatttttcaggatgagtttttatcacttaaaaaaagcaaagaggaaggcatgcagggataaataaaagagatggcggcgccatctcctgcatgcttttttaatttttcacacctaattgctctttggctttggcgggaatatcgtctttgtcaacctcttcccatgacttcacgcctttgttttcagaatagaaaagcctcaaaaacgcgcctatgcgaaggtttttatcagctgtgaattccattgttttttcttgaccgtcttcatcaaaaccggccagttcatatttgaagacggagtattcctcgccgtcgtcaaatttcgacgtgtcttcctccccgtttccagtaatgtgaacataatattcgtccgtccccacacggtttaagttacatccgcttaaaaatgcggcaaatatgatcatcaggctgatccatggaatatggtttttcactttttctcctcatttatgtttctgtctaaaatgataagattcattgtctgataaaaaaattgaataacgtgacatgaacattacacttttgtaagggatcgttttagcacacgcaggcaaattaaatttcaatatcctttttattcaataaagtttataatatggaaaaaaggaggggcgccaatgaaaaaaatcgtatgtttgatggtgttttcaatcatgacggccttcggtattcacatccagcctgctgaagctgcggttataaaagatgagaaaaagatgaccatgacaatgactgaagatcatgtgggattttttatggcggacagcaccaatgtaaattactacccgacatggctgtattacaagcttacgatttttaacgcggaaggctgcacactcaacatcaagctgcagagaatcacgttaacaggacatgcggtcactttaagcgagaaagagtatacgggaaatcatcttcatttaagtgctgcagataaagtgagcgggtcgccgcaccgaaatcatttcttggatatcacaaaagtgtcggggtgcggggatgttggaatcacaggtttttacggctttgagcaccaaatgccgggctactaattgatatagaaagcgcgggaggggacttttccagagtccttttttcatatcatcgcaaaaaatgctaaatatcaggagaaaaaacaaacgctgcttttattgagaggcgccatcctcttgctgctatgttctgcggctggttatgctctttatcagcatgttgccggaggccggaatgaacaggcaggcgccgtccttcatcagcaggcattacattttaaattatcgactttagagggcggtgacatcgaactgaaaaaatgacggggaaaggcggtacttgtcaacttttggggggctttttgtacaccgtgcaaagaggagatgcccgtcatgcaaaaagcttatgaccgttttaaaggagacggttttgaaatcatcgctgtcaatgtgcgtgaatcgaaaggtgcggtaaagagctttgtcgaccgccatggcttaacttttccggtcgcttggatcaatcggctgaagtttaccgttcttgggaaatgtattatttgcctgcaagtatattcattaatcgggaagggagagcgtagcgaatgtatgtcggaggaatgtctgagcggcaagttgatatgtgggttgcagacattcttagcgattcatagaaactcattcaaaaggcatagacaaacacctattgttcttatcgttcataaggtagctcaggagaggagcgatcttatgttttttcatattaaagaactacagtatcacgcaaagcctgataaacccgatccattatttgcgaaaaagctgcaagagatacttggaggacagttcggggaaatatcagtagctctgcagtatcttttccaaggatggagtgtcaggggcaatggcaagtacaaagatctgctgatggatacaggagctgaagagcttgcccatatcgagatgctggcgacgatgatcgcaaggcttttggacggtgcgccggtcggtgatcttgaaaaagcggcaaaagatcctgtgatcggtgccattctgggagggatgaatccgcagcatgccatcgtatcaggattaggggcgatgccggccgacagtgtgggaaaccgctggaccgccgattatattatcgcaagcggaaatttgcttgccgactttcgggcaaatttaaacgcggaatcacaggggcgcctgcaggccgtccgcctttatgaagagacgacggaccgcggtgttaaagatatgctctcctggctgattgcaagggatacgatgcatcaaaaccagtggcttgcagccatcaaagaactggaagcgaaagaaaatgtcgtcgtcccaagtacgtttccgcgcaatctggaaaaaagggaagtctcccatgtattatttaatttttcaagaggcaacgagagcgctgcaggcagatgggcgaagggaccgagcatggatggagaaggcgtttttcagtatgttgagcatcctcagccccttgcgaaaaaaccggtgttaagacctgcgcctccatatattcatgatacgccgccatcagttattcaacatcaccgggatgatgtactgcctccgaatctttattgaaccgctttatttttcctatgatcatatttcgggcttgcagcgaatagccatattgaagaatggtatttaaagggaggcgcaagcttgaaaacttataaggaaacggccgttttcgaacataccttttggcttcaggttttaggtgatcatgcgcgttttattttggactctctcgccgaaagggaaaaaaacgatattcaaaaggcgaagcagttcaagcaagcgtttgatgttttgctgaaaaaagtgaacgcttcgcctgatttgtattcattaacgcttgaagctgaagaatatgctcttcagttcaggaaatttaaactcttcatcattaaaaggcacctgacaggcgatattaaaattcacctttctccaacttttatcaaccatatggtaaatgaactggaggaatatttgcttgtgctaaaatacttgaaaaagcgggaagcgccgcctgttttccacgagctgcaccaccatatgctgtggctgatggatgccgccggacatgccggcgcgattgccgatgacttggatgcggttgaaaaacgattgaaagaaaagagccgggagtttgtcaaacactttgaacagttctacattaaatccgttgaattgacgggatatctcagagcgaatgttgaatcttttcccgctctcagaaggatgaacaaagacgtgaagcttgagatcgaactgttccgtacatttttgaaagaagtggaggaattggagcttacagatcagatgctcggtacgttctccgcactgatggcagaccatatgatgagggaagaatgctattatttaatgaaaatcgccgaatcgacaaatacgcaagaacctgcgtgcgaccctgcaaaaccgaggctgcttgaaaagtaaagccgggcggttttgctgtttttttgatgaagctgcgaatcgatttggcacctgcaagtttgcacagcctttttcatgcgattataattcagaatatatagaaaatctaaagactgtttggagggctttttcgtgcaagtcagaaaaataaaggattcagatgccaaaagctatctcaaactctgtgaaacgatcgatgaagaatctgaattcatgctgtttgaaccaggtgaacgaaagcttcacgcgcaacggcaaatcaaacagatcgaatccggaatgtgcgaagtttttgtttgtgcggctgacgacggaagcttaatcggatatgttgcagcagccaaggggcaggttcagagagctcgccaccgcgcccatgtggtgatcggcatacgccaagcgtatatcggacaaggtattggagtaaagctttttcaggcattggaaaaatgggcctgtgaagaaaagattcacagacttgaactgactgttatgactcataatacagctgccgttcgtttatacaaaaaaacgggctttatcattgaaggcactaaaaagcatgctttgaaagtaaaagggcaatatgttgatgaatatgtcatgtccaaattaatcaacgaacagcaaagggaggtttcaaatgaatgacgggtgccatcaggccattgctgctgtcagctattacaaaacagaacggacgattgattttaaccggcaaacttatacaaaaaagcagaatcaaatgtacttgtacaacgataaaattttaacagcaagccgccagtatcgtttggagcacgtctatgacgtttcatacagacctttttccgaggccggtttgctttacctccatacgaaccagggggtatttgcttatgaagtgaacgttgaccccgggtatttcattgaggcttttaaaaaacagaaaaatccaattaaataaattgcaatatatatgaagtttttagcagtaaatgctagaatgaatgttgggaattttgcaagggaaggaacataccggagcctgttagggcgattgaccttgttggcttaccgggcttatgccacttggcggtgtttatatgtcactgctatgcttgatggtagaacgtccgcttaggctgcaggtgtatgtttgagcaaagattttaagcggctttttccaattttctttcacataacaagtccttgacgttcccagtatatttaaatacatagacggtttaacttaattagagaagtagagaggacaggacagcttaatgaaaaagaagacacagaatacggttcaaaagatcgtagaagccggatatcgtctgttcgcccaaaatggatattcggcaacctctgtagatgaaattatgaaagaagccggtttttctaaagctacgttttatttgtattttaagtcaaaggagatgctgtttctccatattatgaatgagcagatggaagatcgctttcagaccagcatgaattgttttcgaaaaaagacgctgaggggattgctcgcggggattgaacacttgattcaaacatcaaataaagagcattcgacagctttatttttggaatttatggcaaatagtcatagatatcctgagattcaaagaaaggtagcccttctgtatgagcagtggagggagttttttgtcgaaatgattgagcagctgcaggaagaaggcattgttcagaaacagctccatccgaaggtgatggcgtctacgctgattgccatctttaacggctacaaccatcaacaccacgcggatccgtcgattaataaacaggaacagcttcagtccattattttcttgctgaatccgaagctgcatcttcagataaaagacaagctatgaatacatcataagacttttgaaacagccggcgctgccgaccttgagtcggcggttttttgcgtcagatgaatccacttcggtacgccgcacaacaaagcaaatcacatgcaaccgtttaacagcgagcgtttatttcttttaaatagttgacacaagcaaatcgttattatacaattatctcgaattcgagataattaaaaaggatgaatgccatgggcagtcaagatatggagagatatgaagaggagttgtctttaaaggcatttattgtcttgtctcgagcattacaatcgattaaaaagcgtgtggaagaagacattaaatgtttaggattaaatccaactgagtttgctgttttagaattaatctataataaaggcgatcagccgatacaaaaaataggcgaaaaggtattaatcgcaagcagcagtattacctatgttatagataagctggagaagaaaagtttaatagtaagaaggccttgtcctaaagatcgccgtataacatacgctgccttaacgaatgaaggaactgcactgatgaacaatctttttcctaaacataaagcagctatgaaaggcattttcggcgggctggacattaaagaaaaagaagttctaattgaaaagttgaaaaaactgggcttccatgcccaaagcatgtaaatttttttacgacaatatctcgaattcgaaatatacgaattcataataaatgtcgattgcgaggtagtagtaatgaccgaatttctagagttagtaaaagaaagacgatcagcaagtaattttcttcctggatattcaatttctgaacaggagcttaatgaaatatttgaaattgtaaaattggctccctctgcttttaatttgcagcatacaaactatattgcggtgttggataaagaaaagaagaacatgttgcatgaagcagctaatggccaatacaagatcctaagctcgtcggcagtcatcatcgttttgggtgacaaaaaggcctttcatcaagcaaaagaaatctacgaaggtttaaaactgctcggagtacttaataaacaagaatatgatgatatggttcacgatacggtttctttctatcaatccagaggagaagcatttcaaagggatgaagccatcaggaatggctcattatcttctatgctctttatgatggctgctaaagaaaaaggttgggatacttgtcccatgattggctttgatcctcaaaaggtaaaagaggtattgaatataaatgagcaatatgaggtcgtcatgatgatcacccttgggaaggaaaaattagaaagcagaaaaccgcggggatttagaaaacctgtaaatgaatttgtaacctatatctcataataaagctatgtttcatgaaagaggagtgaaatgatatgaaaaagaaaacaagcggaatccatcacattaccgcgattgtcggccatccgcaagagaatgtcgatttttacgctggcgttctaggtttacgtttagtgaaaaaaactgttaattttgatgatccgggaacataccacctgtatttcggtaatgaaggcggaaaaccgggaacgattattacattctttccatgggtgggtgctcgccgaggagtcattggagatggccaggtgggagttacttcatacgtcgttcctaaaggcgcaatggcattttgggaaaacagattggcaaaatttaatttgccttatacaaaaatgaaccgttttggagaggagtacttagagttcgatgatcctcatggacttcatctggaaattgtcgaaagagaagaaggggaaaagaacagctggaagataggagaaattacaccggacaaagcaatcaaaggatttggcggagcaacacttttatccaaacaaccggaaaaaacggctgaattattagaaaaggtcatgggacttgaaaaagttggtgaagaaggagattttgtacgttttcgttcttctggtgatatcgggaatataattgatttgaaattaacaactataggcagcggacaaatggggattggtacagttcaccatattgcctggagagctattgatgacaatgatcaattagaatggcaaaaatatgttgcagaaaatggttatcgtgttacacccgtgcaagacagaaattattttaacgcgatttattttagagaacacggggagattttatttgaaattgcaacagatcctccagggttcgcccatgatgaatcacatcaaacaatgggagaacagttaatgttgccggctcagtatgaacactacagagagcagttagaaagaagattaattcctataacagtgaaggcgctggattaatttttgcaaggaagtgattcaatgctgtccattgatccgcttacaaaaacggaaagagagaactacaagtttttaatcgggagtatcataccaagacccgtggcgtttgttacaagcctgtcagaggagggcgtcttaaacggagctccatttagttattttaatattgtatcttcaaatcctcccatgatctccctgtccatacaacgttctgaagggagccaaaaagatacagcgagaaacattctgaagagcaaagaatttgtggtccatatcgttgatgaacaaaatgttgaaaaagtgaatgcaacggccgcgagcctacctccaagtcaaagtgaaattcagttagcggagttaaccccggttgaaagtgtgaaagtctcggtaccgggggttaaagaagcgaaagtgcgcatggaatgtgttctggagtattcattagagttgggagataaacactctcccggctgcgatttcatgataggtcaagtcgttcaatatcatatcgagagcggcatttatgaaaatggaaaaatagatccgagaggcctcggagccatcagccgattggccgggcatgattacgcaaagattggtgaaatctttaccagggaaagaccgaagtaatataaccatccacgatatctcgaagttgagatttattaaactgaaatgttttaagcttattgtagcaaggaataataaaggcagcgaaactttcaagggggtggtttttaaaaggtttaaaaaaagaaaacaaaaaagcgggtgtaaaatatgggatttttagacaaattatttagaaaatcaaaggagatggatcatatgtcaaatgtgaaattagctgtagttttttatagtatgggcggaacaaactatcaattagcaaaatgggctgcagaaggcgcaaaagaagcaggcgctgacgtcaaagtattaaaagtacaagaattggctccgcaatcagttattgaaggaaatgaagtatggaaagcaactgttgatgcaacaaaagacattccagtcgtaacctcagaagatatagagtgggcagacgctattatattcagtacaccaacgcgttttggcaatatggcatcccaaatgaaacagtttcttgatacacaaggcggactttgggcaaacggcaagacagttaataaagttgtaagtgcaatgtcctccgctcaaaatccacatggtggtcaagaagcgacgatcttgtccttatatacttcaatgatgcactggggagctattattgcttctcctggatacactgatcctgtcctatttggggctggcggaaatccatatggaacgagtgttacagtcgatcaagacgggaagatgattgaagacgtagaagccgcagtgaaacatcaagcaaaacgaacggtgaccgtagctgaatgggtcaaaaagggcaatcagtaatatttgaaatttaaaagagccaaatgactggctctttttttagttggttcagttgaaccgtttttcttatttgatgtcttcatttgactgcgaacacgccataattgcgcggcataaggaataagatatccgacatatcctataacgatgcccgtgcaggaggaatccgtcttttaagttgatgatttcacaatgataaaatttttttctattaaattttaaaaaaatgaaactttaagttcatatgaacgtaaacataagtgaaatgattttatttagtcatacgatcaatcaacaaatgcaaaaggggtgaaacaaaagtgaaagtcatgattggttcgatcatattgctgctcattatagggtttggcgtatggcttatgttgagcccgctttttaaaaaagtcggaagcggggcgaccaaaataaagaaaacgctggaggacgacaaagatgaatgaaaaacaaccaaagaaaaataaaaacaaaacgctgctcggcggaatcattgtcgctgccgctttaattattggaggattcacggcctccctgttcatcgagaaaatcccgaacggatatgtcggcgtcgtttattccccgaatggcggggtaaaatcggaaacgctggatcaaggctggcatttagtcgggctgtttgacaaagtcacaagatatccggtacggatgcagactgtaaacaatcaggatattcaagtggctacttccgacggcaaaaacatctcaatggacattgcctacaactatgtcgttcagcctgataaagtcgtagaattgtttaataaattcggagcggtcgatattgaatcaatcgaaaacagctacttgaaaacaaggctgtgggacgctgcgagaaagtcgatttccaaatattccgtcattgatacatacggacaaaaatcatctgatgccgctgcagaaattcaaaaaacatttgcagatgatatgaaggggctcggctttgtcattgacgatttaacactcggcgtgccgaagcctgataaagcgactcaggaagcgattgacgcgcgcgtgaagtcttcgcaggaactggaaagaacacagacggagctgaagatcgccgaagcggaagcgaaaaagaaaaagatcgaagcccaaggtattgccgagtacaacgaaattattaaaaagtcgatgtcggatgaaatgatcaagtatcaatggatccaaaaatgggacggaaaaatgcctaaagcgaccggatcgaattccctgatccagattccgaccgatgagaaaggaaaataaaacgaaaaaaatcccttgccaagggatttttttcgtctcggtcgcacgtatataatggtgttaacaatcgtttctgagacagggggtaagatgttgtttgctccggaagccattctccgtacgtggagaaaatttgactcttttccgatggaaacgctgacaaaagcatggttttatcatcaggcaggagatgggagacagcgggaagtatcgatgatgaaggagcactatcaagagtacgggattgccggcaattgttttgacctttcgatttggctgctggatgagttcacaaaagaaggagtggaagcttttccaatcggccgttcgttcaaaacggaacgcgcgcatgccgcagtcatcgcccttgatgaaagaggccggcgctttttgtgtgatctgggagaccaatggctgcatccgattctgatcgattgcgaatctgaagattataccaatgaaaagctgggcggttttttccctgccgcacaagttcaagtcatgccgacagccggcggagttgaggtcctttaccatcggccgaacggaaaggtgtcgactcaagtctacaatacagaccctattgacatgtccgtttttttaaaggcggctgaatactcgcaggcggcattgaagcctgcgcctttactggaatgcagaattccgtttcagcatgaaatcgcccattgggaattcagcggctgggacatatatcttagtacgagcaaaggattatacagagaagcgaagccggacacaatcgaaggatggactgaaaaaatccacgatatctcaggatacgataaaaatgttctcaagaaagcattggagatttatcaaacccgcgcgtgatcttaaaccttgaaaaaaactcattttatacatatcatgtggaaagaggagaggataagatgagccattatgaccagcaatacaatgcaatcatacaaaaaattattgaatcagggatctccgatgaagaatatcaggttcggacgaagtgggattcagacggaacgccggctcatacgctgagcatcatgagcgaaaaaatgcggtttgacaattcagaagtgccgattttgacgacgaagaaggtggcgtggaaaacggccattaaagagctgctttggatttggcagctgaaatccaatgatgttcaagttctgaatgatatgggggttcatatttgggatcaatggcgtcttgaagacggcacaatcggagcagcgtacggctatcaattagggaagaaaaacagaacggttaacggccagaaagtcgatcaagtggattatttgcttcatcagttaaagcataacccttcttcacgcaggcatttgaccatgctgtggaatcccgatgatttggatggcatggctttgacgccctgcgtctatgagacgcaatggtatgtgaaagaaggaaagctctctttagaagtaagagcgagaagcaacgacatggcgcttggcaacccgttcaatgtgtttcaatataatgtcttgcagcgcatgatcgcgcaagtcctcggttatgagctgggcgaatacatcttcaacatcggtgactgccacatctatacccgtcacatcgacaatttaaacattcagatgaaacgcgagcagtatgaagcgccaaagctatggatcaacccggatatcaaaaatttttatgactttacaatcgatgattttaaattaatcgactataagcacggcgacaagctgacatttgaagttgccgtatgaacaggcggatttcccgcctgtttttttgtacagtgatgaaaaacggccttggaggatgattcaagaagatacagacatataatacggcaagacaggcacaagggctgtcgatatggagctgtttgcgggaattcattaaaacacgcggctgaagttatgtttttaccaacgatatcaacggttcatgttctgatgcaaaagcgatgacgtgcagcatcttaaaaaataacgtcatagaagaataaacgttcatttacacaatctaaacgtctttttcacaaagaacccgaaaagcaaaaacaattctctcttaatctgttagtaacaccagcatatacaagaggaggttgtttttgtcatgatcaaaaaatgggcggttcatctgctgttttccgcattggtactgcttgggctttcgggaggcgccgcatattctcctcagcatgccgaaggtgctgcaaggtatgacgacatattgtattttccggcatcacgctatcccgaaaccggcgctcatatcagcgacgcaatcaaagcagggcattcagatgtctgcacgattgaaagatcgggagcggataagcgccgccaggaatcactgaaggggattccgactaagccgggctttgaccgtgacgaatggccgatggccatgtgtgaagaagggggcaaaggagcgtctgtcagatatgtcagctcatcggataaccgcggagccggctcctgggtcgggaacaggctgagcggtttcgccgacgggacgagaattttgtttatcgttcaataaaaggcgaaaaacaaatatctttcctttgggaaacatttttgttgacaggaaaatcgttgtgggggataatggtaatgtaagcatattatcattccctctgtttcaggttcgcatccttcattgccgaatggatgtgaacctgttttttcgtgcaaaaaaaccgccgaccggcggttttgctgatgagtccgtgttttaatgaacagtgcggaaaacgccgatgacttttccgagaatcgtcacattctgaaggatgatcggctccatcgtcgggttttccggctgaaggcggatatgggtttcctccttgaaaaaccgcttaacagtcgcttcgtcgtcttcggtcatcgcaacgacgatatccccgttgtttgcggtgttctgctgcttgacaatcacataatcttgatcaagaattccggcatcgatcatgctttctcccatgatctccagcatgaagacgtgctcatccggcggcgccaggcgttcgggaagcggaaagtattcctcgatgttttcgactgcggtaatcggtgtaccggcggtcacctttccgatgaccgggacattgacaacctggtttttcggaatatgaatttcctcctctgtatcgagaatttcgatcgctctcggcttcgtcggatcccttctgatcaatcccttcgtttcaagccttgccaagtggccgtgtaccgttgaacttgacgccaggccgaccgcttctccgatctccctgacggaaggcggatagcctttgcgcttcacttcttctttaatgaaacgcaaaatatcaagttgtctttttgatagcttcgtcattttttgcacctcaaaacgtcgattttagctagattatagcatgtttttcctctgagtacaaacataggttcgaaaaaacgattgacagaaacatttgttcgtatgtatactgaagtcacaaaaaccgaacaaacattctggggtgatggatatgaaaaaagaatcattgatttttgtcagtctgtttactgctgtgatcagctgctgtattctgtttgtgtcttttgccggtaagatcgaagaaagaaagcaatatgttaaaatagaagtgcaagaaggcgatacattgtgggagctggccgaccggatcaaaggcggaaaaaccgctgacaaacacaaattcatcgaatgggtcgccgataaaaacaatctgccgacctctgtcattaaaccgggagatgtcttgatcctgccggtagccaaacagcactccgatcaatatcagcttgcagttgtagaataagagattgaggggatttccatgaatgcgattatttacaccagggtaagcactgcgaaggagcagcaggaaacctcattaaagcggcaggaggaagagcttaagtcgcttgccgccgaacacgggatgaacgtcgtgagcgtcatttccgagcaggcgagcggatatgaaatggaccgcgacggcgtcttcgatctgctcgaggaaatcaaaacatcagacatcgacgcggttttaatacaggatgatacgcggcttggaagagggaatgccaaaattgcccttcttcactgtttatataaagaaggcgttcaaatctacacgctggctcaccgcggaaagctcgagctttccgaagcggactcgatggttttggagattgtcggcattgtcgaggaataccagcggaaaatacataacctgaaaattaagcggggaatgaagaaggcggtcgaaaacggctaccgcccggagaggaacctaaaacaccgcaatgaaggcggcgggagagagcgaatcgaagcgcctctttcagaaatcgtcaggctcagggagaacaagctgacgtttgcggagattgcagccgtgttgagaggcttcggatacagcatatcaaaagcaaccgttcaccgccgctaccaggagtataaggacggccttgcagactaatctgttgtcaaacgaaagcggatttagtagtatgatggatatataccgaatcaaaggagtatcttatgatttctaaagaaaaaatagccagaattaacgagcttgccaaaaaagcaaagagcggatctttaacagacgaagaaaaagcagaacagcagaagcttcgccaggaataccttcaaggcgtccgcgcgtctatgaaaaacacgttgaaaactgtgacgattgttgaccctgaaggtaatgatgtgactcctgaaaagctcaaacaggaaaaaagaaaccgccgattgcattaattttagggaatacgccgatatcgtattccctttttgtatatactacaatttagaatgaaggcaaagattcgtcatttttcgcccagcttttgagctgaaatggttgtgaaaaccgatgggtagatttatgataagaaagtagagtccatacaggaaggggatcataatgaaaacgattgaattaaaatctgtcgcaacaatacgaacactctccatagacgcgattgaaaaagctaaatccggtcaccccggcatgccgatggggactgctccgatggcttatgcgctttggacaaaaatgatgaatgtcagccctgaaaatccgaattggtttaacagggaccgttttgtgctttccgccggacacggatcaatgcttttgtacagcatgcttcacttaagcggatatgacgtttcaattgaagacctcaaaaatttccgccaatggggaagcaaaactcctgggcatccggaattcggacatactccgggtgtagatgcgactacaggtccgcttggccaaggaatcggaatggctgtcggaatggcgcttgctgaacgtcaccttgctgaaacttacaaccgtgacgactatcgcgtcgttgaccattatacatacagcatttgcggtgacggagacttgatggagggaatttcatccgaagcggcttcgcttgcgggacatttgaacctcggccgtctcatcgtgctttatgattcaaatgacatttcgcttgacggcgaactaaaccgctcattctctgaaaatgtaaagcagcgctttgaagcgatgaattgggaagtgctttatgttgaagacggcaacaacattgccgaaattacggcggccatcgagaaagcgaaacaaaatgaaaagcagccgacattaattgaagtgaaaacaacgatcggtttcggttctccaaaccgtgcgggcacatccggcgtccacggcgctccgctcggatcagaagaggcgaaattaacgaaggaagcgtatgagtggacatacgaagaagatttttatgttccttccgaagtgtacgagcactttaacgaaacagtgaaggaagcgggcaagaaaaaagaggcggaatggaacgaactgttctccgcatacaagaaagcccacccggaacttgccgaagagcttgaactggcgatcaaaggcgagcttcctgaaggatgggatcagaaagtacctgtatatgaaaaaggaagcagccttgcttcacgtgcatcctcaggtgaagtgttaaacggaatcgctcaacaagtgccgtttttctttggcggatccgcggacttggccggttccaacaaaacgacaatcaaaaacggcggagatgtttcagcgaaggattacgccggcagaaatatctggttcggtgtaagggaatttgcgatgggagcagctttgaacggaatggctcttcacggaggcctccgcgtattcggcggaacgttcttcgttttctccgattacttgagaccagcgattcgtcttgctgcattgatggggcttcctgtcacctatgtatttacacatgacagcattgccgtcggtgaagacggaccgactcatgagccgattgaacagctggcatcacttcgtgcgctgccgaacttgtccgtcatcagacctgccgacggaaatgaaacagcagctgcctggaagctcgcgcttcaatcaaaagaccagccgactgcgcttgtgttgacacgccaaaacttgccgacaatcgatcagtctgctgaaacggcttatgaaggcgttaaaaagggtgcatatgtcgtttcaaaaagccaaaacgaaaaaccggaagcgatcttgcttgcgagcggatctgaagttggccttgcgcttgatgcacaaagcgagctgcaaaaagaaggcattgacgtatccgttgtcagcgttccgtcatgggatcgatttgacaagcagccggctgaatataaaaacgctgttcttccaactgatgtgacaaagcgtctcgcaattgaatgggatcgccgctcggatgggagagatatacaggcactggacggggacattctcggaatcgaccagttcggtgcatcagctcctggcgaaacgatcatgaaagaatacggttttacgcctgcgaatgtagttgaccgggtgaaaaaactgttaaatcgctaatcgggcatatgaaagagaatgatctgcggatcattctctttttttcgtttcgacaaaattagtcgcttcttttatcatcatcagacaattatttctaaccccttttgtataatagaaaacatatatctttcgaaacagggggatgagacagggatggaacgccattattatacgtatttgatagaagaggaatttgccagccattattttggaagagagtctgtcatgttcaaactgttttacgattatcattggacgagccccgatcaaaagtctcaattagccgcgaaacagatcgagtttattacaaaaccgattcccgctgctcatatacacaaaagaatgaaaatgaacctctgccgggaagactatacacaggttgactatgtatacagattgattgttccaaaaggaagcgcttcttttattatcaaagaccgtcatattgagattttggcaaagggtccattcgatgccgaaacggttttctttgaggtattgcgaaaagtcagtccgtgttttcttgcgatggattttaatatgaaacgttatggctggctgaaccctgtgaaagaaagaaattttgtataaaaaaaaagaatttggactgtaaatgttgtataatagcgtttggtttagtacactttatacgagacaacatgaaggaggaaattaaatggatttgtgggttgtcatcctagtgggcgttttagcattgctcgcaggtgttgcactcggattttttattgctcgtaaatatatgatgaactatttgaaaaaaaatccgccaattaatgaacaaatgctgcgcatgatgatgatgcagatgggtatgaaaccatcccagaagaaaattaatcaaatgatgaaagccatggaaaatcaaacgaaataatgcgaatgcgattatgacatagaaggaacatggttataaaataaaaaacccgcttccgggttttttattttgatctatgattattgtgtatttccgagagatagtttttggtattccaagagaaggatatccagctgctggctgtgctgaatggtgatatgtgaagtcatgccgtttgtcatgacgatttttagcagctcttttcttttttcctcaatttcatgaagcagattttctttcatcacaggaatttatcctttcttctgtaaaaatcatctttttgttgcctactaaatgctattatatccatatataggtttcttttcaattctgaaggtgataagggtaaattgtcaaaattgattatataaagaaattcgtgaaatcaacatccttttttgtgatatgttaggaaattgaaatgtaattgtcatatcaaatgattttctttcatggtattccaaaaaatagaagggagaaagagatggctgatatcaattatattctcgctttcggtgcagggtttctatcgtttatttcgccatgctgcctgccgctttatcccgcttttttatcatatattaccggtgtcagcatgagtgaaatccattctgacaaacttatgtttcaaaaaaggagcttggtacatacggtctttttcctgatcggcttttcgatgatctttgtggcactcggctacagcacgtcgcttgtcgggtcgttttttaaggattatcatcagctcatcaggcagcttggtgcggtttttatcatctttttcggatttgtcactttgggggtttttaagcctgaatttttaatgaaagaaaggcgcctccaatttaaaaacaggcctggaggtctgctcggttccatcggaatcggaatggcatttgccgccggctggacgccctgcaccggcccgattcttgcagcggttattgcactcgccggaacgaacccgatgtcggccgtgccttatatggtgctttatgcactcggattcagcttgccgtttctgcttctgtcttttttcattacaaagatgaaatggcttcggaagcatcagctcatcatcatgaagatcggcggagttgcaatgattgtagtcggcatcctgctgttctttgactggatgacgaaaatcattatcgtattgtcaagcctgttcggcgatttcagaggcttttaaactttgctaaggaccgccttggttttttgttacaataggacttattcacagcaaaactgaataatgatgttggaggggagtatgacaagggttttaattgttgatgatgcaaaatttatgagagataaaattagagaaatacttgaaacagaagacttgcaagtcgcgggtgaagccgagaacggggaagaagctgttttgctttatcaagagctgcagccggacttggttatcatggatattacgatgcctgtgaaaaacgggatagaagctttaaaggatatgatccagctgaacccgaaagtgaaagtgatcatgtgtacggccatgcggcaaaagcggatcgtcgttgaggcgatcgaagccggagccaaggacttcatcgtcaagcctttcgaggaaacgaaagtcgtcgaagcgattcggcatgtgctcggaaatgcttgcagctgataaacgtgaacatggtttttttcttcgttttagagtatagtaacaagtagagaaattagctttagaaaaagggatgatatgtatgatgatcgtcgtttcatctatacttgctatcgtgatggccatcattgtcatggctgtcagaatcaagtcatctgaaaaaccggctacggccaaaaaaattatactgcctccgatttttatgagcaccggtgctctcatgtttttatttccggtgttccacgtaaccggtgctgaatttttggaagctctcaccgtgggcatgatcttttctattttcttaattaaaacctcaaaatttgaaatccgcgatgataaaatctatattaaacggtccaaatcgtttgtgtttattttaattgcgctgctcgtcatccggatcgtgatgaagagcatattaagcacaacgatcgattacggcgcactgagcggaatgttttggattctggctttcgggatgatcgttccttggcgggttgccatgtatttatcgtttagaaagctttcaagccagattgaagcgtcaaatcacatacaggtcaattaaaacaaaacctttcctgaaagaaggaaaggttttgtttatttaaaaagctcttgatatgtagagtgatcaatgttcttttcttttaaacgtttcacgaggaacttatggtctcttttcggtgtggccataatatagcctctgatgattaaatcccggtcgatggcgcctgctttttctttcaatgcaagctccccgatcttaccggcgatttttgcttttgctacatcgcgaaacagctcgggtacgggtgaaaccaattcctcaagcagttctttttcttcgtcattccacaaatgccttgtctgttcaatataataatcctgccagtccagctcagatttcccatcttctttaggcagcctttttaaaaatttgcgaaacatgaaaaaaccgccgattgacaagaggacgatcatgatgacgatccaagcgagcatcagccataaaaaccatccttccagcatctctcatcactcctttgtctataacctattttacatgaaggcgttttagaagaacatagaaaaaataatataaaatgggacaccggcctggtcaaaagagatgctagaacataatctattgtatagcgattccctaatcggccatagagaattgctagaggatatttgacgaacgaacggaaaaaaacccggatggcaagtgttttaagcgctgtccgggttctgcttgttgtgcaggtttgatataaaaggaatattgattgaaagcgaaatgtcatctttgcttgattctttattgattttaactgcaagaatgttgttttcgcattccgcttcgatctgtttgtcattcaaaaagaaaggaagcatcagcgatttctcgtaaagctgctcatcggttttaactgcaagcttgaaatcgtagcctgaaaacgtcaagtcaagatgccggacattcaagtggcttaaatctgcttcaattatatattcagtgctcgtttcataaaggtcaatcggtaaagtttcatcatagaggagaaaagggtcgtcaacaaactgtttcatccattctttatcaaaatctgcggaatcgaaacgttttgtatttgtcattggagcattcctccatacctagccttaccattagattatgcacacctttgaattcatgtgaaggagggtggacaacgcctcagggtgacgcgcggtaaggcaaaaaaccgcgccgtgaaaggcgcggaaaaaatgttacatatcgtgactggaattgtgtttttgtcttgtatggttccggttttttacttttttgcttccgctcaaaggctctggctgccccggctgagctcctttcggtgcgtttttgcgcatatctttgccgtcgtttttatttgtcaatgttttaacctcctaagatattcatgaaggatctttcgtatttattgattggttttccgttttttgttgttttggcgttccgcctcagtgagtatgtgctgatcattttcaatatatcccgcgccgtttccttggcgtttcgcattattcattccatttattacatgattcgcttttcgtttggccaatttcaatcacctcagactgtagtatagccttagcgggtgtattgtataaaaaaatgtatttccagtaaaataaacttttttccgtatataagtcattcttattgaatttaataaaaacattgatatttacttatgtttaaaattgttttaagattaaattgtgagaaaattgtggtgaaatatgccgatttttctggcgtatgatcttgatctttaaagggggattttggagaaatggcgaatcagcaacaaatcgcaaaaaaagacgcttttcaatcaagaaaaacgtttacagtacaaggcaaaacgtacagctattattctttaaaagcattagaggatcaaggaatcggaaacgtatcaaaacttccttattccattaaagttttgctcgaatccgttcttcgtcaagtagacgggagagtcattactgaggaacacgttgaaaacttggcaaaatggggcactgccgaattaaaagatattgacgttcctttcaaaccatcccgcgttattttgcaggactttaccggcgttccagccgttgtagaccttgcttcattaagaaaagcgatggcttcagtcggcggagatccggataaaatcaatcctgaaataccggtagaccttgtcatcgaccactccgtacaagttgacaaagcgggtacggaagatgcattgaccgttaatatggaccttgaattccaacgaaatgcagagcgttacaaatttttaagctgggctaagaaagcgtttaataactatcaagctgttccccctgctacaggtattgttcaccaggtgaaccttgagtatttggcaaacgttgtccatgcagtggaagaagacggcgagattgtcacttatcctgacacgcttgtcggtactgactcccatacaacgatgatcaacggaatcggcgttctcggctggggcgtcggcggaattgaagctgaagcaggcatgctcggccagccttcatatttccctgtacctgaagtaatcggtgcgaagcttgtcggaaagctgccgaacggtacgacagcgacggaccttgcgcttaaagtgacacaggtgctgcgtgaaaaaggcgtagtcggaaagttcgtcgaattcttcggtccgggtgttgcggaactaccgcttgcagaccgtgcgacaatcgcaaatatggctcctgaatacggcgcgacttgcggtttcttccctgtcgatgaggaagcattggaatacatgcgtttaacaggacgtgatgaagaacatatcaatgtggtgaaagaatattgccgtcaaaacggactgttctacacgcctgatcaggaagatcctgtatttaccgatatcgttgaaatcgacttgtcaaaagttgaagcgaacctttcaggtccgaagcgtcctcaggatctcattccgctgactgacatgaaagaaacgttccacaagcatttggcaagccctgcgggcaaccagggattcggtttaaacgcgagcgaggctgacaaagaaatcaaatttaagcttgaaaacggcgaagaagccgtcatgaaaacgggtgcgatcgcaattgcggcgattaccagctgtacaaatacatcaaacccttatgtcttaatcggtgcgggcctcgtcgccaaaaaagcggttgaactgggattgaaagtaccgaactatgtgaaaacatctctcgctccgggttcaaaagtcgtaacaggctacttggttaattcaggcctgctgccgtatatgcgcgagcttggatttaacatcgtcggctacggctgtacgacatgtatcgggaactccggaccgcttgcgcctgaaatcgaaaaagcggttgccgaaaacgacctgctgattacgtctgtcctttccggtaaccgtaactttgaaggccggattcatccgcttgtcaaaggaaactacttggcgtctccgcctctagtcgtggcctatgcattggcaggtacggtagatatcgacctgaaaaacgaaccgatcggcgtcggcaaagacggtcaaaatgtgtacttcaacgatatttggccgacgatggacgaaatcaattccgtcgtgaagcaaaccgttactcctgagctgttcagaaaagaatacgagcgcgtgtttgatgacaatgaacgctggaatgcgattgaaacaacggatgaagccctgtataaatgggatgaagagtccacttacattcagaacccgccattctttgaaaacatgtcagttgagccaggtacagttgaaccgcttaaaggcttgcgcattgtcggcaaattcggagactctgtcacgacagaccatatctctcctgcgggagcgatcggcaaagacacgccggccggaaaatatttgcaggaaaaaggcgtttctcctagagacttcaactcatatggttcaagacgcggaaaccatgaagtcatgatgaggggaacattcgccaacatcagaatcaaaaaccagatcgctccgggcactgaaggcggttatacaacgtattggccgaccggagaagtgatgtccatttatgatgcctgcatgaagtataaagaagacggcacaggtctggtcgtcattgccggaaaagactacggaatgggttcttcccgcgactgggcggcaaaaggaacaaatctgctcggcatcaaaaccgtcattgcagaaagctttgaaagaattcacagaagcaaccttgtgctgatgggcgttcttccgctgcaatttaaagagggagaaaacgctgaaacgctcggtttgaccgggaaagaaacaattgaagtagacgtgagtgagacggtgcgcccgcgcgatctcgtccaagtcaaagcgattgccgaagacggcacggtcaagtcgtttgaagctgttgtccgctttgacagcgaagtggaaatcgattattaccgtcacggcggaatcctgcaaatggtgctccgcaataaaatgaaacagtaattgaatgaggaagagagagcctttagctttctcttcttttttcagcgtaatcctgaatgtggaggatgccgatgatgaaaaaagtgctggctgccgcgtttcttttagtcttggccggtcttgcggtttggaattttacagggcaaaaggaagccgaaatcggcattgagaaaggagacaaggcgcctgattttacgctgccgtcattaaagaatggaaacgatgtatctttgtcagactttaaagggaaaaaagtgctgttaaatttttgggccacctggtgtagaccgtgtgaaaccgaaatgcctgcaatggaagagcttcaaaatgaaaatcaggacattgccgttttagccgtcaactttacatcttccgagaaaaacgaaaagacggtcaaagcgtttgccgaaaggcacggtttacatttccccatcgtcttagaccgaacgggcatcaatgcgaaatacgagattttttcatatccgacgacatttatcattgatgaaaacggaatcattaaagatatcgtgctggggacgatgtcgaaaaagaatatggaagaaaagctgggattataaaaaatcccggcttttttgcttatattgcccaaaaaatggtgaaaatgaaaacaagctggaggtgattcaacatgaaaaaagcgaaaaggcgaacatttgaagaacttgtctcggaaaataaaaaggagctcatgaccaaccaggagtttcttgatcggctggaagataagcttgaagagaaatttaagctgaagtgagtttttaaaaatcgattcatgtttacgctcctttttgagaatcctaatgctgaaaaggagggatagacatgccgagagaacacgacaaacagtctaaatttgccccgagccatcttgggacaaaaccggtagaatataagcgcaacaaaggaaaaaagatgcatgataaatcaggagaaacaccgatcattatgcagacaaaaggcgagtaaagatgaaaaggaggcagagacccgaatgacacatcaaaaacatcatccggatgacagatcagacaacgtagaaaagcttcaagacatggtgcagaacacaatcgaaaacattgaggagtctgaagagcagctgtcttttgccagcgaggcggaacaggaacagatccgcgaaaaaaatgaacgccgaaatgaaagcattgaggcgatgcgcaatgaaatccatgacgaggcggaagcccgcaaaaacggatatcatcaataaaccagggcgacctggtttttttgcatgaagccgtccgtcgtgtttttgcccattgtatatgctagaattggattaaatacatttgtgaaaagggagtagagggaatttgtacgtctcaaaaaaagaaatagaagtccgctatgccgaaacagaccaaatgggtgtcgtctatcacgccaattatttgatttggatggaggtaggccggacggctttaattaaagaactcggcttttcttatgccgaaatggagaaagacggcatcctgtcgcctgtcgtggatatcaatgtccgctacgtcaaacctcttcgctacggtgaaacagcgacggtacatacgtggattgaagattacaacggctttaaaacggtatatgggtatgaaatttttaattccgccggagaaaccgctgtgaagggaacatcgtcccatatttgcgttgacggggacagcttcaaaccggttcagttccgcaagctttatccaaagtggcatgaagcatacgaagaggccaaaaagtaatggcgttcggtattaaaagaaacgagctgaacgaatggaagcgcgccgttttaaacggcgaagttgcgtttcttacgcattactggctcgatgacaggtatccggatgtcaaaacggtgacaaaagcaggatgcgcgaacattgagaagcttgcagagtggggcaaacagtacggactgaaaaaagagtggattgataaaagaagcgaatttccccactttgatttattgggagagaagcagatcatgattttaaaacaagaaaagctctcaagccatatcaagcgtttcaggcttgaataatacggtgttttaaagaaactcggacatccttgaaacaagcaagcattgttcttgcttgtttcattttgatgagcaaaaacgtatctttagtttcagttatattgtcatcatctgtttcaatcacaaagttcacctttacttcagtgtttttcatgccttgataagccattttatttttcgtaaaaaagtccctaaaacaagaagttttagggggaaagagtgagcggctgattaattttgattgtctaatttatgcaggatgtccttatctatttgcttctcgctcgctttttctttgctggatatgatttcccttctatctttccaatgaataatatagtactgacctttctgtattttttcttgagaagagagctttaggtttttggatttcccatctttatcataacccgtaacatcatagttataatttatatatgtgtatccatcacttgctttttctttcacgacttttggatctgttgtaattttgacgtaataatcttccgttgaataatatccggaatataaaaagtagcccccgaccaaaattatcagtcctgccgttaaaattcctaaaaaccatttcatcatttatcacctcggaacccatcatatataaaacctcccaacgaaaccattgatttatcttacatattcctttcacatttgtaagcaataaaagtccaagcgcatcaaaaaaacagctgcttggagcagggaagttgcccattgctcaggaagcattagaatcatcaacatgacggtgtaatgttttcaaagcaaaaggacatctttccggcgaagatgtcctttgaaaatatccatcattatctattgggacttccatcaatatatctctgcacccttgttggggatgactgcaatagaaagtgtgccatccggacaaaccaaaatctcaagacgcatttttgaagttttaatcaatgaaaaaattaagagcagtcaaaattatagaaaaacctaaaatagtacctacgacaatgctatgccgtttacgattcattacaacaacagcgatatattcacggatcatggcgttcggccaataataaaaagcggtttttgaaccgatcccctggctctttaagcctgctcgttttgcatataggctggcgcggaacaggtggaaattgtttgttgtgaagatgctgttgtatttgccgtctgataatgagtccatcagttgtttggagaaaagcatattttgatatgtatttacagaacggtcttctttgaaagtgtgctcttcaggtatccctttttttaaagcatatctctgcatggcttctgcttcagaaaggttttcatcaggtccttgcccgccggaaaaaataattttcggcggaggagcaacagctgcttgtttccgataaaaatcgacagccttatctatcctgcttgctaaaagcgggggtacagtatcgttaattaatccgcttccgagaacgatgatgtaatcctgattaagtttcggtctgttaaattgatatagaaaataggctgttaagaaatttgttaaatgaaagaagaaatagaccgcaataagcgatgatcccgcaaacaacggctgaacatttggcgataaaaaacgagcggggtcaatcactgacaatagaaaaaatatgataatgcctagcccggaaattaaagtcaaacaattagacaatcgtcgtccttctcttttgataagaattctcgcattcagaaataacccgatcattaaagcaaatagaccgaacgttaggataaagaaaaagatcagcagcggtacaatgacgaaaagtctgaaaaagccaattccgacaacgtatgccagatagtaggaaagaacaagaaatgaacaaaaaaatagattgaataaaaaaccgttgatgatccttcttcggtccgttaaataaaagatcagaaaaacagccagtaaaataaaagttgtcacaccgtaaaccatgaccaaacacctcgatgtaaatgactttgtataatattagagtgtgtaaaaatctttattgaatggggaaatccttgccgctttattttaaacgaactgtattttagatatacaggatctgtacccgctcagttattcgtgtttgctgccccgtatataatgtcctttaggagctttacgcagctcgcggtgtacatttgccgaacactcaggcaagccaccctagattttgaaggctttttttcggcacttcaatgacgaagaaaaataaaaaaacttgcagaaaaacgggggattctctgcaagccgtaaaaaatgatattttactgatattcaaaaacaggttcttccgcagattcgttataggtgacaagcagatcatggccgtcgaaataccatacatcgctttcttcaacgaaaaacgtaatgccgtctttttccgcacttacaccgatttgctgcggctcatcttttgagaccccaagggagaagcctttttgaacattgctgcatcctccgtagcggacaaagaagcgaacctgatcaccttcttttaaatcaagctcgttcttataccatttaagcgcctcttcattaattttcaaattcacgggcaagcactccttcatcatttgtttcaaagcatgctgaatctatttatagtatataacgtttttgtccgatcatgaaaatataatgttcttcggataggctcatcttttgccggacatccacttgattttgggctcggttttatcgatgatgcgtttaatgttcgtcctgtgtctgtatacgacaaacgccgtaagaaaggcgacgactgccaccaataaaaggtctttcgtaaacagactgtaaaccgttgtatacaagccggttaaaatggaagaaagcgatacatattttgtgatatacaaaaacagaaagaacaccgcaaccattgtgagaaacagaagaggctgatagcaaagcaatacgcctccggaagtagcgacagcttttccgcctttaaattttgcgaacacagggaacatatgcccgatgactgcggctacgccggccagcaaagggtgtacgccgatgtgcaggatggcgggcagaaaggcggcgagcgtccctttcaaaatgtccgcagccacaacgatagagccggcttttacgccgagtgtccgaaatgcgttggtggcgccaagattcccgctgccgtgttccctgatgtcgattcctttggcggcctttccgacaatcaagccggacggaatgctgccgagtagataggctaaaataaataataaagctattaacatttcatttctcctttttagatgatcccttctctttattttaacatgagaggcgccttccatgacggcttttctttagaagtaccgtatatatcatacaagataatgcgcgctaatcatatgaaaattttgattatctcctttgttttcgtgtaaactgaacttaaaaggagtgatcggtgtggaaaatccttctaaacaggaaatcaaaaccattcttgaaaacagcagacgaattgcggtagtcggcttgtccgacaaccctgaaagaacatcgtacatggtatcaaaagcgatgcaggacgcgggatatgacatcatccctgtcaatccgaccattgatgaggcgctgggcgtcaaggctgtggcatccttaaaagacattgaaggacacgttgatatcgtcaatgtgttcagaagatccgagcatctgcctgatgtcgcaaaggaattcctggagatagacgcagatgtgttttgggcgcagcaggggcttgtcaatgaagaagcttatcagcttctgagcgaaaaaggctatacggtgattatggatttgtgcataaaagtggcacactcgttaacaaaatcggcataaaaaaagaacaaaatacctttgtttttctagggtttttgttctttttttattgcgagaatatgtttgcgaattgctgtgaaaaacggctacaataagtcttggacagttttttaagaatgattttccaattgcgatgtggaaagccttgtgctgcgggtgatgaatcgtgtaaaatgacggctgtgcaaaaagcggctttcattttaacatgttcccgacaatgcttgaagaaattggaaaataatcggataatactttgctttatatgacagagtgtgtattattctttataagcaatgtttgatttttgaaaggggtttatgcatttggttaaaaaacagcaagttgactataatgatgattccatacaggtgctcgaaggccttgaagcggtcagaaaacgccccggtatgtacatcggttcgacagacagccggggactgcaccatctcgtatatgaaatcgtcgataattccgtcgatgaagtccttgcgggccatggggatcacattatagtaaaaatacataaagataacagcatatcggtgcaagacagaggccggggaatgccaacaggaatgcataagctcggcaagccgactccagaaattattttgacagtgctgcatgccggaggaaagttcggccaaggcggctataaaacgagcgggggtctgcacggcgtcggtgcatccgttgtaaacgcactgtccgagtggctgacagtcacgattgagcgggacggaaatgtttacaggcagcgttttgaaaacggcggcaaaccggtgacatcccttgataaaatcggaacgaccaaaaagaccggcaccctgattcatttcaagcctgatcctgcgatgttcagcacgacgacgtttaactttgaaacgctttcagagcgtctgagagaatcagcctttttgttaaaaggactaaaaatagaattgatcgatgaacgcgatcaaacaaaagaaacgtttttatacgaaaacggaatcgaagcttttgtcgcttatttaaatgaggagaaagacgcgctttctgaagtggtctcatttgaaggagagcacaacggcatcgaggttgacttcgcgtttcagtttaatgacggctattccgaaaacatcctgtcgttcgtcaataatgtcagaacgaaagatggaggaacccatgagtccggtgccaaaacggcgatgacgagagcattcaacgagtatgcgagaaaggtggcccttttaaaagaaaaggacaaaaaccttgaaggaacggatatcagggaaggcctgtcagccatcgtttccgtccggattcccgaagagcttcttcaatttgaaggacagacaaaaggaaagctcggcacaagtgaagcacggtcagccgttgatgcaatcgtctctgagcagctcgcctattttcttgaagaaaacagggaaacggcaacattgcttgtcaaaaaagcaattaaagcctcccaggcgagagaggctgcgagaaaagcaagagaagaggcaagaagcggaaagaaaagaaagaaatccgaagcgacgctctccgggaagctgacgcctgcacaatcaaggaatccatccaagaacgaattgtatctcgtggagggtgattctgcgggaggatcagcaaagcagggacgagaccggaaattccaggctgtcctgccgctccgcggaaaagttatcaatacggaaaaagcgaagctggccgatatttttaaaaatgaagagatcaatacgatcattcacgcgatcggcggaggggtcggcgccgattttgacattgaggacatcaattacgacaaagtcattatcatgacagatgcggatacagacggcgcgcatatccaagtgctgctcctgacttttttctaccgctatatgaagccgctgatcgagcacggaaaagtgtttatcgcactgccgccgctctataaagtgagcaaagggtcgggcaaaaaagaaatcattgaatatgcctggtctgatgaggaaatggacgacgtcctcaaaaaagtcggaaaaggatatacgatccagcgctataaaggtctcggcgaaatgaacgctgaccagctttgggaaacgacaatgaaccccgagtcaagaacacttgtcagggttaaaatcgatgacgcggcccgggtggaacggcgcgtaacgacattgatgggcgacaaagttgagccgaggagaaaatggattgagaaaaacgtcgctttcggacttgatgaagaaagcaacattttggaaaacgagaatttatcggtcgctgaggaggtttaaataaatggcacagccagagatttatcatgatttaccattggaagacgtgatcggcgaccgtttcggccgatacagcaaatatattattcaggaccgggcgctccctgatgcgcgcgacggcctgaagcctgttcaaagaagaatcttatacgccatgcatgcggaagggaacacacacgataagaatttccgcaaggccgcaaaaacggtcggtaatgtaatcggaaactatcatcctcacggagacagctcggtctacgaagcgatggtgcggatgagccaggactggaaggttcgcaacgtgctgattgaaatgcacggaaacaacggaagcatcgacggtgatccgccggctgcgatgcgttatacagaagcaaggctcgcggcgatcgcgtcagagctattgcgggatattgacaaagaaacggtcgagtttgtaccaaactttgatgatacgagcaaagagcctgtcgtccttccggcaatgttcccgaacctgcttgtcaacggatcgacagggatttccgccgggtatgcgactgacattccgccgcatcatctcggggaagtgatcgatgccgtgattaagcggatcgactcgccgaactgcagcgtggatgacctcatggagttcgtaaaaggtccggactttccgaccggaggaatcatccaggggaaagaaggcataaaaaaagcctatgaaaccggaaaaggaaaaatcatcatcaggggcaaagccgagatcgaaacaatcagaggcggccgccagcaaattgtcattactgaaattccgtttgaagtcaacaaagcgaatttagtgaaaaaaatggacgaattcaggattgaacggaaggtcgaagggatttcagaagtccgtgacgagaccgaccggacaggcctcagaatcgtgattgagctgaaaaaagaagcggatgcacaaggcattttaaatttcttatacaaaaacacggatttgcagattccttacaactttaacatggtcgccatccataacagaagaccgatgctgatgaatctcacatcgattttggacgcttatatcggccaccaaaaagaagtcatcaccaaccgttctcagtatgagctgaaaaaagcgaaggaaaggcatcatatcgtagaaggcttaatgaaggcactgtccattttggatgaggtcattgcgacgatccgctcctccaatgacaagcgcgatgccaaaaacaatctgatcgaaaagttcgcatttactgagccgcaggctgaagcgatcgtttccttgcagctgtacaggctgacaaacacagatattacggccctcgaggaagaagcaaaagaactggaccagaagatcaaagagctggaagagatcctttccaatgataagaaacttttgaaagtgatcaaagacagcttgaaaaaggttaaaaatacctatgccggtcaaaggcgctctgtcatcgaagaaaaaatcgaagaaattaaaatcaaccttgaagtgatggtggcgtcggaagacgtttatgtgaccgtaacgaaagacggttatattaaacgaacgagccagcggtctttcgccgcatcaaacggccaggacttcggcatgaaagataccgaccgtctgctctgtcagctggaaatgaatacgacagacgttctgctcttgttcacaaataaagggagctatgtctattgtccagttcaccagctccctgatatcagatggaaagatttaggtcagcatataacgaatatcatatcgattgacagcgatgagtccatcgtcaaggcgattcctgtcagagagtttaccgaatctgaatacctgctgttctttacgaaaaacggaatggcgaaaagaactcagctgatgcagtataaagcacagcgctattcaaaagcactggttgcccttaatttaaaaggcgacgatgaagtggtcgatgttcatgtaacggacggaacgaaagatttgtttattgcgacacattccggctacggtctgtggttcacagaagatgaagtcagcgtcgtcggcgcaagggcggccggtgtcaagggcgtcaatttgaaagacggcgactttgtcgccagcggacaggttttagaggaaaaagacgtgcttgtgctcgtgacccagcgcggatctattaagcggatgaaccgcagcgaatttgaaaaaacgtcaagggcgaaacgaggggttctcatgctgagggaactgaagaaaaaacctcaccgcattgccggcctgctcgcatgttcatatcatgatcaaatcacgcttcaaaccgaaaaaggcatcacagaggagatgcttgtcaaagaaatcaagcttcatgaccggtacagcaacggttctttcatcatcgacgaagatgaagcaggggaagtaacggatgtatggatcagcaaacatgagctggagtgaaatcgaacagcacgccgttgatcattcaatatctaggggcgtcaccacatgtctatcaagccgtttcaatgctcagaaaaagagcatgccggataaaccttaaacagcacgatgttactttcttgtgacacaattatacagcatctaatatatcagagactgattttttctcttcggtgagattttcgcccgtttttctgattcaacatttctttgcttaattgataccagagtaaaacaacccagtccgtgttcgcgcctttagtgaacatggactgggtttttcttgatcacgctatgattattgtatttctaactcttttacggtttctccttcaactaacacaggttgatagtaggtttcgtttggtaaatccttctttccttgtaattttttaatgacccaatcagctgcatcgtgtcccatttgttcttgaggatgggtcaatgttgttagtttgatattcgcatttttggcgatatacgaattgtcatgaccaataattgacaatttgtccgggatagaaatattaagttgtctgcatacatttgctacttccagccctacttcgtcgttgtagcagacgattgcagtcaacacgtctcttttttcatttagaaacttcttcaggtctgtgtataggtccagcttcgtctctgtattgtacgaaagcacatgctccgggtaaaatcgtaatttggcttcaccaagcgcttttatataccccttcattcgatactttccttgtaaatcatccatttttgaaatgagaccaatttgtgtatgtccttttgatattaattcttttgttgcgagatagcttgactgcacgtcatcgagacaaagaaaaggaacatctaattcttcataataagcattgatcatgatgaaaggaatatcctgttccttaaacgataggtagtaggcaatattgggattgtacagattgcttttcgtaggttcaacaattaaaccatctacgccaaatgacagcatcatttccaaagcttttttttcttgttcgacatcattatttgtactagctaatagtagcgaataattagcctcattcaatctcccttcaattccacgaataatggaggggaaaatgtaatcagaaatgtaggtcgtgattacaccgattattttgttattggaattcccgccggcttttgattgatactggttactaacataagtgccagaccctttttcacttcttaagaatccttcgttcgatagttctaaaatggcttttcgaacagtgtggcggctgactttgtactcttcctgtatggcggattcagtaggaatttggtctcccgctctgtaaactcctgaaagtattttactttttatgtcattaatgatgaccttatactttggtttcatttcactcacttctttcgcagttgttcgcattcttaattttttttaattgaatgatttgtgtggacatattttatcatggcttacaatgaattaaaagattccgccttattttcgtgaaaattaactagcaattataaaattttctttaggttttatgttattcaaataccttttattataaacattaagagaaaaataacagaaaatatcgttgtgatatttatatgaacatattatattctagattgacatatgtacgtacaaaaaatatactaaggttgtaataaagttaagcggaaaggaaaatgccttctttcgaattataatgaaatcgctatcagaggggggattacgtgaaagcgaatcgagtaaacatcaagcaagccataactgagggagaaacatcacttggaattgaattcggatccacacgtattaaagcagtgttgattgatagcagttttgaaacaatcgcatctggaagctatgagtgggaaaacctcttggaagatggattttggacgtacaacttggtagatattatcactggattgcaaacagcttatagtgaaatgaagaatgaagttgaacgaaattatggcatcaccattcgcaaaatcggttctattggaatttctgcaatgatgcatgggtatatggcttttgacaaaacaggggagctgcttgttccgtttcgaacttggcgtaactcaacaaccggtgctgcagcaaaagaattaactgatcaatttcaattcaatatccccgaacggtggagtattgctcacctttatcaagcgatattaaatgaagagaagcatttgcctcgcattgactatatcaccaccttagccgggtacattcactggttactgactggtaataaagcaattggcattggagatgcttcgggcatgttcccgattgatgaatcaacgcaaaattacaatgaatcgatggtcaagcagtttgatgaactgatttcgaacaaaggctaccctaggaagctgaaggatattcttcctaaagtttatatttcaggcgagcaggctggtgaattaaccgaaattggtgcaaaaattctggatcagtcaaaaaatttacaaccaggcattccaatttgtccaccggaaggcgatgctggaacaggaatggttgctacgaatagtgtgaggaaacgcactggaaacatttcggtgggaacttcagtttttgccatgattgtattagaaaaagaactttcaaaagtatatccagaaattgatttggtcacaacgccaaacggcagtccggttggaatggttcatgcgaataactgctcaagcgatattaatgcttggctaggattgtttcgtgaattttttgaagcaatgggacaaaagattgaaacgaataaattattcgaagtgatgttaaataaagctttggaagctgactcagatggcggcggtttgctaagctacggctatttctccggtgaaaatattacgggattagaaaaaggccggccattatttgtccgctcaccagagagtcgtttcaatttagcaaacttcatgcggacacacctttttacagcctttgctgctttgaaaatcggaatggatattttgaccaaagaggaaaaaattgaaatcgatagcattttagctcacggcggtttattcaaaacccctcttgtcggacaaaaaattgttgcagctgcaatgaatacgccggtatcagttatggaaacagccggagaaggcggtgcgtggggaatggctattcttgcttcttacatgatgaacaaaggtcaagaagagagcttagaagacttcctcgacaaaaaagtctttgaagaggatgccgggcaggaaatttaccctgatcaattagatgtagaaggatttgaagcatttatcgaacggtacaaaaaaggtttaatgattgagcaggccgctgtagaccatttgatttaatggagggattgacgtgctagaacaactgaaagaagaagtattacaagcgaatttggacctgcctaaatacggactcgtgaaatacacatggggaaatgcaagtgccattgaccgtgaaacaggtctattcgttatcaaaccgagcggtgttgattatgaaacgatgaaagctagtgatatggtggttgttgatttagatggcaatgttgttgaaggagagctgaggccttcatcagatacagcgactcacgcagtgctttataagcgctaccctgaaattggaggaattgtacacactcattcaacttgggcgacaatctgggctcaagcaggccttgatgttccagcgatggggaccactcatgcagacacattctatggttccgtaccatgtgcccgttacttgacacaagaggagattgatcgcggttacgaagcagaaacaggtcatgtgattatcgaaacatttgaggagcgagggttagatattttagctgttcccggtgtcttacttcacggtcatggtccatttacttggggcaaagatgtaaaatcagccgtattgaatagtgtggtgttggaggaagttgcgaaaatgaatttatttacaagagaattaaatctttttgcaaaagaattaccacaacgtattttagataaacattacttacgaaaacacggtaaaaatgcttattatggtcaaaagtaatgtcaattctatcaaactatcaattatcccatcaatttaagaaaagagggttattatgttaacaacagggaaaaaagaattttggtttgtcgtaggttcacagcatctttatggggaagaaacgttagcggaagtcagagcgcacgcgcaagccatgaccgatgcattaaatgaaagcgctgttttgccatatccgcttgtattgcaagatttggctgttaatgcagataaaatcactagcatcatgaaagaagtaaattatcgtgacgaagtcgccggtgttatcacttggatgcatactttctcgcctgcgaaaatgtggattcgcggaacaaaattattgcaaaaaccattacttcatttagcgacacaatttaatgaaagtattccatggccaacgattgacatggactttatgaacctcaaccaatctgctcatggcgaccgtgaatacggttttatcaatgcccgtttgaaaaaacaaaataaagttgtcgtaggttattgggagcgacctgaagtgcaacagcaaattgcagaatggatggacgtagcggttgcttataacgaaagcttcaacatcaaggtcgctcggtttggtgacaacatgcgtaacgttgctgttactgaaggggataagattgaagcgcaaattcaatttggctggacagttgattactttggcatcggtgatcttgttcaatacgtgaatgcggttacagatgaagagattaatcgtttgtttgcagaatacgcagacctttatgaatttgattatggcacttacagtcgggaagattgggagaagagtgtaaaagtacaagcaagctatgaaatcgctattaaacgtttccttgatgatggtggttacaatgctttcacaactaactttgaagatttatatggaatgaaacagcttccgggtcttgccgtccaacgtttgatggcgcaaggatatggctttgccggtgaaggagattggaaaactgcagcgctcgaccgcttgctcaaagtgatgagccgtaaccaatcaactggttttatggaagattacacatatgaattggctgccggtcaagaatcaattcttcaatcgcatatgcttgaagttgacccatctttagcaagcaataaaccaaaaattatcgtctctccattaggtattggtgatcgtgaagacccggcacgcctagtgttcgacggaaaagcaggagatggcgtggttgtttcaatggcagactttggtacgcactacaaattgttgattaacgaagtttctgcatttgaaccaactgttccagcaccaaaccttccagttgcacgggtgctttgggaagtgaagcctaacttccaagatggagtgaaagcatggcttgagaatggcggcggccaccatacagttgtttcattgaatttaacaacagaccaaatgatcacttatgcaaagctcgttgacttggaatatgtagtgattaagtaatgcctctaacctccgaggaggtgctgcttccttggaggtgaaaataggcatcagttttcaaaatatttatgattttgtaagcgttatcgcgacattcagtaaaaattgaaagcgtttaaaaatatgcgaataaaaccatgagatttagggagaaatccccaccaaataatatcctggcatgtatttgcgtcttgaaagcgcttttattatttcttaaaaagccttcaatatttttgcagtggatttttacacaatttaatttcaaccttgaggaggaaactttaatggttaatgaaaagaaaatctcaagtggcttcatttacttttttggggcttttgcgggcattcttttcggttatgatatcggcgttatgacgggtgctttgccttttctgcaaaatgattggaaccttcaagacaacgccggggttattggatggattacctcttcggtaatgttaggcgctatttttggaggcgcccttgccggacaactttctgatcgtttgggacggcgcaaaatgattttaatttccgctatcatttttgttgttggatccattttgtcaggaatagcacctcataatgggatactatttttgattgtttctcgggttttattgggattggccgttggtgccgcttctgcattggtcccagcctatatgtcggaaatggcgcctgcacgtttacgtggacggctgtcaggaattaatcaaacaatgatttgttctggaatgttgctttcttacattgttgattttctattgaaagatttgccggaaacaatggcgtggcggttgatgcttggtttggctgctgtacctgctttgatcttatatgttggaatgctaaaattacccgaatcaccacgttttttaataaagaacaataaacttgatgaagctcgcaaggtgttgagctatattctctctaacaaaggagagattgattctgaaataacgcaaattcaagaaactgccagagaagaagcgaaggcaaatcaaaatgcatcatgggctaccctcttaagcaataaatatcgttttttattaattgctggtgtgggtgttgctgcttttcaacaattccagggtgcaaacgcaattttttattacattcctttaattgtagaaaaagcaacaggaaatgcagcaagttcagctttgatgtggccgattattcaaggagttattctcgtgctaggttcattaatattcttagtgattgctgataaatttaatcgccgtactttattaacagtaggcggaacaataatggggctgtcctttattttgccggcaatattgaatatattaattcctaatgcgaatccgatgatgatggttgtctttttgagtatctatgtagcactttattcattcacatgggctcctttaacttgggtcatagttggagaaattttcccgctggtaattcgcgggcgtgcgtctggtttagcttcatcatttaactggattggttctttcttggttggattgctatttcctgttatgaccgcttcgatgtctcaagaagctgtgtttgcaatcttcggtgtgatttgtttgcttggagttgtatttatccggacacgcgtccctgaaactcgaggtcgcagtttagaggaaatcgaaaaaaatggagaaaataaacgagttgacggaaaaagcgcgtaaataaaacctatggaggcttggagtagaattcaaagaagatatcttgggtgccgcttatcgcaggggaaatcctcgcactagtgtattttgaaacaggggttcaaaagatcgtaaacatatggatttcctcacggcgccttgcttgagggcgaagttgctcacttcggcctttttttaattaaaattagcctcttgtttgtatcatttccgctcaattgtcccgcttcgttatatcctaaatgatggagccgtccttcaacagataaagggacctgggcaatcataaaagattgggaaaacttcaagaagaagggcgtttagaatgacaatttggcagtaaacgctaagtattgatgcgattcgaaattcatggacgccacgatttgccgatgggggaggaaccaacggcctgcgttctttgttttttaaacgtgaaccataaatcaaggcgtggttggacgccgtggccgtttcgtattacacggttttaagccatgctatatagctgattattcaatactaaatatggaggggaaaactccgccctccatatagaatataattttaaaattaattaaataccattccgccatcaatgataagagcttgaccagtcatataatctgaatctggccctgcaaggtaagaaacgcatgctgctacatcttccggctcggataagcgttttaatgcaatatttttagcgaattgttccatgccccattcaaacggcttgcctgcttcatcagcggtttgctgtgcaatccccatcatcataggagttttaacgatacccggacaaaaggcgtttacagtaatacctaattcagctagatcttttgccgcagtttgggtaatcccgcgaacagcgaactttgttcctccgtaaaccgctaagcccgggttgccgacttggccggcttgagaagatgcattaatgattttcccgccgtgtccaagttctttaaaggcttttacagctgcttgtattccccaataagtaccgccaacgttaacatcatagactttccgataatcttcatatgtaatgctttcaataggggtggttggtccaagacccgcattattaatcaccacatcaagaccgccaagacgttttactgtttcatcgacagctttaaaaacatcatcgcgatcagcaacatccactttaaccgcaattgctttgccgttaagcttattgatgtcctcagcaacttgtgttgcagtttctacattataatcggcaactgcaactgcgaatccgtcctctgccaatcgtttgcagattgcttctccaattccttgaccgccgccagtaacaaaagcaatttttccagatactttactcatataaacatcttctttctataagtaattggtatttaattggtacaggaatattatatcttatatttgtagatttgaagtaaagccgcggcatttgttgaaaatatgtttaaaatttttcgaaaaaatttaatagtttttgaaagaggtggaagaactgtatgtaaaactataaaagggatgttctgctataaaacagcgattcagccatcgctaaacggatgaagaccaaatgaaaaggcatgaacccgcacaatgccggattcatgccaaacaaactgcttcatgaaattttattgtctagctttttcaaatcgcttcaaattcagctgtcctggcgattgaaaagatcggtaatcgcgtgcatgaattcaattccttgaaaaacaaacagattgattgctgtcaatgaaaatagtccaataatcaccattcttatgataaataacatgttaaaacctcccgctttttttgtatggttatggttttaaaacatgcgctttatcgaaataagaagagtgatagaacaccgcgagcataaatgccttcagatgctctttccgcctgttcatcatgaacgcttgaccggaagcggcagctaagattaagagaaggacggattcagctccgaaaccgagtgaattccataatgatttcgccttttcttcaccatattttccgactgtcagttcatggagttcgtctcctgaaacagcggctttttgcgcatggtgatttgccggcatctggggcattgagaacgaatgaaggctcgcaatgactaaaaagaatatggacagttgcagaaacaatgtctttttcatttgatctcatccccttagtatctcatcatcttagcatattttattatataataaaatatgattattttgtgacagtttgcaaataattattgacaacattagatttttcgcagcgcatttgaaatgaaagcgcatttttatgtatgaataaagataatactctgctataatgagcattgggtctaaagtaatgatgatgccatcagcctttacgattaaaaaacagaaaattctatctagttttgcttgcgtcattattatgatataatcctatcatgttagaaaacttaacatcaaaacaaaattcgtttgtttcaggagggtgctatggaagaaattttaagcgaaatcatcaatgtcccgagcggttttatttggacttatttagtctatatattaataggaataggcctgttctttacgtttaaattgaaattcgttcaattccgctatttcttcgagatgtttcgtatcgtcggacaaaaagaggagaaaggaaaaggcgtctcgtctttacaggcattctttatttccgccgcttcccgtgtcggaacgggtaacctgaccggtgtggcgcttgctgttgcaacaggcggaccgggagcggtcttttggatgtgggtcgtcgcgcttgtcggaatggcttcaagctttgtggaaagtacgctggctcaagtctacaaggtcaaagacggcgatcatttcagaggaggccctgcttattacatggaaaaagcgctgggcgccagatggatggggattatctttgccgttttaattacaattacattcggcttgatttttaatgcggttcaagccaacacgatcgtcggttcgatgcaaggggctttcaacctggataaaacagtggtaggcatcatccttgctgcaatcaccggatttatcattttcggcggattgaaacgcgttgtgacagtttcgcagttgatcgttccggtcatggcgatcatttatcttggacttgctttatttgtcgtgctgacgaatatttctcaaataccggccgttttcgcgatgattgtgaaggatgctttcgggatcgagcagattgcagggggtacgctcggcagcatcattattatcggtgcgaagcgcggtttgttttcaaacgaagccggaatgggaagcgcgccgaacgcagcagcgactgccaatgtctctcaccccgcgaagcaaggctttatccaaacgcttggcgtattctttgatacgatggtcatctgcagtgcaacagcctttatgatcctgctgttcaatctgacgcctggcaaagagcttgacggcattcaaattacacaagcagccatgcagcatcacattggaagctgggcgcctgcatttgtcgcagtggcgatttttctgttcgctttcagttcaatcgtcggaaactactattatggtgagacgaacattgaatttattaaaaagagcaagacggcgcttgctgtttaccgtacagccgttgtagcaatggtgatcttcggatctgtatccggtttccagcttgtgtgggacatggcggatttatttatgggattaatggcgatcattaacctgattgcgattctgcttctttccggaattgctgcgaaagtgctgaaagactatactgaacagcgcaaagcaggaaagaaccccgtctttaaggcaagctcgattccaggtctgaaaaatacagaggcttgggaagacgagaaggaaacattgcaatcgaaataaaccatattaaaaaaggcgtccttgggggcgcctttttcttatttttactgacagctgaaagaagtgatctcgttcaggtcaataccgaagtaaacccagcggaattgacgcggcctccagcggtagcccgcaatcgaacgacggccgacgaaaaccgggtagaaccaaaaacggctgccgtttctcaagcggatgaacgtgtatctgaacaggcatcttctgattccgccaggatcaacggcaaataccgaagggccggagtcttgcggaaattggctcggcggcggggggagcagctgctgttgctgctgtcctcctgctcccggaggcggccccggcggaaattgctggcgatacggatcatatagtgaaggatcgtatggatacaataaaaacgctcctttctgatggtttgctttatcgtatgattgattggtaatatgggtagcttgcctatggagaaaaaaatccctaaagccgttttagctttagggaaaatgtttacatgcttttgcggggcgcccgtttccggtaaacaacatagcttcttgtcaaatattttagcggcatgctgaatacgtggacgagccgggtgaacggccagacgatgaaaatgacgtagcccatgatgatgtgaagcttaaaccagaggggcacgctcgccataagcccggcatccggcttgaataagaaaatgttgcgaaaccacgtgccgattgttgtcctgtagtcgaatccttttgaatcgatgtttaagaaggttgccgcaagcccagtggtcatcacgaataacaaagcgacaagggtgattaaatcgccggcagagctcgtttttcgaatccgtttgtccgtgaatcggcggtaggtcaatatgagaagccctgacagcgcggcgatgcctgcaggcagtccgaagccgatcgcgatcttatggtacatatgctctgaaacgccgagcgcctcataaaggctttccggaattaaaattcccatcacatgtccgccgatgacaaaaaagattccccagtggaaaaggctgctgccaagcgcaagttttttcttttcgagcatctcgctagatttggccgtccagccaaattgatcatgttgatagcggtatatatgccctccgataaaaatggtgatgacaatgtaggggaggatgacccacagtatttgttcgatcatggctgtacattcctttcaacaccaatttcctctaagatcagcattaatccgtccaataacggtgtatagatgctttcattctctgaaagctgcgatctcaattcttccaggtttgctgcgtatttttggaaaacagcagcagctttttcttgatccgcaactgcggcaaattcaagcatgagcggcagataatccggcagctctttatctgtcggctgaaaaccggactgctgatacagatctttcagctgcagcaattcaataccgcgctccctttgttcgccggagttgaaataggtgacataaaggtttgtttttttgccgaaatcaaacgtatatacgtatgtttcaatcaattcctcagacgaataggaagccgcgctttccaagaaggcaagcagatgtcctttcagcgcttcatgctcgatttcgccgatgatctgctgccattcggaacgttcttttctccactcttcatcagggtaggagaggaggtaagaaagagcggcaaaaacggtttgtttgtctgttccatccatgaagcttccctccagtgtttatatgttttggcaagagccgggtcctccggcaaacgataatccgcagcttccttgttccatgtatagatccgcgacttcttcgcgatgggtttgaggaatgacgaaccggtcatcgtatttggcgattgcaagcagacggtacatgtcttcaatctgctcttcagtcaatccggtatcttgaatcagagatgaatcgatctgtttgttcgtttgggtcgcccgcatgtgcatacgcatcacagacattttctttaatgtcgttctaatatggtgtgtatcaccggcagtcagcaaattggccaaatattcgatcggaatccgcatttcatcaatagcagggaagatatcttcagctgattgggctgttccttttccttcaaacatattcataatcggactgagcggaggaatataccataccatcggcaatgtccggtattcaggatgcagcggcagagcgattttccaatcgatgatcattttgtagatcggagatttttgcgctgcttcaatccactccagcggaatgccttgagcttttgcttcttctgcaacagcgggatcattcgggtcaaggaaaatctccagctgtgagtgatacaaatctttttcattttcggctgaagccgcttcttcgactttttctgcgtcataaagcatgactccgagatagcggattctgccgacgcatgtctcagagcagattgtcggcagtcctgcttcaagacgagggaagcacaatgtgcatttttccgccttgttagtctgccagttgaaatacacttttttataaggacatgatgatacacagtgtctccatgagcggcacgcattttgatcgacgagaacgatgccgtcttcctcgcgtttgtacatcgctcccgacggacaggaggagacgcaggaaggattgatgcagtgttcgcatatccttggcagatacatcataaagacgtcttcaaattcggttttgatggattcttccatttttttgacgtttggatcttggaggcctgtaatgtggccgccggcaagatcgtcttcccagttcggaccccattcaaggttcatgaagtctcccgtaatggaagacttcggccttgcaacaggctgatgttttttctccggactgtttgtcagcgtttcataatcatagttccaaggttcatagtagtcatcgatcgtcggctgatacgggttgtagaataaattcatgagccgcgttgctttggcgcctgatttaagctggagcttgccttttttcagctcccagccgcctttgtatttatcctggttctcccattgtttagggtagccgatgcccggttttgtttcgacgttgttgaagtacatatattctgcaccggaacggtttgtccaagtgtttttgcatgtgacgctgcatgtatggcagccgatgcatttgtcaaggttcattaccattccgatttgcgctttaatcttcaagccaatcgacctccttcaattttctgatcacgacattgaggtcgcgctgatttcctgtcggcccgtagtagttgaatccgtagctgagctgtccgtagcctccgatcatctgcgtcggcttgacatggatgcgggtcgggctgttatgggttcctccgcggttattcgtcagctttgttcccggcacgttgatatgtctgtcttgggcatggtgcataaacgccattccctttggaatccggtgtgatgtcacggcccgtgcgacgacgacaccgtttcggttgaagcactcgatccagtcgttgtcctgaatgtcggtttcttcggcatcgtctttattcatccagactgtcggcccgcctctgaaaagggtaagcatcggcagggaatcaaaatacatgctgtgaaccgaccatttattatgcggcgttaagtagtttaaaacgatttcttttccttcctgatccggacgcttgttcaagaaagggcggtggatcaggatcggcttgaatgtcgccatgttttcgccgaattctgtcatcatttcatgatcaaggtaaaaagactgtctgccggtcagcgttctccacggaatcagtttttcaacgtttgtcgtaaacggagaatagcgtcgtccgcctttttcagaaccgctgaaagcaggggaggtgatcaccgttttcggctgagctgaaatttgctcaaatgtgaagcattcctcttcccgttcttcagctaaatctttcaactcaagattcgtaattttttcaagcgattcccacgctttaacggctactttcccgtttgaagtggaagagagagtcaataccgcttcagcagcttgtctagcatcactgatgtcgggacagcccttggcgatcgtgtcgtcttttacgacgccgagcgtttttttgagagaattatattccgcttcaacagaccagttcattcctttcgtaccaaacggctgtttgacaacattcggcccaagcgatgtcatcttattgaaaatctgcttataatcccgctccacaacgtgaatttgcggcattgttttgcctggtacggcagggcagtcgcctttgctccaatctttgattttcccgagcggctgcgccatttcttgtggagtgtcatggagaagaggagtcgcaacagcctctttgacaggttccatatccacttcttcagccagatcggaaaccgcttttgccagtgctttaaaaatatcccaatcagactttgcttcccacggcgcgctgattgccggattaaacgggtggatgaacggatgcatatccgtgctgctgagatcgtgtttttcgtaccaggtggccgcagggagcacgatgtctgaataaagggctgttcccgccatccggaaatcgagattgatcagtaaatcgagtttgccttcaggcgctttgtcacgccaagtgatttcttccggacggatgctgtcctgatcatcgttcatcagtccgtttgtcgtgccgagcaagtgtttcagaaaatattcatggcctttgccggagcttgagattaaattggctctccagacaaatagatttctcgggaagttcttttcattgtcaggatcttcaatcgaaaacttgagctttttctcctcgagctgtctggcaatatagattccgacttgctgagcgttctcagcgcccgctttttctgcttctttatacaagtcgatgccgtttttctcaaacgtcggatacgatggaagccagccgagtctcgccgccagcacattgtaatcggcatggtgcttgtagcgcgatgtttttgcgattggtgaagcgagcccgctgatttcctgatcttcatagcgccactggtcggtggcgaagtagaaaaatgatgtgccgttttgcagtttggcagggcctccccagtccttggccatcgcgatcgtctgccatccttcggccggccggagtttttcctggccgacatagtgagcccagcctcctccgttaactccttgggctccgacgagaagcacaaggttcagtacagctctgtaaatggtgtctgaattgaaccaatggttaattccggcgccgacaatgatcatcgagcggccctctgtgtcaatcgcattttgcgcgaattccctcgcgatcttgatcaccatttcacttttaatgccagtaatcggctcttgccaagccggtgtaaacggttcaggatcatcaaatgatgccggcgtctgtccgccgattccgcggttgacgccatagttggcgagagtcaggtcgaaaacggtggaaacaaagacttcctcgccgttcaagatgacttttttgatcggaagcggtctttcaagcactttattgccgtcatgtgagaaatacgggatgttgaccgtgccgatcatatcttcgtatccaagcatggaaagccgaggtgtgatcggtttttctgaatcctcatcaaccatgcgcaggttccattttcctttgccgtcccagcgggagcccatcgtgccctgcggaatcgcaaatccatctgtgtcttcgtcccaaacggcaggcttccactcatcgtgctctgtcgcgcgcccgatatctttagcatggaggaagcggcctgctgtgaacgttccgttttcctctttcaaagtcaccaaaaacgggaaatcggtatattgttttgcataatcaataaaacgttccgttttctggttgacataaaagtcttgcagaataacgtggcccatcgccatggccagtgcgccgtccgtgccttgtctgatgctcagccaatcatcggaaaactttgaggactcggcaaagtccgggctgatcgaaatcacttttgctcctttatagcgggcttcggctaaaaagtgagcgtcaggcgttctggtaagcgggacattagagccccatgtcatgatgtagccagaattgtaccagtcgctgctttccggaacgtcggtttgatctccccaaatttgcggtgaagcaggagggaggtcggcataccagtcatagaagctcagcatcggcccgccgatcagggacataaagcgtgatcctgctgcatggctgagcatcgacatggctggaatcggcgaaaagccgacattgcggtcagggccgtatttggcaatggtatacagaagggaagccgaaatcagcttcaggacttcgctccattcggcgcggacaaatccgccttttccgcgcgcctgtttataggctttcgctttttcagggttttcgacaattgatttccatgcttcaagcggatttttgctgctgtttagcgcctcgcgccacatctggatcagcacaccgcgtacatacgggtatttcacgcggagcgggctgtatatataccaggaaaagctggctccccgcggacagccgcgcggttcaaagtccggcatatcagggcctgtcgaagggtaatcaagccgctgcccttcccatgtgacgatcccgtttttgacgtagatattccagctgcaggatcctgtacagttcaccccatgggtagagcgaaccactttatcatgctgccatctatttctgtatacatcttcccaatcccggtcttcataagtggtttggctgtgttgattggaatggcgttcaataggggagaaataatttaatctcctgaaaatgggactctttttcttttttttcattgctggttcactccttctgagtcagtgatgctaccctcactatatatggaggaggcgctgcaccttgttaaatttgtcacatggtttcggcttttcacaaatttgtcacattttcaggagggggaagagggcggacaaaaaaacagcctgcatggaagcgggctgtcgaatggttcaatcgctcgtgttcaaaattctcttttccccgttaatctcctgaatcggggcgatgttctgggtgaattccaaagtgccgatatagcggccgttttcatcgcgtacggcaaaatagcggatgaacacgtatttgtctttaaatttgatccaaaaatcttcaacatcttttttgccagatttaaagtcgtccagaagtttgttgacgatgtggacgctagccggcggatggcagttttggacggttcggccgattacggcttttgtccgggcgaaaatccgttcctttccgtgtgaaaaatagcggaccacatcgttttcatcgatgaaggtgatatcgaccggaagatggttcatcatgtgttcaagctgatccacagacagaataccggtagggagtctgacatagccatcagccgcctcttcgctcgttttgatctgatggcgttcaggcttccacaccgtttccggagcagtcaggcaatatccgatctcgtcgctttcggctgcgattttcagccattcgtcttctgtcagcgttctgagcgccatcggcaagaggatattttcttctttataaatcatttccgtgccttcttgaatgataaacgttagttcgcggatgacctcatcttttttgtccggcgtatactcttccaacaaacgcttcacttctttaatgctcttgcggataaaatcgtcgacagcccacatgacttggcttggccctgtaattccgtacttttctaaataggggaacagaagattttcttttctgctgtaatgtttgtcgacgtcagctagcaaatttaagtctgcgagcagtttgagaatgttgtcgcgatgatcttctttttcaaagcgttccaaatgaagctgcattttaaagttcaaaaggaggtcgatttctttattttctttcataaatgtatgaacgggatggccaggctgcttgtcggcgtccgcgcggtgaatgtcttcaatcgatcctttaaacacagcggcgtgaacggagcagagctcttggatctcttcaggtgtaatgccttcttccttcatcaacgcctgttccagctgggcgatttcttcggcattgactgagccgaatgccttttcgaaccgttttttgacgtcggcaagcggctttcctttatgaaggtcgatgatgatctccttcagaagctgctttttttcctcaggcagaccttgctgcgtttcccgattgttaatgatttcgctcattgtttttctcctttccaaacggggtcaaatccgtgtgctttcaatatgtctaagacatggttccattcgatttgcatcattcgcgcgccttttggaatcgtcatgatgcgcccggctgtttccagcatgccgggctttgtaatattttgaaacccggcatccttcatcacggcttttagttcaggatgcaatgtgcaaagtttgtaaacggaatcgtccaaatcaatttttttatgcaagggatcacatcctttgatagtgatgatcattctcatctataccgtaatacaaggaagctgaaaaaaatgtgacgtacatcacatttttttagcgcaaagccttcggaatataaatgcagctcggatcgctttctaggtaatcgcctgtcagagcataagcacgcgagcgcgaaccgccgcacacatgacggaattcacagacgccgcatttccctttaaatccgtccggatttcgaagatccttaaagatcggtgattcgcggtaaatctcagccagcggctgttcgcggatgtttccggctttaaccggcaggagtccgcttggatatacatcaccgatatgggagataaacatgaacccgttgccatcgttcacacctttcggagcccggcccaatccgccgatggcatccatttttcctttctgcaatgcgtgttcatagcggattttcatgtgggggtctttcgcttcccgcattttttgctgaatgacgacccgccggtagtgctgggctgctgtcgttttgatgtcaaaaggcgcttcttttgccaaacggctgagccagagaaagactttttcatggtccaccggggaaatcatatcttcccgcttcgcgcggcctgtcgggacgagaaaaaacacactccatagtacgcagttcaattctttgatcagctttgccatttcatccaggtaatcgatgttataggaggatatgacggtattaatctgcagaggcagctgacattcatgaatgtagcgaatggccttcatagtcaggtcaaaagacccgtccgttccccgaaaatgatcatgaatctcccgggtcgggccgtccaagctgaacgcccatcgggataacccgatttcttttgctgattgaatcgcttctcttgtaacattcggcgtggcactcggggtcatggagacgcgaacccctttttggacggcatattcaataatggcgaatacgtcgtctctcattaaaggatcgcctcctgtaagcacgaggaggggattgtccatcgcatgaatttgatcgattaaatcttttccctctttcagggatagctcccgaggatcgcgtttattttgagccgatgcccggcaatgaaggcacttgagctcgcaagcccttgtcagctcccaaatgacgataaacggagacttgtcgaaatcgcaaagtatcatctttcatctgtcctttcgtttgcattcatgtgtatcgtagcggaaatgcaggagaaaaaagttaagtagatcacatttggaaaaaagaagagaaagaaggggagaggcccttctcacacgtcgtcttctgcggaggagttgaggtagcgcaaaaaaagctggtatgaaaaaataaattctgctggagcaacatgagaaagttcgtctgtaattggcggttataagtcatcatttttttgaaattatgaaacggtatttcaagtacggcggtttcagaggcagtattgactgaaataaacggagataagaaaggttcgcctttttgatcaataggaaaaacatcgcctttttcccactcggcgatcgtccgtgattcttccggaagccttctgtcggaaaaatgcacttctccttttaaaacaaaatagacggattgcgaatgaaggaacgatcgcgaatgctgagacggttggatatctatcaccttaccgttcttcagcagctttttgatgatcggaaggggtactccgaaaaacataggaagatttttcagaaacaataagtagtcaaaccggtccatggtatatcctccttctctatattggcttttagtataaagcgccgggctgcagggcgcagtgatttaattcacacgactgtatgcaaaatgtcactgtgtaaaaagaacgaaacttttataatgtaatagaaaagaagggaggatgtgtgatgaaagtgttcataccgaagcagcacggcgcctgggcgatgcttgtcatcccgtttattctcggcatgttcgccggaggcgcagatgtaaagcatattccgctgttctgcggatggctgtttctatatcttgcggcatctccggctatgatgatggtgaagaagaaaaatatcgtttactatcaaaaatgggttctcatctacggcattccggccgtcgttttcctgcttatttcggtcctgctggagccgcagcttgtgtatctcggtctgccgctgtttccgctctttctcatcaatctttattatgcgaaaagaaacaacgacagggcgcttttaaatgatatagctgcaatccttgttttcagcgcgggcgggcttgcgagcttctggatgggagcggggaagcttgatggtgaggcatcgtttgtttttatccagtccgctttgtttttcacagggagcgctttttatgtcaagtcgatgatacgtgaaaagaaaaacaatcgattcaagctttattcatggggctaccatgttttcctgccgttcgtctcgctggccgcaggggcaggatgggcggtgatcggcgtagtgccgagcagtcttagagcgtggtttttccacgggaggaaactgtcgattaagacaatcggaatctctgagctggtgaatgcctgtatctttatggccgtgttgatcgtttttctgctgcaaacgtaaaaaacaaggacactgtgcttcatgtccttgtttgttttcgctttttcagtcgatattgcagatttcgagcgggcagttttcacagtcgatttcgcgttttaaataattgatctggtggatgacgatttttcccgagtcctcaattgaaatgacaccgttcttccggaggtcgctcagcatgcgggtgatgctttctcttgcagcagcacaaaatttcgccagatcctggttcgtcaggacaatattgatgagaatcccgtcgcttcttgtgatgccgtagctgtttgcgagacggatcaaggtggagtagagcgcgccttttttaccattcagcaaaaggtcgcggatcttcgattgaatctttcgcaaatgcgtgctcatccatttcataaactcaaacgtcagcgcaccgttttgaatgagttctttttcaagcttatctttattgatgaccaacacttcgccatcagagaggatctttgcgctcagcatatatttcgcatcttctgtaaaaagcgtaagctccccgacaatatcattttttttgcacattctaagcgtcagttctttgccatcggacgtcaatttgccgatctggacaagtcctgactgaataagatacagttcctctgcatccatcccttcttgaaaaaggaatgtgtcctgcctgatttttcgtcgcgtactgatcgattccagcaagtgatgcagatcgtctgagagcaaatctgtgtctgattttctaacagaaatgttcattgagcgtcaccccttttgcagttcttattttaacgttaaataaggcagagtgaccttttaaatataaacaatattgtgaacatatgaatatagtcccgaaaaagagcctgggcatatcggctcaatctctttttgcaggaagggcttataaatggttggccttcgttttggacgatgttttgttcacttcctgaaaatacatccagaccacgatcacaaagcttgcaagagccgcttctgacagcgccatgaatccgatcgcataatggccggttgcctgaaaaacgcttgacaggatgagaggcgggaaaaatcctcccaagccgcccatcgctgatacgatcccattaacgatgccggcctgatttgaaaaataaagcggcacgagcttaaagatgatcccgtttccgagtccggcgcacacggcaacggttaataccccaaacccgtacagtccgaggctcggcgaaaaggccaataaaatccctgacaaggtgcagccggcaaatacatacatcaacagcttcagcgggttgaatttgtctgccagccagccgccgacaggcctcagaaaagtggcgacagcgataaatccggcggttctcagccctgaatcgacgggatcaagcccgaagtgattaacaagaaagttcggaagataaatcgtaaacgcgacgaaagatccgaatgtaatgaagtaaaacaagcttaaaaaccataatgtctgatttcggtagactgccttcatttgctctgttacagataccgtaacttttgtttcttttcgatctccaaggataaagttcaataaagcgaatacggcgactaacacgatgtacatccgcaccgtattttcccacccggcggtttttgcgacaacaggagcggcaaacgtagtaatcgctgtaccgacgttcccagcgccgtagatcccattgacaaacccgtgcttttctttagggtagtatttcggcagtgatgtgaccccgatggaaaagaccgctccgccgatgccgaggaagaagccgccaaggatcaagtcgaacagcgaatcggctgtgctgatccaaaaaaccgggaacagaagcagcaaaaagctgatcatgaatgtaattcttgctccaaatctgttcgtgtagtagcccagcggaatcctgagaagcgacccgagtatgaccggaatggccgtaacaagggagacctcgctgtctgtcagggcgatgtcctgcttaatgtggggcattaaagaggaaatcaatacccaaaccataaatcctgcgactaaactaaatgactgcagcggtaattgtattttttgacgatttgccattgcggttttgctcctttcaaagggaaaaatgaataaatcaatcagcatgtttatcttacaaaaagtctttttaaaacattgtgaattacgtcacacggtcattcgcttgtttcgtgtttaatatcggtaagtgacggagagtaaacggatgtaaaaaaataaattgttcatttgcggactttatcgtttatcatggaaataaaaaaaggagtgccgcttttatgtttataaagcttacccaagaagaaaaacaagcgatcatcgatgaaatcaaacgcttttatgttgaagaaagaggagaagaggtcggagacattgcggcgattcaaatgttcgaattcgtaaaggaaaagctcggaccttacttttacaatcaggccttgaaggacagccgcagagtggtggaagagaaggcagcggcgattgaagaagagctctttgcactggagcgccgtctgtgacaaccgctctcctttagcaaaaccgaagggattgaaagaccaatggagtttctgaagcaatttatgattttcagcgggttgaatgatgaagagttcaagcaaatcgagcagatcgcggccaagcgcacctatcagccgagaatgtttgtttttatggagggggaagagagggaagcggtatttttcatcaaatccggtcttgttaaagcctttaaaatcgatgaagacggcaatgaacaagtgatttcgattctgcaaaacggggatatgtttccccatgtcggcttttttgacctctccccatacccggcaacggcagaagccgttcaagaaaccgaattgatcgtaatccgcatcgccgattttaatgaacttttgatgaaatttccggaaatgacgataaaagtgatgcaaatcatggggaaaaagattctcgatttgcaagagcggatccagggttttatctcaaaagacgtccagcaccgcttgacacatgtattaatgaagcttgctgctgaacatggcattcctcaagaaaaaggggtctacatcagcctgcccattaccaatcaggattttgcgaacatggtcggaacgtcaagggaaacgattaaccgcacattaaatgaattgaaaaagaaaaatctgctgacagctgacaggagcggaattttcattcatgatacagactggctgaacggctgcaattaaggcatgagttttaggctttccattgaacggcagatggaaagcctgttttttattttgttcacaaatacgccatgatttaagtgatctggttcacaactggtgttttgcatatccagtatcttaggacatgcaaaatacaaaaaaggagtgaaccgcaatggaagtacaaagaaagacggtgcccgttaaaaaagcatcaaaaaacggttttctgaaatccattctcgtctttactttaatcgtaagtttttcggtgctgcttttgggaggctattggatcttcaaaggacttgcaccaagacctgttgaagtgtccgggccaaacggagaggtgctcatgacaaaatcgtctatttcaggcggtcaggccgtatttcaaaaatacgcgctgatggactatggaacgattttggggcacggatcttatatggggcctgattacacggccgaagccctgaaaatctatacggaagggatgcaggattttaaggcggaggcacaatacggcaagcgctttaaacaactttcagatgaaaagcagtccaccatccggaatcacgtcatccgcgaaatgagaaaaaaccgttatgatcgcccatcagatacattgaagctgacagacgcgcaggtctacggcttgcatcaagtgcgcgatcattaccgcaaagtctttacaaaaggagacggctgggggcttgagcccggtttaattaaagaaagccacatgcctgaacgcaacagggcgtgggtcgacagcgaagaccaaatcacgcaggtctccgattttatcttttggacggcatggctttccagtacattaaggccgggcgacgacattacgtacacgaacaactggccgtatgatgaagatgcgggcaacacgatgtcattcgccgccgtttggtggagcggcgcaagcgttaccatcctcattttatttgtcggcattattttattcgtgttttaccgttacaagcttggaatgaaagaggcttaccaggaaggggcgtttccggtatttgatctggataaacagccgctcaccgcttcacaggttaaaaccggaaaatatttcgccgttgtgtcgctgctgttttttgttcaggcgatgttcggggctttgctcgcccactattatattgaaccggacagcttttttgggattgattggatcagggagctgttgcccttcagcatatctaagggatttcaccttcagctggcgatcttctggattgcaacttcatggctcgggatgggtatttatgcggcgccgcttgtcggaggccgcgagccgaaaagacaggggctgcttgtcgacattctgttttgggcgctgatcgtccttgtcggcggaagcatggtcggcgaatggctcggagcgaaaggctttttaggaaacaactggttcttattcggccatcaaggaatggaatatattgaactcggccgcttttggcaggtcattcttgcgctcggcatgctgatttggctgtttatcgtcttcagaggcattaagagcggcctcaagcgggagcctgataaaggcggtttgattcatctgctgttttattcttcgatcgccattccgctgttttacggtgctgcctttttctttaatcccggcactaatattacaatgtcggatttttggcggtggtggatcatccatctttgggtggaagggatttttgaagtctttgccgtcgtggtcatcggctttttgctcgtgcaaatgaacctggtgacgaaaaagtcgactgtcagaacgctctattttcaattgacgatcctgctggggagcggtgtcatcgggatcggacaccattactattacaacgggtcttccgaagtctggatcggcctcggttccgtcttctcatgcctggaagtcatcccgcttaccctgcttgtattggaagcttacgaacaatacaagatgatgaaagacggcggacatcacttcccgtataaagcaacgttctggttcctgatttcaacggcgatctggaatctggtcggcgccggggtattgggctttttgatcaacttgcctgccgtcagctattttgagcacgggcagttcttgacacccgcccacggacacggggcgatgatgggtgtgtacggcatgtttgccattgccgtctggctgtatacgctccgcaatatcgccaaaaaagaagcatggaatgataaatggctgaaaatagcctgctggtcgctgaacatcggcctgttcggaatggtgtttatcaatttgctgccggtcggttttcttcaattgaaaaaagcgtttgaagacgggtactggagctcaagggcgcctgagtttttacagcaggatgcagtgcaaacgctgctgacttggagggccgtgcccgatacgatctttttagccggaatcgtgattttggttgtattcagcatcagagcattattccatctccgcaaaccgacgcatcgggaaggagaagcgctgcctgttaaagacattgcttcagatgaatagataaacaaaaagacagaggaagtaaaatcctctgtctttttgttttattgattggcttccgcttcaagccgcgggaacaaaatattgttttccaggtgaatgtgctgaaaaagatccgtttccaattcatcaagctttaagtaagtcagtgtatatgttgtgcatgccccttcaggaagggtatagtcattggtcactcttctcagttccttcaggatgctgcctgcggcttcatgctcttgttcaaggacgtcgatcgtctgaaccgcttctgctaagcggtccattgatcgcgtctcttcataggccatcactttcgggaaaatatgttcctcttcctggaagaggtgatgttcgagttctgttttcagctgatggaacaattgatggacctgggcgagctccggatgatggatgccatgaacccggtatacttttgtaacaaagcctgacagttcaggaagcacctcatacaggtaggcatggtgcgtatgaatcacatggtcgatcagctgtgaatacggggcttcactccagttcgtctcttttgcgtttaatgcctttgtctcttgatataatgtattgattctagctaagatctcttcttcatttaaatcctgctcttttatcgcttcaccgatcgggcggttgcccccgcagcaaaagtcgatgcgatattctttcagcagccggctggctcttggaaaacgtgtaacaatatcacccgtttttgtattttgatcaaaaactgcttccatttgtaaaacctcctgaagtgttttgtatgctataggttaaatgtaacgggttcaccgagggaaaatcgtgatctacatcacattctgaaaaaatgacagaaaaagcaataagtcagaagaaatcgggaaatagctatagataacttttcatgttggaggcccgcaatggagcatatatcctggcttacatttacgatgctgattctcgccagttaccggttaactcatttgattgtttttgataagatcacggagtttatccggaaaccgttcatgaagaagaagcagacgattgatgaacaagggcatgtagaaacgaaaaaagtgccgaaatcaaacttcggctatttgctgaattgctattggtgcgcagggatatggtgcgcgttgatcattgctgtcggatatctgattgccccaaaagcgatattcccgttgattttgattttgtcggtcgccggggggcaggcgattcttgaaacgtttgtcggtgtcgccacaaaacttgtcggctttttctccgatttaaagaagtaaaccattccaagcggatggttttatttttttgtcaataaagtgatacaaacagcagagagaacgtgtcagttttatgaacttttcacagcgatttttcccggatgcggcattttaggcagagaggaagcatctcattgtaaagatttcagtttttaaaatttagaattgagagaaaaaggatgtgcaaagtccccggccatttgttttaaaagcttgcggtcactagtattcagacctcccattttatacgaaaagaggaaatagatagattttttaagcgccaaaaaacaagaaatatggttgatagacaatcggtgaatagtttatttacaatcagttcgtgctacaggcaaggaaaggagtgaaaaatggctgcggaaaaagtattttcgaaaaataaaatcattggagggaaaagaatgtcatatatgaaacgttccatctctgtcttcatcgcctgttttatggtagcggcgcttggcatcagcggtatcattgcaccgaaagcggctgccgcttctaaaacacccgttgctgtaaacggacagcttaccttaaaaggtacgcagctcgtcaatcaaaacggaaaagcggttcagctgaaaggaatcagctcccacggtctacagtggtatggcgattatgtcaacaaagactcgttaaaatggctgagagacgactggggcatcaatgtcttccgcgcggccatgtatacagctgaaggcggctatattgacaatccgtcggttaaaaacaaagtgaaggaagccgtcgaagcggcaaaagaactcggaatctatgtgatcattgactggcacatactgagcgatggcaatccaaaccaaaacaaagcgaaagcaaaagaattttttaacgaaatgtcaagactttatggcaagacgccaaacgtcatttttgaaattgccaacgagccgaacggcgatgtcaactggaatcgcgacattaaaccttacgccgaagaaatcctgtccgtgattcgcaaaaactctccgaaaaatattgtgattgtcggaacaggcacctggagccaggatgtcaatgatgcggcggacaatcagctgaaagacggcaatgtcatgtacgcgctccatttttatgcgggcacgcacggtcagtctttgcgggataaagccgattatgcactcagcaaaggagcgccgattttcgtcacagaatggggaacgagcgatgcttcaggaaacggcggggtctaccttgaccaatccagggagtggctgaaatatttagacagcaaaaaaatcagctgggtaaactggaacttatccgacaaacaagagtcgtcagcagctttaaacccaggcgcctctaaaaacggaggatggtcgcaatccgacttgtccccatcaggcaaattcgtcagggataacatccgcagcgggtcaaacggttcgtcaggagactctggatcgaattcgaaagggtcagatcaaaaagaccaaaaaaaggatcaggataaaccaggtcaagacagcggcgctgcagccaacacgatagcagtacaatacagagcgggggacaacaatgtaaacggcaaccaaatccgccctcagctcaacattaaaaacaacagcaaaaaaaccgtctctttaaatcgaatcaccgtccgctactggtataaaacgaatcgcaaaggaaaaaattttgactgcgactatgcccaaatcggctgcagcaaaatcacgcacaaattcgtccaattaaaaaaagcggtaaacggagcagacacgtatcttgaagtagggtttaaaaatggtacattggcgccgggtgcaagtacaggtgaaatccagatccgtcttcacaatgacggctggagcaattatgcccaaagcggcgactattcatttttaaattcaaacacgtttaaaaatacgaaaaaaatcacgttgtatgagaacggaaagctgatttggggcactgaacctaaataacggcactttgacggacaccggatttggtgtccgttttcgtatatattataatggaaggaatgaggaatatttttgtaaacatgaaaggagatggatgtatgaatgaaacattgcagcaatacatgatgcttgtcaaggaacactatgacacgatcaatggaccggattacacaggcaaagaggaagacattgaaaagagaaaagagcaaatcgagctttacgccaaaacgctccagcaaggcttttcaacagatgacgactatgatgaattcgcagatgccgtgattaaatgcgcatacggagatctgacgatggaagaattggaaacggtttatcgggaattaacgtctccataatcaataaaataagggggaggaggagcatgaaagacatgatcatgaagacagaccggctgattttgcgaaaaatgaggcatgatgacgccgaaaacctgctcgaaatcttttctgacccggcagccatggaatattatccatcgacaaagaatgaaaaacagacattgcaatggatcgactggacgcttgaaaactatgaaaaacacggaaccggtctttggattgcagaacataaacaaaccagcgaatttttaggccaatgcggcatcgttccacaggaagtcgaaggatcgaacgaaatggaaatcggctatttgtttaaacggagcgtttggaaaaacggctatgcaaccgaagcagcatcagcatgcaaacaatatggatttgagtcatttcacctgaaaaaaatcgcatctttacctgatgcgaaaaatcttccgtccagaaaagtagccgaacgaatcggcatgactttagaaaaaacgatacataaatggggaaaagaaattgccgtatattcagtgtatcgctaaattttattctgtctcactaacttgagtatactttggtattgagacagaatttcttttcaatccttaacttccgagaatatatattatgtaaactagaaaatataaaagaagaaaaggatgctctaagcctcccctcttgttgagtttcaaccctgatcccgactctctaaactaaatcagatgcacttacaacagtccgcgccaaaaaatatcaaatgatatctctaaagaccgttcaaatgattgtttgttttcgtataccagttgaatgttgagcccgtcataaagcgtaataaatcctattgtgcacttctccggaggacatttcacatccgattccttgaaaacattcgctatccgttcctttaaagtatgcagatataaaaggtattgggctgaaataaaatcgcttacttcagcaggcgctttaaaggacattgcctgcaaaaaagctacattcggcaatgcatgaaaacggacttgggtttcttttaaaaagtcatatatttgactctttgcaggcgtatgttttcttgaatcgaagaattcgttgataaatgaaatttcctcttctacaatctcggggtatatttccatcagcagctctttttttgtatgaaaaatgataagcaagagattgttttctgattcccaattcttttgcaatatgcgacattttgactccctcatagcccaattcattaaattggcgaaccgctgcacgctttatattctctctggtcaatataccgtcctccccgattttcaggctgtttttctcttcatgcagatatataaaacatataataaaagaaacagcaagtacatgaaaatggcggcaatatagatctcccgataggaataaaccgttgcaaccaaacctaataataaggagcctccgccaattcccatatcgaaaaagttaaagaacgttcccattgcatcctcatgatcatgctcttccacaagatttatacaccatgtttggatggcgggaaatattgagccgaaaccaaacccatagcatatagccgctgtaaaaaacattgcatttgtttgtgcgaaatataatattgacagccctgctattgaaaacagcgaggcgggaataaggatggcggcagctccgtaacggtcaaataccctgccggaaataagccgtataaaaaaaactggctcctgcaatcaaaaagaaaaacatcccgacactttgaaaccccttttcaattgcataaagcgaaaagaaagacataattccagatgcagcaacgccgacgaataaaataagaattgacggaaacagcacacgtctttccaagactttcaactttacagtgccctttccgccagtgcctgttgtttccggctgtctgcgcacgaaaacagccataagtgccgccagcaaaagaacggacatcccgcctaaaaaaagtctttgaaaatcataaagctccagagtcgcgataccgatcatcggtccaacggaaacagcaattgtctcacctactccaaaatatccaattccttcacccctgcgctctttaggaataatttcggctgcgattgtcgcaaaataggtcgtcgccaatccaaacccggcgccatgtattaagcgaatcagtaataaagcgctgacatcagacgccaggtaatatgcgcctgttgagaaagcgctgatcgcaagtccaaaaatgagcaaatattttttattgaaccgtaaagccaatgcccctgcaaaaggacgaacagcaattgcagagaccataaaaatgcctgtaacatacccgacttgttttgcccctcctccaatagccgtcacaaacaaaggcaaagtcggcaataacatttcaaataccataaacaagaaagcatttgcaagcgtcacaaaaacaaatgacaatgaccacatttttgcagtatgtattttttctacattcaattccatttggctacctctgtttttatttttcttctcacgcattcactttaactgaccttggtcagtttgtaaatataattttatagaatttaagctattaataagcagaatttttttaaaaaaacttgattaaactgactgttgacagataggggttgagtcgcaaagggtatcttccgataaataaaaaagctactctcaaagagtagcttttgtggtgcgtgcaggcattaaacttccatatgctttataaattaagcctgttttcctatgaagttatttaacgaccggccaagccggtgaatccggatctaatgtaaagtcataagacttctcgtcgcgatacatcggatcggcatagatcgaatcttgatcttgatttgttgcgttttgatacggcgtaaacgagtcgtattcattcttcttccaaatccacaggccgtctttgccggtttccttgtggtacacgttatgattcactttgttaccttcatttttcgtaaaatcgtttgcgatgaatattcgcgaatcgcttgctgttatgatgtttttttcgattgtattgttttttgtatcatattggagcaaaagctgtccgccatcgagcccctttgtatcattgcggtaaacaatattgtgcgaaatgacagaatggctggtgcctccccgcttttggtcgtatccgccgatagaaatgcccgtgtacgcattctcatataccgtgttgtcggttatttgaatatcatccgcatactttcctttatgttcagacgttgcttctatcccgatatcgttgccgtagaccgtgtttttcttaatatcaatgctttggcctccgtcaacatatattccgcccgcagagtagtcatccccataggcgggatttccgtaagtggagttgtcgtaaaccgtgttgttttctacgataccgttgcgcacaaaatcgttttgagcggccgttccttcataaccgatcagatcgattccgatgttgttattgtcgcgaaccacattgcctctgatcgcaaaaccgtcaatatttccgttcagcacaaccgcttcactcgctccgagtgtcagcttttcaaccgtattgtcctcgatcttaatgtctttcatgctgccggatccatagacggcaatcccatgggcattgccatcatccgctgttgtttttatatcccggacgtgattgtttttaatggtgatatggctgctggagcctgacacataaattcccatggctgttgcttcttctgatgaaacggaaaggtcttgaatcgtcagtccgctgattgtgatgtactgttgattgtgaatctgaatgagcggtgtttcatattcagcgtccttaacagattctccgctgatgacgactttttcattctcatagttttgaaatgtgataggcttttcagccgacccgctctctctcacatcaagcgtttcatgatacgtgccttcccgaatcatgacagttgtgccggggacagccttttttgctgcctgtttcagagttcgaaacggcttttctttcgttccttcattttgatcatttccatcgggggaaacaaataagcagttagccggttctgcttcttttgctccggtcttatcgtaagcaaaagcgatgataacagaaactaaaatacacgctgatataataaaataccattttctcatactcagctctcttttcttttcaaattggataaactaacaccattatagaatatccatttatggaaaaccatcacaaacattcgaagatttttagccgcccggaattttcaaatgaagatcgtcagcgaaaagaaaaaggcagcccctattgcaggggttgcctcgatgtttatgacttaattcagcttttccgcgtaccttatatgacttttcttccgcagtctatgaacgagatagccgccaattcctcctacaatcgccggaagcacccaccctagtccgatgtcatacatcgggagaaactgagtgaaaaattgattaatagctgcaattttgaatccggcagcattcaggccgtcaaacaggctgatgataaaggtcaatatcagactgccttgatacacatccctcttccctttaaataaaggatgtaaaaatgttaagaatattaaagaaatcgcaatgggatacaaagttgttaaaaccggcattgaaacgttaatcagctgtgttaatcctatatttgctacaagggtgctgaacattgacagaatgacagcaatttttttataggagatgtttggaaacaagccgtggaaaaacgaagagcatgctgtgatgagtcccacacttgttgtcagacatgctacagttatcattaagcccaaaaaaacggaaccatatggtccgaaataataggatgaaacctttgccaaaacctcggctccattttctaatagacccagtttttcaacgctggaagcccccatatatgaaagcgctgaatagatcagagccaagagcgccgctgcaatcgccgtcgattttgcacaaacgatcatgagctgttttttggaggccgctcccttctctttcatggcgttcacaatgatgattccaaatacaaaagcgacaagggcatcaagagtaaagtaaccttctttgaatcctttaaaaaatacgtgtgatgcatatccttcagacggagcttgaaagcttccgattggatgaataatagccgtaacaacgagcaatccgataaatgttaatttaataggagttagaaattttccgattacatcgataattttagttggattcagggacagcaagcatgccacagtgaaaaataaaacagtaaatatgattaaggcaacagggcccgcatcatttgataaaaaaggtttaacccctatttcaaacgacacattaccggatctgggaatcgcaaaaaaagggccgattgctaaatagagaaccgttgtaaatacaatgccgaacaacggatgcacacgactggccagagactgcaaatcattttttcctgaaaaaacgaatgccgtaatggcgagtaaaggcaatccgactccggtcaccaagaatcctgcattggctgtccatacattctctccggccatctgacccagcataggcgggaaaatgagatttcctgcaccgaaaaataatgcgaatagcattaatcctatgattaggataaatgaaaaaggaattttttttgtccatcatgagtcctccgattcgggttaagctattagtgcgtttttagtagtcagcagtgtagcacgataaaaattttcaaaataaatgtcctgaattatcagtaaatattaaataaaagtactatcctactatagtagctgttgctcgtattgtcaaaggtttagtctgtataaaaattacgtcgtactcctcctttggaattgatttgcaagtttgttacataatgtaaaaataacgatggaaagtaaattcacttttgggaggttgtgagcaaaagctaagaaaagcggccagtcaaataaaatgactggcctatctgttattatatatgatttacaaagtagagacatcaatcacgaatcgataacgcacatcgcttgtaaggacgcgctcatatgcttcatctacttggtcagctccgatgacctcaatttgcggagccaagccgtgttcagcagcgaaatcaagcatctcttgtgtctcccgaatgccgccgacaagcgaacctgcaatgctgcggcggcccatgattaaggaaaacacactgtactgatcccgttctgccggcgcgccgacgttaacaagtgttccatcggcgcgaagaagcgataagtatgcatcaacgtccagattggcggacaccgtgtttaaaataagatcaaagcgtccggccagctcagtgaatactgcagggtcgccagttgcaaagtaatgatctgcgccaaaacgcaaggcttcttcctgtttattcaaagagcggcttaagaccgttacttctgcccccatggcatgcgcaaattggatggcgacgtggccgagtccccccattcccacaacggcaactttcttgccggggcctgcgttccaatgcttcaaaggagagtacgtggtgatgcctgcgcacaagagcgggcttgcaacatccaagtttaggctgtccggtatgcggacaacgaaatcttctttgaccacgatgtattggctgtaaccgccatatgtcggatttccatcgtagtctaaacagttatacgtttggatcacgcctttcgtacaaaattgctcctctccgctctggcagtattcacattcgccgcaggagtcaacgaagcagccgacccccacgcggtcgccgacagcaaattttttaacacttgtcccaactgctttgacgatgccggcgatttcatgtcccggaaccattgggaagattccgcctccccattcatcgtacgcgctatggatatccgaatggcaaatgccgctgtacttaatatcgattaaaacgtcattcggttgtaattcccttctttcaattgtggtctgttcaaatttcgccttggctctcggagcactcagtacacgggttgagatggttttatgcagattacacatccatatcgatcctttcttacgttatattacgccaattcatagagaagaggtgcaagttaaggttaaaccttaaagttcgctttaaggcaagaggtttttctgaaatcttcttcggtttgcgttaaagtccactttaaggtctataatcattgtgtgttgtgacacatccaattagaattttgatgaatatgatggaggtttcaaaatggggtattctataaaagaagttgctgaaaaagtaggtttgcctacacatacactccgatattatgaaaaagaaggtcttctgccttttattaaaagagacgcaaatggaaaccgcatttttgaagaaaaagacttgtcatggttggagcttgtgatatgcttgcggaaaactgacattgcgctttcggaattacgggaaatcgtcaatttaacaaaagaaggagattggaccatctcgaagcgcaaacaaatacttgaaaaacataaagaaaaaatgcttgaaaagcaaagagtcctggaacgcgcctttttaaaaatcgatgagaaaatcatgtactatgatggattagaaaaaaagaatcaggcaatgtccttgaaagcggatgaaaagtaatttgataagtgccggcgcgctttcaattatggcactacattcaaaagaaatttttccaaagtctcctttgcggcttgctcatccgtaccatagaccattaacgtgatctcatccccttcttgcactcctaattgaaggatttccatcagatctttcccgtttgcggtctgcccgtttttagcgagtacgatttcacttttgaatgaaatcgctttgcggacaaatagggtcgtatgcctggcctgaagcccccgggggagccgaactgttgatttgttactaacaccataactctctccttgcttctttttcgattaaggctacgaaattcttttctaagctgcatctacagaataatcgttaagccactttaacgcaagggattttgtgaaatttgctgagaaaaagccgtctccggcctgcgctggaaacggcttttttcttaatttaaaaaggatgctttatatacagataaacgacctgcttatatatcccaccaaaaggtttcgggaagcgagtattggctgtttaacggaaccgtttcgccaatcgccggagcaatcatgttggcgccttttttctcggcctctttcaatgcgcgttcaatcggctctttccagccgtggtatgcgagggtaaaggctccccaatgaatcaacatcatgttctttccttttacatctttatgggcttgtacagattgttcgggtgtcatatgaatcccggaccagcgtctgtcatattggccgccttccattaatgtgatatcgaaagggccgtattttttgccgatttccttaaagtgttcatcatatcccccgtcaccgctcgtataaaaacgcgtatgttttccgaggatgacccagccgccccacagggtcgtgtttcgattcaataatcctctgcctgaaaagtgtttggacggtgtcagggctattgtcaaaccttgaaactccgtttcatcccaccaattgagttcggtgattttttctttctcaattccccaccggatcaagtgtgcgctgattccgtaaggaacgaagaaatgaccggccttttccttcagctttaagatggatggataatctaagtgatcataatggtcatgtgtaatcaagacggcgtcaatcggcggcatatcattgaccgtatgcaggatgtcttcgctgtagcgtctgcttccgatgaatgatacgggtgaagcaattggacccagcatagggtctacgagtatttttttgcggtcgatgctcagtaaaaaagcggaatgtccaaaccatgttaagctgtcttcgttacttttaacgatgttccaatcaatctcagaaacagggatttgatcggaaggattgcgctccttgccgccggaaacagcgtctctcatcattgagaaaactccggatattccgcccatatccatcttttcttgtgtttgattaagaaatttgccatcggcataattgtcaaagctttgatacagctttttttgttccttgcttggatttcctccaaacacaggatgtaaattgatgaacaataaaacagccgcagctaagatgatgataaaaatgaataaaaacatcatgatttttttccttgttccttccttttcaggatgatatcttgcttcttcttattctaccgattatagctgcttcgtcgccagtataatgaataaaatgtaagaaccctccgaatttggagagttctttttaatagtgccgcgtaaaacggctattgtgtaaatgctcagccggcgattccagaccaccgccatagccttctcaggcaggatgcagcaattatttaatttgcactaataaaaatgtgtatttggtgccctccggtttgtttttccaataaatcgttacctccgcgtctcccttttggcgtccttcgtagtctactgagttcatgctcggattagcatatgcatggagaataaaggggtcatcgaccgcaacctctaaatcttcgtccgaaaattcaatttgaggacctccatttatactgccgcaatagaaatgcgcacggccggaaccgccaatgccaactgtttcgtcgtatacggtgaagatgtgagttgagcattcgcttggtttaatagtaccaactgatgcagcatttgcagaaacggcatgaaaggacagaatcgtcgcaagggcaatggctagtgacaagaaatacttgcttaattttccgatgttcatgttgtcaacctccaaccaaatattgtcagtatacatattctccatatcgaaatatatacctctataataaggttcttacaaaaaaagagctgacgctaatggtcagctcccgcttttaaaaccggacagattcagagggttggaaaaaccggtccaccgcttcatcggttacatctgaaacgtgccggtacttatagttcggtgattgatcacggtcgatcaggacggacctgacgccttcgaagaaatcattgtgcttcaaaaagttctttgccagcaccagatccgtggcaaagcattcttccagtgttttttgacgtccgtccgccagctgtttcaatgtgatttttaatgaaaatggcgatttggaaagcattgtttttttcacattcgagctaaaggtgcttccctcgctttcgagcgattgaaggatctcttccagcttatcatacttaaaatgacggtcaatcgcttgctgatcacgggcgagcgtgctctcctgggagggctccgttttcgattcgcggatcagctgatcgagcttttcttcaacgcttgcaaggcgccaatcggtttgttccactgcttgaagcaatcgttctaaagcgccgctctccatgtaggcgtctgccccattgatatacagcacgtcggctgcatggatgacagacgccgttaatccaagataccgccctaagcggcccggggctttgtttaaaaaataggctgccccgacatccggaaagaagccgatattcatttcgggcatcgcccattttgtcctctccgtgacgatccggtggctggccccgtacgtcaggccgacgcctccccccatgacgatcccgtccaagcaggcgatgatcggtttcgaaaatcgatggactgccatatcgacttcgtactctgtttcaaaaaagcgctcggcatcttgcagggcctgttttgacgaacgagcttcatagagtgccttaatatcccctccggcacatagtccttttggtcctgcacctttgatgaccacgatagaaacgttttgatctgtctcccactcgtttaacttttcaccaatcagacggaccatgtcgtatgtgagtgagttgagcgctttcgggcgattcagaacaatcgctgcggcgccgttttgattgacggaaaacagcacgtcatcggacatcttgatccactccttttatgaatgatgaaagtttggtttgcgtttttcgacaaatgcgtgaattccttctttggcatctgaagtgacaaacagctcggcgaatctgtttcgctccctctccagtgcttgttccatgctttcgctggcgccctgtacgacacattcgacggcgcgcctcacgctggtcatgctttttccttcgataaaagacgacgcgacagcagctgccgtcttcatcagttcctctccctttacagccatctgtgcaattttcagctctaccgcctcttgagctgaaagcgatcggcccgtcaggataaggtcgagtgctgtcgctgtgtccgttatgttgcgaagccgctgtgtaccaccaaatgcaggaatcaagccgagctttaattcgggaagaccgactgttgcatcgtctgatacgattctgaagtggcagctcatcgcgagttccaggcctccgccaagagccggtccgtttatcgccgcaatgatgggttttttggaagcttcgatttcatcgcagagcgcctggcccccttgtgcgagcgccaatccttgtttttggtccccaagttttgaaacgaattcttttatatccgctcccgccacaaaaaagcggccttctccagtaatgatgattgcttttgtctcctcgtcgcgggccaattcccgaaaaagagagcgcaattcggcgatacaggaagaagaaagtgtatttgccggcggattgttcaacgtcacggttgtgatgccatgttctgttttaagtgtggcatatttcaagttcaatattgatccctccctgattaaataaaaaaggcccctctgaaaaaaatcagttgtgcatgagagggagccttatgttaaggattagaaccagcgttcggtgacgacctttttacgcgtgtaaaactggacgccgtcctttccgtttgtcccaagatctccatagaaagaggctttgttccctgcgaaggagaagaacgccatcggagccgggacgttgacattgacgccgatcattccggcatcgattttgtcgcggaactgctgggcgcttttcccgctcgatgtgtagatgacagcgccgttggcaaacttggattgattggcgagctcgatcccctcgtcaagatcttgtacacggacgacgctcaagaccggtgcaaagatttcgtcctgccagattttcatctctggtgtcacatgatcgaaaatcgtggctcccacaaagtatccttctcgaacatccggattgcgtccgtctacggcgagtgcggccccttcttttataccgctgtcgatatagtcaaggacgcgttgtttatggacttcgcggatcagcgggccgacaaagtgatcctcggatctgccgtctcctgtcttcagcttccgtgtttcagagacgagcatttccatgaagtcatcggcgatgtcatcaacgaccgccgcaacggagcaggccatacagcgttccccgctgctgccgaatgccgcaccgatgatgccttgaacagtcttttcaagatggcaatccggcataacaatcgcatggtttttagcgccggccagcgcctgaacgcgtttcccgttggctgtgcccgtttgatacacatattttgcgaccggttctgaaccaacgaaggagacggctttaatatcatcgttctccaatattccgtttacaacatcctttcctccatggacgaggtttaacacaccttttggaaacccggcttcatagaacagctcaacaagcttcccggcaagattaggagtccgttccgaaggtttcaggacgaacgtgtttccgcaggcgatggcgagcggaaacatccacaggggaaccatcattggaaagttaaacggcgtaatgccggcgacgactcccaaaggatagcgccaaatcgatccgtcgatgcccccggctatcgcgggaagggattctcccatcattaaagtaggtgtggctgtcgcaagctcaacaacttcgattccccgctgcacttcgccgcgggcgtcttttaacgttttgccgttttccgtcgtaataatgtctgccaattgttctttttgctcctggagaagctgtaaatacttgtataaaagccttgcccgattggggacgggcacaagcgaccaggtctgataagcgtgcttggcagcctgcacggcacgatctacatccgctctcacagatagaggcgcataagcgatgacgtttccgtttgcaggattgacgacttcttccgattccgcacctagagaattgacccattccccgtcgatatggttcatcattttttttgcattggttgtgatcatttgatttctcacctctccttactgataagttgtcttctgttcgcttatttttttgtataaaacagacatatctttttccccgtatccgttctgatcggcttcttcgtaaatgccgaagagaatcttgctcaccggcagttcaacgttgttcttctcagccaaatccaatgcaaagccaaggtctttcagcagcagcttcaaagaaaagccaggtttatagttttcatccgctatgaaacttttatagttgcgctcatagatccggctctgcccatagctgacgttcagcatctcaaacaattggtcgaggtcgagattgctgtttttggcaaggtgcaaggcttcactgacgccggctgtataaaaaccgattaagaggttgttgatcagctttgtattcgttccgctgtcgatgttttcgttcacatgaaaaatattctcgcccaatgcattgaaaacaggcaacgctttatcaaaaacggacttcggacccccgaccataaaggtcagcgtccggttgaccgccccgatcacaccgccgctgaccggcgccgcaagaaaatcgatacctttgcttttcgcttcctccgcaattcggatattcagttcaggagcgaccgtgcttgtatcgatcaggaggacgcccggttcagccaggtgtacgagccctttttttcccagaaaaacctcctctgcagcttttgaggaaggaaggcttgtgaggatggcgtcacactcttcaaccattttttcaactgaaatcccgatcgttcctcctgcatgatgcaaggccaattcagcttctttgttaaggtccattccataaaccgtaaagttctcctgaagcagattcttcgacattggcagacccatattgcccaaaccgataaatccgatttttttcaaacagtttccctccgatcacaccgtatatttttcatgagcggctattttttctgcgatttcgcgtttttgagtaaacagattgctgaaaagaggcaaagaaaggctgcgagcctcttcaaatgcgagttttctttcggcttcatcagatgctatgcttgataaggcggtcaccgccatctcttcgattctgcggtagccttcttcacaaatgacattcgtcatcatttctttcaaccgtgctttttcaccaccgtatatttgcctagctttttcggttcggcgggcggaggattccatcacatagatttcttttttcatgtcggcgagaagccgtgcgtattcctgatcttcttgagtgttcacgcgagagcggataagcgctttcagtgtcttgccgaaaagcctgttggacagctgaataaatcgccggtttcgatttccctcgctgcctagttgagcttccggctctgagatgccgttttgctgcacttctttcatgagcagtttggcgatcgttaagcggtttatttcatttgtcccctcgaaaatccggctgatcctcgcgtcccggtacaatcgttcgacttcgtactcctgcatgtatccgtagccgccatgaatctgcaccgcttcgtctgcgatccggccgaggatttcggagcagtaaactttattgatcgcacattcggatgcatagtttgtgagttttctcagtctatcgtctaatgggagagccgaatctaaaacattgtccaagcaatctgccgttctgtaagcagcgctttccgcgccgaaaatcgagaccgccatgtcggcaatcttttcttgaatcattgaaaaaccgatgatcggcttgttaaattgctttcgctgtttggcgtagctaacagcaaggttcaatgcttgttttgccgttccaatgttcgaaaacgcgagctttaagcgggccatgtttaaaatgttcaaagcgacgtgatgacctttcccgatatgacctagaacattgtcgcttggcacctcgacttcctccaagattaaggttgctgtcgaagaccctttgattcccatcttcttctcttcaggtccgatggaaacacctttaaacgagcgttcgacgataaatgctgtcatgccttccgccgtttttgcaaagacaacatatacatcagctacttgcgcgttcgtaatccactgcttttccccatttaaaatccaggctgtcccttccctattcaagacggctgtcgtttttgcgtttaaagcatccgatcctgcgcccggctctgtcagagcatatgctccgatccattcgcccgatgccagttttggaaggtatttttgtttttgttcctctgttccataataaatatacggcagtgtcccgactcccgcatgaatattaaaggagacgctgaacgatccgccggctcccattttctctgccaccaacccggaaagcttcttgctgagtgaaaggccgccgcaatcctccggaacttcgatactgagcaaaccgagctctcctgctttttgaaacaattttttcacgctttcgtgatcctgctgatcaatcgattcaagaaggggcatgacttcgtttttgacaaatgattctgtcgtttttgaaatcagtcgatcttcctctgtgaaatcttccggtgtaaatccttcagcagccgattcgtgttgagaaatcaagggttcattccatcgaagttttgctttccccattgcttacctcctcgcttccgctaaaaagagtgataaaccgagataaaaagacgatgaatccgcttacatttttgctgatacgaatcatcgtctccttttctcatccagataaggaccaaccaattatgaagggcacggttgtttcggtcatttagcaggattttcttgccagacgccggaacataggaccgcctttttgtttcatgaagcagctgttccgcgaaaagtcccgggcagtgcagctgatgaaagatatgaagcttttaatatcagcttatcaaataattggaagatttccaaatgtttttttggtttactctattttacttgtgaaagcttgggaatatgcattgtcagccctctgtgaacacgtcttggcaagtcgagattattttttttgcaaaaataaaacagaccatagttttatggtctgttcagaaagggcgccgctgatcgtttattcaattgataagcttgagacgatacattccgcatggccggcgagcgtaaattctccaaagccccagggcagcagcatgtgatctccttttttaaatgaaaagttatggccgccagatgcgatgcgcccttccccttctatgacgctggcaagaagaaacggtttatcctgtttgaaacaggccgatccttttacatcccatttttctactgagaaataaggacaatcaatcagtgcggcagtcttgacgtcgcccgatgtttcgtattgaacggtttcgcgatcaggggaagacggaacgtcgatcacttctatgcttttttgcaaatggagctcgcgcaggtttccttcagtgtcttttctgtcataatcatatagtctgtaggttgtgtcagaattctgctgcgtctccaaaatcaaaatgccttttccgatcgcatggacggttccgctcggcacatagaagaaatctcccggcttcactttgacgcggcgcaaaagctcattccattttccgttttcgatcattgagaccagttcttcccgcgtcttggcatggtggccgtaaatgatctccgcatcttccttgcaatcaatgatataccagcattccgtctttccaagctccccgttttcgtgcagctttgcatattcatcatttggatgcacttgtacggataggtcttggtcggcgtccaaaatttttgtcaaaagaggaaagcggtctccctttatatgtccgaataaatgacggtgttcatcccataattcgcttaatgtgagccctttatacaagccgtttttcacgacgctttgtccattttgatgtgcggcgaaagcccagcactcccctgtttgttcggatggaatgtcatagccgaaagaggctaaagccgttccgccccatattctttctttaaaaacaggctcgaaaaataacggttcagtcatgacgggcgtcctccttttttagatgatttcatccagaagtttgtatgcttcttcttttgtttgggcagagagaagcttgtcccggtaggtgtcatccatcagttttctggagagcatttgcagaagcttcagatgctcgtttcctccgctttctttcgggacggcgatcataaaaatcagtttggcgtcagttccgtcaagactcctccagtctacgcccgaacgtttaatgccgaatgctacactcggcttcttgacggcgtcagacttcccgtgcgggatcgcgatattcataccgatcgccgttgtaccctcaagttcgcgattgatgatagcttgtttaaattcgctttctgaatgcagtacgcctttccgggacaatttttggatcatttcatcaataatgtcgtctctcgtatctcctgacaaatgaggttcgatcaaatctgtatcgatgatgtctgtgagctttgtaatttccggcttttcgatttttttgctttccgcttcgatttcgatgttcggttgtggaatgtcgttccctgcagcagcttcacttatccctgcgggtgcagctgtgacctcttttttgagcacattgaccaaaagagcggtaaccagggatccggcaataacagcgataaagaacatcaacacatgatcgacagcgccaagcaccgctacgatcggtccgccgtgggcgactctgtcccctacattaccgatcatggcgatcacggaacctgtcattgaacccgccataatacttggtatgacgcggagcggatcctgtgcagcaaacgggatggcgccttcagtaatgccgaataatcccattgtaaatgctgcttttcccatttctctttcttgcgcctgaaattttcttttccctaaaaacgttgcgattccaagcccgatcggaggaatacaaatggcgacggcgatcggtcccataatttcatagttgccttcaccgatcatggccgagccaaacaagaatgccactttattgacggggccgcccatatcaaatgagatcatcgcccctaaaattaatgccagcagaatcgagcttgagccctgcataccagccagccaaaccgtcaatgattcaaagatttgcgcgacaggcgcgccgatcagcaatacgaacgccaagcctacaatgagcgaggaaaccaccggtatgacgatgatcggcatgatcggctgtatggcttttggcacttttaattttttgatggccagcgccgcatatccggctagaaagcccgcgataatgccgccgaggaaccctgcaccgctcccgctgccgtaaaagcttcccgtcgctgcgatgtatccgccgatcattcccggcacaagccccggtttatcggcgatactgtaggcgatgtaaccggctaaaatcgggatcatgaatgagaatgaggctgccccgatttgctcaatcgttttccaaaaagaatcatcagggatcactaaccctttcggcgtcttttcgcctccaagcgtcaatgcgaccgcaatcaataatccgccgacgacaatgaaaggaaccataaacgatacaccgttcattaaatgcctgtaaatcggattttgctttttctccgtttgagcggaggcttccgttttcacagccgaacgatagacaggtatatcgccgccgatcgctttttgtattaattcttccggttttcggatgccttcctgaacaccgacagccagaagtttttttccgataaaacggtctttgttgaccgagcggtctgcggctataataatcgcgtcagcctcgcggatttcctgctcggtcagctcattttccaccccgatgccgccttgtgtttcgactttcatttgaacgcccattcgatcggccgctttttgcaaattttccgcagccatatacgtatgggcaatgccgtttggacatgatgtaatcgctaacagtttcatgcgaatcctccttctgaaactaaagtagtgagcagctcttgtcattactttataataaaaacgtgcgtgtaaaagcgttgatttttaccgcaggctccggaaaaatcggtttttttaaagcaggactgcagtgagcggcgacttgtaaaaacatatgggactgaatttgaaaaaaatgtgccgtattgcaatagggagctgaaatttgtcgagggggtgtaaacataggacatcctctttatgaaggttattttgatgagggtattcgaagaaaaccctagtgaaaagaaaatatctgatggtattgatgaaatggggatgcttctttaaaaaatatctcattcctagtgcccgaaagctctgattatgatttaataaaaaattaagaaaggtatgatatcaatgatgagattacttattagttttatattcggggctttaggggcagttataatgtataacgtaaaatcaaacttttctttccctgtgacaacaattgttttagtggtttttgtggctgcttgtttgcattttgacctggttaaacgtaaaaagagcaaagatcagaatgataaaaagtatgagtttatatggtggatcgcaacaattctcatggttctagtgatgactcttaataccgtctttgtaaaaattgaccctaagtataatatcatcgttgtattgattcacattttgtttatggtgattattaagagtagatggaagaaagctaagacagactaagcagatgggcggcctgcttttttcgtactatctcggcagactctttttccggtgtccgcaatgtttttcaccttcaatttcaaaataaaaagacatccatcaggacaccttttctttctctttttcagcttttgcttgttatacagaaactagacaaaaaaagtaacaatttctatgctcttcatcaaccagtattcagctcgtttcattgtgaaaaattaatcatcctattggagaaataaaaaagtgtccaaacctgttgaattagaaagaaatctactcctcactaattcatggctctggacaaatatttcaaaagattataaaggacgccgaaatagacgatatattcgttgatactgaaacagatttcatcatttctttttataatacagattaattatttaatcgttcctctaactcatgaatccttctttcaagctcagagaacttcttgtcgttgtatctatgatcacgttcaatgtttcttattgattagtttaagcatggatatgactttttcaggatcgttttcctctatgcgtgttaatgttttgttgattgtatctaaccgctcgtttacgcttttgaagtcttctttcatttccttttgcatttcgtagatcgcttgcaaaacttgattatccaattcgtccatccctttctattgattatatcatcatcctaatgattgtgtttcattttttggaatgctcctttccctattgctaatgtgtttattctttctcaacggtctacttgcactataaaactccacttctttttcagtggggagctataaattagagatctttatataactcatgtttaatccaaagttcgaagtattgagtagcctcattaatctttaaatctttgcttgttattgaaagtatattgcaaccgaatggatcgatttttgaaaaactcaaaggtggctcatctatcccatgatcctgaaagttaaaatacacgtcccacacatcgatatctaggcgttttaatcctaccgcttcaagatctaatccctttttattgtaactaatatgtagatgttgtgcttcatcataattcattaggaaaccctacctttagaaaaagatatgatgttttttcagttgggcggcacggtggaaatgaagtgataaaagccttctaattgaattttgataaaggtcagcgccccgcttttaataatccaaataagataagaacttcatcacatttgtttctttcgtcagcttttggatgaaggccggctgctcgcttaagctggacagctcttggaacaattgttttgtcatgttttgatcctcatgtttgacagccagcataaagacgagcgatactttttcagagccccagtcaagcggctcctttaatgtggcgatcgcaatggctgattgtttaatcaatttggcgttcgcgtggggaatcgcgatgcccgctccgatgtttgtcgccgacattttctctctcaagacggcgtgtacggcatattctttttccacatagcctttctcgtataaagcgattgccagctgttcaatcagcttgtagcggtgttctgactcttgctgcaagaaaacgagaaaaggagtcgtgtcgttcagcactttaaacgttttttgtttttggcgggtcgattcaccgagctgatccataaagtcgctgagctttttctcatcagccgactcgagcagcggtgatacaacaatatgaggaattgataaatcctccaggctgaccgttgatatgacaagctcgatatctttatatcttgcagtatagtccgccaaatctgctttcgcgatgcagtccatcacggcaatttggtggaatttccgttcgatttttgtccgcagcagctgtgacattccgatgcccatatgacaaacgatgatcgcttttttatgcttgtcttttccatagctgaagcgctcgatcgccgcttggaaatgcaatgtcagataggcggcttcttcctcgggaatcgaaagtgaaaacgtttggttgatgtcttcaagagcatcaatgacaatatgaaacagataagggtacatttttttgatatcgttgagcatcggatttgatacggaaaggtcatagctcagccggtttaaaacggtattaaggtgaactttcaatccattgatcaaaacccggtcctcgcggaaatccatcattttcaactctgatacgcgattgattaaatattcgacaacctttggaagcaaagggttttccagtccgctgtccccttcttttccaaatgggtagcgaacttttccgcctaatatatgcaatgttaaatagacggcctcttcttcaggaaagcggatcgcaaaaacagcttccagccgttttaaacaggcaaacgtccactgaaattcttttttgtttttgactgcatcgatttcccccggcgaaatggtgatcggctgtttcattttgatgcggcggatcatcagcaatgtatgcaacagtaaattttcgaacgtttcatcagtgaaatataaagaatgccgcctttgcaatgatctaatctcacttttaacaaattccacttcatggcttaaaaatttacttttaataaatcggcttgtaaactccgggttgtcaatcaactccgagatgcgcgccagcgcttttctcttatttttttcacttccttcgatctttaaaccgaggcgctgcttggataccagtgtgaggccaaaccgcttcagccaaacgtcaattttattcaaatcccttttgatggaagacttattcaagaaatgctcggcagccatttcttttgcagaaaccggctttggattcattaatagctgataagcgatttgcagcattctttcttcatcgggtagctgctgtgcggcgtgatgttcggtatataattgccggcttaaacggactctttcttgatcttcaatattcaaataaacgcccaatcccggtttgcgaattaattgagcatcagaacgctgattgagatagtcttcaatcgttttcagatcatttctgatcgttttttcagaacactttaccctgtctgcgaaatcttgtacgactaaatagtcatcaggttcagataacaacagattcagaatgtctttttgcctcgtattcatatctctctcacctgtttttctatccttcccgtcagtttcacttaaaagaaatgttagtataagtatactatatacgtaaccgtttacattatacagtgaaataaaagggccaaaagtttcgttttttaccgaaacttccggaaaaaatgcttttaatcaactcggaaatttttcttttataggaattttttataatagatgatagtgaggggaaagagaaaagcagacggcagaatgaaaacagccgcacggttctgagcaacggaaaaaggatcaacggtgctgctcccgccgatccttaaacattaaaattctcttttattataaaagctgagcgatatcgcgtatgaaacggagatcatcacgagcagtacaccaaccaaaaggatgaatgtacccgcatttgacattccgctcagaaaagccgttaatttttggctcaatgcaaggttctcgtccgcgtctataaatttaaaaaaggctgttcctccaaaaataatgaagaaaaatatgaggatattcgccattttggacttcaaatagccgtacttaaaaatcagcggaaatgagatcgagctaaataaagtgacagccacaacagcacccatcgctcttgaaaatgtcaatgggaaatcaagcggcaagtgcagcaaatgtccgaccgcattgatcaaagaatagaagagaatggcataagccgcatagacataaaccgatacatatttcgataatacgatgatgtttcttttaataggcaagctgatcaggattttgtcactgttgtttttgtcttccaaggagcttgcgcctaatgccagctggtacgtgacagccaatacagcgaccgtatatccgacaagctcaagctgcgacaatgtaaaagtgaaaaaaatcatcaataacagcgatagcttcattgcccttttctgcattaaaatatcttttttaataagatgatacacgatgatcactcctgccggttgaaaataccaaaatatcttccaaagtgggtttttctatcatgacggaatccccgaaatgctgaacgacttcccgcttatctctggagagcgcttcaaaaccatagcggtttttcttgatggcgattaaggcgtcttcgttccctttgcgcagcgtatcgaggtctcctttcacaatgcagtactcctccaacagctcatcctttgtcttgctcagcacgagccggccgttatgaatgaaagtaatatagtccgctactttttctaaatcagaggtaatatgcgtcgaaaagaaaatcgacttgttctcgtcctgcagcaatgtttgcagcacgtcgaggagctcggacctgacaagcggatccagtcctgatgtcggttcatccatgatcaataattcggcatgatgggaaagcgcgaccgccaatgagaatttcatcttcatcccttttgacaagtttttgatctgtttgtttaaagggagctggaagtcttttgcgtaccgctgaaaaacagcttcgtcccactttttgtaaaacggtctgatgattcctttcatttcgtttggtgtcagttcttcgtaaaaatgattttcatcgtatacaaagccgattctctgcttgatttcgatattgtgtttttcattgtcgagaccgaaaatgctgatgttcccttcgtcttttttgatcaggttcatgatcagcttgatggtcgtgctttttccggctccgttcgggccgataaaacccataatataacctttctcaagcgagaagttgatgttttttaaagagaaatcttgatagtgttttgttacattctttaattccagtatgctggtcacttttaccactcctcataaaccagtttgagcatctcttggagttcttcgtatgtaaagccgatttgtttcgcttcagtaacggcttctgctatgtgttcttcgattaatttgacttttgtttcccgcagcatgtccttgttaatggctgcgacatacgagccctttcccgcgactgtgacgataaacccttctctctccagctcgtcataggctctttttgttgtaattacgctgattttaagctctttggccaggtttctgatcgacgggagcgcctctgactctgagagttctcccttgacgatttgatcttttaattggttgacgatctgcaaataaatcggttcatcagatgaatttgaaatgatgatattcaaagcatgacatccctctattcgttataactgtatatatacaatataaacagttataacactgttgtcaaaccatcacaaaacaatgcatattatttgcgatggttttgtattacgtagcagcagaaaacctcctgtttccagcatggcagatcatacaaaaatgttgtttatcttcttgtttgtaaaacggaaaagttgaaataataaatcccaatttctcaatgtgacacagagaaattgggatttttatcagtgttgaaaatcagctttttggagctaaccccgttagttatactccagaataggcggagaatcctccatcgaccggtatgatggttccagtgacaaatcgcgaggctttatcgcttaccaaccataataacgttccgattagatcttccggaaccccaaatctatccaacgtaataggcttctgttttgggcagtaagaaaaaagcctggggcaatggcattgacacgaattccgacttttgacatatgcacggcaagccattgggtaaagttacttacggccgcttttgcaccgctgtaggcgggaattttcgtcagcggcgtataggcgttcatggatgagatgttaacgatgacacttccgtcgtgatcagccatgtcttttgcaaatacttgagtggttaacagtgtaccaagaaagttcaaatcaaatacggaccttacaccctctatttctaaatcaaaaaacgtagtcaattctttagtattcaagtcttttttatataaatattctttatctgttgttccctttggatggttgccgcctgcaccgttaatgaggatattgcatctgccgaaggttctgttaatgagttgtttcgcttgttcaaggctttgtttatcaaggacgtttgctgtaagggcaagtgcttcgcctccgttttcttggatctctttcgctactctgtctgccgattcagctcttcggctgactactgctacttttgccccgcattgagccaatgctttagcgaaacagctgcataagatgccgcttccccctgtcactacagccaccttatctttcaagtttacatgaaaaggaatctgcacactcatccctcgtctctgcattttagtgcttgttcatttattgcattcaaaagctatccgctttttttctttcgtcaatgtcccacattccatttaaatacactgcacccagcgcccggtcatataaaccataacccggtttaccggtctctccccaaatcattctcccatgatccggtctggctggtccggcgaagtcaatatctcttaatgctcttacgatttcatacatatctaaagacccgtcttctgaacggtgggatgattcttgaaatgacttttccccaatgatcttaatgtttctcaggtgaacaaagttgacttttcctttttttccgaaataacgaatcaattctggaatatcatttgttgaattcacacccagcgacccgctgcataaacacaagccgttaaaggagctgtcatagagatgaatcaatcgctccaaattctttttgttcgttatgattcgaggcagttcaaagataggccatggcggatcatctgggtgaatcgccattttgactcgttcattttctgccacgggtataaccgctttaataaaatacgaaagattttcccataaatcctcttccgtcatgtgctgatattgttgaaaaagattctttagctgtccatcttcatagcttgtgtcccaaccgggaagttttagttcaccatgtaatggattcatttgtctaactttctcttcttcataaattaatgctgtagaaccgtcttctagtgcatagtctaaagaagaacgggtccagtcaaagaccggcatgaaattataacaaacgattttaacaccggcttttgccaagttgcgtatcgtcgttttatagttttcaatatattgatctcttgtcggaagacctaatttaatatcttcatggacaggtacactttcaatgacacttaacgataaaccatgattttcaattttttcttttaactctacaattttctcataaggccatgcttcccctacaggaatatcataaatggccgaaacaattccagtaacgccgggaatttggcgaatatactctaatgtgaccgggtcgctgtctccataccatcgaaacgtcatttgcatggttctcccatcctcttccctcttattatttaacattcgatatcatcatttcgcatgaaataacaatatattggaacgatttttttcaaagaatttgccgattagtatccgcttacataaaattttcatgatcatgattcatgtatcgtgctcgatgacaaaattcagctggccgggatgtaaccgcggacaaagattcctgctcgaattaatggaaacatcttcatcatgtggccttaatcttttaatcacacggcaaactgtaagaaaacgctccgtttttgctttccaaatcgtatgttccttccttttgtattgaaagtttgatcccgtcttctgttgtctccatatcgacatgtataaaggcaaatgtatgagtatattcatttggcgcaacagggtattttttcttttttgcaatcatacaggcgacaaccatcgtagccagcccccacaagattccgggcaaataacccgccataaataaagcggctgcagatgttccgccgctgactaatgagaaaatgatcaaaagaccgctaggcggaataagcaaaccagttggtgcagaagcaatatttactgcggcagagtaagtccggtcatatccttccttttcttgcagcggcgacatgaccccgccgattgcagcagcagcagctacagacgaaccggaaatggaaccgaataacatgtttccgacaacatttgtatgggccagagaaccgggcagcctgccgctgatcaattttgcgaagttaatgagccgcattgcaataccgccattattcataataatgcctgataaaatgaagaacggtaccgctaataaagaaaagctgtcgattccagtgaccattttttgcgccgaagtgaaaatggcaacatcaaaaggaaaaatggtaagcattgttacaatggatgccgccgcaatacttacagaaatcggaacgccgagaaacaataatatgaagaatactgccgataaaatgagacctgctgctatggccatatcatttcacctcttttttagtttttaaaaagcctcagtcacatcttttctgctttttttacatcatcacctgacttttgttttgaattgaattcatgtaaagattcatataaaccggccaagctgtatccaatgatgagtatgcctgcaacaggaagtgatagataaacaaatcccaccggtatccctaatgctgctgaagattgctccattgtggtgatcactgctttcgaacctcctaacaccaacacaatcagagcaaaagcaatcaaaagaatctgaatgaaagtatgaacgaaaacagctgcttttattggaagttttcgaacgataaattcaatcgccaagtgcttttttttccaaaatgcataggcaccgcccaacatagaaatccatatcagtgaatagcgtaaaaattcttctgaaaacgtactgggagaatttagcatatatcgagtaaatacttgccatatcgcaacaaaaaccatgatggccattagtgtgcaagtcaaacattcaatcgttttattcactgctttttttaaagctagcatatacatccctcccttatcgaaaaatattcgagtcgctcattcatccagagtcattttacttttttagctttcgcacgaatttccctatagtattttccgatcaattcttttttggcaaactcatcgtgaagcgggcttaccgcatcccggaatggagtcttgtctggcttgtggaacttcactcccatttcctttgctttctcaaccgcattttcagtttcttcagcccaaacgattttgtgatactcagtagactctttcgccgcttcgatcaccgcattctgctgctcttcgcttaattgatcctttttgtccaaattcatgatcaaaatatccggaacgatcgcatgttctgagtatgaatattcttttgccacgtccccgtgattgctgcttgttaaagccatttcgttgttttcggtgccatcgattacacttgactgcaatgctgtatatacttctccataagccattggagtaggtgctccacccatgagttccaccattcgaatcgctgtagcactcggctgcacacgaatttttaaacctttaaggtcatttgggtgcataatcggtttgttctttgtgtaaaagttccgcgaaccggcatcatagtaggttaatccaataaaccctatgtttttcgttgtatcatacatttcttttgcaatatcactgtccatggcttcatagaaatgatgtttgctgtcaaataaataaggcaagctgaagatggagtagacctctgaaaaactttctaaagcgcttgcacttactttagccagatcgacagccccggtctgtgtcaattcaatcacttcacgttctgaaccgagctgagcatttggatacacttgcactttaacggtgccattggttttcttttctacgtcttttgaaaatttgagtaaagacttgtggatggggtgttcctcattatggttgtgagcaagccgtaacgttacggttttatcgacgcctattacatcgctgcttttacaccccgtaagcattccaaagattaaagcgcatacaaaaaacacggatagcatttttctcatgaactaccctccttgaatctcataaccgttgctttctaaccaatgattgattgcgattcatgttttctttcatcgccatatttttttggtagcgtttacaattccgctcgaatagtgaacgaatatgtgaaatttttgcattgtatgtttcggtttatcccctgaatcccgtttccaattatgttctgtaacaatttgtgtaatattttagtgcattagatgatcgtttttctcacacatctcctcctttacgataagtttaacaacgttgttaaaaataaacgttgcttcatcatccgaaaaattctttaacaacgttgttattttcttcggaagatgtatatgattgttattttatgatgtatcatttataataacaacgttgttatttattatcataaaattatttttgaaaatttgcaatattatatttttaaagatgttttggagggtccaaaatgactgtaaccattaaagacatcgccaatgcttccggagtaagctattcaacagtctcaaaggctttaagaaacagccctcttgtaaaaccggatacaaagaaaaaggtcttgcaagttgccgaacaattagggtatagtccgaattttgcagcgagaagcttggcatctaaaaaaagtcaaacgatcggtcttgtctggcctaccattgaaagaatcgctttatcagcacttgttactaaaataaatgaagtggtcgaaaagaacaactattcaatgattttatctgttaacagagctaaagaggcagtggatttgtttaagagttttcgcgtggatggaattatgatttttgaagaaggcggcgaaactcagcttagtgatgatactggattaactattcctatcttatcttacggagtgtcaggtgaacatacacatcctattatcgatgtcaatcataaaaaagcaatttacaaagccgttgcgtatctgtatcaacttggccacaaaaacattagctacgtcggcgacctctcccctgccgacaagcgtcaggttgaaaaaagcaaagggtttgaagaggttatgatggaagccggtttgaaattaagtcgaaacagtattttaaatactaatgggttaagctggtataacggttataccgctgcgaaaaaactattacaacaaaccccaaaacctacagcaatcattagcggaagctacgatatcagtgtagggattttacgagccgtaaaggaacaacagctcagtatacccgaagacctatctttaatttcttatgataatatccctcaaatggcaagccttgaaaccccgctgacgagcgtaggggttccaatcgatcaattggctcacaaaatggtcgattctctgctgtctcttattcgtgagccgggctcaataccattaactcaaaaaatggaccctgaattaaacgtaagaatgtcatgcgcttctccagcagttttaggtgaagaaaacaagtaacatttaagacgagtttttcaggtcatcttttcttttaaaagctgatggcaatggattttacagaattcctcggtacattgatttctgaatttttacatgaacggccgcatgccttaggggacgttctttctttatagaaaatatatgttgcagacgtgtttttatatgtttctaataaatgcaaagctcaggtattgttacctgagctttgcatttattctcctgtctccgcaaatcgcttgatccgctctccaatttcatcgcgtacacgctgaaagaatgcccatttttcttcttctgtcccttctgctttggcgggatcgtcaaaaccccaatgctcgcgcttgacgtgcggcggtgtcatcgggcatttatcagccgcgtccccgcacagcgtaatgacgaggtctgcgttgtgtaagatatcgggatcaatgatatcggacgtctgctcagaaatatcgatgcctgcttctcgcatggctttgactgcgttcgggtttaaaccgtgcgcttcaatccctgcactgtagacgttccactcgtctccgagatgtttcttcgcccagccttcagccatttggctgcggcaggagttgcctgtgcataaaaaatagatggtcttttttgacattggtcatcgtctcctatcatgtttaatggatgatcagcagccacacataaagtccggcaagcgtgatgaacagggttggaatggtcaaaatgacacctgttttaaaataggttccccaagaaatctttacgcctttcagtgaaaggacgtgaagccacaagagcgtcgccagggagccgatcggcgtgattttcggaccgagatcagagccgatgacattggcgtaaatcagcgcttctctgagaatcccgtgtgtatcggtattctgaatcgcaagcgcatcaatcatcaccgtcggcatattgttcattaatgaagacaggatggctgcgataaagcccattcccattgttccggcaaacagcccttgatcgctgacggtctggatgacctgtgagagaacatctgttaagccggcgtttctcaaaccgtataccacgacatacatcccgattgagaagaaaacgatcgcccaaggcgctcccttcagcactttcttcgtttgcacagcggggctgtttttcgctgtaattaagaaaatgacggcgatcacgcccgcgatgatcgagacagggatcgagaacagctcgctgataaagtaaccggccaacagaacggctaatatgagccatgacaagcggaatattttcctgtctctaatcgcttccgctggctgttttacatttgtcatgtcataatgccgcggaatgctttttctgaaaaacaaaaaaagcacgatgatgcttgcaataagcgaaaacaggtttggaacaatcattcttgttgcatattcgataaatccgatgttgaaaaagtctgctgagacaatattgacaaggttgctgacaacaagcggcagcgatgttgtatccgcgataaatccgcttgcgataataaaaggaaaaacgagcttttcttgaaaatttaacgcgcgtaccatggcaagcacaatcggcgtcaaaattaaagcagctccgtcattggcaaacagcgcggctactacggctcccagcagggtgacatagacaaacatccgaatgccgtttcctttagctgccttggccatgtgcagggcggcccactcgaaaaatccgatttcatcaaggatcagggagataatgatgatcgcaacaaatgccaaagtcgcattccatacgattcccgttacgtctaatacatcctgaaaattgacgactccggcaattaaagccagcaccgctcctccgcaggccgaccagccgatggatagatttttcggctgccaaatcacgagcgtgagcgtcagcagaaaaatcaaagtggctaagactgtcgtcatcgcgtgtacgcctccttcataggttttctctccggacacatcttataataaaatttttatataagtcaatgcttatattcggaatgcaaatgaaaaagagggaacagtccaccctcttctgttttaactgcacgaaacgggtctttcttttcttttaacggtttgaagaacctcgtcgtgtgcatcgatctgattgagaacggcaaggaccaattcgcgttccggaaagtcgtcatgaagcgaataaaaacgccattgttcccttctctgttccttgatcatatttgcgcttttcagctttcgcaaatgctggctgattgcgggctggcttgtttcaaacatatcgacaagctggcagacgcaatatggtttctcctgaagcagtttcagaattaagagtcgggtagaatcgctcaatatcttcatgcagctcaccgtgcttttcgaatcaagctttgtttgtacggacatgacattcctccaatatcaggcgttttgcagacgttatgttgcatccattatataaatgtccttttatataatcaagcggtgatcatcaaggcgcggaactcgtgacaacatcgattgtcactgtgaaacacgctaaaatgattgacactagagttgaggcaaaaatcggcgtgtcactgcgtttttgcggccggacaaataaaggatgaggcccatgaggatcgaacagccccaaatgaaaaatccggtttctgtagcaagcagttcccaatgaaaaagccagacatgaaggattcccaaatgataatgaccaaagacaatgaaatatacgtatgtacgttttgcaataggttccttcaaattatcatcatactagaacagtaaagcctccgaggactcggaagcttttttattctcactcatcatttcgccgcttcttcggcatgattatgattcgcatctcccatgaaaggtagttgcgtaatatactagtcattcaatccctttccatcgagaatttgctgagtatatttttcaatccgcgactctctggttttggattgttttggtttggaaaaataaagaatatatgctctttgccggcccggcgtcaatgcttcaaaagccgcttttaaagctgggatttcagcgaattttttttgaagttcttctggaattgtatattctgcagcctgtttaaaatccacttgcaggccggctttttctacatcaatggcctcatttatataagctttcaaaatggtctccatttcagctatttcttgtacattggtgaatcgaacctgccgcgcggcttgtacattctccgtttgctggataagaatcccgttggggtcctttaacaatgcgcctttatgaaacaaaagcgcacaatattccttaaatccatggattaaaacgatgtttttattctcgaacgtataacaaggatgcttccacttgaaatcttcgttcagctcacattcaagtacgatttgacggagcttcttaaattcttccttccacttttcggctttgcttaaaaattcatcaacctttggattcgttctgctatttgtcataaggaccacccctctttatttcataatgtcattttaacctaaacttgctctgccgacagctgaaatattttaagcgttacggagatacaatatgcttagcaaaagaagaggcgggatgattatgaaatttagcatcatgacgtttaatatccatcatggaaaaggaagggaccgccgcgttgatttaggtagaacagccggtgtgatcgctcaaagcggctgcgacatcatcggcctgaatgaagtggatcggcatttctcaaatagaagcgattacgaagaccaaatcggccggcttgcagaacaattgaacatgcactatgcgtactgcccctccctttcattgagttccggcgattcttctgagaaaaggcaatacgggaacgctctattaacgcgttttccgattaagaaagaacggcatcattcattcaattttgtcaaagggctgatcgaaggaaggtctcttcttgaggctgatgtccggatcggtgaccggctctttcgcgtttttgttacgcatttgagcctgaatccgtggcttcacggcaagcagacggattttttaatcgagaaggttcaagagagcgatctgcctgtgatcgtcacgggagactttaatatgaaaccttattcacggggatggaaaaaggtcgcggaaaaactggccgacctgtgggatgaaagtcaatacggacaggggttcacccacccttcccaccgcccgagacggcggttggactacatctttctcagtccgtcttttcatgtgtcagcggctgaaattgtcgccgttgatccgaacgcttccgaccatctgccgcttaagggcagcatcacatattaaaggacggctttagaagccgtcctcagcgtgattgaaaaccctcgcattcgttgtcaggcttgcgcgtcggtgctcacgaattccaacattcgctccgctccaatgctcggccttcctagactgcaagggttttcaatcacgctgaaaggatgacaaaatcccaaaactaaaagtcgttttgggattttgtcaacaatctgatgacggctttagaagccgtccttaagcttttgcgatgcccagcaaaacgccggctgcgacgatcagtatgatgccgatggcgataccgatcagctgccgctttgttttcttttcgccgagcagaataatgccgccgagcgttgagatgacgatccccatctgtgatagcgaaaaactggtcgctacgccgacccgcggctgggagatgaataaaaacatgtttcccgctgcccagattaaaccaggaatgatatttttgatgacgtaaaaattaaacggcttatgcctgaatgtcaagatcaaaccgccggcaaccatgccgacagcctgaggaaaaagagccgcccagccgctgacatcaaaaagccggacgacgacgacatacacgagatagccgaatgttgaaatcagcaaaatcacgattccttttttcatgtcgccggttttttcctctgttttttggctgcggtcttccagcgatgtcagcacgattcccacgatgataaaaatcagcgccagaacgccgagaacgatcgagattgtcgtcgcccactcatggaaaacaagcaccccaaacagagaagtggatacgagctgaagccctgttgagatcggcatcgttttagacacgccgatcagatcgatgcttttcagctgattggtctggccgagcgcccaaaatagtccggaaacgacgccgacggcaaatatccggggggataattcaggctggacgacgaagtagattccgattgaaaaaattaaagcgccgaatgttgtgccgagcacctggctgtacggtccgcccccaagctttacattaaagagcacgatgcttccccagaaaatcgctggtaaaatcgctaagaaaatgtccatttgatttaaacctttctttccttgtttttatctattaaggtgcactatcgatgcgatttttaacacaaaaaatccattttgaacaacgttcaaaatggattggtactgttaccgcaaaatatcagttttcactgtttacgctgccaagccaaggcatatcgggaacagctgccggttttttgtacaagtcctggatcagtctgtctttaatgccgagcggattccggtttaaatctttcaggctgaaatggatgcttcccatcacatttgaggcgcggtttaatgcgatctgccgcggatattcttcagggtctgaccaggcgggatctgagttttgattgattttataggctgcttgtccgatgtataaatgaacggggcgatggctgacttcatttttccaccagtccactaagatgtcgtaggaagctggggcaaagccgatgctccagtagatttgcggggcgatgtaatcgatgtatccctgtctgatccattccctcgtgtcagcgtaaaggtcgtcatagtttgtcattccggcggctgtattcgatcccgtcggatcatctgctatatttcgccatacaccaaaggggctgattccaaatttgactgaggccctctcttttttgacggcatcattgatttgtttgacaagctggttgacgttgtcccttcgccaatcttcaatatttgaaaaacggtcttttccatattgttcatatgtgctcaagtcgggaaattcgactcccgcaattttatacggataaaaatagtcatccatatgaacggcgtcgaccgggtaattcttgacgacttccgctatgccttggacaatgaattcctgggcctcagggatgccgggattgtaatacagctgtctgccgtaggcaacgacccagtcggggtgcgttctggccgggtgatcctgtgacagcctgttcaaatcggtatgattcatcgtgatccgataagggttgaaccatgcatgaaattcaagctttctccggtgggtttcttcgagcaaaaatgccagcggatcgtatccagggtcttttccttgaatccctgttaagtattccgaccacggcccgtatgcggaaggataaaaagcatccgccgccggcttaatttgaacgacgaccgcgttcatccccattgctgtcacatcatccaaaagcttcacatactccgttttttgctcttcgattgtcagtcctttttttgaaggccagtcaatatttgtgacggtggcgatccacactgcccggaattctttagtttcgcagcctgcgctcttttctttcatgaacatctccccttttggaaaaatcagaactttctgttattatatgccggatgttcttttttgtatatgaaaaaacaggccaagacatgtcgctgtctttagcctgtcgtttgaagcgccagtttcacctgctgcatcaaatattggacaaatgcttcatcccttgcgagccatgcagcgtaatttcttttaatgaaccgctctgcctcttcgaatgaagtgaatgtctcatgctgagccacgccgtttaattgaatgttccagccatttgcgctaggaaagagaaaaaactggtcctcgtccctgttgacataaaggctgccgtagtcggacttttttacattatagacgtttttaaaggcatctgctctcaagggctccagcggaaacggttcagttacatacagcttgaacgcttcatctgtcagcgggcaccccgctgccttggcatggccgcctccgccgaacgtgccggcgatttctgatacatctgtttcatcatggatggtgcgaaggctcacttttttgccgcccatatttaagatggcgatatagtctaggtgcggatacgttttcccgagttcgttccccacctctgaatgataggattcggcatgcacgatgccgacgcagtgcgcattaatgaaggtttgaacgatttcccgccgtttcctgcggatataccgttcaattttttcttcttccatatccaagattttttcttcgaattcatcaaatgaaaacgcgtcgctttctttaaggcgccggatcattttttcctcaaattcgtcgatggataccataaaaaacaggtcattcaggcgtttcgcttcgagcgcgcccgtctgttcccattcccatgtatcatagaggcgtacgagttcgacgaactgatccatcgcttttgtctctcgaatgtggccgttgtctattaagtattcataaaaaagagaagtcgctgaagcgagcctgccatcctcatattgaacttttatcatgccccaagggcgttcattcaaatgaagcgcagttttatggtggtcgatcagtttgacctttccccccgcttccgcatattggtccagcctttcctcattttcttgatgaacggacaagtccgtgataaacaggccttcatgctgtttttctttgccttttgtccgctccaaaaaacgcccgacttgcatgtcgagtccggtgaccgaattgtagcggacctcgacccgttcgccaaaagccacttttgcgagaattccgcagccgactccgtccaagtcgttgtgagaatacaaatgatacatgcttcccgcccaccttgctgttttattgtcggcctgccgcagcaggcgcatctttctcatcttactattgtaaagaaacggattttttatacagttgtgaggtaagacaaaaaggacagcttcttgttagaaaaagtctgtccggcaaaagcgtttatgtctcttgcagcaaggatccgccttgcaagtgtgcggtgagcagtctgtacgcattttcggccctgtcggcacttggcggttcaaccccttttaacggataatccaggccaagcgcttcccatttgtagacgccgagcttgtgataaggaagaacctccaccttctgaacgttcgcaagcgtgccgataaacgtgccgagggccgttaaatcggcatcgatatcggagatccccggaaccagtacgtggcggatccagacgggaacttgatgttcagcgagaaaccgggcaaattctaaaatgtggtcattcggcattcctgtcaggttgatatgtttttttctgttgtgatgcttgaggtcaagcaaaacaaggtctgtatactggatcagttctttgatctgctcttgaaatgccggcgcagccgaatagcatccgccggacgaatcgagtgccgtgtgaatgccgaggcttttgcatgctttgaacagctcgattaaaaacggcagttgtaaaagcggctcgcctccgctcacggtgatgcctccgcccgatgattgaataaacgggagataatgctggacatcctgaacgatttcggaaaccgtcatttgttttccggttccgatttcccaagtatcagcattatggcaaaattgacagcgcatcaggcagccttgtgtgaagacgacatacctgatgcctggaccgtcaacggtgccgaatgtttcgatcgaatgaatatttccatccatggagatcacctctttttatgaggcggagcgccttggtcgcgctccgcttattgctcgctacatcgattcatggaaggttctgctgatgacgtctaactgctgttctttcgtcagcttaataaagttgaccgcatagcctgagacgcgaatcgttaactgcggatattcctctggatgttccatggcgtcgagcagtgtctctctgttaaatacgtttacatttaagtgatgtcctgtttttgcggcatatccgtcaaggatgcttgacaaattggcggcgcggctctcttcgtctttgccaagcgctttcgggacgattgaaaaggtgttggaaatgccgtcgagcgcatagctgtaaggcagctttgccactgaagacagcgatgcaagcgtccctttagtatcgcggccgtgcatcggattcgcacctggagcaaacggttctcccgcgcggcgtccatccggcgtatttccggttttctttccgtaaacgacgtttgacgtgatcgtaaaattgacatggtctgaacggactggcgatatgtctgatgcttgcgcagttttttcataaagcgcttgacaatgtcaacggcgatcgcgtcgacgcgctcatcgttatttccgtacttaggaaagtcgccttctgtttcaaaatcgaccgcaatgccgttttcatcgcggaccacgctgactttggcatatttgatagcgcttaatgaatcggcgacaacactcaagccggcgatcccagtggccatcgtccgcaaaatttccgtgtcgtgcagggccatttcaattctttcatagcaatatttatcatgcatgtagtgaatgacattgagcgtgttgatgtacaagcctgcgagccattccatcgtctgatcgaatttatgcatcacttcgtcatagtccagcacgtcggaagcaaccggcggcatttccggaccgacttgcattttatgcttttcgtcttttccgccgttaatcgcatataaaagagctttcgccaagttggcgcgtgctccgaagaactgcatttgtttgccgattgccattgccgatacacagcaggcgattccgtagtcatcaccgtattctggacgcatgatatcgtcattttcgtattggatcgagcttgttttaatcgacattttggcacagtagtttttaaacttttgcggcagtctgacagaccaaagaacggttaaattcggttcaggcgccgggcctaaattgtcaagcgtatgcaggaaacggaacgagtttttcgtcaccagggcgcgtccgtcgtgcgccattccgccgattgattctgtcacccacgtcggatcgccgctgaacagttcattgtagtcaggtgtgcgcgcgaatttgaccaaacgcagcttcatgacgaaatggtcgacaagctcttgggcttcacgctctgttaatacgcccgttttcaaatctctttcgatgtaaatatcaaggaacgtggacacgcggccaaggctcattgctgctccgttttgctctttaatggcagccaaataggcaaaatacagccattgaaatgcttctcttgcattcgccgcaggcttggaaatgtcaaacccatagctttttgcaagcgctttaagttcgttcaatgctcggatttgttctgacagttcttcacgaaggcggatgttttcttcagacatcacccgagaggtgccggccgcatcttttttcttttcatcgatcaagaaatccacgccgtaaagcgccactctccggtaatcaccgatgatgcgcccgcgcccgtaagcatcaggcagtccggtaatgattccgacttttcgggcgagcttcatttcgtccgtatatgcgtcaaacacgccttggttatgagttttgcggtaatcggtaaagatcctttccacttcttcattcagttcaaaaccataggattcgcatgcctgctttgccattcggatgccgccgaaaggctgaagcgaccgtttaaacggctcatcggtttgaacgccgacgactttttccaggtctttgttcaaatatccgggaccgtgcgaggtgatcgttgagacgatctctgtatccatatcaaggacgcctccgttttcacgctctttttttgtcaaatccattacatgatcccataatgccgatgtagcttccgtcggaggttcgagaaacgattcgtcaccttgatatggctcaaagttcgagagaataaaatcgcggacattgacttctttttgccaaacgtttgtggtgaaacctttccattgttccatttaaatccccctctttttcaagttgaaatgatataacagttgttgcatttatatcttatgttgaatataacaggtttgaatgtgataaatatcacatattttgtgaaatagttaacaaatttgagaaagttctttgaacatcgcgtttttttcaatatagactgttgtttgaagcaatttttattatttaaatctgtattataataaagtcaaaggtaacgaaaactgttatataaaaaagccggcaaaatggccggcttgcacagagaaatattgatcatcagcctatcgatacagtctgattgccgaatgattcgatggtgctttgggagctggtggcaaacatagcagtcttttgacgagaccgctattgcatgacgttttttcactgatctgagcgaggaagcatttccgctcggagagctcaagagcctttaaatccgccggcagcaaaacatgaattaaagaaaacccattgcctgctgcaatgggagaagtcatgaagaagctaatatttgaacgattttgtcttcaatatcctttcctttctcatcatccacgagctgattgaggagaatggagaaaatcaatgtctttccgcttgcagtatcgacatagcccgacaaggaactgacggttgaaagagagccagttttcgccctgacttttccttttagagccgggtctttcagccggtttcttaatgtgccgccgaccattctgtcgctttcacctgcaactgggagtgaacgggcaaacgacggaaaccatttctcgtcttgaacggaatacaatagctttgtgatctgatgtgcagaaatcaaattgatatgcgagatgcctgagccgtctctgagaacgattttttccgtgtccagtccaaatctctgcagttccgtatttaacacctctagcccttgatcccagcttccttcacgtctcgcggcccttcccatttccttgatcagcgtttcgccatggccgttgttgctgagcttcataaagggaatcatcagctctgacagcggcatggattgatgtgtggtgatgcggtgcgctgtttttggcgctttgccgattttagtctttcccaggattcgaatgccttgttgatgtaaagcctgtttaaataaatcgagtgcatattctgacggctcccaaaccgcaacccattgtctgacccttgaagcgccttgtggaatcgtccctttgatttggatggtatttcctccgtgtttccttttaatcgtgatatctttttttccgtcggcagcaacagtcttggcatcgtttttgattttgacatggtttgtttgcggggtgagcaatacagcaggtttttttccggtttttccggcagggttcacgtcgattatcaccgttccggcatcatagtcttcatttggcgaaacagttaaagctgaaatctgcgctccatagtatgcgtcttcatcggtccaggaaaggtcttgagaatagcggatttcatcgtaccaggaatcatcgccgaccaagtctccccggataactgtgatcccttgttttcggagtgctttggccatttgttgaaagtccgctgtcaaaagcgtcggatcgccttttccttttatataaaggctgcctttgagtgtgcccgcggctcgcgccccatcagccattacctctgtgggaaaggtatagtcctcgcccaggacggaataggcagctgctgccgttaaaagcttcagattggacgcaggtctcatccgtgtatcgcccatatgtccgtatatcattttcccgctttccgcagacctgacgctgatgcctgcgagcgctccttttaaatcaggttcggtctttaacagctgatcgatttgctctttgagcccgcctttttcctcagcgcccaagccgtccatgctgccggccaaagtcaatacaaagatcatcatcatacacagacaaagcttcatatgtttcttcatcggatatcccgcctcccgcttatgttttaatactttattgcaaaacggggcgggatatactcctattggggtagcgtcaggaaaatgcggatttacaacgttaaggaaaccaaaatataaaaagtctaatttctcggtgttataagtgaaaaattaggctttagttacttcattaaagcgcctgattgttgaagactaaagtttatattcaccaagaaaattgatgtgctcttatcctaacaaattttatttaggacttacatgtatgccttcactctctcgccaatctgcgtaaagtatacgctttacattatcatatccattggtagttaattggttatctaaccactgttgatcaaatccgagttcatgtaaattatcccataaaatttccccatctataattaacgatgttgggaggtctactggactttctggaagattgagatctggtttttgatacttggattttaataataaacttatttgcccattagcttccaatataccgtatttgacttcgcgaactgaaaagacattattttgacggagtatactcaatacttgatttacatccaatttgttctttgtaagtaactttctgtccataacaccatctcgaatgatgatgttaggattgcctaataagagagaacgtgtcgatttattttttagagtcataaactctattcccaacataagaaacgtccacaatccgatggcatataaaaaatgaaaaatccctaccttatcttcataaatgttatttcctaaaaaatctccaagtactaacacaaaaactaagtgaaacggggtttaactgatagatggatgttctgcctgttatgataatgataaaaaataaagttgcaaaacctactatgactttgattgtcagtaaacccaaaaaaacttcacccaaaatttattcctccattttatatttcactcgatttcaaaaatcctcatgttttaaaatatttatattacaacatgtaagctaattaaaatcagaaagataaataataccggttttttcaacttataataatggagaaagcacgcgagcaccctgttcaacaatgcgctcggtcagggatcgttgcaccaagtcttcaattcttaatggtacagaatcagtaagatccctctcgaactgctctgtgagttcccttgccacatcagcactgtacacgacttgacacacctcataattcaggcgaaaacttctcatatcatagtttgctgagcctacggcagcaatctcctcatcgatggtcaacaccttcgcatgtatcattcctttgtcgtactggtagatttgaactccagcttctataagttctccgtaataagtacggcttgcaagacccacgattttttgattattgtggcgaggaaccagcaatcttacacggacaccacgagttactgctgtctttaatgccatgataatatccgtttctggtacaaaatagggtgttgttaaatcaatagtcttggtcgcctgtgttatacatataaagtaagcttgccgaatgactggggtaggaattccagggtttccttccaacgtatggatatacgctttatgcaatgtcctagtttttccggatatgtccatttctttatcatcaagggtgctcaactctgatcccaattcggctgaccatttggaatgatctgctctgccgattgaattgattttcgttacctctgattttgttttcaaatttgtttttgattttatcctttccggcacagcgatttcccaatgaacatcaaaaacagtctgcaagtcgcctgttgcttcccctataatttgcaaatgagtgtccctccaaaatcctacgtctggctttaatcctgtatattcatacccaacgttcataccgccagtaaaggattcctttctgtcaatcgtcacaatcttacaatgatcccgataattccaattggacaaaatccagggaaatcgcagaggaaatattgtcctgcattctatccctgcttcaaccatctgccggattttttcacgcgggaatttataactccccaagctatctctcataaaacgaacctgcactccatttaatgctttttcgattagcagttctgtgattcgattaccaatttggtcgttccgatagatgaaatattccagatcaatggttttttgggctttttgcagggatacaaggagttgatcatattttgctatcccattgttaaacacttggacttggcccattcgaagcccattcacagtgaaatgccgtaaagcattggcaattaccgatgctgaagcaccgaatgtctcaggtaatttgttagattcatttttagaacaggtcaatctttttcgatgaataaacttagggtttgatatgctaagatatagccagaaaccaatgacaggtaaaaaaaggacgattattatccaattcaaagccttggcaggccgacgaacttcccaaattgctatgaataagataaagaacgtatttaacaggtatagataaaaaatccactccaactggaatccctccttctgttactcttaacatgtacaaactatgtaaccagtatacgtatggaatatgaagggattgtctgttatatattatggactacctttataagaacttgtataagatattaagaacgaaaaaaagagaattaaggttgggaaagttctgacatcaagaaaggcgtaatgatctgggcactgtcctaactagagacttagtgattttgaaaattaccagctggtaaattcctaaatataggtataattttttataaatttggaaaatgaaagtggtaaatgcaataagaagtaaataagagaaaacattaatttatattgggaggaaatcgtcttaaaattagtcgttaacatcttttttgttaatggttaatgaatgatcggtatctctaacagcagcataaaaaaaatctttgatttgaagatatccctttgcctttagttcttcctttaaccacttttcatttttgttgattaattttaaattacgcttttgcactttcccttcaatgacaacggctatgggtaatccgcggtattccactttcatatgtaaatcttttggagtaataggaactaattcttttcttggaaaaatgctaatttcacctgttgcttccaaaatcgcatattcaatatcgtgaatatccggatatcctgatgttcttaaattagacaacagctcaggtaaaggatatctactttcctttaaatttcgatagataattttcccgtgtttaattagaatagtcggttttccgataataaaagggtttaacttatttaataaacttaactttgatataaatagatgaatgcatgttattacaatgattccaataatcccctccatcactccgtttactttaatagaaccaaaagctaaataagataaaaaaagaatcgctccaaaatcatgaggggtaagttgggctagagctgatttccctaaaatttttactgctacaataaacacaatatagataaaaataactttaactaaaaaaatagacacttctaacacctcgtaaaaaaattcaccttagtccgaaattggactaaggtttttaaacttttttcaattaaaaatggtatctttttttcgtcatgtatgaatctaagctaaatccttatccttttaaaataggggtcactttatcaatggcttcttgtaatttttcactgtttaacctatacatttgtttggcctcttttgattccgttccaagagcaaacgattccaagtcagcttgacactttttcatggtagaaagtattaaaggcttttcttgaggggacgggacttggagtttatcatcaaaaaggtcaattgttaattgtccgtaagaatctacctgcccaataaaaacattctcaatcgtcaccccttgtttttctagttcggtttttaaccaaccccgacttctaccaattgtagacagaggctcatctaatatttctccatccataatgacggtctgaggttccttaacggaagcaacagtcaagtttacatctttcggtgtcaaaggttggttttctttcttgagcataacgcttagatccccggtgggctctaataccgcaaattccacatcagctaccttaaagacatctttctttcgaagcaattccagtaactcatctgtcgtatatctttccttttttaaattatcttccataatcttcccatctttgataaatacagttgcttttccttctataaaattgcgaaagcctttgctttttaaggaaagcaaacctgctaaaaagggtattgccgcgaagaccacgattccgattatcccgttaaacatgttccgttcaagtcctgtgataacttctgcgccaatacttccaattgtaatacctacaacatattcaaaaaaagaaagttcagaaagttgctttttccctaaccattttgtgattaaaaacaggacaacgacaaataataatgaccgtattaccacctctaaccattcaggcactgcttacacctcctgtaaatatagtttttctagaaacctttgtactgaagttcctctccttctagttctcctactcttttttttaaatcttttgttacttcgtgtactaccatcatagcctcatgcaaagttcgcttcgattcatcatcaagagtccgtaatgctaaacttgagagacttgcttctaccccttttagactggcaaaacactgtttaacatctgatcctactgtcatcctaattctccttatccttttggcttaaaaattaaagctcctatcatgccgaaaacaatggaagctgtaataccagaactagttacttcaaacattcctgtcagtacaccaactaacccatgtttttctgcttcctgcatcgcaccatgaacaagcgaattcccaaaatttgtaatcggaacggtagcccctgccccagcaaaatcaatcaaaggctcgtatagtccaaatccatctaaaagcgccccaatcactacaagagcacttaaggtatgacctggtgtcaatttaaatacatcaaacataatttgcccaatgatacaaattaaaccgcctacgacaaaagcccaaaaatagatcatgttaattgttcacctccgtattcaattgacactgcatgggcgatacaaggaattgtttcattttgctgaaaggacaacggtgaaagcaaagcacctgtagccacaactaacatgcgtttaaattcaccatttttcatgcggtttaataaatgcccataaactaccgttgctgaacagcctgcaccgcttgcccctgcaagaacgggttgtccttcccgataaatcataaggccacaatcttggtattgttcttcactaataggagttccatgctttttaaatagatccatggacacttcctgtccgatttggccaaggtcaccggttacaattaaatcgtaataagatggctcaacatttcgttcctttaaatgggcttcaatggtatcaaccgcagctggcgccatagctcctcccatgttaaatggatctgtcaatcccatatcgattacacgaccaattgtggcagatgtgacatgaggtccttccccagaatcacttaatagggctgcacctgcaccagtaaccgtccattgtgccgtaggtggcttttgtccaccatactcagttggataccgaaattgtttttcaacagctgtatcatgactggaagctcctgttaacaaatatttcgctccttttgtatttacaatataagcacctagagccagtccttccatcgaggtagagcaagcaccgaataagccaaaataaggcgctccaatcgttctgctagcgaaacttgttggggtgatttgattgattaagtccccagctaggataaattgaacttgatccttttgtatgccccctttttccatggctttttggcaagcctcttcaaaaaggattttatgtgctttctcataggaatcctgcccaagccataaatcagcatgaagagtatcgaaatcatctgggatagcaccattggcttcaaatggtccaccaacggttccagtggagataatgacaggcttttgttcgaagatccatgtacgatgacctgctagcattataaaccaccccactggattaaagtggttttaattaaggcaatgacaaaagcagaaaaaacaccaaataaaataaccgcccccgctaatttaaacatgttgccacctacgcccagtacaaatccttcggttcgatgctcaatggcaggcgatataaccgcattgccaaaacctgttacaggtacagctgttccagccccaccaaattgggccattcgatcatatacgccaaaaccagtaagaagcattgtaataaaaattaacgtacccaccgtcggatttccggccgtttgctcagtaaaatcgaaataataaatgtaaaagtctgaaataagctgaccaatcaaacaaataagtccaccggttaaaaaggccttaatacaatttttaacaaccggtcttttgatctctcgttgtttttgcaatttttgatattcctgttgcacaggagtaagttgtttcttttgattgttagacataactcgatccttcctctttaggtttgttccttcataagacttttcagtttgttcaaatcattttttaagttcttcttattcatatcgttttttttcagtctttgctcgaccttttcaagctcccagaatatttttttatcagtcgaaacaaaaactttatagtcgggatattttttttctaagtcggattttactgacttctcgatactctttaatcgaaatcgatcaaaattctcaactttaatcgctgccataagctctttatcagtattcacagcttttacgtctgtaatatcttccttggcaattatcttttctttcgcatgattggcaacggattgatcaattggcttacttgtatgtacttgtgaaataccaaaagtactattaccttgaataaattcattttgattaccattacatcctgatgcgaaaccaatgaccattataataaaaagtaggtttttcaatgtggttattttatctttcaaaaaaatcacctccatgtttttccattatttgctgaaaaaaggttggttaagaggccaaccttttttcgccttactaattactgttgtttgtattgaggttcttcttgttcgatttgttgaacacgtggttcaatgctgtctacaacggattgggtttgcttagctgcatcttggtaaagttgcttagcttgttgattatctgtactaagagcaaatgtttcaaaacttgcttgagcacttttcaatcctgctagagctgttttaacgtcatttattactgtcatgataatttcctccttgaattttttttactcttttattttgctttatggagaattttttattcaatgatttttgggaaatttaaatctaaattatttttgacgtatagctccattttttcgataataaccccttttccatatccccatcatttcttctatttctcgttgacagcaatagctcttataacttttcattaaaggagactttaaataatggtaagcatttgattaaagggattccttgggcaggtaaaggctttattacaaagttggagataagtatcgacggtgggattacttggctaaatgcaatgttagagtcagctaaaaatgctggttatgggtggcgatcttggtcttatgagtggactgtactggacaaaggtgaatataagattatgacaaaagctactgattcttatgatagaactcaaccaaccctacctttctggaatagaaaaggttacggttataatgcaattgatgaaatttaagattgaatagaaagctaaataaagaagagaatgttgtatagaatacctagtccagacctaaatatcggataatgcgactgtcttaaggtgtacagcatgcacccttgattaacttacctttatttaaggcagaaagaaaaacaagccattgtaattatgattaattacagtggctctttattaaagtttacatattgctttttaaacgttttaaaatacgatagtaatcatccaaatcaatccctggagcgaattgctctggaagttctggaaaatcgggtacaggcgcaccttcaggcattccgtcaattacatgcagcctttcacctgtttctgggtttgcacctttccaaatttggttgatatcacgataatccgcttctccccatgtatacaacacattgtacaatccttgatccataaactttttggcataatcaaacttattattatccaaacttggaactggaagcattttacccacatccacacctgtagctacttctagtgcttttgcataggcaataatatgagtcccacctctgacaagcaagtatccggtcatctctaaggcagtcggatgggtcgtcatttcatacacacgcattttgtggtttctagcaccgatttccaataaataattggcgagtagatcttcaacgagcgttccactgttatttacatacgacccattccacggtcttcccatcccgtcacctggaaaagctgtttgagcagtggttgtaaaatgtgtagaataacgggcatcctttccattttgcagtggggcggtatcaggattgccaggaatggtattgccaatcgagagcagattaattgcattcgctactaattcaacatggccaaattcctccgctgtaatacttgcaattaaatcataaaagggctttagcttttttttaccgcggaaattaaaggattgaaacatgtaattgtttaaggtggacatctcaccgaattttccacccattaattcttgtacagctgcagcagcattcatatcgccatgttctggatatggtaactcaatggcaattttattcacgcgtttcatcataagctttacacctccatccgtaaacaataatcattttcatcatatgttggatggagcttggcttattctcacatcgtcggatgaaaccaaattatttgtgctgtacgtacatagaatggtgtcccgcccatcatgatgacgatatgatcaggcatgacctctcgtaatacacctcgtacagagccgtgggtcgtttgaacagcaagggattgattgtgaagtcccattaaagcttgataaacatacggatcactaagtttccatttttcactcattttcaacacactcctttcatgaagcccatagcagtatatgcaaggaagtaaaaatgtgcatttgtccaattggaatgttggttttcggatttattcagacatccattctttcattagaaaaataaacccagattctgaatccaaaataaaaacacctatgaaatagtgtcagggcgtctcaatcttaatccttgtttaacttttaaacacggggtcctaccaacaaaaagcgcaaaacatacgctaggcaaaatttaacatgacgaaactgttgagtgacaataaagttctttccttaccaataaagttgtttactaatcggtttgttttattacaataaagtcgtttgcttttaccataaggttgataaatcaactgtttgaacgcataaaagtaaacaactatttttatgcatttggcgaaaatctaaaaaatggggttgccagcaagatttcttcaggaggctctcttgtgctaaacagccaggccaagtaccttatttcacgataacggttgatcaattccagcacttctccgactttgttttccttcatcaatctctcgctgaacaaaatggcagagatttgtcccaagtttaagcgttgttgtgatgtactgtacaaatcatttgccgcctccgtaaacgaggaaccttcgcctttgcccacccaaaccgggggctgctccgctttttgctgtccctccagcttggccactgtcgagaaatcaagcaattgcaaatacatggtgtattggccatcgacatagtctattccaacagccgtagcatagttcatgttttgcacttcatatctgctccagcaaccggtaagggtgagaagaaggaaaagtgcaaccatacttttatatctcctcatttatgcctgtccccttgccttgtagaatctcgtgtcttcaacatgtccggtcgagtgtttcgccatggccaaggtaatcgaaacaaagcgttggccaagtctttaaatggaggtgatattggggccaagtaaggcaagccgcatgaacgcaatgaggctaaatggctgagcacaataaataatccaagaaagaagccataaatgccaagcgtggcagacagaatgaaaagaaaaaagcgtaaggtactaatcgttccagccaatgataggctcgataaagttgaaccaaagatttgtgtaattgctccgatgacaacgatacctggggataagaatccagcacgaatggccgcatcccccaggataagtcctcctacaaccgttaccgtggagccgaccgcagaaggcaatcggataccagcttcccgcaggatttctaagaagagaagtgcaataaacatttcaactgccacatcaaaagggattcccaaccggttaatccccaaagtggcaagtagataatagggcagctgatcttgatgataggaaagaatggcaacaaaaaatgcaggaagcagtagcgatacggacaagccaagtaaacgaagcgtttgaccaaatgtagctgccaaagcagtaaagtggatatcttcgggtgctttcacaagcaaaaataaattggcaggcgcaatcaacgcagccggtgtaccatccacaatcaacgctacacgcccattgagcatacagttcacggtaaagtctgctctgcctgtataccccatcaaaggaaacaatgcttttgtcggttccattaattcttctagctgagtggcgctaaagcgctaaacgctccgtcaatgtgaagatcatctaatttattctttacatcttgaacaatcttaggatcaacaatgtcacgcatgtaaagaattgcaacggttgttttcgtgcgaacgcctacttttttcgtttcataaaccatgctggttgatttgattcgtttccgaattaacgccacattgactcccacttcttccacaaatccatcctttggcccccgtaccgaaagcattcgcatcatctgtacgttctttcaagctgcgcgtaatatctgctgttctactcattttaatttgcaggccttcataatggttttccaagagatttcggatgctatgggaaatatttaaggtaatttctttttcctgcatcccattgccaatagatcctgggtccattctcccgtgaccaggatctaaatataatttaaacattttacaccacctcgtacaaataaaatatgatcgaagagtaacggaggtataggaattcgtctgagatacatataaaaataggtgatgataggcattacatttcattgaatcagatgatttattttaaagctaagaaattttccaaatgcgagaccatatgtatgagcagcaattaatgttccatatttttcgtgggtcaggcaaactcttgttcatctagacagtaggctgattgattattgatgcttctttcttaacaaaacacctaagtgattctctgtgcatatactgtatcattactacaggattatgattaaatacaactcaatccatacataaaataatcaaggagaggttaattttgaaaattccaaagacagccaaagttagtatcccctttccatccgtatgggggattgatgcttctattgcggggagatccattattagaggtatacttaccattgattccattgtagacaacaaagtagtaggtacagttaattttcgtggtatacctattccgattaatgggtattgggacgaaagcgctaaacaaataagtttcgattcaccatatgcctccttttttggcaacttgacaataattgatgagaccgctataagcattcggcatttcattttaagtggacggtttataatgaaacctccctctttgctggctggtgaatacggaaattggattgctacaacctttacaacccgtttgggacctcccatatatactaatgttttaccacctgttggtgccttttcagtctcaagtatgctcttgggacagcaattgttttaattagaccatgactttataaaaacaaccttcctttgtgactaaggttgttttttaaaagtgttctcgaaaaatacagccttgctttaaatctaagtttagcgtatatctccgttaaaatgtactcggaaccctttgatgatcgtgcctagttagataaacaaatattgatacttccttatagaaatagcctgcttggttaggtacgttgtttcacaatccccggaaatttttaatataagtaatgaatgcttatttttttccttccgatagctttctatataaagaagctctagatacatttgtaatttcacaaatttgatttacagtcatatttccttctttatatagctttactgcataattcattcctgcgtgatttttatgatatttctttaaccgtcctttaaacttcccttctttctttgcgagctcaattccttcacgctgacgcatacgaataaggtctcgctctaattggttaacaccagccattaccgtaattaagaattggctatatggattatcttctgataaatctagccatgtatccttaagtgattttaagcttgcctttttatttcgtattaaatcaatcaattcaaataaatcttgcgtacttcgagtgatccgagttaaaactgtaacataaataatgtcaccttcctgtaaatcctctaacattttttgaagttgttcacgatcttttgtggctcctgaaattttttcttcataaataatatccattccaatttcgttcaattgccgaaattgccttgaaggattttggctagtcgaactgacgcgtacataaccgattttctgcaaaatttcacctcgtttttgagacaagtcttatgagacactcttaactatgatttatatcagtctactatacttgtatcaatagagtacactctattgatatataattgaactaattaactgaataattatggaaatgggatgatactgaatgaaaattgcgagaggtagagaattgcttacactggaacagaggcaggattttatgcaaatccctgaagatgaatggatattggggacctacttcactttttccaaacgggatttagaaatagttaataagcgaaggagagaagaaaaccgtttagggtttgctgttcaattagctgttcttcggtatcccggttggccatacactcatatcaaaagcatcccggaatcagtcatacattatatatcgaaacaaatcggtgccactccatcttcgattagtctttatcctcaaagagaaaatacactttgggatcatttgaaagaacttcgaagtgaatacgactttgtaacttttactctaagagaatatcgaatagcatttaagcatcttcatcaattagcttttgaaaatggcgatgccatacatctactacatgaatgtatagattttctaaaaaaaaacaaaatcatactgcctgctattactacacttgaaagaatggtgtgggaggcaagggcaatggctgaaaagaaactgtttaatactgttagtcaatctcttacaaatgaacaaaaaggaaagcttgaagagatcattacttcgcagcatccatccgaatccaataaaacgatattgggttggttaaaggaaccgccgggtcatccttcacccgaaacatttctaaaagtaatagaacgattcgaatacatacgaggaatggaattagaaacggtacaaattagtcatttgcatcgcaatcgcctgtttcaactatctcgcttaggctcaagatatgagccatatgcattccgtgactttcaagaaaataagcgatattcgatattaaccgtctatttattacatcttactcaagagttaacggataaagcttttgaaattcatgatagacaaatacttagtctgttatcaaaaggccgtaaagctcaagaggaaattcagaaacaaaacggtaaaaagctgaatgagaaagttatacactttacgaacatcggacaagctttaatcaaagcaaaaaaggaaaaattagacgtttttgaggttttagaatccgttatcgaatggaattcttttgtctcttcggtcgaagaagctcaggagcttgcacgccctgacgactatgattatttagacttactgcaaaaacgattttattcacttagaaaatatacgccaacgctattaagggtattggaatttcattctacaaaagcaaatgagccacttttacaagctgttgagattatccgtggaatgaacgaatccggaaagcgaaaagtgcctgataactcacctgtggattttatttcaaaacgttggaaaaagcatttatacgaggatgatggtacaacaatcaatcgtcattactatgaaatggctgttttaacagaacttcgggagcatgttagggcaggagatgtttccattgttggcagcagacaatatagagactttgaagaatatttgttttcagaagatacatggaatcaaacgaaggagaatacaagattatcagttagtttatcattcgaggattatatgacggagagaaccagcagccttaacaaaaggtaaagtggttagctaccaattccaacaagttagacggggtttctcttgaaaaaggaaagctgtcaattgaacgcttagaaaaagatgttccagaagaagcaatagcgcaagcctgtatcagatgctaccaagaataaaattaaccgatttactgatggatattgcttatataacaggatttcatgagcaatttattcatgcttccaataatcgaaaaccggataaagaagaaacaattattattatggctgctcttttaggaatgggaatgaatattggtttaagcaaaatggctgaagcaacacccggacttacatataagcaattggccaatgtatcacaatggcgcatgtatgaagatgcaatgaataaagcccaagccgtattagtaaattttcatcacaaattgcaattgtcctcctattggggagacggtacaacatcctcgtccgatggtatgagaatgcagataggcgtttcatagctacatgcagatgcaaacccacattatggaactggaaaaggagccaccatctatcgttttacaagtgatcaattttcttcttattacacaaagattattcatactaattcaagggatgcgattcacgttttggatggtttgttacaccatgagacggatctaaatatagtagagcattatacagacacggctggttacacagaccaaatattcggactgacccatttattaggatttaaatttgctccaagaatacgagatttatcagactcgaaattatttacaatagataaggcaagtgagtatccaaaattagaagtcattttacgtggacaaataaatacaaaggtcattaaagagaattatgaggatgttttgcgattagctcattctataagggaaggaacagtttcagcatcccttattatggggaaattaggttcttattcaagacaaaacagcttggctacagccttacgtgagatgggccgaatagaaaaaacgatctttattttgaattatatttcggatgaatcattaagaagaaaaatacaaaaaggattgaataaaggagaagccatgaatggactgggcaagagctattttcttcggaaaaacaaggagagcttagggaacgaaccatacagcatcaattgcaaagagccagtgccttaaacatcattatcaatgccatcagtatctggaatactttacatctaacaaaggcagttgaatatcaaaaacggtcaggtagttttaatgaagaattattgcaccatatgtcacctctaggttgggaacatattaatttacttggagaataccattttaattcagagaaaatggtctcgttagattctttaagacccttgaaactttcttaacgttgttaaaactgggggaatagtcggggaaatgggcttagcgttgtaaatccgcattttcctgactgtaccccctattggtcggttttcaccaaaaacctccggtataaaaacagcagtatcataatgtgcagcgcaattccggtgatcccgaaaacgagaaaaagcccttcgtgggatattcccgccaagtacgttttcgctgtccaataaggtgaaaacaccgaaaagctgccacggcacaggaataaaataaaccgcggccggcatgagagtgagcaggctgaatcctttcattaaagcgagtccttctactttgtttgcgacataggcggctaaaagcagcgtgtaaatcggggcttcaagcgtgaccatgatcaggacgaacaataggttcacagcgccaggcgccattagaccgccggaggcaaacagcaaaatgctgtagcataatgtcatcgccatcggcaggatgagccggatcatgacatatccgcgcttcgacaagggcgtcacggcaaaatactgaatcatattttcttcgcgctcatcaagcaggataaaccccgacatgacaccgagaatcagggggatgaaaagcatggcaaggctcatgatcaaatgacggtatggggtgatattgaatttcgtcaattccgctgacaaaggaacgcctgctgcagttacgatgatgagcagaaaaggcgccagtccgtaaaaagcgagctgcgattccgttcttgtcagtatattttggttcaaatttaccacaatattttcatttgcccgtcaaatttaaagcaaaaaaaagcaccacttatagtttaaactataagtagcgcttcatttccattaataagccaggctgaacagaccttttatgtggctcaggtagcggacgttgctcgcttctttcatcaatgaagcaggcaggcctttaagagatgtgctgttcgcgccgataacggcaactgcgtctttgcggcccaggcttgcaagcgtacctgagttgacagggctgaacgtcgccattgatttgttttctaagtatgcatacaggttgtagccgatcagctcgcccatttgccatgcgatttgagctgtcggagggtacggacggccatccggaccgaagacaacggcgctgtcccctgcaacaaacacgtcttcatgtgatgtagattgaaggaagtcgtttacagttgcgcgtccgcggttgacttcaagacctgattcgccgatcagcggattgccttgaacaccgccggtccagacaaatgtatttgtaacaattttttgcccgtctttcaaatcaacaacgtttccttctacatttgtgacaggcagtcctgtcaagaattcaacgccgcgtttttcaaggctctttgtcgcacgttcgatcagctcatccggaagaaccggcaggattttcggaccggcttcaacaagcttcagcttgatttctgtcggatcgacaccgtagcttctcgcaaggctcggcatgatatcggcgagttcaccgacaagctcgacgcctgttagtccgccgccgccgattaagatcgtagcatcagcttcgtttttcgttttcgcgtattcgcgcacgcgctcttcaacatgcttgaagatcttgtttgcatcgtttgcagatttgagcaccatgctgttttcttcaagtcccggaatgccgaagtaagcagtgacagaaccaagaccgacgacaagcgcgtcatatgtcagggtagagccgtcagaaagagcgacttcttttttgtcaactgagaaagagttgactttggcgattttaagatcgatgtcttttcctttgaaaagctttgcaagcggcatcgcaactgcctgttctgacacgttgcccgcagcaaggcggtgcaattccgtgatgatttgatgtgtcggatattggttaaccactgtgacttttgcttcttcttttgtgtagtgtttgcgaactgttagagcagacagtaatccgccgtaaccagcgcctaaaatgacgatatgttttgacatcgtgaatcctccgtccttattctgaatgtatagtgattatttttgtttttcgcgttctgacatgatttgcaggtagctttgaacaaagcggaacagcttttgggcctgcggatctttaagcattttcagcaaaccgaaaagtccgatgacttcattgctttcgtcagcgcggtcttttgcttcaatggcggtagccgcgatttcttttgccgtatctttgacaggctcaagaatttctgtaatggcaccgaccgtatcattttttaatacttcatcagttgcaacggattgtgcgaagtcgtaagactttgtcaaaatgttgaccagttctgtcagctttggaagctggtcgactaaaacagtcaaagactcctgtacttcaggttttagcagttgatcgataagatcgcgttggctttggcttacagattcgtttgtttgatcagctgtttgatcgattgtttccggcataaccaattctccttttcaataagcgatgtgctgttttttgaaggaagcccctttttatagtttgtgaatttatgcacaaacaagtccgcaaaaaggctctccccttttgtgtttgttttgctgttttcggtctggaactcccgaaaacccgcaatctcaaaacacgctgtattttttactactaaatgataacactttttgaacaaaaaatgaacgtgattgtttcggaaatgaaataaaatcatagaaaactttatatatagggcttctttcatccctttcatttcctatattgtgtctttttttacgaaacgtcccattcacacgtcatgatagagtcgtgcgaacatttcctagaaacgcatctagtttacataatggaattatcgttatcttggttaatcttcatctttaacatccggatcttcggggatgggttcgttcagaaaggattccgcccactctttatacttttccatctgttccatatgggtattgaattgctctttgttgattaaatgctgctgtccgtcgaagacggtgcggattttcttttctctcacaagctgttcaacatatgcttctgaaagcgttaaatattctgcggtttcctttatcgtcaagtacatgttttgtttcctctcgttttgatttaggcgaacattgcgattgtaggatcatacgataaggtatatcagtttagatgatggaggcctattctatgtattcaaaatggaattctgaaacgtcttatccgccttcagccccgcaaatgcataccggtcaatcttcgcagcagatgaaccaaaggctgaaaaatctcgaagatcaaatggaattgctgatcaagctcatggaaagcaacaatcagctgctgcgttcgattgaagagcagcagaatcgcgtctgcacggccggcggcggttcggttatcgtcaggatgtgagtgttggtcgatcgagcttcatcaaaataaaaagaggaaggacgtgtccttcttctttgtttgtaagccttatccagtatactacagattttttcgcactgaaagaccggcaatttcatcatatgtttcgcggttttccaaagttgacaaatcgcctgcgggctcgttcatataggcagctctgatcagccgtctcatcacttttgcatttctcgtcttcggcaaaccgctgacaaaataaaccgctttgggcttgaccgctttaccgatcgcatcagatgcaaggttcagcaaatcatcttttaattcttccgacggcttttccgactgtctgaggacgacgaagcagacggcagcctggcctttgagcttatccggaacgccgatgacgcctgcttctgccaccgctggatggccgaccagaacggactctatttcggcggggccgatccttttcccggcagcattgatcacatcatcagagcgtccgctgatcgtccagtagccgttttcatcccgttttgcccaatcgccgtgcacccatacgtcggtccagcggctccaatatgcttcttcgtatcttgacggctccttccaaaaaccgttcgtcatgccgacccagggctttgtcaggacaagctctccgacttcattgacgacttcctctcctttttcattgaagacattggccgccatgccgggaagaggcgaattaaacgtcatcggcgtgatcggccgcaggagcacattgcctaaaattccgcctgagatctctgttcctcctgaataattaaatataggaatccgttcttttccaacatggaggaacagccacatccacggctcataattccatggttcgcccgttgagccgattgccttcagactgttcagattgtattgatagagaaaatcttcgccgtgctgcatcagcgagcgaatgagcgtcggagagacgccgagatgcgtcacccggtgtctgctgacaagctcccacagccgatccggggccgggtagtccggtgctccgtcaaacagcaaaacagccgctccgtttatgaggcccccgaatattaaaaacggccccatcatccagcccatgtctgtaaaccagaaaaatgtgtccccttgtttgacatccatcccgaatcccgcatcaaatgcagctttcagcggaaaaccggcatgggtatgaaccgctcccttcggctgtcctgtcgtccctgatgtgtatagcagcatgagcggatctgaactgtccatttcttcggtgttttgcatgggctcgtttttcatcaattcattccagtcgatatccctcttataattccaaccttgatcgccgccgtgaagcttgcagacgacgactttttgaacagtgggggaacggtccgcggctttgtcagcttctttcttcatgcagaccttctttccccttcgcaaaaaggcatctgctgtgacaaggattttcgctccggcagcggtaagtctcgccgctgctgcatgggcgccgtagcctgaaaaaaccggtgagaataccgctccgattttagcggcggccagcatggcgatgaccgtttcggggatcatcggcatgtaaatcgcaatgacatccccttttgagatgccttgctttttaaagcctgccgccgcacgggcgacttgttggtgtaaagaagaataggtgatctgttctgtttttccgtcttcactttcccagatgagtgccgtcctgccggccgtatcaggccggcgggcccatttttccacggcgttgtaaacggcatttaagcggccgccggtaaaccattgcggccattttatgcctttgtcgagattcaatgtttggctgtaccgcttgtaccagctgatcccgagcgctttttcggcctcttcccagaaccaggcgatatcgtttgtacttgctttcaaaaaatcatcatagtcggaaaaaccgagggctgtcatccattgaaacagccgggttgtttttacaaattccggatcaggctgccaaaccgctttttcggccatgccgtttcctccttttcgtttcattggcctttagacgggataaacaggatgcttccgatccgtaaatgtcatgtatttggtcatatatgcattcagccgtttgatgagttccgttcgcagcgagtcggccggaatgatcccgtcgacaatcatttctgaagcaagccggtaaatgtctatgtctttttggtactctttccgtttttcggcgatgaatgcggaccgttcttcttcaggcaattctgcgatttttttagcgtaaacggcatttaccgctgcttccgggcccatgacggcaatttgcgccgtcggcagcgccagaaagcagtcaggttcaaaggccggaccggccatcgcatacaagcctgcaccataagctttcctgacgatgacggatattttcggtacggttgcttcggccatcgctgaaatcattttcgcaccgtgtctgatgatacccgccctctcgactttcgttccgatcataaaaccggggatgtcagccagaaacagcagcgggatatgataggcatcacacaaattgataaactttgcggccttgtctgccgaatcgtggaacaaaacaccgcctttgacccgcggctgattggcaatgatgccgacaggctgcccgtgaatccttgccaaaccggtaatcagctctggcgcgaacaattttttgatctcataaaaagacgcttcatcaatgatccgatcgattaaatccatcatctgaaacggagcgttttggtttttcggaatgatgtcctccaatgaccggtcaaacggacgggcggattttgcttcaatgacaggcgctttttcggtgtagttcgacggaaagtaggaaagataccggcgcgccgacttgatcgcatcttcttccgtgtcggcaagaatgtctccgcagcctgaaacagaacagtgcattctcgcgccgcccatttcttcaagcgatactttttcgccgatcaccatttccgccatgcgcggcgagcctaaatacatcgaggcgttaccttcgaccatgatgacgatgtcgcaaaaagccggtatgtaggcgcctcctgccgctgaaggcccgaacaagagacagatttgcgggatgcgcccggataatttgacttgctgataaaaaatccgccccgctcctcttcgccccggaaacatgtcaacttgatccgtaatccttgcgcctgccgaatcgaccaaataaagaagcgggcaattcagtttttcggctgtttcctggatgcggatgattttttcaacggttctcgctccccatgatcctgctttgacagttgaatcattggccatgacgcaaacggttcgcccgccgatttttccgattccagtgacgactccatctgccggtagcccgtcagccatgcaattggcaaaaaacgcgtcctctaggtcgagtccttcgtcaagcagcagctttaatcggtctctgacaaataatttcccttttttcttattagcttcatggtatttctccgcgccgccctcctgaatccggcggatgcgttcatacaattccttttcggccggcatcggctgtccctccgttcgttttattctcccgtataatccggcttccgcttttctgcaaaagctttcagcccttctgtcctgtctttcgtcggaatcgtcagttcataggctttttgttcaatggcaagccctgtttcgatagctgtctcaaggccttgattgatggcaaacttcgcttgtctgacggctaccggtccgttcgccgcgatgttcgccgcgatgctttcactcgcttcctttaacttcgaaagcggaacgacatgttcaaccaggctgatcttttgcgcttcttcggcgctgatgcggcagccggtaaagatcatttctttcgcctttcccctgccgatcaagcggggcagccgctgtgtccctcctgcccctggaatgattgcgagcgttgtttcggggaggccgagttcaatatgttcggctgcgatcctgatgtcgcacgccaatgcaagctccagcccccctcctaaagcgcttccgtttaatgaagcgatgacgggctgcggcagtttttccgtttcgctgaccacgcgttgaatcagggaaacagcctgcttcgcttctgtttggctcatgcgggctctttcctttaaatcggcgcctgcacaaaacgtcctgtccccttttcccgttatgatgacacagcggacggccgggtttgaacgaatatctcgaaggatgcgctgaaagtcgtcgagaagcccaagcgagagggcatttgcagcctgcggcctgttcagcgtcaacacggcgaccgactgctcgtttatggaataaagaacattgggctccattcggtcttcctcctcttcatcaatgaaaacagttctttgatttagccgcctgcaaatttcggcttggcagctctcttccggttttgtcttcgatccatttagcagctgaaagcagcttgctgagatcaactccggtttcgatgcccatctgggcgcacatgtagatcaaatcatcagttgccaaattccccgtggctcccgctgcgtaaggacagccgcccagcccgccgcatgatgagtcaaatacggtgattcccatgtccatcgctgcgatcatgttggcgagcgccatccctctcgtatcatgaaaatgaagggcgatattctcttttggaaagcgctttaagaggacttcaagcaccctttgaacctgtacgggatttgctgcgccgatcgtatctccgagggaaagttcgttgatccccatgtcgaacagcgtttcagatgtccgtataatttgttccaatggcacgtgatgttcataaggacagccaaatactgtggacaggtatgctctggcggtgaggctcgcttgttttgccgctccgatgacttccttcaggacgggaagcgtttccccgatcgatttgttaatatttttccggttgtgtgtctcgcttgctgacatgaaaacagaagcttcatcgatccctccttcgagagcccgttccagcccttttcggttcggaatcagggctgcgtaggtgacgcccggcttccggttgatccctttggcgacatcaagggcatcagacagtgcaggaatccacttaggatggacgaatgaagtgatttcgatatacgaaagccctgtggcagaaagcatgtcgatccaggtaattttatcagctgtcgaaagtgcggtttgttcattttgcagaccgtcgcgcggcccgacttctttaatgaaaatgttcttcggtacgtccatttgccatcctccagaccttattgaagctccaataagacatccccttcatcggcaaaatcaccttcgttctttctgacggttttgactgttccggccgtttcggcgacaatcggaatctccatcttcatcgattctaaaatggcgacttcctgccccttttcgattttgtcccccgctttcactaatattttccacacgtttcctgccatattggtgacaacagtattcatagtacgcctccttgatttcattttgactgatagcgactgataaaatcggtttggaccccgccttttcggaattcgtcagaacttacaatgtcttcaaggagcggaatgttcgttttaatgcctttcacttgatattgtgaaagcgcttcggccaatgtgcagatggcttcttctctgctgcttcctttgacgatcatcttggcaatcatcgggtcgtaatacggggtgatagtcatacccggggctgctgcgcattcatgacggacattcggttgctcaggcagcttaaggtcggtaatccgccccggcgaagggaaaaatgttttcggatcttcggcacagattctgacttcgatcgcatgtccgtcccgccgaatgtctttctgcttatgggaaagcggttttcccgctgcgatattgagctgttcttcgacaaggtcaagccctgtaatttcctctgtcaccgggtgttcgacttgcaggcgggtattcatctcaagaaaataaaaatgattctccttgtctactaaaaactcgattgtcccggcgttggcatagccgatcgacagcgcggctttcacggccgcttcaccgagcttcgcgcgcatgttttcatcgaataacggagcaggtgcttcttcgatgattttttgctggcgtctctgaatcgaacagtcccgttcccaaagatagacggcatttccgtattcgtctgttaaaatctgaatctcgatatgtcttgcatcttcgatatatttctcgatgtacatagccccgtctccgaaaaaatcggcggctcgtttttggctgccttcatatgctttttctaattcgccttcattgcgaatcagctgcattccgatgcctccgcctccaaaagaagccttgagcatcacgggatagccgatggattcggcaagagccttggcttcattcagaccggccaagctttttgtcacgccgggaacgacgggaatcccggcttgttccatcgcttgtcttgcttcaattttgcttcccattttggcgataacgtcaggcggcggaccgataaacgtaatattctccttgaggcacctttcggcaaaacggctgttctcggaaagcaggccgtatcccggatgaatggcacagactcccgcttttttagcggtttcgatgattttttcaatatttaaatagctttcactgacccgcggtttgccgatcagccaggcttcatccgcagctttgacatgcagggactccgcatccgcttcagagtagacagcagccgtctgaataccgagccgttgacaagttcggatgatccggagggcgatttctccccggttggcaatcagtactttcttaaacaaaaaggtccctccttttatgttagtcgcgcttgaaagagaaaattacaattgaaaatgctcaagcgcctgctcccttaacttgaatttttgcactttccctgatgccgtcatcgggaactcttctacaaatgcgatatagcgcggaatcttatagcgggcgattttgcctttgcagtattcttttaattcgtcagccgtcatcgatgctccacttttcagtttgatccaggccgatacctcttcgccgaatgtttcgtcaggcactccgacaatttggacgtcgagaatgtcgggatgcttgtataaaaactcttctatttcccgcggatatatgttttcaccgcctctgatgatcatgtcttttaatctcccggtaatccggcagtagccttcttcatccattacggctaaatctcccgtatgcaaaaatccatcctcatcgatgaccgctgccgtggcctcaggatttttgtagtagcctttcataacatggtagccgcgtgtgcacagctcgccttgaacgcctctttcaacctcccggttcgtacccggttcagttattttgacttctacattcggcaaagcgcgccctacggtttcgacccttcttttgagcgaatcgttgaccctagtctgggtaatgaccggtgaggcttccgtctgtccgtatgcaatcgttatttcagacatccccatgttatcgatcacttttttcatgacttcgatcggacagtttgaaccggccatgatgcccgttcttaaagaagacaggtcatatgatgcgaaatctggatcattcagttcggcgatgaacatggtcggtacaccgtgaagcgccgtgcatttttccgtttcgacggctgaaagcacttctttcggactgaattcttgtaccggcaccatcgtcgcgccggcggtgacgcaagcgagagtacccagtacacagccgaagcagtggaaaaacggaacggggatgcacattctgtcttttttcgataaattcatgcattccgcaatatttgccgcattgtttgccaaattggaatgggtgagcatcacgcctttcggaaagcctgtcgtacctgatgtatattgcatattaatgacatcatgctctttgagccgttccatcctgcgatcaagcgctttttcgcttactgaccctgagagctttaataaatcatcccataggtacatgccgggatgcctttgatcccccagcaaaataatattttttaagaaaggcagtctttcagatgcaagcctgcccggttcgccctcctttaattcaggaatcagtttgcaaaggatatcaatgtaggaagtgccccggtatgattccattaaaatgagtgttgtggcatctgactgtttcagcacatattcaagctctgataattgatagttcgtgttggctgtgactagtacagcacccgcttttgccgaagcaaactgggcggtgagccattccggagtattggaagcccaaattgcgacatgttcacctttatcaataccgagcgccatcagtccttttgcgacttttctgcacaactggtcaaattcccggtacgtataacgcaggccgcggtccggatagacgacagcctcgtgatcaggggcgtctgccgcggttttctccaataactttccaattgtcaaatggagcagctctgccaaggttgtccctcccttccgatagaaagcgttttcatttcagcgcttgtttgccgatgccgagctgccttgcaatgacgagccgttgaatttctgaagtgccttcaccgatttccattaattttgcgtcccgcagcatgcgctccactccatactctttcatatacccgtatcctccgtgtatttgaatggactgattgcatgtcctgaacgccatttctgaggcataaagcttggcaaaagccgcttcttttgtaaacggacgtccttgatctttcagccaggcggccttcagcaccatattgcgggcgagctcaatttccatggccatgtcggcaagcttgaactgaatcgcctggaaataagagatcggtcggccgaattgttttcgttcgcgcgcgtatgtgagcgccgcctcaaatgcgccttgggcaataccgacagccagcgctgcgatcgaaattctgccgccgtcaagtgtattgagaaattgtttaaaccctttttccgggcttcccaatagattttgttttggtacgcggacattgtccaatatgagctgtgatgtattggagccgcggacacccattttgtcatattcgcttttaatggtgaagccctccgaatctgtcggaacgatgatggcggaaatgatgttttttccgttgtcatctattccggtgacggcggtgacgatgacggtcctggcaaatcctgcatttgtgatccagcatttctcaccgctgatcacatagctgtccccttccgagcgggcttttgtccgggtgccgcccgcatcggaacctgcattcggttcggtcagcccaaatgctccgagcgcccggcccgtcgcaagcgggacgagatattcttgtttttgttcttcagtgccgaaataataaatcggtgcagccccgagcgatacagccgcagcatagctaagaccggtgcttccgcacgctttgccgatttcttcgacgctaagtgcataggaaatcgtatctccgcctgaaccgccgtagctttcaggaaacggaatccccaagaggccgagctcccccatttttttaaatgtctcaatcggaaattctcccgtcctgtcaacatgttcggcgtgcggtgcaatttcctgtttcgcaaaatctcttgcgagttcacgaatcatttgctgttctctggttagttcaaaattcataaagtgcccccctttttggatcgtcaaattccttaggcagcagagctttgtaacattatattaaaaaagtgcatttttcatgccagaggattttggacaggtaaattgcatgtttgatcgccaacaggtacttacctttatgtaagtacctgaactaaaagtgcatacttacaaattggcagtgtgaactttatactcaagatgaaaacatgctgaaggagggcaaatctttgaaaacgctagttatcgttgcacacccaaatttagaaacatcagtggttcataagcgctgggtagaggaactcaaaaaatatccggaaaagtatacggttcacgaattgtccgacgtttacccggatggaaacatagacgcggaaaaagaacaaaaattggtggaatcgcacggcaatcttgttttgcaattccctatctattggtttaactgtccgcctcttcttaaaaaatggcttgatgatgtattagcttacggctgggcttatggttcaaatggaggagatcgattaaacaatcgtaaagtggcattaggtgtatccgccggaattaaagaggaagattatcgtgaaaacggaaggtaccggtatacgcttgaacaaatattagttccatttgaaacgacattccggtattgccgcgcagattatcgttcattttttgcattttacggcaaggaaaaagagcctggcggaaacgaggaagaagaaaatgagccgggagcaggagaattggagaaaagcgcacgagattatttgcattttattgatcatatgtagcaaggggttttgctgaaaatcattcgggctgaaacaggctgtcagcccagcctgtttttctccccccactcacacatcatatttaacaaaggcacgatggagcgtccgcgttcagataatgaatactcaacctttggggggatttggggaaattctctgcgaatgataaggccgtctgcttccagctcttttaacatgatgcttagcgttttgaaggaaatggtgccgatgcttcgcttcaattcattatgccgcatcacttcgcgttcagacagccaatatagaatgactattttatatttgccgcttatcaatgacaacgtatagccaaagccggtgtctttagttccacaccggtcggaacgcaggtttttccggatgggatttgcataacgcacactctccttctgactcttatatcatagatcattatgtaatgtgattgaaaggatgtaaagggaggagtttgaaaggtgcctggtaaaaaaattctgcgcctgcatgttttatgaggatgtaaattcagccgaaaaaaactgcacctccggattgtcagatggtgtctgacaaaccaggtgcagtttcagtacaggtctctttatttatcttctgatatggccgtcgcctctcatgatatatttgcatgtggtcaattctttcagacccataggtccgcgggcgtgaagcttctgtgtagaaatcccgatttcagcgccgaatccgagtgcgccgccgtcggtgaacctggttgaggcattgtggtacaatgctgcagcatcaacggtattcagaaaagctttggctgtttccggattttcggtgataatcgcttctgaatgctttgttccgtatgtttcgatatgatcgcaggcttcttcaagacttcctgcgactttaaccgcgagatcaaggcttaaatattcgttctgccaatcggcttcccctgctggtcttgcgcctggaatcatttgaacagccttttcgtccccgtgaacttgaatcccgtgttcgtttaaagcattgataagcgcggcgctgttttcctcaagccatttttcgtggacgatcagcgtttcaagtgcattgcagacggcggggcggtctgttttcgcattgatcatgacatcgatcgctttttcagggtccgcttcccggtcaatatagatgtggcagttgccgactcccgtttcaaggaccggaacggttgcgttctcgacgacttcctgaatgagggccccgcctccccgggggatgagtacatcgatatgttctttcatcttaaagagctgcttcgttgcgcttcggtctgtgctttcgatgaattgaacggcatcgcgggggatgtttgtcgaatcaagcgcttgatgcatgaccgatacgatcgctgtattcgaatgaatggcggaagagccgcctttcaaaacgatcgcattgcctgattttagagcaagcccggtcgcatcgacagttacgttcggacgcgcttcatagatcatgccgatgacgccgagaggaacgctgactttttccgcttttaacccgttgtcgagcgtccagcttgatagcgtttctccgaccggatcatcaagttccgcgacttccagcagcccatcggcaaaatccagaaccctgtcttcattgagcgacaggcggtcgatgtaggctgcatcatagcctttttttcgtcccgcttcgatatctttggcattttcagtgagaatatagctcatgttttgtttcaggtggtcggccaatgcagcaagcgcctcgttcttttctttttcagttgccagccgcaaagattttgcggccgtttttgcctttatcgctttttcttcgatttgtgcactgatgctctcgctcgtcgcagtcatgtcaattcctcctttgatttgttttttaaagcggaacggatagctctaaatgacagacaaacgcttctctgtcaacgacagcctgtgaggaagcggctgtttcctgattcgtatccttcttccatttacgaagctgggatgaggaaaagttgacgacgccgaggccgatttcctctccttcctgatcaaggattcgaacgacggatccgttgctgaaacggccgttgatgtcgtaaatactagaaggatacaggctttttttacggtcgataataaactctttgctttcgttgtggacgacgatgtctccttcaggtccagagttaaatgctatccattgctttttatggttgagggcgtgtgaatccgcattcggtataaaatacgttcccctcgcagtcccgcagatcgcttcgtgcaaaatgccgggggtgtccgcgcgccctaaaaaccctttgatgcctgaagccattgtaattttaaaagcgtccagtttggacttcatgccgccggttccgacttcgcttcctgcatcccctgctgaagcttctatttccggcgtgatttcagttacttcctggacgagtgcggcgtccggcgtttttcgcggattcgcgtcataaaggccgtctatatcagagaggatggtcagcaggtcggcgtcgatcagacccgccactttagcagaaagcgtgtcattgtctccgaatttgagccgattgacggtaaccgtatcattttcgttgatgatcggaataatgccgcgtttcagcagcacgttcatcgtatttctcacattgttgtaccgtttttcatctgaaaaatcgctttttgtgattaaaatttgtgaagcgatatagccgtgggataaaaaaagcttggaatacgcttcgattaataagccttggccgacagaagcggatgcttgtttttcaggcaatgtatccggcctgttgataaagccgagcttccggtaaccggctgctacagcgccagatgaaacaaggaggacttcgtgtccttcatctttgaggcggacaatctgctcaacgagcttttcgagctttttgctgctgatttcgccgtgaagacttgttaaagaactgcttcccactttgacaactaccctctgttgattagaggtcattttatcactcctgtagtatttttcttcgttacgggcaattactttgctgcgactaattgttccagttcgagactgatcgttttggatcgttttgcggcttgtttgaccgcctgttcgatcgcttcgcctccgccgctttcttccaaggcctttaaaccggcggcagtcgtaccgttaggggaagtgatgttgtctttgagaacagctgtatcctcagggctttccaacagcattttggcggcgcctaacaatgtctgcgcgccgatttcccttgttaatttttggcttaatccagcctcggctcccgctttttcgatgtgctccattaaataataaaagtaagcaggcccgctgccggcaatgccagtgaaaatgtccattttgctttcttcgatggaatagacttctcccatgcattgaagcagttgtttcgcggtttttgacagatcggccgttacatggcttccttcggccatggcggttgcagatgcgccgattgcacttgaggtattaggcatgattctgatgaccggctgcatgtcgttcagcgcgttttcaataaatgatattgatatgccagctaaaactgacacgataagctgatggggtttgatatgcggtttcatggaattaagagcgccctctgcatctttcggcttcatcgccaggatgaagcaatcgatgttctgatagtcaagttgttcttttttgacgccttgtattccatatttctgctggagttcttctaaacgccggtggttcgtgtggtttgtaacatagatttgcgaagcaggcagttttttggattgaacgatgcctgagatcattccctctgccattgatcccgcccctataaaagctacgtttttttgattaaagatctttaacatctccctttgttcgcatttctgttcgtatttttcgaacacggttagtatattaacactttagatcattatgtcaagtttgcgtgttttgcttggacggcgcagagcatgtgaaaaatggagatttttgaagaaaaaaaggaaaaagaaaaaggaggctgaaggcagattcttcatcttcatgtgcaccttttgtcgtttgtcatccggccatttgaaggccgtttgaatgatttaacggaattttttggagatcaacagcctttcggaccggtaaaaaagtatgttcctcgagccttgtgaatgcaattgaaaaagcgcgggttcgaagcttgtcgaacccgcgcctgccaacatcaatatgttgtgatgtaaagctgcccctcatcaccgcgccattccgcatacagcacctcttgatactgagtgataccctgacttgataattgattttgcagccaaagctcatcaaatccggctttgtgcagattgttcttttcgagctggccgtcgaggattacaggcaccgggagctgaaccggtttgtaaggaatgtttaagtcatcttttgtcggcatcccgtatttgtgttttgggaggacgctgatcgaaccgtctgtttccaagatggcgtattggatctcgtgtaaggaaaaacagcctttttcacgtgccaatgtctgcagctggttcaggtccaatttgttctttttaagggcgttgtaatcgatttttcctttattgatgacaatgctcggcctgccttcgagaaaacctctgatgttttgcactttttgcgataaaacttttattgaatagattagaacggcccaaatgaggatggcgaaaaggattttccagatggtgacatcctcatcgaaaatcgcgtttccaaccatctcgcctaatattaaagccgaaataaaatcaaacggcgtaatttgggcaaattgggtttttcccagaattttcgtcatcagaaacaatgctgcaaaccctatcgtcagttcgactaccaagtgtacatattccatcaaggttccctcccgaatctctctcctcattgttaacaatcgggatgcagtttaaaccagaggaatacttttcctgagaaatggaccgactgatgatcctctgaaacgtcggggatcagccaaaacaatcgtcaaaaaagagcggcgtcagccgagctcttcttcggtcaaacggctgttaagtgccgtaaccgctctcggcttctgcacgatcacttccggcaatgaaacagatacagctgcacgggcgccttttcccgatgtgatgcactgttgaaaaggtgcactgcattgacagacttgtatttgattccgggcagttcggcagcgctttagctccatatcatccaaaacaggcggccaggttaactaaaagtccctccatacggcaggttctcttttacgtcccctccctccaacgattgatttcaaatgatccctatttcttcggacatctgattgtttctgcctggcatatttcataaggcttatagatcctaaagtggcaagaaaaacacataaaacaactgccactgaatataaatcaaaatcgagaaagattttcacgagactgtaggaaatgacaagtgaaaaaaccggtgacacaacccatactttcattaacttcaaaatgacgcttttacgaaaaattgcccttcccttttcagaaaggccgatcccgatgatgctgcaagtcgtaatctgagtttgcggcacgggaatgccgaatagcgaagcgccgatgaccaaggacgcaccgagccctgaaacacaggacccttgcaaaagcgaaaactcggtgattttttttccgttcgtctcaatgactcggcttccaaggcaaatggccccgatagccacgaacagccctccaagaaacgttccgctgccgactgacaagaggcctgctccaacgagaggtccaacggaattggcgacattgttcattcccgccgaaaatgcttctaaaaacccggttaaaatcaccagcgcagtaagcagccgcgcccatttttgctgtttgagccaccgcagcttcgcctcagtctttttcagcaattgtccaattaaaaaagcgagaaaaaatgcggcaatcggaatggtcagccaatacatgacgatcaccaaaagcttatcggtaaataccgcctgaaacgcgacgccgaccccgacaatcgagccgaccgtcacctcgctggttgaaagaggaatcccggcgatgttcgcgataaacagcgaaatcgcggatgatccaaggataatcacgacaatatgcacattgagaatagacgcgggaatgatgcctgaaccgattgttttcacaacctctcctccgcctatcatggcgcccagaaatacgccaattccgctgatccacaaggccgcctgccttttcctgacggcgcctgcgccatatgctattcccatcgacgctgctgctccgctcgctcctatgttcatggcaaaaaacaaagcgataatgaatgccaaaattgtaatcgtcattttttacccagctcctaccggaattgatgcagcccgcattctgttttttcctggtgggcccaccttcccgctcttaaattgccgcagtctgtcacgggaagcgtacacacctcacagccgatgctcggataatcttgatcatgaagcttgtgatacgtcagctgattcagcttaatgtaagtccagacatcctcccatgtccagtgaataagggggcagattttaatcagtttaaaattgtcgtccttgttgatatatcggacatgtttccgtgtttccgactgctcccgcctcagcccggtaatccaggcttccatgcctgacagatgctccctgagcggctcgattttgcgaaggtggcagcactggtccggctggcgcttccaaagttcgctgccatagcgtttttcctgctcttcaactgagaggccgggttttaaaaagtggatcgacagaccgggatagcgatctttcacttcattgatcagctcatatgtttccggaaaatgcagtcctgtatctaaaaacacgatgtccgcttctttcacaacctttgaaatcaagtcgatcaaaacgattccttccgcgccgaagctgcaggcgtaaacgattttttgatacgtgctgtacgcccatttcaaaacgtccatctcgccgctgaaagtatccatcacctcttcagaagctttttcatcccatgtgctatacgttaaaacatcgttcatcgatttttcccccaatacgtcctaaaggtttgttttcttatcctctgatacgaaacatgaactaaaagaacatataggcagattattcactttttagactaaatgtgatctggaaaatgttattatttcagcaattttgtgaatatccgaaagaccagatgcgcaagatcgaaatcaatcatattctctgcttgtggacctaaattaatagagcccaatttgatataccgaaatattatcagatgttaagcaagtatttcgcaatctgtcatggagaacaagtgaggaaccatatgaaaggacggcgaatatacttactttgacttcacaaaatggatagatacctagtgataagcaagtcaggcgataaggggctaacatgctgcctaatggggaggtgggcgaagatcactccttgccgaacggcaacacatgaatgagaaaaacgataaacggggaaagtgaattcttatcgtgacagctgaataatggccaacagacatttacctgaaagcaagaaagatacagtagattgtgaggggtaatcaatgatttcttctgaactgatactgcccgacaggcagcttaaaccaagaaagaaagggatcaccatcctgatcgataacggggttcccttgagcttttttaaagatacgattcacggagcggcagattatatagattttgtgaaatttggatggggaacgtctttgattacgaaatatttggaggaaaaaatcgatagtcttaggcagaatgacgttcaattcttttttgggggaactttgtttgagaagtttttaagccaggataaaattgaagattactaccgctactgcaaattatatggatgccgttatgtcgaaatatcaaacggaacggtccgtctctctaataaagataaagcaagctttatttccgacttttcgaaagaatttcacgtgttcagcgaagtcggcagcaaagacagcaccctcagcagcgagctggagtcagccgaatggatcgattatatcctcgaagatcttgaagccggagccgagaaagtaatcacggaaacgagggaaagcggcacgagcgggctgtgcaaaagcgatggagaaatgcggtcccagcttattgaggagatccttcattccggtatcgcttcaggggatttaatttttgaagcgccgacaaaacagctgcagacgtgtttcattgaaaaaatcggtcctgacgccaatttggctaatattccgtttcaagatgccattccgcttgaaacgctgagactgggacttcgatcagatacattttatttatttgattagcttcgcttaaatagcggcctattttttgttgcggaaaccggcgataggcatcaataacggccggaagcgaatctgataaatcgcatcgatgatcctcgtagaaatccattggcagattaaggcctggataacgattccccaggcgatgacagacgcggtcaaaagaaaaatgaatgcattcatgataaacagcgcagttcccggttttccgccgcggtaaatcgatatcattaaagccaaggcgccaaaaccgccgttagaaatattatatttatatagcagtccaacccccgctcccaaaaggacggagccgtaaaataaatccagccagatattgttcgtcgtcataaccggcatacaggattcgaagatctgcaccgaaacggacgtcatggtaatcgcccccatcgtcccgaagactgtcacgggttcaagccatttaacggccgtcaaaaggagcgagaagttgacagcccagacggttaatccgtgcggaacctgaaaccagaaattgagcaaaacagcgatgccggctgcgccccctgaaggaatatggttcggaaacaaaaacagcgccataccgagaccctgcaacacgctacccaatacaatagcatgtacgattttgagttttcttcccatacggaataatcccctttaaagtaacttgtcctctttcctactatatgtaaggggaaatgaaaaatatcacattttttcggggtggacgctgatcagatgtaagacgagccatcccacacatacgcttctacgagctctgtatcaatttcgattttgtcggggacttgaatgcagccgtcttttatgctgacgggcacgatttgtgcgaacggattctccatcgcatcccattcaagcggttcgatatcttctccgtccattttggtccaatgcggtaaacaggcttgtccgaaagcggcgtatattcttgaaagtccgccgtcatagctgtggggagagaccctttttccgaaatgcctggcgagcttcagaacggtttgaaattcgtccgtgccctcacagtgcataacatcgggctgggcaatatcgactgcgttctccagaaaaatcggcaaaaacggctttgcgccttttacgttttctcctccggcaaccggaacagaaagcgctgagcgcagcatccggtattcagctaggtcgtcaaacggcatgggctcttcaaaccaaagcacgttttgccagccggaaaaccacgtttcccacttgcgcgcggcggcctgatcataactctggtttgcatcgaggatcagtccggtgctttgccctgtcatctcctggaaggcctgaatatgtgccaagtcttctgaaaacatcttgcctcccgctttcagcttgactgccttaaatccggcccgaactgccttttcgataagccggagggaatggcggctccaatccggcctgtctgaatacgattggaatgacgcatataccgggatctgctcccgcagttttcctccccataattcgcataccgaaaggcctgcttttttcgccgtgatgtccgttaaagccatgcttacagcagaggcggcccgctgatgccattttttgatgacagtgatcagctccgttcgattgctcgcttcttttccaattaaataaggaatgatccgttttttaaagcctgcatccaaagcaggcagccaatccgcgcattctccccatcctgtcagacctgaagctgtcgtaatccgaatcagatagcatgttctgtagcttttcaatccgttcgcatcgccgtaaggggaggaaagcttgtggaacagcggaaatgtgtcaaccttttctatgcgcatgttttttcctttcctcctatcttgcgtcagccggctgcagccccttgtcccctttttttgtcgtgtcttcctttttgacgtgaatcatggtcagcacaagtacaccgacaatcaacgtcaggcccgctatggacataaacatgccgagtttcgaccattccatcagtctcccgaaaatcggcggtccgatggcgactcctaaaaatctgaccgaaccgtacagagatgtcacaaagccgcgcctctcttttccgacagccccggttatgaagctgttgacacatggcagaacaaagcctgtgccgatgctgctgatgacaaggatcgaaataaaaggaatgagcgcggagaaaaaagacagtgtgccgtaggaaaccgtaatcagagcgagtccgatgaccatcatttttttcatcagccgctgattttgtccgattttgctgcccgtaatatatgatgttgtacacatcacaagcagagggatcgccaaaatcagccctttttttacgccgtctgtatgatattctttttccaaaacatcggataagtaaaagaggatgccaaacagagtaaacaaacagacggctcctgcgagatatgcggtgaaaagccatctgccctcatgtttaaaaacgcttgtcagcccttttacatattttccaagaggcggcggatcttttttcttgtctttttctttaataaaaatccaagtcataatgatcggcgcaatacaaaaagccggaaatgcaaagaacacccaaaaccaagcgattaatgcaatcaatgatcctaaaataggagacagcacttttccgaagccgttcgaggcttcaacaagaccgagcacccggctttcgtcggcccctttaaaaaggtctcctgtcagcgccattgcgatcggcgctgtaccggctgccccgagcccttgcagtcctctcccgaacagcacccatgggaaggcattcgcaaaggtcgtcgatgcaaaccctgcaagaatcccccctgccccataaaggaacaggcacggaataatcaccactttccgtgagaagcggtcggccaaataaccgagcagcggaataaagagcgctgcagtgatcgaaaacactgtaatgacaaggctgacttgaaattgcgataaattgagttcggatttcattttcggcaaaatcggaatcagcatcgaatttcccaacgtcataatcaacgggatcgacccgatagcaacaaccgtcatgccagagttttgtttttctgccataagtttgtacatccttccttattcataatgaactataaaattggagttaactgctcgggttgcatccgtcatcagctgagcttcgtttccggccgtttttcaggttcgcgccggccgagccgttcagtatacaaatcgatatccaccgcatatctcggccttcttttcacttcggtgaaaatcgttccgatatattcgccgataatgccgatccccatcaattgcagaccgcccaaaaaccatatcgaaatgatcagcgaagcccagcctgcattcgtatacccgagcagtttttgaatcattgcataaatacccgcgatgcagcttaggaaaaataagaagaagccaatcagggtaaaaaatcggatcggagcgacactgaaagacgtaatcccgtgaaaagcgaaagacagcatttttttcagcggatatttcgtttctccagccatccgctcttttcggtcatagtacacttttgccgaccgaaggccgatcaggggcaccagaccgcgcaggaaaacatttgcttctgcatagcggctgagctcctcaagcgcccgtttatttaaaagccgaaagtcggcatggttatcgaccagctggatgccaagcttattcatgatcttgtagtaccatccggctgtcgttcgtttaaaccatgtatccgtttggcggcttcggcgtacgccgtagacgatttcatagccttcatgatatttttcgataaaccggcgaatcgccgaaatgtcatcctgaagatcggcgtcgattgaaataacgcaatcggatttttgctttgctttatcgagtccggctaacagagctttttgatgtcccgaattacgggccagcttcaagcctgtcacatagcggttttttgtgctttccatggcaatcagcggccatgtgcggtctgtcgatccatcatcgacaaataaaagcttgctctctgaagaaatcagtttatctgctgtgagatcatccaataccgcagtcagctgttttgcggtttcggcaaacacgtcctcttcgttataacagggtacgacgatcgtcagcaaaggctgttgaagattcaatttgcttcctccttatcgatgcttatttcgcttcatatacatagatgttccaagcggactgcgggtggctgaaccgctttaaaaacgcaagcttgttttgttctgcattcataatcggaactgaagaaaaaatatattgtccccccatttttttgaatgcttcagtgtttaactccaggttcgtgatttttttctttgtgctctttttgaacgcgtaatgttttccaagctcgtcaacaaacaggtagcagcggctcccccactcatcgaaatagcgcttcagggccggatttttatcaagctctttggcgatgattttccggaattgatacttgtatttcagcggataaatattggcatacgtatcaagtgtgtagaagccgttatactgcgcaatcgccggatgcaggccgatgctcgccaccctgtaggaatcggtaggacggccgatgaatcgtttgatctgtttaaactgatctgatgcataaaattcccgaaagcttggggcgtggtggtatgcgccgtaagtcagctcttcatgaaacggaataagcacaagcagctgggcgattagtgcggcataaacaaaacgccgccatctcttccccattttccacaatatgtagcatgcaacggcaaagcttgcgtatatcacaagagggcgcaaaaagtggaaacgggcgaaattgaatgcagaaagcagactgatcttttcctttggaagcgcccacagcttgttgaaccagagggcataccataaagaaagcgcataatttaaaatgaataaaaagatgaacagcttttcttcgcttggccgctttttgcgttgtctagcaacgacgagcccgaaagtgagcacaatcaaaggcagtatcactgccgtatggacggtcatgacatgattgtggccgagcacgaaatttttaaaggacaaccgaaacgaatgaaggatgtcatgcctggacgaaataaattcaacgcgatgcatcgtttcgcctgaagcgaaaaccgaataaacaagccggtattctatcgccaggaatatgcctgtcataagagcgatacttccgagaaagccaaggttaaagctgcgctttgtgaccaaatcataaagccaaatcagcgaaacggcggcaaggaaaaagaagaaaccgagcacaaagcttgagtaaagcggtaaaagcgcaagggttgaccactctttccatgagtcgttccctgccctgatgtttaaaaaagcccataaggccaaagggtgaccaagcgtgctaagcattcctgaaggccaaaagggtgtcagggcaaatgccagcgatacggcgattctgatgaaatacgccttttcatcgcgaatcacatggcttttcagcagcaggtacatcccgacaaaggcaaacaccctcgtgatcgtctggcttaaagcatatgcggtcatcgaaggaaacaaggcgtgaagccagacaatgccgctccattccgttccgtaagcgtcccgcggcaacccgttgatgatttgcggaatgacggctttaacgccgccgagcagctgcccgctttcggccagcaccttataccaggcgatattggaatccaggttgtcatgctcacggatatgagcgtcttcatttaatatgtaaagcggaaggacatagagaagaatgacactgaatgcgaaaatcaaatatcgcttttctctgctcaactttttgacgaataacgacacgaataccacatccattttgttctcttttggaaatatagagagcttttatcatatcgctgttattattcgtggaagcgttttgaaaaattcatcaaaatgaaaaaagctgcctgcttcaccagacagcttcgttttacaaattaccaagggtaagggtagaaaggataaaaaggataaaagaacggatagaagaatggatacggataaaacggcggcctcggtctagggcgcggtcttggccgcggataagggtagcccccataagtaaaaggctgctgtctatccggatccgcccagttatcttgattttgataagtttcttccactgttatagcctcctttagttgcttttcatactttaggttatgctatatcccataaaatggagtaattacacaatttttcacagataactttgggcggcagtccgaagatcagccagaaggcgaaagcactgaatcaaaaaaacaaaacagcctgccccgtcaacctaaaaataaggtcgcgggacaggctttcatttatatgatgtgaatacccctttgtttttaaggcagtacagagctccccattaaatatttgtcaacttcacgggcgacttcgcgtccctcgtgaatcgcccaaacgatcaggctttgtcctcttctcgcatcccctgctgcgaagactccatcgacatttgttttaaattccccgtatgctgcgtcaactttatttctcaccgtatttaccccgaactgctcaagcagcggctgttccgttccttcaaagccgatggcgataaagacgtattgagcaggccatactttttccgttcccggaatttcgtggaactcaaatttcccttgatcattctttacttttttcatttgaatcgtatgcagttctttcaaatggccgtttttatctgcgacaagcttttttgtttggatcgaatattgtctcggatcgtttccgaatactgcttgcgcctcttcataggcatagtccagcgtatggacatgcggctgttccggccacatattttcggcggtccttgtatcgggcagcttcggatgcttgccgaattggacgacgcttcgcgctttttggcgcagggccgttgcaacgcagtctgcccccgtgtcaccgccgccgatgacgatgacgtctttatttttcgtattgataaactgcttatctttaaaattcgaatcgagcatgcttttaatggtgcctgttaaatagtccatggcaaagtggacaccttttgcttcacggccttcaatcaagagatcgcgctgtttttgggcccctgtgcaaaggataatcgcatcgtactgttcttttagttcgtcggctgtaatatccttgccgatttccgtattggtgacaaagtcgacgccttcctgtgtcaacagtttgatgcggcgttcgacaacgcttttttcgagcttcatgctcgggatgccgtacattaacaggcctcccgggcggtcgctgcgctcataaacagtgaccgaatgccccgcctggttcaattgatcggcgcttgcaagaccggcaggccctgagccgactatcgcgattttcttgccgctccgttttttcggaattcgcggctgaatccatccgttttcaaatcctttgtcaataatcgtccgttcgatccctttgatggatacggccggatcggaaatcgccaccgtacaagagccctcacaaggcgccggacagacccgcccagtgaattcagggaaattgtttgtctttagaaggcggtcaagcgcttctttccaccttcccttgtaaacgaggtcgttccattcagggattaaattgtgaatcggacatcctgacgtataaccgcgtatatccatgccgatttggcaaaagggggtgccgcagtccatgcagcgcgctccctgtctttttgatgcttcctcagaaaatggagacgaatattcgttccagtcgtttatccgtgtgagaggatcgcgttcagcaggcttttcccgcttgaattccataaatcctgttactttgcccattttcccctcccctttcttactgtgccaccgcttcttttgatgaagcagccgcagatggttcaatcttttgtttcgtaccggcttcaaacgcgtacatcaacgcttcttcatcagacaagccggcttctttctgctctttaatccgctctatcatttgcttgaagtctttcggaatcactttcacaaaccgaccgacggcctcttcccaatgatccagtatcgaagctgcttttgagctttcggtatatttgtaatggttttcgatcatcgttttcagttcagcgatttcctcaggtgcttcaagtgtttcaaactcgatcatttcaggattgcatttccgtttaaaggcttttttgtcttcggcgtatacgtaggcgattccgcctgacatgcctgcggcaaagtttttgccgacgtctccgagaatggcgacgcgcccgccggtcatgtattcgcatccatggtcgccgatgccttcaacgacaacgctgactccgctgtttctgacggcaaaccgttcgcccgcgagtccgttaatataagcttctccgcttgtagcgccgtaaaacgcgacgtttccgacaataacattttcacggaatgcagggttgaattcgtcaggcgctttgacggcgatttttccgcctgaaagacctttgccgatgtaatcattggcatctcctgtcaaatacatcgtcattccttttggtacgaacgctccaaagctttgccccgctgaacctgtgaatcggagcgtaatcgtatcttcagggagaccttcttcgccgtagcgcttagaaatttcgcttccggttatggctcctgttacacggttgatgttgcggatttcaaaagacgcttctacaggcgtgccgttttcaacagctgactgcacggccggtaagatttgcgtaacatcgagcgattcatcgattttatggttttgcggcgtacggaatgtacgtgtgccttccggctggtaaagcaggcttgataaatcgagctgacccgctttccaatgcgctttggcccgttcgctgacacgcaggacatccgtgcggcccaccatttcatcaaccgttctgaaaccgagctgggccatcaattcgcgaacttcttctgcgacaaagagcatgtaattcacgatgtgatctggatcgcccatgaactttttgcgaagctcagggttttgcgtcgctaccccgacagggcacgtatccaaatggcaggctctcatcatgacgcagccgagaacaacgagcggtgccgttgcaaaaccgaattcttcggctcctaaaagcgcagccatgacaacatctctgcccgtcattaatttgccgtctgtttccaatacgacgcgttcgcgcaaaccgttcatcatcagtgtttgatgagcttctgcaagtccaagctcccatgggaggccggtatgcttaatacttgttttcggtgatgctccagtgcccccgtcatagccgctgatgacgatgacatcggccgtcgctttggcgactccggctgcaatcgtgcctactccggctttagcgacaagctttacgctgatccgtgcatcgcggttggcgtttttcaaatcatgaatcagctgcgccaaatcttcaatcgagtagatatcgtggtgcggcggcggtgaaatcaagccgaccccaggcgtagatccgcgcacattggcaacccatggatacactttgttgccagggagctgtccgccttcccccggttttgcaccctgcgccatcttaatttgcagctcgtcggcattgacgagatagtggcttttcacaccgaaacggcctgaagcgatttgcttgatcgcgctgcggcggttatcaccattggcgtcaggcgtaaagcgcgccggatcttctccgccttccccgctgttgctttttcctccgagacggttcattgcaatcgccagcgcttcatgggcttccttgcttaaagagccgaatgacatcgcccctgttttaaagcggcgtacaattgattcagcggattcgacttcttcaagcggcagcggcttccggttttcatcaaacgagaagaggttgcggagaaaaccgattctttcttcatcagccgctttcgaatattgtttaaacaggctgtaatcacctttgcggcaggcccattgcagcgtgtgaatcgttttcggattaaaagcgtggtgctccccgccttttctccattgaaaatcgctaccagaatcaagcgtttcactgaatgtatcttcataagcttccctgtggcggcgcttcgcttcttcggcaatcgtgtccaaaccgattccgccgagctgtgaagccgttcctgtgaaatagctgtctatgacgtccttgctgattccgaccgcttcaaaaatctgtgcgcccctgtagctttggactgtggaaatacccatttttgacatcacttttacgacgccttctgtcacgcttttgctgtattttgttacagcttcttcataactgatggtgagcgctccgtcttcaatcgcctgcttgtatgtcgcatatgtgaggtacggatgaatggcatccgctccgtagccgatcaaggcggcaaaatgatgaacttcgcgcgcttcaccagattgggcgataatgctgactttcgtgcgctttcctgcacggaccaaatattgatgcaaggcactgacggctagcagcgcaggaatcggcgctttttgaccgtccattttgcggtcggataagataaggagtgtaacgccttcggcgatcgctctgtccgcttctttaaacatatcttcgagtccgctcttcaagtcgtctgtaaagagcgtgtgaatcgtcttgcttttgaaatctttgtgtacaagcccctttaaagaattgaactgcgcgttcgtcaagaccggtgtatacaatttaatccggcggcagctgctttcgttcggatggagaatatcgccttccgctccgagccatgtcaatgtcgatgtgacgatctgctcgcggattgcatcaatcggcggattggtaacctgtgcaaacagctgtttaaaatagttgaacagcgattgcggacggtctgacaacaccgccagcgggacatcgtgacccattgaaccgagcgggtctttgccttctgtaatgacaggaattaaatacttgtgaatatcttcgtacgtaaaaccgaatgctttctggcgggtcagcagatcaggcacagatttttcttcggtttcctcaatgtcgtttgagacatgaaccagttctttactgagccattcctggtacggaaactctccggcgatttcggatttgacttcttcatcggagataatacgtccttcttcaagatcaacaagcagcatttttccgggatccagccggtctttatataaaatgttttcctgttcgacatcaattacgccgacttcggaagaaaaaataaggtagtcgtctttagtgacataatagcgagcgggtctgagtccgttccggtctaaaatggctccgatctgttttccgtttgtaaaagaaatcgcagtcgggccgtcccaaggctccattaaagagctgtgatattcgtaaaatgccttcttttcttttgacatgtacgggttctcgttccacggctccggaatcagcatcattgcagcatgggccggcttccttccagccagaacaaagaattcaaaagcgttatccaggatcgaggagtcgcttccgttttcatcgaggattggcaaaacctttggcaagtcttcgccgaacgcttcggaaacaaactgctgctccctcgctttcatccagttcatattgccgcgcagcgtattgatttccccgttgtggatcagatagcggtttggatgtgccctttcccagctcggaaacgtgtttgtgctgaaacgggagtgaaccaatgcaaaagctgagacgaagtcctcgtcctgtaaatcttcatagaaagcatcaacctgctcgggcgttaaaagtcctttatatacgatggtattgctcgagaggctgacaaaatagaacgttttctcgtgttctttcgcccaattttcggcctgtttgcgaatgatgtacaacttccgttcgaatgccagattgtctttcagcgcttcatttgctccgatgaatacctggcggacgactggcgcgctttcttgtgcgactgttccgatttttccgacatttacaggtgcagttcgccagccgagtaccgtctgcccttcctgttcgatcagctcgttaatgcgcgcttcggatttttcgcgcccgctgtcgtctttcgaaaagaagatcatcccgacgccgtagcgtcctttttcaggcaagttgaaatcggcgcagacttttttaaaaaaagcatccggaatctgcatcatgatgcctgccccgtctccggtatgcgggtcactgccctgaccgccccggtggtccaattggcaaagcatttgcaatccttttttgacaatatcatgagtaggaaggcccttcaaatgagcataaaggccgattccgcatgcatcatgttcaaattcaggacggtagagaccttgtgcctttggtagttgattataagtcattgttcctctcccccgttcatttttcccgtttgtccccggtcataaaatcttacaaactctaatcctattgtaggttttcaaatctatacaaacaatatataatttagattaaaactatctcattttgagattagcaggtgaaacaacgatggaattacgccaattgcattactttatggaagttgcggaaagagagcatgtatcggaagcggccatgcaccttcatgtcgctcagtcggcgatcagcaggcagatcgccaatctagaggaagagctcggcgttgatttgtttgagcgcgaaggccggaatgtgaagctgactccgattgggaggcagtttttagatcacattaaaacagcgatgaaagcgatcgattttgcgaaggaacaaatcgacgagtatttggacccgaatcgcgggaccgttaaaatcggtttcccgacaagccttgcgggccagttcctcccgaccgtcatttccgcttttaaagaggagcatcctaatgtcgcttttcttttaaggcagggatcttataaatttttaatcgaagcggtgaaaaacagggatatcgatttggcttttctcggtcccgtcccgtcaaacattgccgagattaaaggagacattttgttttcggagagccttctggcgctcgtgccggtcaatcatccgttgtcaggccagaaaagtcttcatctcggcgatctcagaaatgatcagtatgtgctgtttcctgacgggtacattctccgaaaaatggctgttgacgcatgcaagcaagtcggatatacgcctaaaatttcctcggagggcgaagatttggatgcgatcaaagggcttgtttctgctgatatgggggtgacgcttttgccggaaagcgcctttaatgaaacggcaccccgttttacaaagaagattccgattgattatccgcaggtaaagcgcacggtcgggatcatcacccctaaaaacagggagctttccccttctgcaaaagtcttttatcagttcgtaaagaagtttttttctcgccttcagcaatatcaataacagtcttgcaacgaaatcagccgggcgcaaaagcttggctgattttattttatcataaataaagataaatatctgaattttctgccctttattgtttgcggccgtgtctcttctattataatgagcgcgtcttacagatgtatgttcatccctgttttatcaaatggtttgcccttctttacattgcgcttaacgcagctcatgaaggtctcctctcttggaacggacatgccgcaccggccgcagccgttgccggccttgggcttgtcaaaacagctgaagcaaaaggcgggttgcatccgcgctgctccgttacaaggacagaaaaggcgatcatcttccgggtttaagcgccgccgcggtgacgaggttttaaaaaagccgccagtcaggcggcttttcttttcattttatttcttgcttttcaggcatatcggcatggattaaataatggatcaacgctttttgctcctgtttggaaaagccgcttttggcgtcgatccaaaattcatgccctttgccggttactctgactgcttttaagtcgggcgattccgaattgcttttgatgaccttctgtcttaagtctctgtcgatcatcgccaataaactgttataagggttcgccggcttacctttgataatcgtctttggtatgcctgtttctttcaatgagatcccaactgcaacccctccgtcgtgcaaataaggagcacgccagtaaacgccaatcagactcggcactttatacccgcctttggaatcaccctgcgcccacgaaagcttgatctgttcggggtcaaatccggctgtcgggactttcagaacctccggcttgcgcggcagaggcaccggtgtgtcaggcgaatggacaaggcttttcccgaatatgctttctgctttcttaaaagactgcgcccttgtcggctcggtcccgatcgtttcagccgagatgaccttgttgttcgtcaaataccggccggcatgacaggatatgcagcctgcttgttcaaaaacgcgcctgccgcgcctgatggtttggccgtcggttttttgccgcggttcaggcggtctaagtgtattttgccaggcagacacagcgttgttttcttcatttacatttcgtccgggcgagctcacatgcacgccgtcgggcgccgccagagtgattttaggaaagctcggcggcttgaccatttggttgacgcccggtactccgggagtggggtctgcttttttgaaaaacgcggtcggactttccccttttttcggctgatacctgtatgttgaggcgggagccctttgcaggatcgtcccgatataaacatcttcgctcattccgaaaagcgcccggcttgccggagattgtgagaggctgtccgaattttgcgcatgaacattattgctgaacacagtcaagcctttaaacggcccggccattgccacaccgctccagctgtacggatggtcgcccaatgtataggcatctggaatctgcgtgggattgcttttcatatcgatcgttgaatcgaaaaaacctctcggccacttcaggaaaatacgatcgactgcatcttcgaggcggtccggatcggggaggcgttcttttttgccgtttcttgcggtgatcacagggcttttatcattcataaattgtttaatattatgaatttcggcatgtgtaaaatatgcagctgagttcgtcgccagcgccagcatcagccctgtatttaaatctgagtttgtcacgccttccatcaccttcatcgttttcgaatcaactgtggcgtggcaggccgcgcagctgatgccggctttgatttttccgtcagcgtatttaaaaggcatgccaaggggcgcgtatgccccttttgcaacatcaatgccggtgtcgatcttctcgccttttttaaaggttttcccgccgaccttaaccgtttccgccaattcgatgcgcaagtttgtcgtccctttccctttcaatccagcaatggctttcgtcatgttggcagctgtaatgggaccgtcaagcagtccgacgatatccgtcaaaaacacctcgtttccgaatgtttccttataaaatgtctcacgtcccaagtcgagaaggcggtcatcaacctttacagctccctcccctgcagacgcgggcttatccggtgtaaatgccccccataaatcgtatccgtgcaatcgtttttcttttgagatgactttttctttaggaggcatataggcatattccggttcaaggtgtctgaccgtgaaatagccaataacggctaaaattgcgatgatagcaattgcggctaaccacttatgtttattcatcatttttcctcctttctaattgaataggcttcccaagagctggcgtaattcatttagaacctattaccagctataacttccggcgccccatgccagaatatgcatacaatgggattaaaggaatgaggccattttgaaaaagctaagcattgtacttgtcattttcatatgtgcgctggtttcattcatcatatggctgaatgccggggatgaaaaattggggctctcagatgaagaagcagaggccgtcaaaccctctaaaaaaccggtcattgtcctgatcatcgactctttgatggatcagcctttgaaaaaagcgattcaagaaggccgcgctccggcattaaaattctttcttgaaaacggtcattatgaacctgaagtggcgagcgcgtatccgaccatgtcggtcgcgattgacagcacgctgctcaccggaacttatccgaatatccaccgcgttcccgggcttgtctggtataatcaggatgaacagagaattgtgaattacgggagcgataaaaaagaaatcgccgcgctcggcctcaaacaaacgatcgaagacgggatatattctctcaatcaccgccatttaaaccgaaaggtgacaacggtacatgaagatttgcaaaagcaaggaaaacagtcggcatccatcaacgggctcatatacaggggacctgaccgccgcgaattaaacataccgcccccgctcaagaagcttagactgatgcctgaacatatgacggtaaacgggccggctcttttttcgtacggccgctttgcccagcttgatcccgacaactcctaccaccatatttggcagggttatggcgttaacgacaagttcacggcgcaggaaatggcttatttgattaaaaagaggaagcttcctgcgctgactgtcgcctacttgcccgatttcgaccacgatgcacacaaaaaaggcccgaaggatatggaaggcctcgaaaaaatggaccgtcagctgcagcgtatattgaatgcatatgattcttggcgcgatgctgccgaaaaagcggtgtgggtcgtcatgggagacggcggacagacatcgatcggacgcgataaagataaggcagccatccggctccattcgctttttaaaggatatcggatcgctaaaataaacgaaggcccagatcgaaaagaccagcttctttttgcggtaaacgacagaatggcatacatttacgtaacgtatcaaaacacgtcgctgcaagatgccgtcaatgaattgaaaaaagacggacggatcgctttcacagcgtggaaaaaagacggctggatatacgtcgattcgaagcgttccttaaaaccgctgcggtttcgtccgcaaggcggttatcaagatccttacgggcagtcatggacgatcagcggagatttttccttattggacattaaaacggacggtgcatcgatcatgtatggcgattacccggatgctcttgcccgcctgtacagcgccatgcattcgcatcgcggacggtttgtaattgccgatgcgaaacccggattccaatttgccggagaaaagtctcccctccattttggcggaggcggccatggctcactttataaaacggatagcttggctccgatgatcatcgtcggttccgaagaagttccggctcaccttcgccaccttgaactgaaggattttttaatgaagctcgtacaatgacccggtcatgtcatcaatgatcgggttttttctttttttctaggtttcttctttgacattcttttgttgttctatgtatgataataccgtgttttagtttatttacttaattaattaaaatggagaagcaggtgcttttatgaaacaagataaagtcggccgcgagaccgttgagcagttgatcgaagctttcaacaggctgcgttatgcggaaatgaaacagtcatttccttcagttgaatggaaaaagactgaggcgaaagcgctgatgtttttaaatgaagcaaacggtgaaggaaaaatggcatccgaaatcagccgcgctttgcatgtcacctcccccttcgtcacgcagctgttgaacagaatggaaaaaaaaggactcgttttacggcgcatagatgaggatgacaggcggatcgtccggatttttctaaccgatgaaggaaaaaaagcggctgacgatgcgcttaaaggcctgaaccgatggttcttgcagctctcgcggtttctgggcgaggctgaaagcaggcacttcgccgatctgattcataagctgtccgagtttatcgaacaaggagaaaaaacaagtgaaaagaaggttgaaaaatgatctcactcttaaaatatttaaagccctataagctgcaagtgattctcgtcgctgtttttactttgctgagcagtgtgcttgagctttatttgccgacgttgatggctgatgtcgttgatgtcggaatcgtaaacagtgatatgccatttattttgaaaaccggcggctggatgatcgcctgctcccttctggccatcatgatgactgtcggaaaagcgtttttcgcttcgaaaacagccctcggctttggaagagatatcaggcgcaagctgtttgtcaaagttgaacaccattcaatggatgaattcggaaaaatcggttctgcttctctcattacccgtaccaccaatgatgtcaagcaggtccaagatgtgctcaacatgatgctttcattgatgacgagagcgccgttaatgctggtcggcggtattgtgcttgcggtttccagagatgccaagctgtcgattatatttctggccgctctcccgatacttgcagggctgatttttctcattacaagaaaagctgtccccttattcggcgtcctgcaaaaaaagacggatcgtctcaaccttgttctcagggaaggtttgacgggcgttcgtgtcattcgcgcgtttaaccgcgttgatcaagaaaaagtccggtttcaaaaagcgaacgaagaatttcgcgatacaggcatcgccgtcaacagaatcatggcttttctattccctgtcatgatgattatgatgaatttcacgaacatcgcgattatctggttcggaggcatccgcatcgatcaaggcagcatgcaggtcgggaacttaatggctttccttcaatatgcatcgatgattctaattgcgctgatcatgcttgcgatgacattcgtgatgatcccaagggctcaggcatctgccggccgcattaatgaagtgctgttaacagagccttcgattaccgatccgaaagagccgcagaaagacagcggcttgcgcggttatgttgagtttcagaatgtgacttttcgttatgccggggccgaaaagcccgttctcgaagatatctcgttcaaggcaaagccgggtgagacgactgcgatcatcggcagcacaggagcgggaaaaacgacgattcttcaattgatcccgagatttttcgatattgaaaaaggaactgtgctagtcaacggaacagatgtcagaaagatggcgcaaaaggagcttcgcgcgaaaatcggctatgtcccgcaaaaagcttcaatattcagcgggacgattaaagacaatatccgctttggcaaagaagatgcaacagatgaagaaattttggaagcacttgaaacggcacaggctgccgagtttgtagaaggcaaggaaaacggaattgaatctgaaatcgagcaggccggagccaatctttcaggcggccagaaacagcggctttccatcgccagggcattagtcagaaaaccggaaatttatttatttgacgacagcttttcggcgcttgattacaaaacggatcaaaagctgagaaaagcgctgaagaaaacaaccgctgatgacgccgtcatcatcgttgcccaaagggtaagcacgattacggatgcggatcaaatcatcgttttaaatgaaggaaaaatagccggcatcggcactcatcaacaattgcttgctgaaaacggcatttaccaggaaatcgtcgcatcacagcaggctgaggaggaaagcgcatgagccaacaaccaaagcatcacggctctatacccaaaggaatgcacaagacaaaaccgaaagaatttaaaaagacccttttgagattggcccgctatttaaaaccgcggaccttccagctggtgctcgttgtcttcgctgcaatattggcgacattattcaatgtcatcagtccaaaacttctcggggacgcgacctcttcccttttcgcaagctttacagaaggcaccggtgttcaattcggctttctcggccggatcacgctgatcctggcaggattgtatctgctttctgctttgtttacgttcttgcagcattacctgatggccggggtagcccagaaaacgatatacgaaatgcgccaggaagtgaatgaaaagctgacgcggctccctttaaagtactatgacaagcattcgcacggcgacacgctcagccgcgccgtcaatgatatcgacaatatcaatacgtcattgcagcaggcgctgacgcaaatgattacgtctgtcattacaatagtcggaatcatcgtcatgatgcttttgatcagccctgtgctgacgctcgtcgtcttcatcacggtcccgctcagcatgctggccgtccgattcattgcctcattttcgcagaaacacttcgccgcgcagcaaaaagaactcggcgacatcaacggacacgttgaagaaatgtttacggggcatcaggaagtaaaggcattcgggcatgaagaaaaagcgattcagcaattcgatgaagtaaatgagcgtctttaccagtcaggctggaaagcgcagtttatttccggtctgatgatgccgatgatgacattcatcggcaacctcggctatgtgtttgtcagcataaccggcggtattttcgttcttaacggcacccttttgatcggaggcgtgcaggcttttatccaatatacgcagcaattttcccagccgctcgttcaagctgccggaatcgcgaatacaatccaatcggcaatcgcatccgccgaaagggtgttcagtcttttggacgaagaagaagaaaccggggagacgccggcttccatcgataccggcaaattaaaaggcgatgtatcgtttgaacatgtcgccttcggttatgataaaaacgttccggtcatccgcgacttaagccttcacgccaaagaaggccagacgattgcgatcgtcggaccgaccggcgctggaaaaacgacgatcatcaatttgctgatgcgtttttatgaactaaacaaaggcagcatcaaggtcggcggcacagatatcagcgagctgtcgcgcgaacaggcgagaagcatgtttgcgatggtgttacaggacacatggctgttcaacggcaccatccgggaaaacatcgcttacgggcgtgaaggcgcgaccgaagaagacatcatcagagcggcaaaaggcgcctatgccgacgattttatccgcaccttgccggacggctatgatacggtacttggcgaagatgcccaaaacatctcgcaagggcaacggcagctcttaacgatcgcgagagccattttagctgatccgaagattttaatattagatgaagcgacaagcagtgtcgacacccggacggaaatgaatattcaaaaagcgatgaacaaactgatggccaaccgtacgagctttgttatcgcccaccgtctttctaccattaaagatgccgacatgattcttgtgatgaaaaacggagatattattgaaaaaggcagccacgaagagctgctccgcaagaacggattttatgccgatttgtataacagccagttctcccgggaagaagccgtcagctaacattgaggccgcacctgatcaggtgcggcctctttttttcatccatctctttagctgatatacccgcttttttaagcatacctcgccttttttccttttttagatccgatactttcggccaattgacaattttttcattgtatgtccgttgaaaccgttataaaaatagtgataacgttaagattgaaccggctcataaagtataaacgtttcatttaaaggagagagttgactgtggcaaattcaaattcacttcaatcaagcaagcactatgccaattggattccgatgaaagaaatcagctcgagtaatgaccggctgtttccgtttccgatttataaccggatcagaaagacgtctcctgtgcgttacgatgatgagcgaaaatgctttgatatcttttcttatgaagacgttcaattcgtgttaaaaaacccgaagctcttctcttcaaaacgcggcggtaatatggaaggaaaaagtatattaacaatggacccgccgagacacacaaaaatgagagccatcgttaataaagcttttacgccgaaagcggtgaaagagcttgaaccgcatatcgaagaagtgacggcttttttatttaacgaagcgaaacagaaagaattgtttgatgtggtggacgacttggctgctcctcttcccgtcattatcatcgctgaacttttaggcgttccggctgaagaccgcctcatgtttaaacattattcagacatccttgtcgcaggtgcggaagaccgctcggctgaagccgccgaacggatgtacaaacgacgtgaagaaggcaatcggtttttggcggattattttaaaaacattatcaagcagcgcaaaaaagagccaaaagacgacctgatttcgcttttactgcgggcggaagttgacggcaaatcgctgacagaagaagaactgcttcatttttgcatcattcttttggtcgcaggcaatgagacgacaaccaacttgatcgcaaacagcgtccgctatctcacagaagataaaatcacacaggaagccgtaagacaagatccgtccctcgtccctgtctttgttgaagaaatgctgcgttattatccgcccgtgcaagcgatcggccgcacggcggcagaagacgttgatatcggaggcgtgaggattgcaaagggttctacagtgatcagctgggtcgcttcagcgaatcgtgacgaacttaagtttgacgatcctgacagcttcaagcttgatcgcaaatcaaaccctcatatgagcttcggcttcggcatccatttttgcctcggcgctcccctcgcccggcttgaagcgaaagtcgcgctcgattacttgctgcggcgcgcatacatggaaagggacagctctaaggagcttgaagcgattcaaagtccgtttgttttcggcgtccgccatctccccgtacaactttcacaaaaatagcgcgaaaaaaaaggacaggctgttacaaacctgtcctttccctgctgtttaaggatttgtagaccacatgccggctgatttaatgaaaatgcgcggatgcagtttgagctgggcaaccatgtattccgccagatcttcaggctgcatgacgcgttccggattgccgtctgtcaattttgagtcgattgccaaatccgtcgcaaccgtgcttggtgtaagggcgctcacgcggatattgtgctttctgacttcctgcatcagcgattcggtcagcccgagcacagcgaacttagacgcactgtaggcgcttgtgccggctgctcccctttggccggctgtagaagaaatattaatgatatcgccggcttttctttcaatcatttcaggcagaacggcgcgtgttacattgtaaacccccatcagattaacctggataatattttcccattcttcgggagattgctcaagaaatcctgcaaacccgccgatcccggcattgttaatgagaatatcgatttgtccaagctcttctttgacggattggactgcacgttctacagctgttaaatcctttacgtcagctgcggctacagatacttttacaccgaacgccttcaattcctctgccgctttttcaagattcgcagctgtacggccgataaggccgatatgtacgccttcttttgcgagggcaatcgctgtggcgcggccgattcctcttccccctcctgtaatcagagcggttttgttttgtaaggattgcatatgaaaaacttcctttctattatgtatagcacgttttaaattataggaaaataaaatacgcttttgcaaatattacgacttgcgaagaatgaatggccggtgcagctggcactaatccgcaggacgcatgaattcaattgcccctaagttatgtcgaatagcaaacttttccggccgacatcgaggttttttctgctcgcacgaggaaaagaaaaaagaacctggtaataacatccaggttcttttggtattgcacaaaaacagacgcgatgatataatcaaatcacgcatgttttcaattaaacgacataaatatcccatcttacattttaagtctaccatattaaaaagctcttgtcaaatttttttcggaggagagatgcagaatgagtcatttggttctcggttttcacgaaatggaaaaaacacagcttccactcgttgggggaaaaggattgcatttaggggaattatcaaaaattcaagggatacaagtgccagacggattttgtgtcacaacagcaggatttcaaaaagccatcaaacaaaacaaatcgttccaagccttgttggatcaactgacaatgcttaaagttgaggatcgagatcaaatcggtgaaatcagcaggaagattcgacataccattatggaaatcgaaattccttccaatgttgtgaaagaagtggctcgctatctctccctgcttggcgatgaacatgcttatgctgtgcgttccagcgcgacagctgaagatttgccgcacgcctcttttgccggtcaacaagacacttatttaaatatcatcggaaaagatgcgatcttgcagcatatcagcaaatgttgggcttctctatttacggatcgagcggtcatctaccgcatgcaaaatggatttgaccatcgtcaagtttattcatccgttatcattcaaagaatggttttcccgcaggcttcagggatattatttaccgctgatcccattacttcaaaccgaaaactgctatccatcgatgccggttttggtcttggggaagcactggtctccggcttggtctctgccgattgttataaagtgcaaaacgggcaaatcgtcgataagagaatagcagccaagaaattggcgatttatgggcgaaaacaaggcggaacagagacaaagcggattacgcctgatcagcaaaagacgcaagcccttactgacgggcaaattttacaactggcacacatcggaagacagatcgaagcacatttcggccagccgcaagatatcgaatggtgtttggaccgcgatacattttatattgtccagagccggccgatcactactttatacccgatccctgaagcgaatgatcaagaaaatcacgtctatctatctgtcggtcatcagcaaataatgacggatcccataaaaccactgggattgtctttttacctgttcattactccagcacctatgcgcaaggccggcgggaggttgtttgttgatgttgcgcctaggcttactacacgtatcggccgggaaactttattaaataccgtaggatccgatccgctcataaaaggcgcactcatgaccgtaatagagcgagattatataaaattgtcaccaaatgatcaaacagcaccgattcctgacagagggaatacggatatgctggcgcaattcgagaacgatccgacaatcgtttctgatttgattaagcgcagtgaaacatcgatagaagagttaaaacaaaatatccaagcgaaatcgggatcggatttgtttgattttattctggaagatatccggcaattaaagaagatattatttgacccgcaaagtacggcagtgtttatggctgctataaatgctacatcatggatcaatgaaaacatgaacgagtggttaggcgaaaaaaacgcagcagatactctttctctatctgtaccgggtaatattacttcggaaatgggtctggcgctaatggatgtcgcggatgtgattcgcccttatccagaagtgattgattatttgcagcatgcaaaagatgataactttttggatgagctggtgaaggttgatggcggacaggaagctaggggcgccatctatgcttatcttgacaaatacggaatgcgctgtgccggagaaatcgatattacaagagctcgttggagtgaaaaaccaatgacacttgttcccatgattctgaataacatgaagaactttgagcctaatgccggcaatcgaaagtttgagcaagggcggcgtgttgctttggaaaaagaacaagagttaatagagcgattgaagccattacgggatggtgaacaaaaagccaaagaaacaaaacgaatgatcgacctcatccggaatttcatcggctaccgggaatatccaaaatacggtatggtcagccgcttcttcatttataagcaggccttactgaaagaagccgatcaactcgtacaagcgggtgttattcatgaaaaggaagatatatactatctcacttttgaagaatttcacgaagccgttcgcacaaaaaaaatagatgacaagatcatcagcatacgaaaagacgagtacaaattatatgaaaaactaaccccgccacgtgtgatcacgtctgatggtgaaatcattacaggtgagtacaaacgagaaagtttgccggctaatgcgattgtgggtctacctgtttcttccggagtgatagaaggaagagcgcgtgtcattttaaacatggaaaatgccgatcttgaagatggagatatattagtcacctcctttacggatcctggctggacaccattatttgtatccataaaaggcctggtcactgaagttggcggactgatgacccatggagcagttatcgcacgcgaatatggcctgcctgcagtggtcggagtggagaatgctacccaactgataaaagatgggcagcgaattcgcgtgcatggcacagaagggtatatcgaattattgtaatgctggctgctgcccaaaaaataagggagtcggcaatgcatgaaaagaactcttcggatttggagagttcttccctttttatccatcaggagaaggattcaggcatgattcttttcagtcagaacatccgccggcgaaacaggtgaaatatacctgtaaataacggaatggcttgacgaaaggatcatcaatgcccttcctcccccgccttttcacatgcgcttccctgccatttcataatcatccatacgttaactacaaaagatgaacctgacaattttattgaaaatataggtggaatcaagtatactcgcatagttgccaatcatgaagaaaaacgatgaacggcggtggagacacgttattatataagatgaaaaacgaaaaaagcaaattggagacccgaagattcgggagtcctacatatcatttgttgtcatgtttttgggtaaattgtattacaggaggtttgatatggagaaaaaatttaattccaaagcaatattagtcaccttcatgattggtgcattttttgcaatattaaacgaaacgctgttgaacatagcattaacagagctgatggacgtctttcacgttgatgccccgactgttcaatggctggcaaccggatttatgcttgtcatgggtgtgttaatgcctatatccgctttattgattcaatggttcacgacaagacagatgtttatcggtgttatgtcgatctttttattgggaaccgtcatcgccgcttgtgcagtgaattttccgatgctcttgacggggcgcatgattcaggcagtcggtacggggctcttgatccccatcattatgaacgccctcttgctgatttaccggcctgaagtccgagggaaaatcatggggacgttcgggctggtcatcatgtttgctccggcgatcggccccactctttcgggcgtcattgttgacatcctcggctggcgctggctgtttatcatcgtcattccttttgcagtattttcaatcctgtttgcggtgaagtatctgcaaaatgtcggagaagcgacgcgcccgcgggctgactttttgtcgatcatcctgtcaaccatcgggatcggtggaatcgtatacggattcagcagtgccggagaagctcaggaaggatttcagtcccctctgatcatcggtgtgatcatcgtcagcctgatcagcatcgtgttgttcgtgcttcggcagttgaaacttgaacaaccgttgcttgatgtgcgtgtgttcgcctataaaaattacacgcgcggggtttgcctttttgtgattgtcattatggcgatgttcgcttccgaaattgtgatgccgatgtatttgcaagggccgctcggtttttcagcaaaagcagcaggtcttttgcttttgcccggggccttgctaaacggtctcatgtcgccggctatgggcgctttgttcgataagttcggcccgagaaaactcatcattccaggtacgatcgttctcgtcggcgtgatgtttttcttcagcaggatcaatccttcggtgccgatttgggcgttcattattgtatacatcatcttgatgctgtccatctcggccatcatgatgcccgcacagacgaatgcattaaacgaattgccgaagcatttatatcctcatggaacggcaatttccaatactcttcagcctgttgcaggcgcactcggtgtttcggtgttcgtcagcatcatgagccagggacagaaaagctatcttgccggccaagaagcagccggcaaacaaatcgtgcatgaagcgatgactcatggtgttcaccatgcctactggtttgcgctcgctttaagctctatcgctttctttaccgctttatttattaaaaaagcggtcgcgcctgattttgataaagaataaccaaaaacttaaaggatgtccttcctcggggcatccttttttatcattttttctgccgggattcttccgctcttattttcagaattgacgacattttgtgatataatgctagaatcatattcattttatcggaaaggaacggattccatggagtcatatgttgatcaaaaagacgggattttcaaatccgtatgttcgctcgactgcccggatcaatgcgggctgctcgttcataaaaaagacggaaaaaaccatccggtcacacagggcaatatttgcaataaagtccgcaatatgacggagcgtatttatgaccccaaacggctgaaaaccccgctgaaacggacgggtccaaaaggagccgggatgtttgaaccgatcagctgggatgaagcgattgaaacgattcgcacccgctggcagtcgctcattgaacaggaaggctccgaaagcattctgccctacagcttttacggaaatatgggaaacttgacggctgaaggaatggacaggcgctttttccaccgcctcggttccagccagcttgaccgggcgatttgcacccctgccggttctgtcggctataaatacacgatgggcggaagcatcggcaccgatcctgaagatacaacggagacaaaactgtttattttttggggaatcaacgcggtctcaaccaacatgcatcaaatcaccattgctcaaaaagcccggaaaaacggcgcaaaaatcgtcgtaatcgatgttcataaaaatcagaccggccggatggccgactggtttattccgattcgccccggcacagacagcgcgcttgcgcttggcatcatgcatgttttattcaaggaacatttggctgatgaatcatttttgaaagaatttacagtcggccacgaagagctgcgccgccacgtgcggcaatacgaccccgccgcagtagaggcggtcaccggcgtatcccggaatgatattatcgagcttgcccgcctgtacggccgcacctccccttcattgattcggatcggcaacggtcttcagcatcatgataatggaggaatgatcgttcgcaccatctcgtgcctgcccgcgatcacgggccaatggacgaaaaaaggaggcggagcgatcaaaggcaacacggcatttttggcctataatacaaaagcattgcagcgccccgatttattaaaaggcagaacgccgagagtcatcaacatgaatcagctcggcaaagctctcttagaaaccgaaccaccgatccgttcgctgtttgtgtacagcagcaatccggccgttgtcgcgcctgaggcgaacaaagtcagaaaaggacttgagcgcgaagatttattcacggttgttcacgatctatttctgacggaaacggcacggtacgccgatatcgtcctgccggcttcttccgctttcgaaaatacggatttctatacatcatattggcaccattatgcgcagattcagaagcctgtgattgagaaatacggcgagagcaagtcaaatacagaagtattcaggcttttggctgaggcgatgggctttgatgatgagccgctgaaagattccgacgaagagatgatcagacaggcgcttgactaccctgataatccgtggctcgatggcattgactatgacagcctgactgaaaagcattttgtcaaagcaaatcgaaaaacgttttttcctgataaactgccgacgcctagcggaaaaattgaattgtattcaaaaatgatggagcagcacggctatccgggcctgccgactcataccccgctcattgaaacggacaagtatccatttttatttgtgcccggcccgaatcacaattttttaaattcgaccttttcaaacaatgaaaaacatatcaaattagaaaaggagccgaaacttcacttaaatataaaagatgccgaagaaaagggcatcgaaaatggagatttggtgaaagtttggaatgaccgcggctcatgcatcctgcccgctgccgtcggagaaaacgtccttccgggcgtggccgtcagccagggattgtgggcggatgcagaagggaagcattatctcgtcaatgcgctgacgcccgaccgtttagctgatatgggcggtggtgcaactttcttttcaggaagagttcaaattgaaaaaatatgaacatcaaaaaagaccggttgcagcaaaaccggtcttttatcacttcgtcttttttaaggttttggcataatcggcggcaaacgccgtgctgcttttcaaaaacttgataatggtttgcagttcttcctctgaatatcggcttagaaattcggcagactcttgcgccaagtcatgaaatatatgtgatatcgtctccagattttccgggatcagttcgactaaaagacgccttctgtcggacgaatccctgatgcgtctgacatagcccgctttctcaagacggtcgatcactcctgtgatcgctcccgttgtcagtccgctttttgcggcgagctcccccgctgttacttgaccttcccgcgagatgatctcaaggcatttatgatccgttccgttcagtccgattttctcgccgatcgcctggtgcagaaaaacggttgctgtgctgtgaaacctcaactgctgtatcagctcgttgaccagcccttttccttcaatatgatttgttcttgacatctgtaacacccttctataaaatcattatgtcttagcagctaagatatttatttcctgatataaatcatcataacaggatgaagcgtcgatgccaaacgctgctttagaacgaatttatttaaaggagaatagattgatttgtcacaaactcaaaatcaaaaattaggatttgttgtagcaggacttttgcttgccattctgatggcttcgatggacaataccatcgttgttacggcaatgggaacaattgtcggcgatcttggcggactagacagctttgtctgggttgtatctgcctttatggtcgctgaaatggccggtatgccgatattcggcaagctgtcggatatgtatggcagaaaacgtttttttctttttggcagcatcgttttcatggcgggatcagcattgtgcggaacggctacaaccattgagcagctcagcatttaccgcgcgatccagggaattggcggaggcgcgctcattccgattgcttttacgattatctttgacatttttccgctggaaaagcgcggcaagatcactggacttttcggtgctgtttttggcctttcgagcattttcggaccgctcatcggcgcctatgtcactgactacatcagctggcactggattttttatatgaatctgccgctcggtatggtttcttttattttcattcttctattttacaaagagacgaaacagcatgaaaagcatcgcattgattggctcggggcgattacgctcgtaggggcggtcgtatgcctcatgtttgcgctggagctcggcggcgggaaatacgcctgggattcgaatgtcatccttacccttttcggaagtgcagccgtcttgttggtttgcttcctcatgatcgagcgcaaagccagtgaaccgatcatttcgtttcatatgtttaaaaaccggctgtttgccggcagtacgcttgtcgccttattttatggagggacatttatttcagcgaccatccagattccaatctttgttcagggcgtttacggagattcggcgacaaactcgggacttgtgcttttgccgatgatgctcggctctgtcgtatcagcccagcttggcggattcttaacaacaaaaatgagctatcggaacattatgctcatctctggattggttctcgtcagcggattttctttattaagcacgcttaacattgacactccgcgtttattattaaccatgtatatgatcgtcgtcggcttgggagtcggtttttctttctctgtattaagcatggcagcgatcctcatttcggcccggagcagcgcggctcagcgacatctacgagcaactttatgcgctctctcggcatgacgatcggcgccagtatgttcgggatgattcaaaaaaaccaattttcagaacagctggaagatatgtttaaaagcagcggcgcttcaaatttcgcctcaacgaatgacgccgaccagattttatcaagtgcacgggcatcactgcctccggatgttttacataacatcaccgaagcgctatcaaattcgattgttcacacgttcatttgggcgatttccccagcagcggccgcctttttactggtgttcttcatgccgaatgacagggtgaaagtgaacgcaaaaaaggaagtgaacaaagccggctgaacctctagctttgcactgccttcttttttctcattttcgaaaccaataaaagcggaatcggcacaatgccgaataaaacggccgcaatatagccgatcatgtcgccgagagaaaatacatcatcaatgttttttggcgtcatcgcaagcaaatacatcaccggtagcagcccgaacatgatcggtctgctctttttcttgaaaatttgcgagagccccagggatgcagcgtaaaatgagacggagaaagtcgcaaacagctgcataatccagatgacaagaagcagcgattcaaaacgttcaaatattaagccgggcatttcaaaactgcggataaggtcaagcgccggccatgtcatcgctgtcaccccgtcaactgacagccctccgatcacgaatacgatcgttgttaagtaaaagagcattgcgatgccgattcccatgacaacgactttgataccatctttcggctttttcataaacgccaaaaggaacaccatcacttctgcgctgataaacgaaagcgttgttgcttttgtcccctttaatgccggcatgatgcctttccctaggacagtccgcaggttatccagttcaaatatgccaaagctcataaataccacggttaaaaagaaaagaattgtaatcggaaagatgatttcaaacaaacgggcaagcgaccccattccgtcttttattgaataaaatccgacccacatcatcgacatgacgatcgcccaaatcggcgtttgctgcagcaaaaaaaaggtgatcacctccgccagaattcttgcttcaaaagcagcaatcgctacaaaatgctcaatgaaaagcaggctgatcacaatgctgagccactttccgacaatgtcttccccatattgaaaaaatgttagcccgggataatcctggcttaactttgtcataaccactccggctgccgttgtgacaagtccgcctaataggacggaaatccatacatccggcgtaccggcttcttctacggcggttcttggcagggtgagaatcccggccgccataatataactgaccaagacaacgattgcctgagaagtcgtgattttatcttcggaacagatcattgcgcgtttctccgcctttcgtgattagaagttcttctgttactgatccccaacggttccgtattctttaatcgcgatttgaacatgaaatgtaatcggtatatcggtaaaggtctcatcccaatttttctttagtttttcccaaatcctcggatgcttgatcctcaactcgtttccgaatccggccagatctgctttgtattcggttttcattttttttgtaatgtcctccatcgattttttcactgttttcgcggttgttttttcgactttttctaaaaatttgtcatcaaaagctttttctttcgtgttccagttttccgcaagatacccctctgactttacgttcacttcaaaagacaggcggttacctttgacgatgggctttatgttgcttttaatcgattcaacgccaaatgcggtcaccttcttttctgtcggatcatagcttttgaccgtacctccggtcccctttccggtaatccacattacgccctctacatcctgttcatccaaatagccgatcagcttattggtttttccattgatcgcagctgctcccgcatatttgacttctccgtcggtaccgatgacattttgaagaagatagcttgttcctgatctcattttgcctgtcagtttggcaagtgtcacagggggaaggatctttttcgctttatactcattttcaacgattttacgcagacgaaacgccggcatttcgccggtttccttcagctcaagcgtgtctcttgcacgccctcttgtgacaagaaccatactgctcggcctgatttcattatcgcggagaggctgatctagcagttccgccagcgaataggtgcggaggaggtcagcggcgatgacaatcacctttaaatgaggactgaatacaggcctgtcctgtcttaatgctacttcagcattaatttgctgaagcgagtctccagtttcataaacgttgatatacgtcttttgatcagtgcttcctccagtcgattttgaaccggccgcttgttcgttcacgtattgatagatcatcgtgatccggtcttttttcggataatcgccccccgctttgtcaaactttttttcaagttcggtttcctcgcctttgtcaatccccattgcaaatgttaagccgagctcttcaatttcgtggctgctccagcacccggttaatagaaacattagtaaaaaaatcgttaaataacggatggtgttagtttttttcaaactttcccctcctcactttcgatatgaccagaagcattagcgggatgaagccgactaaatagatggcgctgttgccgattagatctcccagttgaaaaagttgattaatatttttaggcatcatcgcaatgagataaataaccggaagcaagctgaataatatcggttccatccttttcttcaagagttgcgacagacctaaagcagcagcaaaatagctgatcgtaaaactggagaacatttgcatgatccatatcactagcagcaaggactcaaagcgttcaaaaatcagacccggtatctcaaaactacgcatcaaatcaatcgtcggccatgtccgtgacgacactccatcgattgacagtgcaccgatgaccataatgacggtgatcatataaaagacaaccggaaaagaaattcccatcaaagtagcttttaacgcttgctcgggctttctcataaaaggaacgatgatcagtatgatttctatgcctgtataagcaaaagacgttgtcttgactccttcaagcaccggcatgatccctttcccgagaaccgggcgcaaattgtcgatcaaatatgcttgcgctcataaaaatgacgatcagaaaaatgagaacagtaatcggaaagacgatttcataaagtcgggcgatcgggttaataccgccggttaataaatagattccgctccataaaaaaaccatcgctgtcgcccaaagcggcgtttcttccagtaagtaaaatcccataacctctgtgacagaccggacttggaaacctgatgttgcgagaaaataacaaatcaaaagcagggtgaaaagtcctcccggccacttgccaatgagatcccggctatattgatatagcgttttgtcgggggactccatgcttaatttcaccatgatgaaaccggctaatatggcaaccagccctccgaatgcaacagaaagccagacatccggggctttaaccgcttccgcagatgtccgcggcagcgtcaagatgcccgttcccaacagaaaattcgtaatgacgatgccggtttgtgaaacggtaattttatcctgctgactcaccatcatggagaacccccctttctttttcaagcatcagctgattccctgttttctccttcttatttttgaaatcaccagcagcacgagcggagtcaagccgcctaaataaacgccgctgtttccaataaagtctccaaatgcaaacatcgcgttaatatttttcggaatcattgcaatcagataaatgaccggaagcaaagcaaacatcatcggccgaatatttgttttaaagagctgggccaggcctaatgccgcaccataaaaagaaataacaaaggtacagaacagctgcatgatccagatgaccagcagcaaagactcaaaccgttcaaatatcagaccaggtatttcaaagcttctcatcaaatcaatcgtcggccaggtccgtgaaactaccccgtctatagacagggcgccgatcaccataacgacggtgatcatatagaaaagcagagggatggcgattccgatcataatcgtatgaatggccttgcgtggctgattcatgaaaggcatcaggatcaaaatgatttcaatacctgaaaaagacaatgcggtcacctttattccttttaaaacaggccctattccctctcccagtacaggacgcaagttgtccacatcaaaaattccgatactcattaaagcgaccagtaaaaaaagaatgactgtgataggaaaaacaatttgaaacaagcgggcgatcgcgcttaagccgccgacgatcaagtataagcccacccacaaaaaaaccatcgcaattgcccagcggggggttccttccagtaaaaaaaagcggatgatttcaagcgttgagcggacctgaaaaccggaatgggccaataggtaacaaacgaaaaacaggctgatcaagctgccggtccatttgccaatgatgtcctgactgtattcataaaagcttttatcaggatattggtggttgagctttaccatgatgactgcggccgtcagagcgaccaagccgcctaatacaagcgtaatccaaacatcaggcgtccccactgcgtcaacagacgttcgcgggagcgtcaggatccctgtcccaagcaggaaattggtgatgagaactgctgtttgtaaagtggtgatgcgctcttcgtgcctgaccatcatgagcatcgccctcctttctatgctactggcgtgacgaatcgtctgtttttaacagcttcggccgttttttcatgatctgtatcggcatgcgaacgatgaaatctttccaatcgcgcaaacgataaggaacggccgggctcgcatatggaacgccaaagcttttcagcttcaccgcgtggctggcaagcatgaggaaaaacataatcaccccgtacaaaccgaatacagcagcgcaaaacatcgctacaaatctcagcatgcgcagcgaaatgccggcgctgtattgaggaatcgcaaatgaagaaatcgcggtgacggcaacgacgatgaccataatcgggctgacgatgcctgcctgcacggcagcctccccgatgatgataccgccgacgattcccatcgccggaccgattggttttggaagccgcaggccggcctcgcgcaaaatttcaattgccacttccataatgagcgcttcaatcagcgatggaaaaggcacacctaccctcgttccggtaatggaaatcgcaagttcactcggaatcagcccgggatgaaacgaaataaaggaaatatatagagccggcccaagcagcgagatcatggctgcgccgattcgcatgatgcggatcagggaactcggcagccagcgttcataataatcctcgggcgattggaggagcatgctgaatgtaaccggaacgattaaaacaaaaggtgttccgtccaataaaatggccactcttccctccattaacgcactcatcaccctgtcaagacgttcagtgctttgcacctgcggaaatggactgagataattgtcttcgatcagctgttcgacaaaacctgattcaagcacatcatctatatcaatcttttcgattctttttttgacttcttccaccagccctggttccgcaatgtctttgatataagcgacgacaagatttttgacggctcgcttcccaacttgaaattgaaccatagacaagttttgatttttgccgtgctgcctcaaaagggctgtattggtgccgatcgtttctgtaaagccgacgcgcgcgcctcttaccaaagattctgatacgggctcttcaatgttccttgtatttcttttaacagttcccagcagtaaaacttccgctgaaccgtcgatcagcagcatggccgtaccggataacacttcgggcaccacttcgttgacatggtttacctctgatacgccgctaattgataaaatttgctttttaattaagtcggtcacattgctgcttaatgaagaaagttcaactttatattctttagaaaaatcatccataagggatttcataatatgcttgtcaatcaggtcttgatccgcaagcatttcgacaaatacaatcgccgcgcggatgccggtgcggcctaagttgaattcgcggaaatgaacgtctgagttattctccatagccgttttggccagtttcaagtcgtgatcaaaatcgccggtaaaatacccagttgactccacagacggcacttcatttttaggtttttccggcttgttggacgactgtatcattcttcgcgtttttgctttccaccatctcatgccactcactcatcccctgccgtgcgaagccacaaaaatacttttgatatggcaaacgggacaaaaaagacaaaaaaagcctgcatcaggaccagccagtccggaaaataggaaacaatggttttccacatgttgatcaccctttttcattgctgtagtaagtccatcatttttatcctattattaccttgggtgccagctataattggtggtaatttaaaccacgtcaaacaaaaaagaaccatctgcgttaaaaacacaaatggttctgttcatttattctttttctaaaaacgcccgtttgcgtttggccagctctgaaaactcctgatccaattcatgatatttcggatcttgaggcgtgagtccggccaactctccaagaacggcggtcatccgattttcgatgcgcagccgctcctcttcatcgctttttgcatggggctgtttctgtctgttccgataatcttttaatccggtttcgacgcgggtgatacgaccgttttcaaatacaaggagcttctcacacaatttgtctgtgaagtacaggtcatgcgacacaatgatgatcgttccctgaaactcaagcaatgtctgctcaagctgctccctgcttggcaaatcgaggtggttggtcggttcatccagaatcagcagatcataatcctttaaaatcatgcctgccagtttgattcgggtccgctccccgagactgaacgtcccgattccatcatgaaagcggttttctttgatccccatattggccaaaatcgtccgcgcatttgcgatttcggctctgtcagacaaattcagcacttcagcaactgtttggtcaacccttagatcactgacatcctggcttaaatatgcggcctttacagactggcttttccatagcgttccggctgttgcaggttcagcatccaacatcatcttaacaagggtcgttttgccgcacccattgtctccgataagcgctattctctcgccatgcttgacgtaaaaatggctgtctttgaataaagtacgtccgtcaaacgcttttgccaggcctttagcttcgataatccgcttgccccttttttctcctgatgaaaactgaaaattgacagatgccgcttcctttggcttttcagctttgtttttttcaagttcctgttcaaggcgtttcagttttgatttgacttggttgtcgagctttttggcttttacccgatggtattctttaaaaccaagctgccttcgttctgactgtgatccctgttttgttgagtcgcggtgggctttctgcgaccaattttgaagagtggcaatctgtgactcgattctttctttttgcttctgctggacttcgtattggtgcaggcgtgcttcatataaccgttttttctcccgccggtatgcactatagtttccttgataggtgtgcaaattcccatcttccagttcgaggattttggagacggattgatccagaaaataacgatcgtgagaaataatcaatactgccccttgatattgctgcagttcttcaaggagccaactgatcccttttaaatccaagtggttggtcggctcatctaagatgaggagatcaggcatcgtcttccagacgtgtgccagtgcaagcttcagtttttctcctccgctcaaatggctgagccgttcggaattccagctttgaacctttgataagccaagactgctcgtcaactgatataattcccccccctcatcgcctgttaatatgctgttgaaatcatgaacagagtactcaatcgactggagcagatagccgattttgagcgtccggtctgtttgaacagtgcctttgtcggcttctgcatgaccgctcaatatatttgcaagcgttgttttccccgctccattgcatccgaccaaaccaatccgctcatgattggaaatgtcaaaatcaatgttttttaaaatcgtttgctctccaaagcttttttccaagcctcttattttcattaaaatcgtcataccgttcacctctgtttatttttggctgacaacaaaaaacctctcgcggaaacccggagaggatatcatgccaaaatatgcatcgtgaaagcggtataaaccgatcccattccattgcacgacaaaaaacatgcaaagtcagaaaatgatgcaaggtataaaagggcatactcatcctattctccaagtttccgttttttcatattaaaaaaacgatggaaaataagattactgcttcatgtcccctatacctatcctttcactgtatttaccgataagtatataaacggagggaaactttgtcaacagttatccagcccattttccgtcaatacagatactttcgcctttgttgaggattttgttttgaagccaaaatttttaaatttaatgcaaaagtgtgaaaattgtccgatattattctcgtaacctagaaaaaggagttttggctaatggaaaaaatattggactggttcaagcatccatctctttcaaaaagattagcggtctcatttttattgattttaacgctccctgttttagtcctttcaggtgtttcctattatacggcaggcgggtcgattgaagatgaaatcatgagaagcgcaagaaacagcgtggatcaattaaacgaaatgatcgatcaaaacattgagaaaaaagcggatgctgttacatatttcagtgaagagatcaaagaaaaaacatacaaggaaaaaggccagacttcgttaagacaaaagtttgaacaatacgccaggcaaaacagagatgtagaagccgttttcacaggctctgaagacggtgtatacgtgcagcacccttatacgaaaatgcctgacggctataatccggcggaaaggccctggtttaaagaagtggttgagaaaaaaggcgaaattatcgttaccgatccatacacatctgccgctaccggcaacacggtcattaccatcgccaaacaaaataaagacgggtcgggcgtcgctgcgctcagcttgaatatcgacgagctgattaaagcgacaaacgatatcaaagtcggaaaagacggctttgcttttatctcaagtgcgtccaaaaaatatatcgcccacccgacgattaaagccggaactgaaggtgaaggcggctgggttgatcaagtttacggcaaaggaaaaggcgaattcaagtatacttttgaaggaaaagccaagcaaatggcttttacgacaaacaaactgacaggctggaaaatcgccgggacgatgttttccgatgagataacaaacgcaacaaagcccgtcctttatatggctctcatcgtcttttcaggggctttggtgcttggcggagttctcattttctttattgtccgcgcgattagcaaaccattgaatcagctcgttctatctgcaaagaacatcagcagcggcgatttgacacagcaaatcgaagtgcgttcaaatgacgaattcgggcagctcggcaaaagcttcaatgacatggcggaatcgctccgcacactgatcagcaccattcaggaatcggttgagaatgtcgcctcctcttctgagcagctgacagcaagcgcagaacagacgagccaagcgacagaacatattacatctgcgatcgaacagttctctaacggggctgaaagccagaatgaaaaagtcgaaacgagctcacagcagctcagccagatgaatgatcatctgagcgaaatgaccgaagtgtcggaatcaatcaccgaagcatcgatcaaatcgacagaaatcgccgaaaccggaggagaactcgttcagaaaacggtcggccagatgagctcaatcgaccaatctgtcaaacaagctgagagcgtcgtcaaaggcctcgaaggcaaatcgaaggatatcacatcaattctcagggtcattaacggaattgccgatcaaacgaatctattggcattgaacgccgcgattgaagcagcacgcgccggcgagtcaggcagaggattttccgtcgtcgccgaagaagttcgaaagcttgccgcccagtcagcggactcggcaaaagaaatcgaagcgttgattcaggaaatcgtcaaagaaatcaaacattctctcagcatgtttcaatcggtcaaccatgaagtgcagtccggacttaaaattaccgagaaaacagagtcgagctttcacgaaatcagcggcatgacgaatgagatcgcaggcaagctgcaaacgctcaatgcggcggtcgaacagttgtcgaatggctcgcaggaagtctccggtgccgttcaggaaatcgccgatgtatcaagggaaagtacagctggaatccaggacattgctgcatcagcggaagaacagctggcttcaatggaagaaatcagtacatcctctgccacgcttgagcagatggcggaagatctgcgagaattgacgaaaaaattcaaggtgaaataaaaaagagaggcttccttcatttagagggagcctctcttttatgtatcagctgatcttcgttccattgggcgcttcttgatcaggggtcagcaatataacatcgcctttttccggtacgcctccaagaacgagaacttccgatttaaacccggcaatccgccgcggcggaaaattgacgactgccgtcacctgccggcctataagcttttcaggcgtataacgctttgtgatttgagcgctcgaacacttgacgccaatctctccgccaaaatcgatttcaagcttaatggccggtatcttcgcttccggaaactcttctgcttttaaaactgttccaacccgaatgtcaagctttaaaaaatcttcgattgttgccatgaattcagctcctttggccgcttactaaagggtgatattgacatgactagaatatcatgtattttgattcgtttaaaccctgaactttcgctgcattttatagaaccgagtagtatacaggccttttttgccgccgttttaggacagccaactttacgggaaccgcctctcattcatagattaagaggaagaataaactataagagatgaggtggagctaggatgttcggttcctatatggttcaaatggtaaggtccaacgcccataagctggaccggccgctgagagaaagcgtgctgaaactctataaaccttttaaatggacgccttgctttttacacgggtttttcgaaaaaatattaataaaaaacaaaaaaataccggtcataattgaatttgaaaaagactgtcagcataaaggctatcaattagtcgatgaaatgatcggcagcaaaagaagaaacaaaatcaagcatcgcttctcctgcgttaactgctgcagcgctgaagtcaccccttcttctttgcaatcgcttctatctgagtgcggcgacattcgcaaaatttatttaaatcgcaaagtaaaagcgctcctcgacgtagcggttgaatcaagccatgccaaagaagtggtcagaaacaatcagacgctgacaggcaaaggagtgacagtcgctgtcattgatacgggcatataccctcacgaagatcttgaaggcaggatcagggcttttcaagactttatcaaccagagaacagaaccctatgatgacaatgggcacggcacacactgcgccggtgatgcttgcggaaacggagcggcctcatcgggtcagtaccgcggacctgctcctgaagcagaacttgtcggtgtaaaagtattggacaaaatgggatccggatcgctcgaaaccgtcattcaaggcgtagattggtgcattcaattcaataaggaaaatcctgatgatccgatcgacattatttcaatgtcattgggtgcagaagccttgcgctacgagaatgaagaagaagatccagtcgttaaagctgttcatgcagcatgggacgcaggcattgttgtatgtgcggcagccggcaactccggtcctgatgcgcaaacgattgccagcccgggtgtcagcagcaagattattacagtcggagccttggatgacagggatacagtcagccgggaggatgacgatgtcgcctcttattcaagcagagggccgacaatctatggtcaagtcaaaccggacttgctggtaccgggcacaaatattacgtcgcttcgttcacccggatcttttctcgataagctgcaaaaaacaaacagagtcggcacaaaatatatgacattgtccggaacctcgatggctacgccgatctgcgcaggaattgccgcacttatccttcagcaagccccgggcacagaacctgatgaagtcaaacagctgctaatggacggtaccgatttatggaaagatcgcgatccaaatgtttacggtgcagggtacatcaacgcagaacaatcggtgccgcaagactaaagaccgttcgcccgtttttgcaataagcgggcgaatcttacataaaaatatttaaactgcagaccttcttttttcaaggatgagcggtatcgtcaaatacatggcatacgcgaagaccatccaaaccgcaaacccaatcatctggccatctgaaagcgccgggaagatcagcgaatgattccataaagaaaaagcgtcgagaaacaaaccgacagccgaccccacaatgccaagcttaaccgccgcaaacctcgttttgtcaacccgccgataaacgagcatcacggcatataaaagggcaaaagttccggcttcaagaagcaaaaagcggagcataaaaccatcttggccgggttctgtaagaaccgcactgccgaacagcataaaaaatacggtggcgccaagccagacaacgattgaaaaaacaagagccaaacccagcttttcagtcaacttacccatccctttttactcccctccatgctgtttaacagcggtttccgtcagcatctgcagcacagtttctaattccctgtagattttttcaggggaaaatcccggagacataagcgactgaagtgcaagaccgtcgattagtgcgtttaaaagaatgccccacgtgctgaaagaaaccccgtcaacaggagaacgcttccacaggtcggaaagctgttctgccaacaccgcattttcctcttcgagaagttcgccgagctgttcttttatcttttcatttcgaaaccctaaaacggccaattctaaaaaaagctgatgataatacgcatccttcagtgttcttgatttcgcggaagacaatccgtcttttatcctttcggcagcgggcttttcatttgctttcaatcgctcccacgacgcgcggcataggtcgcggaccacttcaaaaacaagctgctcttttgtccgaaaatgatagtaaacagttccctgtgtgacctttgcttcttcagcgaccgcttttaacgtcagtttgtccagaccatgttcggcaatgcggcgcttagccgcctcaatcaacgtttcttttgatgtcacatttggccttgccattcggttcacctcttagttattcaaataactaacttgatggtttaactataatatggaaaatatttcttgtcaatcgattttcttctctcagccatagatttttaagtttacataataatattattgttagattgaattaatgcttcttatccgtttctgtcataaacgtcagcccttgaaggaatttcaaaatcgctccctgttctgctgttgaaaacgaatcgagaaatctgctaaactgatccgctttttgctgatggagcttttcatgaagctcaaacacttgttttccgctgggcgtcagcctgaagtatatctcttttttgttgtccgtcaattgaaaccgtttgatgaggccttcttttaacagctttgaactgatttttgtaatatttgcttttgataaattcattttttttgcaatgccggtgttgttgatcggttcatcatgaccgatacagctgatgacatggatggtagtcatattccccgggagccgtttaacatcagattctgccgcctgctttaaaaatgctttgagatctgtatccgctttttgttcgttcaggtgcaggagtttaacatacatatcatagatcagctgttttgtcagttcagacatagtcaatggacagtcccttctttttattttccggttaacaaaatattttaatagttaatttcaggatttgtcaatattatgataaggtgaaatcagataacaaatgtgttttgtttatcatgaaacaacaccaaaaaggagaatcgctgatgaatattgaaggaatagagatggaagttcgctgcacaggcgatgtatgttcagatgcccttgaatttttgagacgccataaccacgaaaaaacagccgaacattcgataagggtgaaacaagcggcagaaagattggcaaatcgttttcatgttcctgcacaaaaagctggtatagccggtatgatgcacgacatcagcggtgtcatccctaatgaaaaaagaattgcggctgctgaagcgctcggtattgatattctgcccgaagaacggatattcccgatgatcatccatcaaaagctgtcgaaagtgatggcgcgggacctgtttcaggtggcggatgaagatattttaaatgcaatagaatgccatacgacgcttaaaaaaaatccctcccagctcgaccttgtcctgttttcagcggacaaaatagaatgggatcagacggggactccgccttacatcaaggagcttcatgaagcgcttgaaatttctctggagcacggggcgtttgtttatattcagcatttgtggaaacaaaaagataaactgaaagttgtccatccctggctgaaagatgcctattaccacctaaaagcaaaaatcgaagcttgacctcaggcaagattacggcttgaagaggtgaccgccttaagccgtaatcttacttgtaactccgttaattcacgccttttgaagcatcccagattttcagctgctttctcatatggacgatttgccccaaatgataagcattatgaagaatgaggcaggacaaaatctccgcccaggtagaatgcggatcgtgctgagccggttgtttcagcatctcctcttcgcattccgaaagcgcatcgatccattcggcatagatcgtattcagttcctgccggctttctttccagccaagtccgcttttgtttacaaacgtatcatcgatcgtataatcaaaagccggaacgggaattcctttaaaccgctttaaatagcgctcgttgtaaaaaatcaaatggttggcaatttctaaaatcgaattttccgaaccttcccctttttgccttgcctggctttccgtgagatcagcggcagccgtttgaaaacaaacaaaccaagtcgtttcgttatagcatgctttaaactgttcaagcaaaacgttttttagcataaagaccctccagttcgattcgatttttgcctagctttcatttgctattttcgcccttttcacggcagaatcctttttttcaatatgatattgaatgtcgagaaaccgtatgccgaacagccacatgcggtgatgggcgcagagcctctttcgtccctgccctttaatgataaagcgttcggcgagcggcagtttaaacgttcctgttccggtcgaaaggaagatgccttcatccccacggtcagatcgtttatcactgctcgtcaaaatcaggcagccgtcctctgctttcggctttaaaatgcctgtcatattggaaaacggcaatggcagcgcgatattcatatatgtgatgtgatcgtgggtatgagcagaataaagcgccacaaacacagtctcgcctacctcgttcgttctgatccaggcgcgcacattcttccttccgtctctggctgaatcaacaccgataatctctccgtccatcgtttgccgtccggtcttagtccccaaatgaatttgtcctgtctttcttgaaatcagctggtacatgtgcgcgagcggcttaaaccatggacgccaggagatctccgctgttaacgaataatcggcagtatgctcatagaaatcgagaataagaggagaaaccttctcaggctgaaatcctttgctctgaaatgcgctcatatcatcggcaagaccttggtaagacgaatcggtttgtaatcggtgtctgtgtaaaaaatcggctccgatcttccaagttccgtaaatgttgctcatcgtttcgccttgcctcctttcacagcccggcccaagggattcaaggcgccagccggtcagcgctggaatgatgacgccaaaggcgttgacaagcccgtgaatccaaatcatttcctggattgtaaaagtcgtccggccgcgaaaaacgccgtaagagtaaatgagtgaaaaagcaatggtgatcattaatgtaaaagacgaaaagataacaaagcggcgagccgcgctgtttttgaaggccgtaatcgaggcgagaaagccgcttccgtatagggccgacaaatacagcgcaacagcgatgacatcaatggttttcgaaaacgatatgccgatggcaatgaacagcggagacagcatgatgagccatgtcaccgccgcataaaggaggcctttctttttcagcttccttccgagcattccattaaaaatcggaatgagaaatgcagaataatgaaaatgtaccgctgtcagcagcacaatcagcgggctgaaatccatgacctggagattcagcgtataagcacaaagccacccccctccaaaaggaaggtaaagcaggccgctgtcaatcgatgcctcttcaaggctccttccttctctctcccagaggcgaagtgccccgtataaggcgatcatccccgtatagcatagccaaaccaatgaaaaaagcggggaatggaacagcagtgatagcgatgccgaacaagccgcataaggaaaacagacgctgatcagccgaaacatcccattttcatgctgaatgagatcgagcgcagccggaacaaaaaacagcattgataataaaagaagcgcctctgccgccgggatatccggcgctttgccgatgaaaaaaaccgcgtagcaaagaacgcttacaaaaaaacggcgggctttcatgccgtctcctcctccctgttaaacgttcctctgtaggcaaacagcgttccgaacagcgggtttttcacatgaacgtcaattgtaaaacagcctttttcttcgtcatacgattcattcacgctggaaataccgtataagcactttggaaggggcagcttttttctgaataaaggcagccattgtctgacagaagtaatcgataatgagccgtcggcctccgccttaaaccgcaggcttgagattaagattggcggatgcccgaaatagtcgatgatttcaacacggcttttatcatagatcatgacagcatcgaaatgcctttgtttatcctgaaaaaagaaagtcctgttccaaacggctgccggtgtatcatttttcgtcagccgaatgtgattttcaatcgtgaacggaacgttcctccccctttcgggaaaaaacagcggaagaccgttcccgctttgaacaacagtctgacccagtatgaaccgccggaaatttccgtcatcactccttttcctttgaacacgttttccttgagttttgggtggagaaggtgaaaatcctcgatcacccgttcatacatcgaaatcaaatcaacgcctctttctgatcgtatttcccgcgtttggaatgccgcaagcgctcacatagccgataacggacaagatgataagtgcggcattgagcacgaccgggttaaaaggttcggcaaaagatgcgatatcagccattcccgcggaggcagaaagcagcacaagcaggacgatatgcagaagaaaccacttccttttccgaacaggataaagccataacacgccgaccatcacctcggctaaaccgataagcctcaggagcgtttcgggatggaaacggccgcccgtaaaagccgaaagcatgctgatttccccagggtgagccatgatgagctttggaacaagcccttggtaaatccagacgaaagaaaacagcagacaaacgagccaatagactaatgttttttgaaaaagcagccttggatggagccctttttcaagccaaatcttcagtgcatcaaaactccaggccgtcgcccagccgaggagcggcctgaatgccatatctgcaagccggcccagcctaccgtaacgggtgtcataatcgtattgtgtcataaacgtgatcccggtttcgctctcgctgtatttccaatatcctcttccttcgcgaatgacagaaagcgggtggtttgtagcgaacttgagtgacgagactctgtctccagtatcttgaaatacgtttccggcagactccccggtgccggagatttttaagccgaagccgattctcgtttcgtataagaacctctgaggttcacccggtctgcgctttaaataggtaatgtccgtaaatcgcaagtcccattgccgatggagggttgggtcttgggtatagcgccatagccgctccatttctgtctggatggatatttctacataaatcggagtttttttcattgtgcacacccttttgtgaatatattcacaatgatagcataacatggaacacacgatgtgtgaaccaatttttgcatatcaagtctctctttgccgacataaaaaaatcctcggctgttaggccaaggcaattagtggctggttaagccttctcatacctatgactcaaaaaatggaagagccatacgacaatcatactaaattttcgaaaaaatgtaaacaattaagaaaaattctcttgtttattcggtctgatagacagcaatgccttttaagaagacgcggattgtcagatcaagactttcttctacatcataaggaagaccgaacgcatcgtgttgcctgagtgcggcaaatccatgcaggatgcttctcaagcctctgaccgcatgaatcgcggcttcatcatctaaatgatagtctttcagaacggaaagcaccaaggcgaggactctgtctcccgcctcgtcaagccgtccatcttcatcgggcattgcaataaaagttgcttcataaagccccggtctgtttttggcaaaagcgagataggcatgagccatttggctgacagcctgattctcttcggctctctggatagccgaagccatgttttcataaagaatcgtcaagccgtaaagtgcgagttccttccgtaagtcgttcaatccttttatatgattgtacagagacggagatttgacattcagccttttggaaagtgaagcaagcgtcacttcatgaatgccttcctcatcagccagagctgcagcagcttccaatactgcgtctttattcaaaccgattcgcggagacaagattccttcatcctttcctgtttaatttgatgtatgcttcgtttaccgcttttttcatcgcttgagccggatcatggacaagatcgccgtggccggcggcaagcgcctttggttttaaatctaacagcttttgtgcgctttctaaagcgatttctttgtcccatgtggccaaagccggaaaaggaaatgaaagctttaaatgccccgataccgtcatgccgcttcgcgtatggtacgcatcaccgactatgagaaggccgcttctttcatcaaaaaacgaaatgctgccaggcgtatgcccgggtgatgaaacagtcagcaatgaaccgattctgtctccttcctttaaaaagatatcaggatttgtcttgatgtttttcggaacgcctcctttgattattccgcgctccccttccagcatctttgtatcgccttttaacagacatgcatcccgttcagatattgacaccttcacacccggaaggctgtggtacagcgcgtcaagcgaaccgacatggtcgctgtgggcatgggtcagcaaaatccgcttaatcggcttgcggaggtgatccgcagcctttaaaatcccggttttgctgatcggaatccctgtatcaattaatgttagaccgtcttcttcatcggctaaataacagttgacaggaaatatgtgcggaaaaaaagtcagctggtaaacagattcaaatcgggtcatcctcataacttccacctcttccatcaaaataaaaaactaataccgttagtttccattttaaaactaacaccattagttttacaagctttatttttttcgatcgacagcaatataaatggcaacttgagcattttcgggattcactgcttgttcaccataaacttcataatctccggtatatgtacggagatttttctcagcccatgtccaaatctcctgccaagtctcaaacacgacctcttcgatcctcccccgccttgaaacaaaaacggcatattcggatgcagggagcgaaatcacattggccgctttttcatgctgatcagcgaacgtaccgattgaaaatgtatacgccccatattcttccgactcataatctgaataaagcgcaatcgtatctctcttcatgtcctggcgttccttatgcggaaatctttcacggtataaactccacatggaaggaattttacctttttcggttgcttcattttggttgcttgttacggtggataccccgctgaataactttgccttctgtttttcgaaatgagaaaagctcatcttccctgcccgccttccgtttgcgccgccgcccatcgttttaaataagggagtgtccgcgacaaaagcgctctcgcttcggcctcggttttccctcttcttttatataaggcacacagatttcgatcatatctttcaatgtcgcatctggatgagtataagctccgttttcatagcagtaaatgcagtagtcacgactgttccccccgtctttttctgtgccgaaaagttcgcttgtcatcggcatgccgcagctttggcaaaaataatgttccatgtttcattcctcctttttcttcatcatacaaaaaagaaacctgacagcatcgtgtcaggtttcgtataaatgtacaatttgttttgccaagtcttttattttttgacggatgcgaggaggatcgagaacttcgatatgggttccaaattggagcagaaatccgtacagccattgatcttccggataagaaatggttgccacgcattgtccgttttcataagtgagagcttctgagccgaaccattctcttgccaaagactctcccgacggcttaatgagaagggtcacctcggtcatattgtccggtttgtaccacgatgtctcccaaggaagtgaagacagatcgacttcctttctttcaaacttttcttcaagcatccgcacgtctttcatccgcaacagtttaaagaagcgaaacgcctgtctcttcaggcagaaagcatacaaataccagtgccttccctttaggacgagggtatgcggctccgctttcctttttccggtctgcccctctctgtccacataattaaaggagaccgcccgcttgctgtctgacgcttcatccagcaagcggatcttttctttgatgacaggactttctccccaggaagagatgtcaacaaaccatttttccgttttcttgcggaattccggcatttcttcttccgaaacgagaaaccggattttttcaagtgcagacccgtgatggagcacttcgtacgtcgaggaaacgctttccaaagccgtcgtaatggccgccagttcgtctgctgacagcagcttattttcgagccgaatccgctccatgatgctgatcccgcctcctgctccctgtgaggtgacaatcggaatgcccgcctggttgatcgcctcaatatcccgataaatcgttctgacagagacttcgaacatgccggcaagctcctttgcctgcacttggcgtttattaatcaataaaatcacaatggccaaaagccggtcaattttcactgcagatccctcacattcatcttgtgcagcctctttttttctgctattttcattccatagcacacaccattctgggatatcatgacaaaaaagaggatctcatcacccatttatctagaaaaccacttttcaggttacgatttgtacagtttggacatatactccttaaaaaaggaggttttaaaaacatcatattttattttttgcagtttttcatcattgtgtccatcgtctatatcaagttcaaacggtcggtcggttatcagcctttaaagccggcacgcatgttgttccggatcatccttttttcgggaattttcgtttttctgctgacgatgagcgcacttcaccctttatcatacttttatgatctgattgggatcgcgctcggactcatcttgaccgtctatgcgctgaagcatgtgtcgatcgaaaatcggggcggagtcctttatttcagaacgcatttatgggttgaattgatcgtactctttttatttttataccggtttctgtaccggatcgccgagatcggccagctgcagactgcggtttcagacgggggttcggcagcttacggcgccctttttgcgcaggacccggcgacgatgatcggtttttttgtactggccgtttattatgtcggtttctctttttttgttttaaaaaaaggcagaaccgaagaaaagcgctcagcttaaaaaggcaaactcgggaaatggagtttgccttttaaactttagtcatgttgtgtatgatcgatcatctgctgaagtacatcgaggacatgctggtcttccggagaataaaaaatggaagtccctgcccttcttgatttgacgagacgaaggttttttaaaaacctgagctggtgagaaacggttgactgcaggagactcagcttctctgctatttcattaaccgaatgctcgccttgtgagagcaggtgaagaattttgattctcgttgggtcagagagcgctttaaacgtctgtgaaacgagaaataaagtttcttcatctaactcggcccgcacctgtttttctgttgtttcttgattgtgctcactcatgcttttcaccttttccgcgcgacttttacctccatatcatataccaaaacataccggttgaaaagttttaacggatcaagtcgaaaacagcgttccttgaagcgcttctacatatcttgcagcagacctctgcacacattctccggcgtttttttcaactgagcggcgaaaagcgttgtacagcctgttgaatggaacatcctttatttgatcagccatttgctgcactttgccggcgggaagaggaatcaaattcggatagctgtacataaaactcacccacctgcgatcttgaacaacttggataatgtctcctgaaaggaggattcccttgcctgcgttcccgtttgcccaatggcagaccgctccccctttaaaatggccgccaagcctgtgcaaggtcaacccgcttgatagcttgagagtttcgccggaccaaaaaacaatccggctgctcggccgctgcacccattgtttgtcatcttcatgaatatagatcggagcatcaaacatttcagcccattccgcctgtgcagaataataatgcggatgtgataaagcaatcgcctggattccgcccatctgctcgatgttctcagtcgtacgctgatccaggtatgtaatacaatcccacagcaagttaaagccgggctcctgaatcaggtacgccgattgaccgatgccgaattcgggtgttgtcgtcaaactgtataggcgctcctctacaaaggtgatctcgttttgaaacctcccgctttgcttcatttcttccagtgttgtccaggtttgccctgataaactgacatactgtctttcttcattgcaaataatgcattctgccggctctttcgaagcagcgttatattgaacgccgcacgtcgtgcaaatatggtttttcaaagttgcccctccccttttaaactatattttaccatcctcttcatgtatacaaatatttttatgtgtcggtatgctctaaagattcagaatgacctgtcattcgaagagtccggcaattttctgaaagcgaaaaaaagcgtccgatgatcctggacgccagttgcctatggttgaaacatttgttcaagctgtgaataggaaatgtcgccggccgcgcaatctacagcggcattgactacctgatcaaagctttcggccgaagcgcttttctcttttaactgttgttcatagcgttcgagctcttcctgctgtcttcttaaatcctcttcttttccatcataatcagatgcattcatcgtttccatatttcttttgacggcttcaacatagcctctcaatatatccatatcttcatactccttgccttttttcaaagggtttgcaacatttgttatttttatgcgaaaaaagaggttttcatacgcttgctcaagcacaaaaaaacagataaaatatgtcttaatttctgtattttttacataaggggatttagaagtcattgaaaaacgaaactgcgcttaaacgaagccttacactcggcccgctcgttgtgatcggccttgcttatatggacccgctcgtcgtatttgattcctacggagttgtcgcacagctgacaaagggacacgttccggcggcatacgtattcactgttgccgccctccttttgaccgctttgagctacggcagcatggtcaaagcttaccctaaagcgggatcggtttatacttatgcatatgaaagcattcatccgcatgcgggatttttagccggctggacgatcatgctggactatttgtttttgccgatggtcaactttgcgatcggcagcgcttatttaacggcggcttttccagaagtgccgcatggtttttgggtcgttctgctcgctctatccatcactgtcgtcaatgttttaggcatcagactaacggcaaatattacagggctgttcgtcgcttttcaagtgatcgtcgccctgacttttgccggatttatgatcgccgggctggcaggcggcctcgggacgggcgagctgatttctgccgatccgtttttccattctgatatcgaaccttccctgattgtgtcaggggcgacgattttgtgtttttcgtttctcggttttgatgcgatctctacaatgtctgaagaaacggtcaacccgaagaaaaacattccgttagccatctttctaacagtagcgatcggcggaacgctgttcacggcgatttcttatttgatgcagcaaatctatccgtcctatgataacttccggcatgccgattcggcatcgctggaaatagccctatatacgggaggcgcttttttaaagtccttctttctggcgggaacgatggtcgcagtcatttcatcctcgctctcttcgcatgcgagcgcttcgcggcttttgtatgcaatggggcgtgacagctctcttccgaaacgctttttcggctacgtgcatccgactttaaagacgccggtatttaatattttgttcatcgggctgatttctttgacggccatgatcggggaattagaggtcatctattcattcatcagtttcggcgcgctgatcggatttatttttgtccatttgtctgtcatcggccattactacattcggaggcaggaaaaaggctttttaaaaacgcttcgttatttggttatgccctttttaggggcctctttctgcggctggctgctgcttagcatcagcaaaaatgcgctaataattggagccggctggctgattgccggttttatatactttttgttcaggatccgttctcttccggacgtcacattcggctttgatcgcgatccgcgctagaatggtatatcgcttggtcttcttgtagagatatgtcataataaatgagactgtatactgttttgcatcagggcgctacagaggtgaaaccattgaagaaaaagaaatcaggatgtttagccggagctggctgtttgtcattttttgtgtttgttccattgatcattttctttgccatctccggtctggaacaattaaaatggcttcctcttgacactgaatctaatattcttgagagattaaaagattacaagcctcttgttgaagaagaactcgataaacagggtctttcacaatacaccggtcttttattgggcatgatgtatcaagagtcaaaaggcagaggcggtgatccgatgcagtcgtcggaatctctcggcatgaagcgaaatgagattgacgatccaaaagcaagcattaagcagggtgtgcgccattttacagtaatgtatcaaaagggacagaaaaaaggcgtcgatattgaaacgattatccaaagctataatatgggggccggttatatcgactatgtctcaaaacacggcggaaagcactctgagaagctggcaaaggcattttccgaagaacaagtcaaaaagaaccccgacctgtacaattgcggcggggatacaaacaatttccgctatccttattgctacggggattactcttacacggaaaaagtaatggaacgcacaaaaaaagtcgaagaacatatcgaaggattaacacttgaacattgacaaagcggctggctgggtgatttttcgcccggcttgtcctgttttggaggagcgaacgaaagcatcgcctgcagacgcatgccatgcttgtcatcagttcgcatattccccgtgaacgcttcgatccatccgtctaatccaaaaaaccgccttttttcagcatttcttttacttcctcttttgagattaaaaagtcttttgagctcaagttatctgtttctaaaggctggcaatccgcatactttttatgaagctcgggcattttgattgcaggaagcaccaccgcgaggtcatctgtaaatgagacagcatgctgccgttcatgaggtgaaatcagcagttcatgaagcttttcccccggccttgcccccgtttctgcgatggacgttatttcgtttccataagcttcgatcagcacctcagccatgtctaaaattttgcaggccggcgaattcataatgaaaatttccccgccttggccgctttcagccgcttttaataaaagctgaatcgttttttccttcgtaaggaagaaacgggtcattcttttgtctgtgatggcgacttggttcttttccctgatctggtctttaaaaagctgaagaacgcttccgctgcttccaagcacatttcctccccttacacaaataaaacccgtgtctgaatacagatggttcgcgtatacgatcagcttctcgccgatcgctttcgtcattccgtagaagttggcagggtcggccgctttgtcagtcgagacgttgatgacttttttaacgccgttttcgatcgctgcttcaatgacgttttcggtccctgtgacatttgtttttaatgcttcaagcggctgttcttcacaaaccgggacatgcttcagcgctgctaaatggaagacatagtcgacaccttttaatcctgtattgagcgctttccgatctctaatatccccgatgaaaaacgtcagcctcggatcttcaatctgccttctcatttgaacttgtctttcttcatttctggaaaatacaatgatctttttagggcttgaggctagcagctgaagtatgagttcctgaccccatgagcctgttcccccagtaatgaatatcgttttattttcaaacatccgctttttctctccctttgtgccttagtcaatcattctcatcggcgaaaaactaacgaattgttatgccttggaacatttctctccaatacgggtcgtttgattgccaaatttcttgatcaggaagttcaacagcgcatacgttcttcagcggccagtgattttcaacaataccggatacatttgtatgattgatcaaaagaacgctgaaatcgtttgtaaccaaatcagagagcacctcttcaagctctttggcttcctgcatcgtgccgctcgttctgacaaacagcacgcgctttgcagtcgaggtcttttctaaaaatctgttaaatctcctattaaacttctctattacttcatgataagtagccaggttgtcgagtgtatttcgatccgctttaaaatcgtgtgccgagtcaatgcagtaataatcatccgtaaccgagataaaagggtctttagtggcaactcctgtagaatagcccgtcactctcaaatttataggattcataaacccttcaaaccggtttcgtatcaagcggcacagatcaggcagcgacgaggtgccgacccaatcaaaaggtcctgcataaggtcttttattcatttttctcagctgaagagctgtcaggcacaaatgccctaggctgaaaaccgcatcatattcgccttgtatctcttttaaattcatatactcactccttgtgcttactgacggaacattctcgctataagtagagcatctggtctttataacatagtatgtcggtgtaataaaaagataaaagacaacaacctaagatcggctcctaaaattcaatccaatattgatagattgaaagacttaataaaaaccttcggagcaccgaaggttgattgagaaataactattctgttttggtttcattttgtgtttgaaagaattttaatgtagtatcatttggaagtgtgtaattttcaggaagtgactctttgatcgcttcaagcactttattattgctttctataattttattgttcatttcttcaaagctggctgttaattcgtctaagacttcatttttgctgtttacattggttgagctttcgttctttaaggcctctccggattcagccggcttttcatttgatacagcttctgagcctgctgctgaattcgtctgagctgccttttctgccagtgcttcaactctttcttttcggaactcgaaaagcaattccaaatatttatcccaccaaccgacatcgatttcctcttttgtcagaagttcaaacaaatgctttttaatttcagacttcatacgacatgtctcctttattttaaagtttgttgataaatgtccaaaaccttgttgacagcttcatccatattccaatactccattgcaaatttgtgtgcattggatcctaaagtttttctaagcgtctcatcttccagcaactgattgatagagttgcatattgcctgtgcatctcctttaggcgtcaccataccggtcacattatgttcaacgatttcaggaagtccccctgcatcgctgacgataataggaagtccggctaattgcgcttcaataacagacagcggctgattttcgagaagactcggcaaaacatacacatcagcgattgacagaagatatgggacatcatcgcgctttttcataaacacgacatcgttttccaaaccgagctgcccgcataaaattctcagtcccgccattctctccccgtcgccggcaatccagcatacccaatcatcccgaacctcttttaaatgcgaaagtgcggcaagcagatgctgaacacctttgttttcaacgagccttcctgtgaaaaggataattttcttatctgtttgcggtatttccgctgactttatatcctttcgttttagaaagctgtcaatatcatagccataatggagaacgctgatttgttcctccggtgtatcgaattcctttgtcaacagattcttcaaccaattgttggcaacaattgtagcgtcagccgaaacagcgccgacccgttcaagatggtcaaagtacgcccttgcgatgtcagaattagacttcctgtggatcgttgtaagctgatgtctgatttcatgggctacactcccgtgaagcgtggcaacaagcggcgtgtcttttggcttcactcttttcaggcagccgcttgagatgacatcttgggcatggatcaggtcgtatttttccagccctaaataaatagctgcaagttcgtatacatagcgctggatctcagtaaagtggaccaattgattgtcatataattgcggaaaagactgttgatcgactgattgctcaatcataggcaaaagctgttcttttttcaccttgcgatcttcgtttacaatatgaacaatctcgttctcttctccatatccaagcagatcgacttcatgtcccatagattcaagcgattctttcagctggaccatatatgtccacacaccacctacgtgcggaatactccaataagtggcaagaagaattttcataagcatctcccttttcatttctatccaatgctctaattatttatattggtgattgctatatcttgtgtaggacggatatccaattaagaaagattattttttgaagaagctgctaaaaagaaaaaaatccgctccccttgtataagggaacggattttttcttttaataatatggggaaatcattatatagacgagaacgcctgtcaggctgacatacagccaaagcggcatcgtccagcgggcgattttgcggtggcgttccacctgcatgctcaggcctctgaacagcgtgaacaatgccaagggaacaattaatgccgacaagacaatatgtgtgatcaaaataaaaaagtagatcggtcttatgatcccttccccgccaaaatgagtgtcaggcatcaatgaatggtaagtcaaatatgagacgagaaagatgaacgttgtcgtaaaagcggcaaaaataaaccgtttgtgcgctttaatgtttttctgtttaatcatgatcagtgcagccactaagaaaatgaatgtgaagctgttgcagactgcgttcaaaagcggcagaaaagtcaaatccaaatgagcgaatttgtcgcttttcggcataaaaaacaagagggcaatgacgccgtttatgataatcgtcagagcaacaacaatgcctgtgtagtttttatttttttgtgaatgggtcatatcgggcaatctctcctatttgtgcaagctatcaaaatcgtattcaaattcaggaggaatgtcaacgttttcggcttttcgtcagaatttagtcacagaatatacaaaaattcccctcctcttgaacgaggaagggaacacatgcgggtgccttagaaattcatagcatcttgagccattaatttttcgaattcttcttcagttacgatatcttctttattcggtttatgctcaaactttacgtcaccatcgatatttttgtaagtcgttgatgctgtgatgccgaaagattgaggcgcttttttgctgtcaaccgagaaagagatatccgcattttctgtcagaaggttttctttgtcatcgattgtcgatgtcacatcgaattttttaaatgtgacgtctttcagtccgtctttaatcttgttcagctcgctcttcggaacagcttctccgctcgcttttccggcgatttcgatgaacttgacgaccgcagctttaatttctttgtcactaaagctgaaagcgactttttgagaagcaccctgctctttttctttatccgtcagatcagctttttcaaacttatctgcaggcagattgtccgctgcttctttgatggattccatcaattgtttttgaagttcatccgtgtctttagatgaagatttgtcatcttcaagcgggaattcaaggtatttgcctttgacgctgtcaaaattcatgccggctgttccaaggaagatgccgaagctgtcaagaacgctgtcaattttgatgtagccgacttgtttcttttcatccatataaaccggaatatcgaaatcaagagacatgttttggactttcagcttcgctttaataacggcctcagactgtttcgtttcagcatttgttttaccgctgatcgtcaatgttgcatcattcagcatgtcagcgaattgcttatcttccgcaccaaggttggatgcgtcaactttcaagccgatatcacttgaaaattcgtatgatttcgcagaaatcagctttttataagccgctgcgtaagatccttttggatcagcctgctgacatgcagctaatacaagaacaaaagctgacatcagcatcaatagagaaaaaattcttttcttcaaaatcgtacgctccttttgtcatgatttttctgggattaggaggatccattgtctcgcatcctaggtaaatataccagaagtcatatgaattctatcacaaaaaaatcgtagaatgtgaaatatttgtttaaaattacattaaaatttaattctagcaacccatttgcaaattgccgttctttttactataatcgaaaactgtatgtttaaatggaaaggagcaagttctatgataacggatgaagaactgcaaaaagacagctccggcttgcagaaggaattgaacgacctgcaatttcaactgtttcggatgcgtgaaaatatgaaggatatctccaaagattcgcgagtgctcggtattgatcaatcgaaagacgatgaatggatgattgtccattcgattgatgatggccggacatgcaagatcatgttaagcgattgccagtcgccgtaccgcgggaggtgtgatttttctctcgtcgcttcctacacagaagaaaaacgcgcgatccatattggggatattaaaggaccggcaggctttggatatggttcaatctgtatgaagtatttaaaggaaaaagcccgcgagcataacatccccgtcatcaccggggacattgctaaaagggattgggaccatgtggaccggctgatccatttttacgaaaagcatcattttgaagtaacgatcgatcctgattcaaaatccggcgaaattcagtggcaggatctttaaggtgaaataaaggcaaataacgcaaaggacaaaacattaaggcagaggatgaacgcacatcccctgccttttttatttggcaagcccccaaggcgaaaataacaggtaaatgcaggctatcaggcaaatcacaagaacagaagcaagtttggcatgcttccatggctgcaaatctaccttggcatttttctcaagcttgaattccgacggccttggcttcaatcttccgatgaaaagcatcaagaggacggaaaacggaaacagaacagccaatatatatagaaaatgaatatggccgaaatagatttttgagatggtatacaatacaatgtgtgcaaatatcgcccatttcactgcaagcgccggcacttttttcgaaaaaaatccaacgacgacggcagccaatacaggaacattgaaaaaaccgaacatttcctgcagataattgtaaaggccagacggcgcaaacaaaataaaaggtgcgatgataatcgataccgcggccaggatcaccacaaagatccttccggttttcacgagctcttcctcttttgcctctggcttgaagagcggtttgtataaatccaatgtaaacaacgtgatcgtactgttcagcgaaccgttaaacgagctgagaatcgctccgaataagatcgcggcaaagacgccaatcagtgcagtcggcagcaaatcaacgatcagcctcggataaacggtgtcagcgttttgaatatggcctccgtaaaggtgataagcaataacgccgggtagaacgagataaaacacaccgatcgttttaaatacaccggccagcaatgcgcctttctgcccttcagccaagtttttggctccgagcgcccgctgaacgatcgactgattaacagcccaataaaataagttgttcacaagcagtcctgtaaaaatcgtcggccacggcacttctgcagagttgtccgctgtaatggcattcagcttttccttatgtacactcgtcagctctgtatagccgctcaagaggctgccgtctcctattgccataattccgagcacaaagatgaacagaccgccaagaattaaaccgacgccataaatggcatcagccgaggccgcggctttgagtcccccgaaaaatatgtagcagcagcttgcggcgccgatcacaagcgagattaaaaaaacagtcactaacgtattgatcccaagcgcggatgaaatgttgaatacttgatcgagaacgagcgccccggagtacaaaacggttggcagaaacgaggtcgcatatcccagaagcagcaggatcgagacgatttgccgcgttctttgatcatagcgcttttcaagaaagtcgggtatcgtcgtgactccggaactgagatacctcggtaaaaagacaaatgccagcataatgagcgcaagcggtgctgtaacctcccacgccatcgcactcatggttcccgaatagctttgcccgtttaatccaaccatttgttccattgacaaattggttaaaagcagcgaacttccgatatagagggcagtgagactgcgcccgccgagaaaatagccgtctgacgtttttaaatcaatatcttttgtcctcaaataagaaaaaataaaaattcctgcattaatcaataaaaatgtcatgataatccacaccaatacttctgcaactcctttttagatcagctgatatgtatttatctattgaactacccatttgccaatctaaaaaaacatcaaaatagaaaaaaagatgcagaaaacagaaaaaagacactgatcatcttcatggtcagtgtccatcaatggtaaacctattattttaaaactttaactttaaccgttttaacgccccagttttttgctgcggatttgcttggaacaaatacgtcgattttgttccccttgatcgcaccgccggtatcggcagcggtcgcttctccgtagccttccacatacaccttggatccaagcgggattacgtttggatccaccgcaataaccttggcgtttttattggccttcagatcgatacccgtggctgtcacgcctgtcataccgccgtcattggcagtgtatgccgttgctgtaaccgtcagttctttggcagtgctttgagatacgtttgaacgggaagccggttctttttcctgcttaggtgcaggggcaggcgcagccttctcgactttcgcttctttttgtacggcaggctttgtttccgcaggttgcgccgcagcagcctggaccgtcgcctgtccgtcaacagttatggatgtattcgggtaaatgatatctgattttatgttgttccaatttttaaggtcattcactgaaacgccgaatttttgggcgattttccagagagtgtctccctttttaatggtatattgtttcttttcttctgtctgtttttcagaaacgttcagcttttgtcccggaataatcaagtcagaggaaagctgattccattcttttaagtcctgcagatttaccccttgtttttgcgagattccccaaagggtgtcacctttttggactgttacttcttttgcagaggcactcgctccgaatgcagttgaagataatgctgcaactgcaacaaaggacataaacgtcttcttcataagtaaatcctcccttgttagctttttattgtccggctaacaggagcaatcgtaacatatgaaaatgtcaaatcaataacaaaacaatttgtttttgattacagttgttttacgaggaggaatttcagccgccctaaaatcggccgaaattcagatgtatcaagggttccaatcgtttttcaactgaaataggagatttactaaaaaaaattttacatatataaattttgggtttttatgcttctttctcagttttataggcttgaagctcctgtagaaatacagctccgtattttactcttttttgttctcccactcctttgactgacaaaagctcttcgtctgtcagagggactttcccgctcatttcccgcagcgtttcgtcagagaatacaacaaaaggaggcacgccttgttcctgagcaagctttctgcgcagcgcccttaaccgttcaaacaattcgtcatctttaacgatttgatttgtttgcattttttctttgcgcatcaccgcttcccggccgagcaaaacgtttcgccccttgttggcgacaaagagaacaggatatgtcccgtcggacattttgatgtactcatctgcgattaaaaactctataaaatcgcttatgtcggcaatagaccgtttctttaaaattccgtaagtcgataattgctggaagccgttttcggtcactttcttatttttcgaacctgccagaacttgcgccaccatggtttttccgaacctttctcccatgcggatgatgcaggacagtaccatctgtgcctccttcgtcacatcggtgatgcttcgggtgtcgagacagctgccgcacctgccgcagtcttcggttggaacttcgccaaaataagaaagaataaaccgttcgagacagccttccgtatggcaaaaatcaaccatttgcctcagttttttcacgtcttgcgcccgaatgtcttcatcttctgtcgactgttcgattaaaaaccgctgaagccgaatgtcctgaggggaaaacagcaggatgcactcgctgtcaaggccgtcgcgtccggctcgtcccgcctcctggtagtagctctccatattttttggaatttgggcatgaatcacatagcggatattggatttatcgatgcccattccaaacgccgaggtcgctgtcattacactgatctcatcatttaaaaagagatcctgctgccggtctctttcttcatcatccatcccgccgtgatagcacccggccgcaattcctttttgagagaggcggcttgatattctttcggcttcctttcttgtcgctgtatagataattcccgcctctgagcggtttttctccacatatgattcgataaaacggtccctgttttcgccttttaaaattttaaacgtcaaattatcccgtgaaaaaccggtaaaaaccgtgttctctttttcgatcccgagctgtgtacaaatatcctcatgaacctcgggcgttgcggtagccgtcaacgccaatacaaccgggcgggtgccgaggctatttaaaaagccttcaatatgtctgtagctcggcctgaaatcatgtccccactgtgaaatgcaatgagcttcatcaatggctaccagcggaatatgaatgtgggaaatcgcgcgaatgaattcgggagacgtcagccgctcaggtgttacataaaagagcttgtagccgccttccttaaatacggagagccgctcagcgatttcgttatggcctaaagaactgttcacgtacgcagcttgaattccaagctgatttaaagcatccacctggtccttcatcaaggaaattaaaggagagatcacaatggttgtcccttccataaggagcgcgggaatttggtagcagattgatttgcctccgcccgtcggcataatgcatgctgtatctcgcttttcagaaacgacagattgaatggctttcttctgccccgggcgcagtgaaggatagccaaaatagtgctgcaatagtgcttcggctttctctagcatataaatgaaaccctctcttatcattaaacttcttcctgtcccccatgatatcatatttaaaccggcaatcagcctctccccgtaaaatcgtctaatcgataaagaaaattcatttttagatgtaaagcgtcagaaaatcaaatgtattgggactcgccatcattaaatcccggtctgttgttcagctaataatcgcaaccgctccgcttcctcccggcaaagcgttttgtatgccaaagctccggcaatactcgctccgtctgatgcatcgcggcgcagagcggatagctctgacagcacagatgccgcgtcgtcctgtaaaattccgcggtcatgcagcatttgaatcaattcatcgccttcgaggcggatcgcatcttgatcaaatgttgaggctgtttcccgcagaacattgtgaacatctgaccaagcgctttcgatcaagttatcccctcgctgcgctgaccgtacagaaatcagtcccgacaatcttttttcccgtacggagacgagctcctgaagccttttgtcaaactccaattcaaaatccttatatttcagtttgatcaattccttcattcgatcggacaaaggctcctttagcagcaaaacgcaaatcatcaaggcagctggccatgccaatgattgaaccatcgcagaaacaaattcaagccaatccataaaatcagcctccgtttcaaaaggaaagttgttttgtgaaagaccaggtggtaatgttgaatcgaaaggaaaattttgcatattaaggggtgtcgttataccatgtggttcatcatcatactgatgatcattttgattggatttgcaggaaacatcgttgccatgttgcgaacgattgtaaagcagaatgatagaatcatcagcctctttgagaatgaaatcaacaaaaaccattagacaaatgcccaggaaatggagaaatcgcagaagatacaaacgaactgaaaacagccactctccctaattcgggacaaataaggaaccgatcattttccgtattgagaggcggattcttttttatgatgcctaagatggcgatggatcggtttacaactatattaaattgaatattcagattagtaaatatgagtaaagtcctcacctctctaaccgatacacatgttaaggaggtggttatgttggatattgctgttttatcaatggccatgagtcaggcggctctttatcaaaacgtgcaaatgtcgctgacaaagacggctttggataccgccgaacaaagcgcacagcagctcgtagacatggtgcaggcgccacatcccgtttcaggacatcatattgacttgaaaggctaaggccgaaacatacattcagcaggctgcgaagtctgccggatgtatgttttcccgaagaaatttgtgaaaaaaaccgctgcaacctctttattttttcaggtttttgtactataatattgttctgtgtcccagtagctcaggtggatagagcaacagcctcctaagctgtgtgtcgggagttcgaatctctcctgggacgtttcaaatgtaaagaggcaagcccttgtatgccaagggtttgcctcttttgttaatggccgtgttgttggtgctttaaaataaagttgatcaaaacggattcttatccaacgaatttaagtttcggttgcataaaaaagtttgaatattttctggttgcttttgcgaaagataatttcacgatttacttggttaaattaaagctttgctcaattaagttataaacttcttctgaatctattcgttctaaaacaattgatatccaattttccttatccatatgataaccaggtaaaatactctttccatttcttaaactgccacttatttctggagggcattttaaattcagaatatctatttcgtcatttccatctaagcctaacttttccggaagaacattcattacaagaccataccatttttcggtagtttcatgtcttaaagcggcatagtttggaaatttttgaaatgggtaatctggcgatgtcccgaatttttctttgacgtgcttaaagatatcttctcttgttaacatactgaatcattcctccaacaactcaaatagattttcggcatttgccgatccagagggaacaatggtgaattttttgcagtcatgatgtgaaggtggacatgttttactaaccgtcaatattaaggcttttattttgatctgttgttatttcctttggaattcaacttcatttttcttttatattaaacaatttggccctttgccgtatatacttcttttacaataagaaacccttttgacatattctatccaaacataggcgaatttttcaccctaatacattgagtgcgaatgtctaaaccggcactcctcatctcattttcaaatgctatctgataggcagaaggatgaaacacataaatcgcggctttatcttccatttcttgagtaattctgaaagacgtctcttaaaaattcatcaaattgatcagctgccatttcatcattcagaatcgtcttcctcaacatgaagaacctctgaatctcccgagaaatctaaaaggagctccactaattcttctcccgaaaatcctgtcattaaaagtgttatttaattcagcaagatgcagctggagcttttcctcatcccagtcgccgcagatcttatttttcctcagcctcatccagatttacaactgaaaccaggagagtctttggtcctttttccatgaggattttaaagcgttggttgccgcctgcaaggttgccaatcctttcattccagactaacggttcaactgttcaaaagcgtttcatagactgtttcagtgtttcatattctgaagcacccggctgcaagtgtggattgtatggagccgggttaatttttctatggaatttcacgaatgttcatgacctccaagaaaaaaagcatccattgagatgctttataaattgatatttatttatgatagatagttaactttttgcatgatcctttttatttgttgtatctcatcgactgtatatttagcaggctttaaaacctcattcttaaaatactcgcacaaacttgcttttgaggtaaatctattcttatcttttgtagaataatctattacacgattttctttgtcctccggataaccaaaatagactataggctcaacatagttgaatttattattataggttatgagaaaattcctgagtttatacattgtgtccatgacttgatttctcgggttatcataataagaaatatttatagaatttttttgctcggaatccttatctatattgctatttttcataaaaatgattgtcttctctgtatcactattcgctttcggaaataattgttcaaagacaaatgaaaaatcatttgcaattgattccgcatttttacgattaatcccatggataactgttccacgccaatacttggtttctataatatagatatctgatggcaaaataactaaatgatcaatttgcctggtttttgtctccccattttcttcatagggtacaaatacgtttcccattataaccatctcgttttcatttattttcccctcagaaataagcttttcttttaattccgttaaaatagtgtgggtaataacttcaccgctatttcttgaatactttttaagattgtttatatattcatccatctttacaatcttgttcttcagaaaatcgttttcatttaagaattcatttttttgattaatattcatgacttcagcttgttgtaaagcagcggaagcctctttatgagcttgcaccaggtgatcttgatatgtttgctctagattttttaattcacgttctaaattgttttgatgaattttttttgtctcttttaatttccagatcatataaccagaaaagccaagaagaacaataatagctaatgtagacaccggtctcctcctagacagaatatgattctacattttattacaaataaacctttttttgaagagtccagagaaaaaaacaaatcgaattcctttttatcccttcaagttattttccgctattaaaaaagcacgtttccagatgatgaaaacgtgcaactgtaaatcaacttctaatctaacttcaccaagtaatcaatatcgtccttaactctctcttcagtattactgctatttgtatcagctaaaaacggatgatataccagttgtaatgtgtctgtactcccttaggagtacacctggggcgggtggtcaatccctcttattcatcccccttttctctcggggttcctgatgatgtttttggtgctctggaggctgagtcgtgcgttccagctcctttgtatcttgtcccattccttttaaaaaggagaaaagcagcgtaactgctttgttgatttccgggtctttgagcgagcggatgatatcaaaataacctgttttctcttcgctgtccttctgttccaccgcgtttgccacccccgcattcactttcaaaatgagaggttcaagctgttttacatccagcatgccaagcgttccgaacagaagaagcagatttttcagtgtattggccgtttcctctgtatctgcctttttcactaagatgtcaagaactttatctccttggccaaaaggccgcgcagcaatggcaatacaccacgctcgttcatgtggccaatcatatgcagcatttcaagaatggcttccttattttcgactaatgcatcctctatttctttcatatcacgctttctctggtcctcttcggttatctcgattttctgaattcgtttaatcgctctagccattatgcccaatcccccttttcacagcgtcgccagggaaaatataatccttccgcgcccatttcttttgtacctgcacaccgatttgcggctgcggattgccgttgcggtgattgatcttaggcagcggattgtttccgtcgcgcttcaaaatttccatcttggctgatgtttctttgtacgcaggcgtatcggtatccttatcagcatggctgcctgttaacaggttgatcgctgcttctcctgaatcgttcattggcagatatacttccttccctttgacacgatcagtgatcaagcacttcacttcgacatttccgaaaggcgatgtgagtctgacaagggttccgtcctgaatccccctttctgccgcgagttcaggagaaatttctaagaacacttccggtgttttctttgaaatgccttttgatttgtaggtcaggttcccttcgtggaaatgctccaagagccgcccattgttgacgtggatatcatattcctctccgaactcttcaggttctgtccaatgcacaggatagagaatggctttgccgtctgggaaagggaagcgctcagtaaaaagtaaaggcgaatcctttccatcagcgcttacaggccattgcagggaattgtagccttcaagccgttcataggtgacacccgcataaatcggagacagcttggctgcttcctccataatgtcagcagggtgctcatagtgccagtcagcgccaagcttattggcaacttccataataatctgccaatccggctttgattcgcccagcggttcaaacacctgataaagccgctgaatccggcgttctgtgtttgtaaaggttccctctttttcaaggctcgggctcgcaggaagaacaacatcggcaaactcggctgtacgtgaaaagaaaatatcctgcaccacaaagaaatcaagcttttcatatgcggcgtgtacatgattgatattggaatcgaccagacccatttcttcaccttttacatacatcgctttcagctggccagagtggattttttcgatcatttcgtggttggtcatgcccggctccttcggcagcggtacaccccatgcctgctcgtatttttggcggacttgttcgtccgtcactttttcatagcccggcagtctgtcaggcatgcttccgaagtcacttgctccctgtacgttgttatggccgcgcaatgggtaagagcccgctcccggttttccgtagtttcctgtcacaagcagcagattagagattgctgtgctcgtgtcgcttccgccaatatgctgtgtcacccccatggcccacaatgcgcacacactgtcatcctgaccaatcatctccgccatttggatgagggtttcttgatcaatcccggttttctcctcggcatattcaagggtatacggcgtgaggcttttcacatattcatctcgtccgttcactctttcctgcaaaaagcgttcatcggccttgccgttttcaattaaatatttggcgatggcattcagccagacgatatctgatccggcacgcggctgaacaaacagatcagatcgctctgccatttcgtgttttctgatatccgctacgattactttctgccctctcagcttatgagcccgtttaatgcgagtggacaagaccggatgcgactcagacgtgttcgaaccgataatcaacacaaggtccgcttgcgcgatatctgtaatcgatcctgagtcaccgccatagcccactgaccggaacaggccggcagtcgcaggagattggcaatagcgcgagcagttgtcgacattatttgtgccgacgatccctctcgccagcttttgcatgaggtaggattcttcgtttgtacatttagaagatgtaataaaggcaagtgaatccgggccaaactcctcttttaaatccatgaacttgctggcgatcagcgttaacgcttcctcccattccgcttcacggaaatggtcgccttcgcggatcagcggctttgtcaagcgctcctcgctgttgacgaaatcccagccgaattttccttttacacaagtagaaatgccgttggccggtgcttcctcctgcggctcgactttcagaatatctctgccctttgtccagacgggcgttgtgttgaagcatgccaggacgttcaggtgactgaaacactgaccattgactgggagcggaaacgcccgcgcgtcatttggaacagacggtagaacaatggccgcatgatacacacgacgactcattgatcggctctatcgtatgacaaagtggaaaagaaaaagtcccctattttatccccctttttgtcggatttttctcgggtttgaatataaaaaaaccttgaaaggccaaaagccaatcaaggtagaaaaggtgaatattgtttatattttcaactcattcttcattaaatattaatcatcatcaccaaataataactcatccaattcttctcggtcttttgcaatgccctcataggtttcgatcaagacatctcaagtgttatttctctatcattttcataaattttaatgctagctcccaatgagagtaactgttctataatgattactagtgatttcaattcttctgtgtcatagtaatcacattcaataactggttttcctgtttcaatcgcctgctttagttcgttaataggtttagatgatgtttttcttaataacgaaatgtacttagtaatatttgaatcattgagtacttccacataaatgaagtccatcaagataactcccctctaaattaaaaatctttaatatccttaatcggctttcccggaaggctatttttgtaatttccctccgtgccatctgtgtaaatgttcccttgttgttgctggatatataacttcacctttgtcacttaaatgagggaatttagaagcgctataactgtgatgtccttgcatagttttcccttcatactttgctctcttattgtttataatatcttgcgcctgctcctttgaaccaatttcttgttggagcttcaccattaagtattcttgtttaaaaagtcttagcacctttatctcgcttagctgcaaatttcttattccaagtatataccttgtattcttctcgagtaatagtcctattatctatttttgatttaagttcgattgatcaatggctttgtgcaacgcctgaacatcaagagttttcatagcattctcctctaatactaaagtgacataccacgaactgttttaccactttacggaaaggaattggttaataaatcctgacaatccgtgaaaatgaatccttgggatcaggtcattaaacctttgttgagggtttgaaatatataaaaaaaagccgctattaaaacggctaaaaggatattccaaaaactcttttaggttaaacaacaaaatcatgactggagggtgcgctgtgatgtttcttgaagctgtgttcatatcatcgttgttcgaaaaatgactgagaaaaccaagtccaattatcataatccctaaaccgatcttcattttagatttcatacaaacattccccattcaatatttgcttttgagcatagaccatctttttaagacagatgagactatcctctgtttctaaagcaaatcgatcagcttctcctcctattctttatatatttgtttaatgcaaagtattcgacatcatctcaccaacagctttccatttcaatagatgtggcgagaaagaaaaaaaggcagatttcaggtctttctcaacttttgggggtgacacctactgtaagctgcatcatataacaggttaaaattaatattctaatcagatttcagttttcttctttcttccaattgcaattttatgcaataatgtacaagtgcttgttcatcatgttcatccatcttgataaattcaactgtcatgatctgtttgtttgttctccgatctatgtaagtgcgtttgacttgagcataaacgtcaatcacattttcatcatgtccctcatttggcagatgaatgcttaaatttaaatcctcttccgcttcgtgtatttgcgtctcttcaataattaacgcagcgcctccagcactgatatttgctgtatatgttttaaacattgaaccagatccatatgggcggacagtgacaggaatcgttgtatttactctaaaaaattgccgtctttgaatttttgtcatttgatcttcttcgggtaaatacatatttaatacaggtatatcctgatagatctctcgtccctgtattacactggtaaatttatatgggacttgttgctcatttataaagtgaactattgctactgtatttgttggaataataacagttctccctgtttcttcatcaacaggataatgtactcttaaaacattgtcctcaatggatagcactttgcttttcgcgaggacatactcttgaatttcgttttcaaattctattgttaaaatatttcctaaagataacaatggacatcactctttcaattctacttaatcattatatcggtactatgacacataaatttaaaaaagaaaaggagaaagcattgagaaattacgtaaacggaccgcttctcttgtgagactgacgatcttatcatcattcagttcagggataggtgtgtctcccattctatgcccttttttcggattaaatataaaaaaccttgaaaggcaatagccaatcaaggtcattcttcaaagttaatcaattctcaagtcaatttaggcatgaatataatagtctggttcttcttcatccattttcttgaaaactcttcgagtgatgccgcaattatcttgtcaaaatagtatactggacaaataccgttctcttcttcctgatctaaatctagagtcagatatgtcccctcaccgacttcaaaaaacactaacatgggtatagttctctaattcttgggtctataaaatcagctacactatgagaatccattactctatctccatgagttttatcaagattacaaataaaaccatatcatactcttaaataaaactctcttagttcattgggaattttttctaatctatcttccgcctcaataacattatattccagtcgatatataatatgttttttgcttttgactttagcaatttcgtctgattgatgttttaaatgttccagcgctttgtgcagcgcctgaacatccaatgtcttcatggctttctcttctattttgttttcatcgatgaagccagctgtttgtcggtgtccatcattgcttcgactgctgattccgtttggacgacttgttttgagaaagcagaggcataggaagaagcgatcttattaatcgtctgattcagttcctctatcttctttgtcgcatcaaggtgattctggcccttgatatctgtcggaatcgtcgctttcattgaatggctggaatgctttaatttagagagcgcttgtttgacttctccggtattcacttttatttcttgatccatttttcatttactccttgtctcgtgcttcccgcttcgcgttctcaatctttttctctaaagaacgaacttcctggctgagcgagtgaatatcttcttgtaaagatttgattcgttcatcgattttgcttaaaacatcagaaagctgttttccgcttatgtcattgtaagcagtcttcatcagacctcgaatacggtcaaaggagtcagcaagactgccttgccacgtatgagacgacagctgtggttcggtgatcgtctttttcgaatcagagaactctgttttgtctttttccagctctttgcggcaagctttcagctctgccaaaaattctttcttcatcgataaatcaactttcatgatatctaaagccagcgtttctcccaggattgaaccgatcatttgcaatacctcgcttcccaaaaaatgcatgacaaaagtaatgaccaactaagagtttaccactatacggaagggaattggtgaataaatcctttcaatccaacaaaatgaatctttaagaccagtccaataaacctgttttgaataaaaaaaagacgctaatgaaacggctgcaaaaagataattcaaaactcttttttaagctaaacaataaaatcgtgactgggtgcgcttgtggtgtttcttgaagctgtgttcatatcattgttgttcgaaaatcgaaaatgactgagaaagccgagtccaattatcaaaacacctaaaccgatcttcattttagactccatacatccccccttcaatacagatgaggcttccctcttttcccattataatccatacgagtgccgcctaacaatcgctgctttttactcgaaaaagacgttctgactaccgcacatagcaatctgcggtaaagattaagaactatagattaatgaggtcgattttaggtgagtaaaatgctcttgcagtttataaaggtggttcactatccctttccaaaggaattatgagatccctgagtgttcgcattaaatatttttcaccgaatcaagaaatactgataaaaaaaggtggtgctatatatggatttcccaatcattcatacaaacttttgggatgctgttacggcagtgccgattatcttgatcgtcacacagataattaaaatctttcttaaggttcccaaaaagtatgttccatcaattgcacttgcactaggcttaatcatatctgtttgcataagtcatcgacacagcctcatagctggagtatttatgggcggattctatggttgcgcagctattggttcatatgcatcattgaaaacgacaatttcatcatatagaaacaaaaaagcataaacaggcatgaaaagattggttccagagttcaattcgctttttcccgcttcaccggttaaatcagaagcagctatacttgctcctttgcctggttcatttccgcttttctccccagaagaggtatcatgctctccagcgtgttcgcctaacgaataagccccttccgtcagccgcttgtaacagaagaaaattgaagccttaaatcactgaatggggagttctcgccccttctttcacttgttctctttcccttgaataggcttgcagtttgattcactcgaaaaaaagcgaatgaataccttctcaacagacagaataagaagagttggtattccaccatattttgggcgaaaggagtgaaatcgttgtattgatcaaatgagaaatgaatatgagactgaaatgcctttcagatgacctttttacctaaagaacaaaatttcactgatatggagtgattaacgtgcctcaaaaaaatggagcagacagaccggatgattacaaaagattttcttcactagacaaggaatatgattctcagcaatctttagacagcaatgctaagacagaaaacgtaaacactgaaactgataacaaagaaaacacaactgacactaccgatgtggccggaaaatatttcgacccttcggattatgaaggggctactcaattggaaaaaggattagctgaaactcatgaacaggtcagtgatgactattttgaaggaacgatcgatcaaaatttggattagcgattcaaacggaactaactctttaaagttagttccgtttgaaattaacaaaaaatgactgtcctctaatcaattattcggtcaactccaaaagctatagccgaattataaaaatgcgtctgtttgatcagatgacatttgtctttttacagcctatctatatatatatataacttatccgcgaaaaaagtttgataaaacacacacttaccgtttatgaccaagcattctcacccattccccgttatcccctcgctgttatttgtgcacctttataaagtcatgattaagctaatgtctactttgtgatccaaattctttaatcgtgatgttcacatcatattgaatgggggtttctgtgaatacttcatcccaatttttcttcagctttctccaaagaaagggatagtggatcctcacttcatcaccgaagccggcaaggtcggctttatattccttctgcattttttctgtgatctgctctaccagctgtttcactgtttgtgacgcactttcttcctttcttttcaaatattttttgtcaattgccgtttcggttgtattccagttttcagccaggtgtgcctctgaattaatattcactttaaatgagaggcggtttcctttgaagactggcttgatctcactcttaaggtgatcgactgacatggccgtcaatttttttgttttttgatcatagtttttgacagtgccccctaccccttgtcctttgatccacatgatcccgtctaaatctttttcatctaaaaaaccaaggagcttatttgtttttccgttaatggcaacagctcctgcatatttgacttccccgtcggcaccgatgatgttttgaagcaaataactggttccggccttcatcatgcccggcagtttggcaagagtgatcgggggcagaatttttttcgccctaaagtcattgtgaataattctggtaaggtgaaatgcgggtattttaccggtgccgtctttcagttcaagtgtatcacttgctcttcctcttgttacaaggacaagcgtactcagtctgatttcattgtccctaagcgtctgatcaagcaattcctttagtgaataagtacgaagcaaatccgcagcaatgacgatcacctttaagtgggagctgaagaccggcctgtcctgcctgagtgctatttcactgcctatttgctgtaaggaatcacccgttccatatacgttaatgtaaggttgttggctgctgccgcttccaacggcaatctgagcccctgctgtgtacggattgacatattggtatgtcaaggttactcgatttttttttggataatccacgcccattttattaaattttttttcaaggtctgtctctcggccttcatcaaaccctatagcaaaagtcaagccaagttcttcaatttcatggctgctccagcatccagctaaaaaaagaattatgataggaaataaaaagcagatcttataagtgctaagcttcatctttccgctcctcccatgaaaaaaatcgaggaattagcctgattcaaggtctgatcttattttttccttgaatcaattgatatatatacggtaattaaaaccatattcaagaggctgctaaacctaacaaaccgtgcggagtgatttagttttcggcttgtgcttatcctctgaaaaaatttccatctttttcaactcgtctatgctacaatggaaatggaaaaaggaggggatattaaatgaaacgctttttgctgatgatggtgttgatttgtggatttttcagttttgtgagccgcgctgaagcctattcgttcccgcacaagctgaatttaacgtttacggggactcatgtggaggacattcccgatagcgacttaacgtttctaactggcatattggctataagtttacgattttcaatgcagaaaactgcaaaacaacgattaagattcagatgatgcacctatcaggaagatttatgagtttaagcattaaagattttgaaggggactggcctgaccgaaccgctcaggatgtcatcacgttgatgcctcgaacctacaggctttattttgaaaattccgaaggcgaatgtaaggatattcgcattaaaggaacatacggggccattccgcaaacttatgattatttctcggccttcaaaaagactccgggaaggacaacctttttgccaaatagatacgaacaacaaacggatgaggggggacgcatttgaaaaacttttggacatacgaagacgaagatccatacaaattaaaaagcatatcagagagagatattcaaaaagctgaaaaaaagttaggtgtgaaacttccggaggaatacaaagcgcttattcttgaacaaaacggcgggtatatcaattttaacgccttcccttctgaacggcctacctcctgggctaaagatcatgtccagtttgactacttattaggcttagggaaaaaggcagggattctcgagagcaaatacatcattaaagaatgggaactgcccgacaacctgatccttattcacggtgacggccatacatggatagcgcttgactacagagaaacgaaagaaaatccgcccgtgcactatttcgattcagaatttgaagagaattataaattagcggattcatttggagaatttctctctaaactttatacagataatcccatggatgatgacgactgccagcttatcgaaggcgtgcatcctgacattccctatgtctatccggaagatgccattacaaaagaagaagctgaacaaattctgactaaaaattcggcagccgagctgcatcagcttaattactaccctattgaaagtattgatgatttaaaatggcttttgacaaaaatgaaaaaatccgctttaaaagcagaccgtgacactggtttggcacttgccggcgctttggaagccgtcatttcttactataaaaatttaacgtttgaggatgaacaaacaagaaggtcagtccgcgatatcttggtgatattagagaagttgaatgactctactgtagacatatacttatcccaaattgacgacttattttaaaaagagccagcccctttatatcaagggctggtctttttagcatttgagcatctgtttcctaacgttttagtttccagatgatacgcggctgtctatgaggcctttacttcattggtcagatatccgttttttcgcataaccaatctggggtcttatttgcaaaggcgcatcatgaaactgtttttcttaaaaggcgccctcaggggatcgggataaaatatgatctcttgcttccagcgctttttgtctcaccttttcaagatctgcatcaaccagccggccgtttcgtttcaccgcttttcctgcgacatatacggaatctacatttcggtgtgcgtgcattggacgatggcccccgccgcatcagtgaaagggagcaaattgacgctgtccgttttcaccatgataaagtcagcttctttgcctggggaaagcgagccgattttatgatcgagctttagggcgcgcgccccgtcaatggtagccgctttcaggatttgttcggccgatatgctcaattcgggccccggcataattccttctctcagcagttcatcattgtgctttgcgcgttctgcttgaagagcaaatttcatctgtgcgaaaaggtctcccccggtcgatgtgacaacatcaaccccaagcgcagtaagaaccccgttttttagagagagccctgtaacaggatagccgtgccccatcatcatctcaatttctggtgtcacagatatcgagcttccgtgagccgcaagcattttcatttcttcttcactcatcgcattggcatgcaccatgtttaaatcgggaccaagcagcccggcttgattcagcttttcaatcgaacgatctttcgctccccagttgccaaaagcaatatgcatgctgcataaggcatccagttcccgggccgtttcgatttcaaagacagatgtcttccatgaagaaaactccggacctcgaattgcaagccccatcgtcagaagctgatccttcgattgaaaatatgctttttttacccgtttcgcttcgtccatattcgaaagatcgctgtctctgtcccaatattcggcgtcaccagatgttccaaaggcgaatactgcgcgaatgccggcgtctttcagtccggcaatcagctggtccgtatgatcaggcgactcaatcatcgtccagtccagcaaagtcgtgacgcctgcatcgagcgcctcaagcgctcctaaatagttcgcggcccaatcatcctcaggtcttctcatcgacccataattcccataataaatccggtttaaataggtttgcagggaccagtcggctccgattccgcggatcacagattcccatacgtggcggtgcgtatcaacaaatccaggcatgatcagcatattggaggcatccacaatctcagcgtctccggcttcaatcgactcggcaacgtccagaatgacggagccttcaatcagcatgtcccctgtttcgagcgtatgaagctgcggatcaagcgtcacaatcgtagcgttttgaaaaagcgttttttgcataacggctctcctttcttcccaaccgattagagaaaataacatcctatatgtaccatattaatataaaaaaggtataaatgatattaataagcattccgcgacttcgaacttcgtctgcatttttcattttgccatatactatttttctgctgttcgctataacctatgttaaacgttgatatacatggtagctcccttataaaataggaacagaccataaaagacccctgccgggtatttatatggtctgtgaaagtacaattaagccttaattaatagcaatgtccgtaatccgattttttttcatagcttttgcaaggttttccgcaatgatagtgttcatgtgaaacatctttatgatgtgagtaagtgtgcggatagtaatgaacatgttcatacttgtggtggtctattttttttgtatgctggatgaatatgaggaacgacagattttgagtaatgatgatcctcacaatatttcgtagggtaaacatgcggctcatgatgtttgcaatacattcgtacattctcctttccctttgttttatagattcactagtacattatgctgaaaagctaaagcccgactgcataagcacctatgctttgtccctaatttcgcccgttcattttctaaatatcgtttttggaaaatctgttttatgactatgaagaagcatctgcggttgaatcccattgcttccagagttaaaaaaaaagacactaaacgaatattttaaatgttcgcttaaagtccttcacctccaatgaacattgacgggctctgtatgaatatgcagctctgtttttgtatcaaaatgaacaacaaagcctctgattaatccatagaacttgtttttttctgtaattttcattacggtcgcttcgtctctaaatcctggcggatggcatcgctcaccgacgatatattgctttgaatgaacggtgattgattggattgacttcattaaattccattccccctcagaaacgtcatgctcccctctgcttctgtgccaaacggagatacaccccgataaaaatacttgcacttcgggtatttttcacgcttcagggtgcagaagcagtctcggtgattatcatcataacatgattatccaaaatattcctctctgctttttgaacattatgtggcagctcctcaatataaaatcaaccgataaattgcgttaaaatccgattgaacattttgcgttcctcccagaatggaccgtgtccgctgtattgaaacggaacaagatatgaatttctgattttgcggctgagctcctttgcttgtgcaaacggaatcaccttgtcttgaataccgtgaatgattaaggctggagcagcgactttttccggatcatcatacagtttctcatctctcagcatttcgatgaccgcttttgtcgaccagcctgccgcctgcaatcccaattgaaaaaaacagtctgagaacggttgtgtaatatattgaaagaaaaacgtgtcggtcacttcgcgcatcatcttgggacgatcgttagacgcttgctgaagcaatttggctgccgtttcttcagtaaatcccacaggcgccgccgcatcgatcaaaaccagctttgagaccccagcgcccctatatcgggacatatagcggagtgctatggcgccgccggttgaatgaccggcaagcgtgaagttgtttaattgaagcgcctcaacgacagcgcggatatcatcagccaaacggttgtaattatagcccgtcgccggcttatccgaacgcccgaatccacgccagtcaatgccgatacagcggtatccctttcgcgaaagatcgtcaaattgatattcaaactggagatggcttaatggccagccgtgcaaaaatacaatggctttgccgctttgaggattgatgtcttcaacgtacagattaacgcttggttctgcctcgataaaatatcccatgccgtcgcccccgatcatgtctttaccataagatactcccaagatgtaaataggtgaatgtctccgagggctgaacatgaagaatttgaaaaggcgtgactggttaaactatttcaagaaacggagggttgttcaatgatggcacttctgagaagtctggcgatatcgtttgtcctcattctgcctgcggcagcggcctacgcacaagtaccttatccatgcagcgtcgttcttgatccagtccgagatattcccaatgcccgcggaacggctttaattgcgaaagtgaagaaaccgtataccgaagcccccgggagtcctgtcagggaaaggcagagtgtcggcatctacgctgattggcttccggaccctgcttcatttggagattatgatcaatttgaaggaattgcccggatacctgaccagatcagctggcgtttcaccatgcatcaagtccaagaagacgcgccgagctggtttggcggaagtccttgggcgggcaaatttgacgaaatatcatcagagctgactgtgaatacccaagtcgaagtgcgccctttcaattcgaagacgaaaaaggccggcgaagctgttttgcgtgggaatttgcaaggatgcaggagctaaccaaaaaggccgtaaaagctccatggggacgcttctacggccttttttcatgtagaagaattttttcttccggaaaggttagtatttttcgtagcgatcgcaaggtttaccgcagtaagagtggtcatgataaaccggcttatagcttgaataagagtgcggataatagtgaacatgttcgtatttatgatgatccacttttttaatatgctgcggatggatgtgaggaacgatcgttttagagaatctgtgatcctcacagtatctagtaggatgcacaactggcggcagaacgcgcggtttgcagtaagacataagcacttctcccttccttaggtttcattcttcactatcagattatgttgattagcacaaacttgtactaatacaagaaactaaaaatccgtccattttccccgcctttttgctaaaaagtgtttctcagatgctataataataaaaatactattgaaaatggagctggacagatggacgcgatatcgatcgtttcttttttgggtgcggccgtactgctaacacttatgccgggccctgacaacctgttcgttttggcacagagcatatcaaagggaaaatcggcgggtatagcaaccgcatccggactatgcacagggctaatcgtccacatcacggcggctgcagcaggcatttctgctgcgatctatcaatcagctgtcgccttctcgattgtaaaatatgcaggtgcagcctatctgctgtttttagcttaccagtcttttcggcaaaaaagcgccggtttcaacgttgaagccaaagattcattgaaccgcagggctttatatcaaaaaggcgtggtgatgaacctattaaacccgaaggtctcattgttcttccttgcctttcttccgcaatttatccaccccggcaccttcaatgtgacaacgcaaatgcttgtttacggcatgttatttttgattcaagcgttcgctatctttgtgatgatcagcctgtttgcggaaaaagtcggagaccggctgcgcagaaatccgcaagccgccaaaaaagttcatttgctggaagggtctttgttcgctttgatcgggcttaaaatagcggtcagccaaaggtagaaccgctgaaaaaaggtatgcagcctgcacaccttttcccgattttattgcttataaatgtgacgcgtttaccatttccgccgtcgtcttcgttagtaaacggtctcaatgacacggcggcatctcatccttaaaacatcgaggttcagtgaaaatgaacagccctgcattccgttttcgttttcaagtttgatcgtttgggcgggaaatggtgttgcggaaacgaattgatttgttcttcagctggagtagatcacaaggctgtcaaattctacagcgctttcttactatgtttgattccttcttcgtttcattgcatagtggagtgccagacaatgagacaaaaatttaaataccgtttttctctatactcccccctttctttgatgccagtatacaaatttacagccgctgcgtaatgatgcaaatcggttattttccgctcaatctaaatgatcagatcgaataaagcggactcattgatctagggacggcagatcagtcaaacgataggtctgggtcttttttgatagaaaatgccgtttgcctgaggtaaaacgggatcgttgattggcatatctgctataaagtcttcgctttttatcagcaaaaaagactcgaacagcgagtcttttcaatttatttacaaatgatattttaaatgttataataaattgtttacaaaaataaaatctatttttatttatataaatcgataaatgtaaaaggaggtaaaaaagatggccaagacttcaatgattgtcaagcaaaaacgggaacaaaagttcaaagtcagagagtacacccgctgtgaacgctgcggcagaccgcattccgtgattcggaagtttaaattgtgccgcatctgcttccgcgagcttgcttacaaagggcatatacccggcgttaaaaaagcaagctggtaaaacgatttcgccagcccaagaggctggctttttttatttagctctgttaaattttaatattaatacttttgttcaacatcccttcagctcaataagaacgatttaatcagttgctcattatacacactaattgagtgtaaattctcttttaataagctatcagtgatttgctttattacattcggttctcgtaagccttcgttttcaaatgttacaaggtcatttactgttatccacttgctgtctgaaatttcatcttcttcgagatttaaagaacctccagtaacttcgccgataaaatgaaataaaataacttgattgttcgtactactgataaaattataaacacctgtagtggcaatcagatttacgtcgaatccagtttcctctttaacttcccttcgggctgaatagagaatgtcctctccatattcgatacgtccgcccagaaaattccacttattaacagaagtaggcttattctcttttatcatcaagactttatcatcactaaagatagatacactggctactaaaacaattccattttgcgacatccatttctcctcaatttctttggaaatgatattatctctataatatctgattcgcttcttctatcaataaccgccttgtttttgctcgccttgacaacgatatcgaacgcacgttcccattctggttatatcaaggattcgtataggtatcaaatatcaattttcctatataaagcctttatttaaaataactcaggagccgttgccgtccaatatttgaacaaacccgtttgttccgtcgactcggatgtaagcgccgtcttctatgatttctgtcgctttgtcgatcccgacgacagcaggaatgccgtattcccttgccactactgaaccatgggtcatcatgccgcctacttccgtaatcagtccgaccgctgaagtaaagagcggagtccagcccggatcagtatacggcgccactaatatgtccccttgattcagcttcgcgtcttcaggactctttgcaactctggcggtcccttcgatgattcccgcggaaacaggggtacctgtgagagcgccttcaggacttttttcatttcgcagctttcctgtgatgatctccccttcactcgtcatcacgcgtggagatgtgagcttttgattggacgtatgctgccgttttctgtctgctaacaattccggaatatccccgatgccgcgattctccaatagggcgataagctcctcaagcgtaaagtaaaagacatcttcttcacaattcaaaatcccttttccaacgagggtgcgggcttctttaagaatcgcttttttgtataaaaacatctgttttacaagtgtaaatttatgatgctcccgcattcccatcaagcttcggtacatatgaacgagccgggagactctctttttttctggaaaacgaaattgagagatgatctccttttttgcctcttccgcttcggtttcaccttgtttaaatttccttctgtgttccccggcggcaatcgtccgaatatggctgagtatggacggaacgagctgaaccggggcctcggcccatctcggccttgtcaaatcgatttctcccacgcaccgcatcccgtactttttgagaaaatcgtctaaactgcgtttcatttcggcgccgccggggattttgagcagttcttccataaaattttcgctgtttgcacgcttgaaatagtcaatgacagcaggatactttctcgcctgatcggaaagatctcctaactctagacccatttccgttgtgacattatggggcagggatttatacaatttccccagcaaaatagcgcttttctcgtcccccagcttctttttcagctttttttcgagcaatccggctgcaatcattccgctcaagacatacacagcgacttttgaaagcacgtcttgcaacatgtttcccattcctttttggatgacgcggatcgtctcagcaccggaagtccggctaagctgctcttcggtgtccgtcacgatcgcttcaatgatcaattccgcttttttctcggctttatccggatttctcatgagcaggattccggcaacttttaatgctgccggaatcaaaatcggcgccaaattcccggcaatatgaaaaatgccttttctggatgtggaatatagctgatgttctttgcgcttgactacctccgatacagctgatgccatcaactgatccatgccgctcaatactttaagcagccggcttcggacgaatttgagggagagagcacccgtaatatcggcaaagactcttcctcccgcttcgcgaagaatcggctgtgccgaaggatctttttttaaaaatcggaggacttggctgataaccgatacacccaatggtttcagcggatcggtcatcatttggatgtagccaaaattaatcaatacgtgcggcctatcatcaaaaaagcgtacgaccgggtaaagggatgtgatcggccggctttgaagaatgtaaaacctgccgccggcaaaagcccactcgatatcctgttccttgccatagtgagcctcgattttgcgccccagttctgctaattcaatgattcttggatccggcaaagcctgtgtttgttgtttttccggagagagggttttctggacggttcctccctctggtacggagtaaatggccaattctttcttagagagttgttttttaacgatttcaccagaccgaatctgatacagatcagcgctgacgacgccggacaccaacgcttcacccaagccgaagctggcatcgatggataccgttttgcggtgccccgtgatcggatccgccgtgaacataattccggaaacctcgggaaaaaccatctcttgaacgacaaccgcaagaaagacagagcggtggtcgaaaccgtttttcgctcggtaggaaatcgccctgtctgtaaacagcgaggaccagcattgtttcaccgcttcaagaagctgatctttcccgcagacgttcaaaaaggtgtcctgctgtcccgcgaatgaagcatctggcaggtcttcagccgttgcgctggagcggacggcataggctttatctttgccggtcgtatctatgccctccaatatcgccgatttgatctcgtcaggcatggagatctgagcaagatgctcacgaatttgtttccccacagtccgaatctgttcaagatcatcatgtttgagctgttcaagctgatcgaacagactgtcgatgatgccgcttgtttgtatgaacgcacggtaggcttcagttgatatgcaaaatccctgaggaacgggaaagcccgcttttgtcatttccccaaggttcgcccctttcccgccgacagagggcaagtcaaattgatcgatttcattgaaatacagcacgtatttctccattctatcctctccttaaaatccgctttttgcagcaactttacaccgcattttccagcgtgacatgcatcaatattcagctcaaaccatgaacagatgcctaacgcggcataccttctttatacgaataaaataaacactatgttgattaatattcatcatgtttattataattgcgcaaaaggagaacgcaatgaacaatcaatcggcaaatgttaagttctcaacacaaagatggaaattgttgattttcatgaaccgtcaggaggatttgaatgactgagcagaaaaaagaccgcagggtaaaacgcacgaaaaaaatgattagagacgcactctctgaactgatgaaaaataaagcgtttgaagagatatccgttacggacattacgaagaaagccgatattaaccgcggcacgttttacttgcactacgaagataaatacgatttgctggaccaaagcgaggaggaaatcatccaagagatcaataaaattgctaaacgctcgattcactcaatggatgtattaaatcaggatgtgattgaccatccgctgacattcgtcgtcgacatttttcaatatataaaagaaaacgaagtttttatgaaggcagttttaggccctaaaggcccgggttctttccgtttaaaattcaaatcggttttgatcagcaatttaaaacgtctgaaaacagcgatcagaacggatccgattgtaccggaagactacttgatttcctacataaccggcgctcatatcagcgttatgcagcaatggcttgagaacgggatgaaagagacgccgcatgatatgacgctgattttatcaaaaataaccggaatgggccctgcatatgcggcagggctgagaaaaaaatgaccggctttcaggaagagggataaccctcttttttgtcttttttcgtgttatgtataagaaatcaaaaacaatccaaaatatagtgaaaaaggtggtgagaccatgcagaagaaaggtattcaaaacagcagccttgagcagctgaaaaacgatcacgaaacagaaagcgcattccagcaggatgacaaaaacaataaacagcaacaaaacaggaatgctttaaaataagctgaaaggtgaggaaacgaaatgaagcatgtaagagcattgtgtttaaaattcattgtgagccttgtccttttatatgtggtcctaactctgttttttggcgttccattcggtgaaatgtttgttttgacattgtttctgggtgtgatatcctatctggtcggagatcttctgctgctgccgagaacaaacaatacaaccgcgacaatgggagattttggcctttcactcgtattgatttgggtgattctcgccatgcaaaataatcccccgtatggtacgcttgctgcagcttcaatcgtgtcagcgatcggcgtcacagtgttcgaatattttttccaccgctatatggaagccaacgtcttgaacgaaacagaaaacggaaaacgggaaaacagagaaaagcctggttcattgcagtatcaaagcgaatcatcagaggagctttatccggttaccccctctaaaaaacaggacgaagaataagcatgaaagcctgccgacccggcaggtttttttacgtttatgaccagaggcatttttcattgattaaaggaatatccgtctttttcacgaattgatataaaaaagtgaggaggacaaaaaatgacacatagcgcattaaagcatttagattatcacaattgggcgaatcaaagggtgctcacccacctgaaaagcctgcctgaagagctgttcacccgggaaatcaaaagcgtttttcaaactgtatctgaggttgttacccatatgtgcgtggctgacgccttatggctgaagatcatatccggagccgcttacgaggaagcaaaggaaacaggcatgcgtctgaaagaaggattaaagaggaaaaagagcgatgacttcatttccatctttcatgacacggcgcttcaatatgaagcgttttttgaaaatcttgaagaccccgatggtgaaatcacgattgcccatccaatattaggcgaaatcaaaacgcctattagcgaaatccttcatcacgtagtcaaccacggcacttatcacagaggcaatatttcagcgatgctgagacaaatgggtgaagcgggtgtgccaacggactatatttattatttattaagcctgaagcaaacgacataaataaaaaaacccttgttccgtctttggaacaagggtttcacaattaaaatgatgctgcaagctttttagcttctgctaagccgttttcaataattttttgagcgtcgtcaggaacagcgttgtgtccttcgatgacaacggtatgcaagtcttgaacaccgaagaagcccatgacggttttcatgtagttcaacgacatttccattgcagccatcggtccttcagaatagaagcctcctcttgcatttaacagagcaaccttcttatctcccatcaggcctttaggtccttcaggagtgtatgtaaacgtcactcctgcgcgggacaagtagtccacataagtgtgaagtacagctggaacggcgaagttccacaatgggaaagcaaaaacaaccttatcggctttgacgaattcgtctaagtaacgatccgctacagcggcggcagctttttcatcctcgttcaattccatgccttttcctgctttaaatgtcccgttaatggcatttctgcctaggtacggcgggttttctctgtaaaggtcaagctctacaatttcatcgtttggatgattttctttatagctgttaagaaacgcttcataaagttttacagatacagcttcttcagctgtacggtcattagctttaacaaacaatactttagacattctattttcctcccgttgctaacgttttaatatttacttacaaatagtatgttactttcatttaaatagaaagtcaactcatttatttttctaaccaaaaaaagcacccattgggcgctttatttggagtcctgttcctggtcaagccgttcatagacgtatgaatgtttttggtccatcgtttctttattcgtcaaatccttcatttgccgtgtaaattgccgatcattctctgtgcggtcttcttgtcttgcttctgcttccgcttgagcttcggcggttcttcgcgcatatggaatcgcttcaaggcgttcataggggatttcttttcccgttgtttcacacgtgccgtatgtgccgtctttcatcctatttaaagcgtcttcgatctctttcagcaaagcatcgtccgattgccggaaagcctggtccctcattcgttcggtatacacgccggcatggtcggcaagatgattgtcaataccgtttgaccattcgcctgtttcttcattcatcggctgcacctcagactttgtacctgtgatttcgttttttaagctgattaatttatcgtaaaggtgctgtttttgttcctctgtcaatggcatgttgatcatcctcctttctttttcattacccgattgccaaaagggaaaacgtgcatttctccgcaaaaaaagaccgttcattcgcaaaggagcgtttgaacagcctgttgagattatgcacataagtattttgataacagcgcttgaatttcaagcatgtcggtatccttcgtaaattccagatcaaagattttgctgctggtcatcagagaaagagaactgtctggattgaacatgctgacttctctaatcgcaaagccttcaatcgatctgtaaggcaggaagacgcggactttctttttagaaaacagtttattatcaaaaaaaataatccgcttgttcgtaaaacatatttgatccattcttagtctgcaaaccgattcaattttttctccttctataagcagcggttcaaattttttgccgtctgctgttttgcttgctgaaaaaacgcccaatcaaaacccctctttctatgtgtccaatttatgtttatgcacaaggcaaagtatgctgtcagttaataataaggatacgataaccctgatttataaacaattacgagcagattacatttctttaactctatatgtttgtttttactatcaattaatacgcccggcggacgcgtgaggtttcaacttttcatcagttttttcagcttatttttcgtttgctatgaatcaaaaggtgcatagcggatacagcaaaaaaccgcagcaagatgttctgcttctgcggttctcctctgacgttattatgccttttatgtacgtcggcacttggtcacacttccgattcagccagccgattttttatgaaagtgttcggttttgttgaaactttatgcgaatgaattcaggcttttacttcttcaaagtattctttgtaatagccgccgactttgtttgtattatcgatgataaacaaaaattctcccgtttcgtttttgacctcgtatatgttaccgacggtcagcgctctgttgacgatatactttttggcatcggtatgtatgcactttacttttttaatggttttattgttctgccatttttcatgaatcatgtggatgtctcctttttcatacgtgtatagtttccattgtagcgttttttcgccgaaatgcaatgcgctctgtcggcgaatgtggtttttgccaaacatgaatattgatttggtttcattccctgttatagaatggtggtgtatagttccaaaatcagaaatatatccctctttcatccgcgtaatgaccgaactaaaagacaaaccagcaccaagacaactcacctgaagacagaccaaaattttaaaggaggtttgtttgacaaacatgagttcattaacgatgcaggtcagtaagaagctggagtcatttttgcagggaacaaagaagctctatattaacggggaatttgtagccagcgcctcaaacaaaacgtttgagaccccaaacccggcgactggtgaaacgctcgccacgttatatgaagcaggtcccgaggatgtggacaaagctgtaaaagctgcgcgggaagcctttgaccgcggtgagtggcggacgatgaaccctgccgaaagaagccggctgatgtacaaactcgccgatctgatggaggaacataaaacggaactggctcagcttgaaacgctggataacggaaagccgatcagcgaaacgaccgcaggcgatattccgctgtcaattgaacatatgcgctattatgcgggctgggcgacgaaaataaccggacagacaattcctgttaacggaccttattttaactatacacggcatgagcctgtcggagttgtcgggcaaattatcccttggaacttcccgcttctgatggctatgtggaaaatgggagccgcccttgcagccggatgtacggttgtcttaaaaccggctgaacaaacgccgctttccgctctgtatttagctgagctgatcgatgaggcaggcttcccgaaaggcgtcatcaacatcatccctggctttggggagacggccggagaagctctgaccgaccatgcccttgtcgacaaactggcattcacagggtcaactgaaatcggcaaaaagataatggagaaagcggccaaatcggtcaaacgtgttacccttgagctcggcggaaagtcgccgaatatcatcctccctgacgccgacctgaagaaagcgattccaggcgcactaaccggcgttatgttcaaccagggccaagtttgctgtgcgggatcgcgcgttttcatccataaagaccaatatgacaaagtcgttgatgaaatggccgcttattcaaaatcgctccgccaaggtgcgggccttcatgaagacacgcaaatgggaccgcttgtcagcaaagaacagcatgaacgcgtcctctcgtatattgaaaaaggacgccaggagggtgcgaaaatcgcggccggcggaacatgcccttatgaacagggatactttgtttctccgactgtattcacaaatgtcgaggatgagatgacaatagcaaaagaagaaatcttcggtcctgttttggcggcgattccttatgaaacggttgatgaagtcatcgaacgggccaatcgcagcgaatacggcctcgctgcgggcgtatggacggaaaatttgaaaaacgcccactatatcgccgaccgtctgcaagccggtaccgtttgggtcaactgctataatgcttttgacgccgcatccccattcggcggctacaaacagtctggactcggacgtgaaatgggctcatacgctctggataactatacagaggttaagagcgtctggattcatacaggcgaataactcgacatgagcttctgcagccgccctgtcgatcagggcggttttctttttttatagaaataaacatttatagatacatatggtaaaatagatgacaattcaagtcgactggaatgatagaatcgtgtattcttcctctcttggcataaccgtctggaaacaaaaaaactttagatacatatgggcgtcgcaaacagcgcaggctgtcggatcaatcttgatgacgatcattgtcatggtcgatgtatttaaggaaacgaactctgtattcggatccggtctggttttggctttatcctcgttcggcagtgtattaggcggagcgatcgctgcttttgctattcagcgtctcgatctgctgcaaacagcggcctggtcaacatggttcagagcggtctgtgcattatgcatcggcttatgccaatcgcttggcttaccctcttatatcatttatctgctgctatttttgcaaagctttgtcggctcctggtatactcccgcacagttaggtttactgtaccaagccattaaaaagcgcgattacgtggctgcatcgggaagcatcgtaacggtcaaccagtttgtccaggcggcaggctggggtctcggcggctttttaaccgttttggcccagacttatacgttgacagtgtttacagcagcactctttttcatatcagggcttttaatcagattgccggatttcaaaaaagcgattatccctcgtcaaaaagcccgcgcacaatcggtctggcgcactgtttacaggaagaaaaccgttttgctgcttacgatgatggacatgtcggaaggtttagcaaatgcagtctggacttccgccgttttgctggcttttactaaagaggcgctgaataaaggagaggcttggtggggattcatcaatgccggttattttttgggagcgattttgggcggcattctcgctgtgctcttttccaaccagctcaaaaaaaggcttggcctcatgattttctttggctccgtttcaatgggcatcacaacgcttttattcgcctattcgtccaaccccctcctttcggttatcctctgtatcatgatggggccgctttatcaagtaagagacgtcagccagacggttatccttcaagatacattgactgatgaagagcgtgcaccggttaccgccgccaaaaataccattttggctgcatggtctatcataacaatcgccatcatgggggctttggcagacttgatcggggtacgaagcgtatttatcgctgccgctgtattatatgccggaacagccgctgccacatttttcgtccgggatttaagaacgtacagccaatctgcaaggcagcagacgaaagggaaaatagaaggatgaagctgctgcggttttttctcattaacgggatatttggagtgatcgtttttgaaataaaagaagcacagcggcgctgatcgccggcggtctgtcttcggcggcgtttgcagctgttcagcaaagattgaataataagaacaaacaaagcggcgatcaaaaaatcaaatgctcccgcgtcctccgattcagcgggacatcagctcttcgtattcccgcttcaatatccccataatgatttcatccgagtactgctcattcatataaagagcctccctgatccttccttccattttaaatcccgctttttcatatgctttcagcgcgcggatattgtgtgaaaagacttcgagctggagggggttaagatcgagcctttcgaaagcaagctgcatggccagccgcaccgcttcaatcccatagcctttgttcaaataagcggggctgtgcaaagcaattctaaaccccgcttttcgattcctccggtcaatgtccataatggacagatcgcctatcaaacgatcgtcctcctttaagcagacggcaaaatcatagcgcgtctcatcactcgtgattctctcatagtgctcataaaggtcttccatcgtatattcgcgcgtcgtgcccgtcatatacctgatgtcttcattttgaacggctttgtaaaagctctccatatcgcctttttcaacaggtctgagataaaccttgcggctcttgaacatcgaacgcccctcccctgctacttttgatacgcggcaaaccaatggtatggctgtatttcctttaaagttttataaaccaggcgcccatccggtacagttacagctgctttaagatcaggaccccaataaaaaagtctttcctggcataccccgcacggcgttaataccttgcattcggaatgttcgtcgtctcttgcaacacaaacagagtgcgttattttcgcctgatacttatgggcttcgagaatggcgcccgtttcaatgcataattctgttgaagcgttgattacttccggggctacgctcgttaagattcttccgtcctcggtatacatggcggctgccccgccccatccggtcggatacctctttttgatcaattcgactgcggtgtcatacagcatctgttcaatattcattcatcaacatctcccaaccattgtttaatctaaagtctctctttatacaatacctgatgttggaacgggggtaaatgaagttattaaagacaaatcactacactcacgattccctgatgatgcccaccgcctaataaaagcgcggcgtgcccatgctgacttgacgactgtatcctcatcacttatttaaaatctatgttcttctgttttcacccgattggcatgacacatttcccaaatgaatacagtaagatgaaggagatgagaagattgcgatctatactagaagacgtgaaagctttcaggcaaaagacgctcgcagagcttcaaaacagacaaagatctgatggttcgtggcggttttgttttgaagggcccgtgatgacggacagttttttcattctgatgctgacatcactcggcgatcaggactcttctctcatcgcaagtcttgctgaacgaatccgttcaaggcagagcgaagacggcgcgtttcgcaatcacccggatgaaagagcaggcaatctgaccgcgacagtccagggctataccggaatgctggcttcggggctctatgaccggaaagctccgcatatgcagaaagccgaagcttttattaaggacgcaggcggattgaagggcgtccactttatgacgaagtggatgctcgccgccaacggtctgtatccatggccgagagcctatattccgctctcgtttttgctgatcccgtcctatttcccgctgcatttttaccatttcagcacatacgcaagaattcattttgtccccatggccattacgtttaatcggcgattctctttaaaaaacaaccaaatcggctcgcttcggcacctggatgaagccatgtcaaaaaaccctctcgaatggctgaacatccgcgcctttgacgaaagaaccttctattctttcaatctgcaatggaaacagctctttcaatggccggcttacgtccatcagctcggatttgaggccggcaaaaaatatatgctggacagaatcgaagaagacggaacgctatacagctatgcgagcgcgaccatgttcatgatttacagcctgcttgcgatgggaatatctaaaaacgcccccgttgtcaaaaaagcagtcagcggaatcaaaagtcttatttcatcatgcggaaaggaaggggcccatttggaaaactcaacttccaccgtctgggatacggccctcatcagctatgccatgcaggaatccggagtgcctgaacaacattcttccacctcatcggcagccgactaccttctcaaaagacagcatgtgaaaaaagcggactgggctgtctcaaatcctcaagcggtccctggcgggtggggtttttcacacatcaatacaaacaatcccgatttggacgataccgctgcggcattaaaagctattccgtttcaacggcgtccggatgcatggaaccgggggctcgcctggcttttatccatgcaaaacaaggacggagggtttgcggcatttgaaaaagatgttgaccatccgcttattcgaaatctgccgctcgaatctgccgctgaggcagcagtcgatccgtcaacggcagacttgaccggacgcgttcttcatctgctcgggcttaaagggcggttcacagataaccatcctgcggtccggcgcgccctcaggtggcttgatcatcatcagaaagcggacggctcttggtatggcagatggggcgtctgctttatttacggtacatgggccgcactcaccggtatgaaagctgtcggggtttccgccaaccagacgtctgtcaaaaaagcgatctcctggctaaaatcgatccagcgtgaagacggaagctggggagaatcttgcaaaagctgtgaagcgaagcgttttgtccctcttcactttggaacagttgttcaatcttcatgggcgctggaggcgcttttgcaatatgagcgtccggatgacccacagatcataaaagggatccgttttctcatcgatgaacacgaaagctcgcgtgagcgactcgaatacccgacgggaatcgggctgccgaaccaattctacatccgctatcacagttatccttttgtgttttcattgctcgcttcaagcgcatttattaaaaaagcggaaatgagggagacatattgaacagagatgcttacaaagaaaaaatatcgtcatgggccaaagacctgaaagaccagatgaaagatgatccttctttagaaagccatttagaaaaactttttcaatcattggatgatcctcgtgcgaccgaacaggaatggtatgagcaggcagaagccgagtatcaagccatctcccgcagtgatgcgtctcaagcaggccggcagccattcagaacagtgccgatcggaggccatcgcctgccaagcctgccctactcgtattcagcccttgagccctatatttcaaaagaaattatgtttcttcatcatacaaaacatcaccaaagctatgtcgacggtttgaacagagctgaaaaagaactgcagaaagcgaggcaaaccaaacagtttgacctcgttaaccattgggaaagagagctcgccttccacggagccgggcactatttgcatacgatattttggtacgcgatgcacccaaaaggaaaaagacggccgacaggtgaattgctggagatgatcaaccgttcattcggcagctattcggcctttaaagaacatttttccgaagcggcgaaaaaagtggaaggcgtcggctgggcgatcctcgtctgggcgccgcgttcgcaccgcttggaaattctgatcgcagaaaaacatcagctgatgagccaatgggatgtgatccccctgctcccgctcgatgtatgggagcacgcatattaccttcaatataaaaatgaaaaggcaaaatacgtcgataattggtggaatgtcgttgactggagagagcctgaaaggcgatttgcgtcagcaaagcgcgttttatgggagccgttctgattcaaattcgctggcgggacttcaatagttgaagtcctgtttgcgtttcggcagatcatgcccatttgctgcgccggacattggcctgatgtcgccgaaatttctcctccggattccccgtcatcagagatgaataagccgtgccttaaaatcctctcgcgcttttccttacatgaatgcttctaaaacgcctggcagccgtcgacataggtcgtgcgcatctatgctttctcttcaaccctctattgtatataagaagataaccaataaatgtttatatatcccagctattttcctcattcttctaattccaaaaatcgttaagctattctatgagaagggaggtaatagatgaaacaaactgtcgatgtttgtctgattcagctggtcagttttttgaaaaatggcaatttatattaggagggttaatcatgaaaaaaatgtttgctttctttacagctttaatgctcggtttgacttgtctgccatacttatcggaagcgaaagaatcaaaacatacggacagttctgttacaagcttgccttctatgtctatacctacatctctcaatcagtcattgaacgaggaaaaacagcagtttaaaacttccgctattgatctcagcatcagcctcgacctcttaggaatcggaaactcgattagagacgctatcgttcaaagcaataaccgcagcggtttcgtcaaaaactgcatggaaaccgctttttattctgcagggcaaagatacaatgtcatggtgttcaacttaagccaaggctatcacaatggtttaagaggagttaaattttatggatctgccaactatcatggcgtgatttacggcatttgggtatttgaaagcggacaatttacaaaccaaggagacggcggctggattaactgggcctttaaaggctggtttgatcgaaacggccaaacagtaacattccgtaagccttaatcaaagtccatgtatccccctcttctgcttgccggtaaaccggcaagcttttttaaatttctgaccagaaaaacaaccgctttttcccttcctctcccccctttcatcacacacttcttgccggttataccgccgagaaatgaaagtgcggctgacctaagcgacacgcaactgtctgcatgaaaaaaggccggatggtccggccttttaaaaacaatttattcttaaaataccccgatagcatccaaaaagacgacaataatgacgattggagctgcgtagcggatcagcagaagccaggctgcaaaccattttctgctgattttagagccttctttcaattcggcaaaaagctcgtctttcggaattttgagcggcacgaaaacggcaattagcaaagcgccgagcggcattaatatattgctgacaagataatccgccgcatcaaaaatggatagattaaaaatcgacacatcctgaagcacgccgtatgacaatgctgaaggaataccgaataggaaaatcgcaattcctcccgcccaagcgaaagcctgtcttttcttaggatccccttttgacaaggaagaaacaaggatttcaagcattgaaaatgcagacgtcagtgtagcaaataaaaataagagcagaaacgccaataaaaagatgattcctaaaggcatcttatgaaagactgacggcagcacattaaataacagcatcgggccggcatcaggagataatccgaatgaaaaaacggccggaaaaatcgcaaacccggcaagaatcgctacagatacattgagcaatgtcactgaaacggctgactgtacaaggttttcttttttcgataaataagagctgtacgttaccatcacggaaacaccgacgcttagcgagaaaaaggattgtccaagcgcaaacagcaccgtttcggctttgatatgtgaaagatcaggttttaagaaaaactccaagccctccattgaaccgggaagtgtgagcgaacgaacgatcaaaagcagaaaaataatgaacaaagcaggcatcataaacttgctcgccttttctattccgcttctgactccttttgcaacaacaaggatcgttatgatgataaatgcaaactggctccctagaacgagatactgatttgcaatcgtctccccgaaaagaccggcataatccgtacttcttgacagttcaccggtcagccctttgacaatataaatgatgatccagccgccgacaacactatagaaagacagcagaatgaaacacgtgataatgccgaggcgcccaacccagtgccagagcgagccgggagcaagctccttataggattcaaccgcatctttttgagtctttctgccgataatgaactccgccattaataaaggaagcccaatcaataaagtaaaaagaataaacataagtaaaaatgctccgccgccgcttgttccggcaacataaggaaacttccatatcgcgccgagcccgattgccgaaccggccgaagctaagataaatccaagctttgatgaccatatattttgtttattttccacttaagcacctcttcttctcggtctaattgcacatggctacaaactatcattttaaaaagcataaacgaattcgtcaaggttttcaaacatttctttcagtttacataataatattatgttaaataattctttattttactagtattgaattattcagaatattaattataataagagaatgttacattttctacagatgtgaggagctggacttatgagttatttgatcaaaatcagtcaatttgcaggaaaaacgttcgccatttgggtgattctatttgcgattctcggctttgcctttccgtcgcagttcacttggatcgtcccttatattacgattctgcttggcgtgattatgtttggcatgggattgacattgtcagcggacgattttaaagagctgctgagacgtcccctgcatgtgctgatcggtgtgctgattcaatatacggtgatgccgttgctcgcttttggactggcctatggactcgctctcccccccgaaatagcagtgggggttatattagtgggatgctgccccgggggaacagcatcaaacgtcatgacatttctggcaaaggggaatatcgccctgtctgtggcgatcacaacgctttccacactgcttgccccttttttaacgccgtttctcattttatttttcgcgaaggaatggcttccggtatctccgggctctctgttcgtgtcgattttacaggcggtgctgctcccgattatcgccgggctgatcgttcaatttttctttaaaaaacaagtgaaaaaagctgtacaggtgctcccgcttgtctccgttctcggcatcgtcgccatcgtctccgcagtcgtcggaggcaatcgggaaaacattattcaatcagggctgctgatttttgcggtagttgttcttcataatggcctcggacttttcctcggctttgttttggcaaagtgctttaaaatggattatgcgtcgcaaaaagccgtgtccattgaggtcggcatgcagaattcgggtctcggcgcggcattggcgacggcgcacttctccccgctttcagctgttccgagcgctgtgttcagcgtctggcataatctttcaggttcatggcttgcgacatactgggccaaaaaaacaaataaacagaagaatgacaatcattctcctgccccgcaaatgataaataaaaagctttgaccgtacttacggccaaagcttttttatgattaaccttccaacagaagctgttcaggatcttcaagcagatttttaatcgtaaccaggaagccgaccgcttcttttccgtcgacgatccggtggtcatacgataatgcaatgtacatcatcgggcggttttcaaagcgctcttcatcaattgctacaggacgcagctggattttgtgcatgcccaaaataccaacttgcgggctgttcaaaatcggagtcgataacaatgaaccgaacgttcctccgtttgtgatcgtaaaggacccgccttgaagctcgttgagcgacaatttgttgtttctcgctttcttcgcaagctctccgatatccctttcaatatcggcaaaggttttgcggtccgcatcgcgcacgaccggtacgacgaggccatccggcgcagcaacagcgattccgatgtcatagaattttttgatcacaagctcgtcgccttgaatttccgcgttgaggagcggatattttttcagcgcggcgacaacagcttttgtaaagaatgacatgaatccgagcttcacgtcatgctgctccaggaattgatcttttcggcgcttccttaagttcatgaccgccgtcatgtccacttcgttgaatgtcgtcagcatagcggcggtgtgctgaacttcaacgaggcgtttggcgatcgtctgtctccggcgggacattctttgacgctctacaggtttaccagcatcttcggtttgtttagcggccggcgcctgtgttgcgcgttttggttcaggctgagcttttggcggctgctcgttcttttgataagattcaacatcctgttttctgacccttccgagcggatcaccggtagggatttccgataaatcgatgcctttttcccgggcgagctttcgggcagccggagaagcgatagttcttgttttggctgtatccgcctcatcgctcgcaccttcgcgaggttcggctgtcttttcagacgaggctgctttctcttccgaagcgccggcgctttcttgagcgtcagcttgcggagccgttgatttgcctccttctccttcgccttctgaaatcgttccgattatttcgccgacctgaaccgtgtcaccggaatctttcagcacttcctgaagaacgccggactgctctgccgtcaattccacgttgactttatcagtctccagctcaagcaggaattccccttgctctacataatctcccggttgtttcagccattgggctatcgttccttctgaaattgattccgctaattcaggtactttaatttccgccattttatagttcccccttaatttttgcgagtcaagctatcagatacaatgcgttcctgttcctttttatgaaccgtcggatccccttctgccggacttgaacgtcttcttctgccaatatagcggaccttcacgtcctttggagctacctctcttaaataaggctcgatatagttccatgcgcccatattttgcggttcttcctgtacccagacgatctcctccaaattcggaagtttgctgaagatcgctttaatatgctttgcagggaaaggatacagctcttcaacccgtgcaatgtgcagccaatccttttcaccttccattttattgaaatggtcgctgatgtcaatcgaaactttgccgcttgaaaggacgaggcgcgtcactttgtcatattgatgggaaagtcctgacatttcatagaccggcttaaagctgctgttactgagctcctgcacttctgacacggtattcggatttctcagcaggcttttcggcgtcatgatgatcagcgggcggatctcctcgcgaaggagcatcttcgcctgccttcttaaaatatgaaagtattgggcagcgctcgtcaggttggcgacagtccagttgttttccgccgccaattgaaggaatcgctctgttcttccgcttgaatgctcaggcccctgcccttcatagccgtgcggcaagagaacaaccagccctgatttttgaccccacttcgctcttcctgcagaaatgaactggtcaaagtaaacttgcgccgcatttgcaaaatctccaaactgcgcttcccagatcaccatcgtttccggcgaagacacgttatagccgtattcgaagccgaggacggacccttcagaaagcgggctgttgtgaaccgcaaatgacgctttcgtatcggcaaggtgatgcagcgcgatgaattcgtcccctgtcttgctgtcgtgaaggacaaggttgcggtgtgcgaatgtgccgcgttctgaatcctgcccggtcagccttagcggcgtaccgtctttcaaaatcgacgcaaacgccatcgcctctgcaagcgaccagtcgacttttcggtcatcttcgaaagctttggcgcgcctttcaaggattcgttttagcttatcgaaaacgttgaagttttccggccatgaaacaagctcctgattgattttgcgcaaagtttcaaaatcaaccgatgtgtcaacatcaggaaaaccgttggagaccggctctggaagtacgatttcatgcgtcatgtcttcctttttggccggcactttgcgataggcttcttctaaacgcttctggacagcgtccttgattttgccgacggtttctttatcgacgatccctttatgaatcagcttttcagcaaagatgtttttgacggtcggatgctttctgaccgcatcatacagcatcggctgcgttgcggacggctcatccatttcattgtggccaaaacggcggtagccgatcagatcgatcaaaaagtctttgttgaaagtcatgcggtattcaacagcgagctgaaccgctgaaagacatgcttcgggatcatcagcattgacgtggacgatcggaatttcaaaacctttcgcaaggtcgcttgcatatttcgtcgatcttgactcattgctttccgtcgtaaagccgatcatgttattggcgataatgtgaatcgctccgcccacttgataccctttaagctggcttaaattcagcgtttccgcgacaatgccttcccctgggaatgccgcatcgccgtgaatcagaatcgccagcgattttttgacgtcttgaaccggatagccgctctccgttctcgtttcctgggcggctcttgtcgatccctcaacgatcggatcgatgaactcaaggtggctcggattgttcgcgagcgcaatgcgcgccgttttcgtatgctcatcctgaatctggcggttggcgccgaggtggtattttacgtcgcccgtccagccgtaattgatcccggtcgaaccttccgacggaacgagatctttgttcggcgcatgctggaattcagaaaaaatgatttcataaggttttccgagcacatgcgcaagaacattcaggcggcccctgtgcgccattccgatattgacgtttgtcgtacctgccgaaacggacttggcgataatatcatccagcatgggcacaagcgcatcaagtccttctattgaaaagcgtttttgcccgacaaaggttttgtggagaaactgttcaaggctttccacttctgtaagccttcttaaaacttctaccagtttttctttcgatttcggggtgaataattccccggattcgatctttttcatcagccagttgcgctcttcaaaaatgtgcacatggtcaaattcaaaagaaatcgattttttgtatgtgtttcttaagtactggatggcttctaaaccgttcgttacttctttaggggcatctttgcatatgacagacgccgggatttttttcacatcctgctcagttaacccgtactcagcaagaggaaaaagctcctgtttctcttgtgtttttctcagtggattgacggaagcgtttaaatggccataggttctaatatcttctgcaagttttaccgctgatgcgattttttgaatagatccagccgtgaaatctgcctcttcgtttttttgagaggcggccctaatatcgcccgggggagctccaagttcgtcaaacatctcttttaaatcagcatccaagctttctggatccttgacgtactgatcgtaaagctccagcacatagccgaggttcggaccgtgaaattcttcccaagtcattctttgtttcatactattttgaaacatttgaacattacccccaacctaataatcaagtgaatgattcactatcttaatatatcttctgaaccttgcgcccagaaatatgtaataaaaacgcttccacgtacattttaccactgtttctcatttgtttctacacagattgttcaaataaaattaaaaaatcgtcttgaaaaataaaaaaatttataatttcgaactttcagatccctttctttcaggacctgatctttatttattcacatatttcccctggccgtctattttttaacatccggatgtactccttaaaaaattaagttgataaaaataataaaaatttcgttatttcactgtgttttcacgataaaaaacagatggccgcgagtattgctgccatctgttatatctatcctatacttttgttcaacagcttttttaaaagcgggtacagaacatcgggaagctgatcgacgtctgggacaaaaaggctgtactttccgtacatgtcctgtatcgtcttcatttgcgattcttcaatttcgctgtttgataaaaatacattgatgacttcgatatttcgtttccgcgcttccatcaccgcttcatgtgtatcgacgatcccgttttgctcataatcgaatgcggccggctctccatctgaaaagacgatcaggaacttctgagcttcgcttctttgaacaagcatcttcgtcatctgtctgatcgcatatccgtcccggttgtcttcctccggttcaagctgcataatgtgcggtccggcgcctgcttttaaggaatccgcaaaagaaacgaccgtatgaaagtagttgggctggctcgtctctgtcgcatcgtttgtatcttcccaaaaaccgacgatttgatgagggacagcaactgatttaagcgcttcatgaaacagcacaatgccccgtttcgtctccgccattttgtcatgcatgcttgccgaacagtcgacgagcaatgtgaaaacggcgtcgatttctgttgacggctcctgctttttatagaacaggcgcggattgcgctctgtaaagtaacggagcagtttattgttcaatctgcctgcatgcaaatcggttctcgggagtgtttttttatgctcaagcgttttttgaatcatctgtttgagccgtttttgatatgattcgattgttttggcttgagcctggtagtctaatatatcttcattcgaaggtttttccggcggcttcatcaccgaaaaggcatagcggttttctttaccggcttgggctgttccggcgttcggttcatcttgaacagattcaagcgattcaagttttgagtagtctttccttttcgtctgcttcgccgttccttgaacagacccgagcgcttggtcgccgtcttctccttctcttaaagcgccgccggaaatatcggattttgcgccgtgctccaaatcaaactggagaaagcttttggccggagcttccgtttctctgtgccaagtcggcatttcttcttcatgaacttcctcgtcacccgcgcttttctcttccagcgtcagatcctcgctcagcttcggttttgcttttaaatcttgaaagagcgcttcttcgtcaacttgttcgtagtcaagttccggaaaaaagaagtacgtattcagcatatctttttcgagcacttcttcaaaaccttccattaacccgtttacaatcgaaacgatgtcagcagttgaacgcgcttcgaatacgcgggcgagctcggcttctataaaccccttcatcggatcgaccgattcatggatagccggtatctcttcaagcggcgactccgcggtcagcttaagatatgcagcgcaaaacaaagcatctgtaaaaatgctccgctccagattcagcgtcagctgtgtcgcaaagtgtttgcggtacatcgatttccggtttgaaaatacctgctttgtaccggggcgctccctcttgatggactcttcaattctgatatcctcaaaaagcataaacaactgttttgccaaactcttaaactgatatttccgagccgagtccagcatgcgggaaaagtctttcatcgagctgtagcgggagccgattgaccgcaagtatacatcgctcttcaagccgtctaccatatcgcggtggttcctgtctttccaaaagtggctcatgtagatctttttctcaaaaggattgtaataagactgaaccccgtactccacttcaacctgatcgcttttcgcgagcgttttcgccagatctgtcagctccataaatagcaaagagtcaatcttgctgtcattgaatttaataaacttcataaaaaaccctcattcgaacaaagtttgggcaatatttcggaccgccgctttttcgcgttcatcatcaagcttttcaacgatgccccgttcgatcgctcgcagcggcggaatatacgtcgacagatcgcaagtatcgagaagcgctctgatggaagcagcctcttcagatacctgtccgttgtgggcttgcgtcattaaatccgatgacagggtgacaaaccggtccagcagcttctgattttttagttcggattgtgtttcaagcacccgtttcagcaggtcgcctttaatgtatggcacgtcgatgatcacaaaccggtttttcagcgcttcgttcaatgggactgttccgacatacccttcgtttattgctgcaattacgccgaatccctctttcgctttgacgacttcccctgtaaacggattggtcatcattttccggtaatccagcaccccgtttaagatcggcagcgtttccggtttcgccatgttgatttcgtcaatatataggaaatggccgttgttcattgcttttgtcacgggaccttcgacaaattcaatagaggcgttcccgccggtgttttcaatcgttttgtaaccgacaagcgcctctgcatcaaggtccacagaacagttgacactgtgcataggtttttgaaaataagcggagagcgtttcggcaagttttgtttttccggaacctgtcggaccttttaacaaaacgttttttccgagtgacaacgcgatcatcgcgtcatagagaatggcgctgtcttccgcttcatagccgggcgtcccaatcaatgattggtattccgcgtcaacaggtttagcggcagactgaatcagccgctcttttatcttttcaggcagctctagttcgtgcagatcatatttcatgtgttgtaaaattcctttctaaaagcgtcttctgtatttaagtatactagaaaagacgcgctgccctcaatataaacggcttccaggcgccgattcacttttttccgctgttcgtcagcgctccgcaaaccatccgggctccggagttacctgatggatttgtcaaatcgtcatcctgatgctcgtgaataataaaagcacttccgtcatgatccagcagactgaacttgcttttctgatcgagggtgactgccggcgcattgacgatgacgtcgactttgccgtctgctccgacttcaatattcggcaaatcaccggcatgcggcccttttggattgttaaagccgtgctccttttgatcaggattgaaatgagcacccgcactttcaaaatcaggctttttgcaaacgcccgtttcatgaatatgaaaagcaagcatgcccggcggcagatcatgggcgctcactctaatatcaaggccttctgcagcagattcatacacttctataaaaccggtctccgtcccgtcgcgtttgatcagcggtacttttaatggctgtgtcatcgtttcaaaagtttctttatgttcctgttcggcatttttttgctcgatttctttttgctgtgtgcatgcagctgccaaacaaacggacatacatgcgagcaatatgtaatgtaatgttctcaaacagcttcccccttcgcttttcttttcagtttagacaatgaagaggggcattaaacctgtccttcccatcctgaaaccacgcaaaaaaaagccatataaaatggcttttttaaaatgaataccgttttgcgccgagatagcgctgcttccagtaggaattgttcatgtcgctcacggtgacgccggaatcgttggcattgataaacttgttgtttcctaaataaatgccgacgtgtgaagggcccgctttatatgttgagaagaaaacaaaatcacctcttgaaggctggctgactggcgacatgatgttccagtatcctgctgcgctcagccttgagacagatgtaactttgttcaacgtgtaatagatgaatccgctgcagtcaaaaccggaaggattgttgcctccccatctgtaaggcacgccgatatgcttttctgcctctgcaatcatccgctcgacttttgcgcttgtcgaagtgccggttgaaactgaagagttcggcgagctggaagatgggctgccagatgaccctgaagacgatgcaccagaaattttaagcttctggccgacttgcaatacatctgtttttaattgattagcctctctgatgctctgtaccgttaccttcatcgaattcgcgattttccacagagaatcgcccggtttaaccgtgtaagtggtcgtttttgaactgctgcctgtgttcgttttacttgatgaagagcttgaagacgaaccagaagatggtttgcttccgctggaaactgttcctttcactttaaggacctggttcgggtagatcgtgtccgacttcaagttgttcagcgttttaatttcggcgactgtcatattcaaactattggcaattttccataaagagtcgcccaatttgactttgtatgtgctgcttgaactgcttgcactttgtgagccggatgatgagccggatgatttggagcttgatccagagctggaaccggcgctttttgcgcttcctttaataaccagcttttgtcccggataaatcatatcgctgctcagcccgtttaagtttttaatctcttgtacggtcgttttgtagtctctggcaatcagccacaaggaatctcccaatttcaccgtgtaagtggacttggcagcgcttgaacttgagctagaacttgcggattttgtctgtgagctgcttttcgacttgccgtccggaacttttaaagtttgtccgacataaataaccgtcgatgaaagattgttggctgattgaagtgccgaaacactcgtattgtactcagctgaaagcttccacagtgagtctccgcttttcaccttgatggtttgggcttcgaccggtgacgccgccaatgaagttccaactaccgcagaggccgccaaacctgctgctatcttcttcttcataacctcttaacctcccgtttcattttcgttctctctatgtatgccattacatttgccattgcttaagactttatccagccgatcaggcgggtgatctgatcaccatatgtatgcctttggccgaaatcccccttttatactcttaagcaaaaaatgcaattcacgatttgtatcggtctattttatatttttttaatagctttttttgtttttttactaaatttctcattaaaaatacagactgatagacatattgacaaaaatcaacacttttttctgtgtactcgaggtgccggatgcttttttgcaaaggttttgagtttcaagttttcggaaatacgatgatcagttgttttaaaatcagaggttcatggtgaaaacagcgagaagggagttgaccagatatgctgcatgtgccgaaacagccagaatagacgccataacatgcggatttccgtgccgttttactgccgatttctctttctctcggatcaaacggaaacaggtaggcaagccagcgttcatgttgagggtgtgaaaactgcgtgttcatattcttttatttttccggaaatcgccgatctatcctcatctattgcctaatcgaaaagcaaagatcaggatcatttatacaattttacatttcagcacaaattcctccacgaaaccataaattgactatatcatacattttttttgccaacatccggaattgggagtatctttttttagatcgaacggcgttttactatttcacctatagattcttatttcctatcttaatataacgatatacagaaacataaaacttaatgctcactcatttatatatattaatagatctaatatactatcaaaacatgtaaaaaagggttctgttttatcaccgcagctttcatgcatgtttcctccttttatggcgcattttaagatatggaggtgaatcttcttggccattcaaaaaatatgtcaatatttatgtacgtgtttagggatcctttctctttcctttatttatgtgcaaatgtttaaaaaaacaaaacagacgaaaaaagattgaacagacatttattgcattttatacataacgtgttataatttctctcgttatccaaaagaaacggggaactgatatgagggaaacaaaggatttgcgggagaaagcaagacagtttttaacgattttaattccgattttgattacgcaagcgggactgtcgctcattacggttctcgacacggtgatgtcaggcaaagtcagcgccgccgacctcgccggcgtcgcaatcggctcgagtttatggacccccgtttatactgggcttgccggcattttgacggctgtaacacctatggtcgcccagctgatgggtgccaagcggcaaaaggatgtcccttatactgttattcaatcgatctatgtggccggaatcatcagccttgccgtcatcgtttccggatattttctgattgatccggtgctggagaatctcgatcttgaacggaaggtagctgtcatcgcaaagcaatatttaatctgcatcgggctaggcatattgccgctgtttgtttacaatgtgatgcgctgctttattgattcactcgggaaaacgcgggtgacgatgctgattacgctttgttctttgcccattaattttgtcttgaactatttgtttattttcgggaacttcgggtttccaaagcttggaggagcaggagccggtttggcttccgctatcacatattggtgcatttgtctgatctctttatacatcgttcataaaaagacgccgtttcaccagtttaggatttttggaacattctattcattttcttttgctgaaagtatgaaacttctgaagatcggcatcccgatcggtttcgccatcttctttgagacgagtatattcgcagctgtcaccttgctgatgagccactttgacacggtcacgatcgcttcccatcaggcggcaatgaattttgcttcgcttctttacatgcttccattgagcgtatcgatgacgctgacgattgtcgtcggctttgaagccggggccaaacggtttaaagactcgagggcctacagctatctcggcatttcaatagcggtcggtttttcattattcaccgcactcatcatactactgttcagagagcagatcgccggtttgtacgcggctgaccgggatgtcctgcttctgaccaaggacttcttgctgtatgcgttgttttttcagctgtcagatgccattgccgcgccgattcaaggagcgctcagaggatataaagatgtcaactacacgcttgtcacagctctcgtctcatattggattatcgggcttccggtcggttttgtaatcggaacgtatacttcattcggagctttcggatactggatcgggctgatcacggggctagcggccggtgcagtcgggctgttcttcaggctcaaacgcattcaaaaccgctatattcacactcaaagcatgtaaaaaaggagccgggctcaaatgcccgacaccttttttgatcatgttaatcattccattgataggtccaaaatgcttctttttcaaaccatgtctcaacaaccggctcgccattggcgagttttttctctatttctttcaaaaggccgcctgtttgggatttatgcgcttttaaagcgttcattttaatatccgcgacttctttgatatcaagaacgacgtcaggcttgccaagaacctcttccctgtggtgagtgatagccatgcataagacgcgcggccggtcctctttctttttccgcgataatgccctgatgaccgcggcaccgcatgcatcatggtcaggatgaacgccgtgtccggggtaaaacgtcacaacaaggctcgggtttacatcatcgatgacagcctcaatttgatcggccagtttttcttcatcctcgaattcgagcgttttgtcgcggtatccgagcatgcgcaaatcctgtacatccatttccctgcaggcgtcgatcagctcttgctttctgagcagcggaagggtttccctgttggcaaaaagcgggtctcccatatttcttcccatctcgcccagcgtcaggcaagcgtatgttacaggaatgtcttcttttcggtttaaggcgatcaagccggcgactccgaaagattcatcatcaggatggggcaggatcacgagtaaatgttttttcatcttataacaccttctttttagactgcaaatggctttttgctgatttgaagcgaaatggcgagtttgccgcccggcaaatagccggcaagaagcaaccttccttcatcgtcaaccgtataatccgtcaggccttcggcgtagatccagccgtcttcggttttcaaaccggcgcgaaatggtccctcgcccgtgattttggcccgggagcaggctaccttcgcgtttctgatatatgccaccacggtcatgttctgctcatctttatgcgcggaatacgatccggttgtcgtttccaaatgaatgtaaacaggctgatttaaaaatgtttccaaagaagcctgcacatcttctttttttattgctttcatgttactccctgctttcttcgtttgttaataactccaatcgttccgtatgacattcaatcagcttgagcttcatttctgattccaattgtgaattcacgatgcgccggattgattgatagtatttttcgtgcttcgtctttctgagccttggatgggtgccgaggtcgttcagctcatcatcaaccgcctgatgaagcgcctccctgccttccccctccatcgtccggtttttccaaagggttttatatgcctggaaaagctccagttcatctgccatgacggaacaacctccgaattgcttcaataatgtttaattatacataatcggtgtttcttgaaaagaaaaagggcttacggatgaaaggatttttttctttttaaaaataccttctccggtctcttccattgaaattgcgaaagtgtaaacaatatcagcgccgcccatatgcaggaaaacgtaaagaccttgctgctgttgaacggttcatggtagacgaaaacgcctaaacataatgtaatggtcggagcgatatattgcaaaatgccgacttgatagagcggcagtttctttgcaccttccgcaaataaaagcagcggaatcgcggtcagcacccccgccagaaacagcagcaccatcatgccgatgctccctgaggctgcctgagccttctccggatggctgaagaacagcaggtagatcgctgcaaccggagcgatcatcatcgtttccaaagtaagtcctatggcacttgagagcgatgtgcgctttttcgccagtccgtagagcccgaagctgaatgcgagcatcagggcgatgtacggcacggacccgtactgaaaagctgaaataagcacggccgagggcagcgagaagaactgccgctccctgcatccgcgttagcttttcctttaaaaagacaattccgagaacgatcgatacgagcggattgatgtagtagcccaggctcgcttcaagaatatagccgttgctgacggcccatatgtagacataccaattgatcgaaatcagaacggacgacaaaatgagcggaacaaattcctttcggtttcccgaaagcgagcgaaatgctttgactccgtttttccactgccgcaaaacgagaagcaccccgcacataaaaacaaatgaccagataatccggtgcgccagaatatcgagcgcggccgtctgatcgagcactttccaatataaaggaaggagcccccacagcaaataagaaagcgctgtgtaaatgattcctttcgtttgagatgaatgattcatgtctgtttctttcctttcttcttcatcactttccgcacttttttgcatatactgtaccgtctatgtgaaaggaagtgtgatcgtgtttgattggcaacgcttttttccatttcagcagttttccaaggacggattaaaaaacgctgacccgaaagatgtggagcaatatatccaccacatgatgaaaagcgttttcggaccggggtatgcagttcaatttccttttcgtgaccctctctcaaaagaaacatcggcggcagatgaatctgatccgattgatatttttgaaacgacaagccatgtatttgttaaaataccgctcaccaaagaacagcttaaccttctgaaaattaaacatacttcacaaaccctgatcatagaaaactaccctgaaaaagggcggcaggaaaaagtcgttctcccctctctagtgcgcagaaagggtacgaaagcaatatttaaagacggcattttggaagtgatgttcttaaaaaatgaggactttaacctgtctgaaatcgacatcacgttttgaaaacggcctgcttgaaaaagcaggctgttttttttcttcctgtatcatcttaacactactcctcaaggatgatcatctcatttgcctgacattcggccgcgcctttaaattttgacagtgttagtcattattccttaaaaagtctctgtaactatttcctctttcggctgttgtcgatttgtccttataatgataatggttctcaatttataaaacaggaggatgtatatgaaaaagaaaatcagcatattgatcacagcaatgtttttgacaatcctttgtttttcgcctcaagcttccgctgcgtacaactcactgcatacgggctatgccacttatacggggtcgggctactccggcggcgcattgcttttggaccctattccgtccaatatgaagatcaccgctttaaatccgacagatatgaattaccgcggtgtgaaagctgctcttgccggcgcctatctgcgggttgaagggccgaaaggaaaaacgaccgtctatgttaccgatctgtatcctgaaggagcgccgggagcccttgacctttcaccgaacgcttttcgcgagatcggcgatatgaaagacggcaaaatcgacattaaatggcgtatagtcaaagcgccgattaccggcaatttcacttaccggatcaaagaaggcagcagccaatggtgggcggcgatccaagtcagaaaccacaaatatcccgtcatgaaaatggaatattacaaagacggaaagtggatcaacatggagaaaacggattacaaccatttcgtcagcaccaatctcgggacaagtccgcttaaagtcaggatcacagatatccgaggaaaagtcgtcaaagacacgataaaaaagcttccggaaaacgggacgtcaagcgcatataccgtaccgggaaaagtacagttccctgactgatcgatccggaaagaatgagacggcggccaaaggcgaaaagattcgcaggctttggccgccgcttcatattgacatccggcatttagacgccagcaacaattggcttattgatcaatagcccggtcctgctcctctgtatggagctgcgcccggaacacctccgtacggaaaagccccaggagctgccccgtagccgtaataaggcgcgccgccgtaaggtcccgggtatggcggcgggtaagcgtaaggtcttgggtagttaaaaatcgcgcttccgagaaatccgcccagcaatccgccgacaagcggcgctccaaaaccccagaataacgggaatctggccgggtatccggcaggacctgatctcgaataaagcatatgagggttcattggcttttatcctcctttatgtctgcctatagtaaaggtattcataaagtcgggaaacgtttgggctattcttcataaatcattttttttgtcattccgccgtccaccgttatgtttgtaccggtgacgaagcgattgtccggatcggtcaaataaaagcatgctttgacgatatcctgtgggcggccgaccctgtttgacaaatgctgcgcgtggtcaataggccacagggcagtataatcaccggtttcaatccagcccggggaaatgctgttgaccacgattgaatctttgcttaaagacgcggccaatgcgtgagtcaaagctattaagcccccttttgacgcggcataggcttctgagtccggttcggacataaatgcccttgtcgaagcgatattgacgatggcaccgcctgttttcgcctctttcattcttttggccgcttctcttgcgcaaagaaacgcgcctttcaaattcgtattcaggacgccgtcccattcttcagccgtcaagtcgtaaggggacttccaaactgatcggcccgcattattgatgagcgccgatatcgaacggccgtttcgggaagcttcctgcatcagccgtttcacgtcttcttcagaagctacatcacaaggtgcaaattggacccgcgcaccggaagcggtcagctctttttcaagctgttcaccctcttccttcaatacgtcggcgaatacgacgataaaacctttttgagcataggcggccacgaggtctcttccaatgccttttgccccgcctgtaatgacgacagtttctttactgttcaatccggtcagctcccttccggatcacaatggctttcggcccaggtttgtatctccttgaggacaggctccagcgccgttcccttgtctgtcaattgatagatcacttttaccggcgtttccgggagcacttgacgctcgactattttgcagtgttcgagctcttttaaacgttcagccagcattttctggctgatcatcggtatcatttcagtcaagtctttaaatcgtttaggtccatccaataatacatggatgatcagtccattccatcgtttgccgagtaaagaaaaggcggcttccattctaggacacattgtaaaccccaattctctcacccctccatatccagttgacaaatataatgtgtgccattaaaatactcattaaagttacaaaaagtaagtttctaactttttatctaactctatcataacacgtttagcccaaaggaggaagtcacatgtcttcacaagaaaacaccgctctcaacattctggaagagcgtacttcgattaaagaatatgacacaagcgtttcgatttccaaagaggagctgacaaagctgctgagcatcaccacaaaggctccgtcagcctggaatctgcagcactggcattttacagtctttcacagccaggaatcaaaagataggctccttccgatcgcgttcaaccaaaagcaagtcagtcaggcctctgcggtcgtagcggtgctcggggacttacaagcgaatctgaacggtgaagccgtatacggccctctggcagaagcaggctatatgactgaagaaatcaaaaacacgctgctcggacaaatcaacggcgcttatcaaaacagcggatttgcaagagacgccgcgtttacaaacgcatctctagcagccatgcagctgatgatcgcagccaaagcaatgggctatgacacatgcgcaatgggcggctttgacaaggaagcatttgtgaaagaattcaacatcgatgaacgctatgtaccggttatgctgatttcggtcggaaagccggtcaaacctgcgcacaaaagcaatcgtttcgatgtgtctgacgtatctacatggctgtaaacatgttaaaaaccttagtcccaaaaaaggactaaggtttatttttatgcttttatatgcttttcataccagattttcgccttttcaatttcgccgtgtgtcagctgatggcctccgccttcccagtgaaggagcactttggcgccggcgtttgtgaaatagccggcaagctcgcttgattcctgcggcggacagagcggatctgttttgccggccccgataaacacgggcagacctgtcatatcagggagcttgcgatttctaaacggaaccatcggatgatgcaaaatcgcccctttcagtacatgttcatgacggaacagcagacttcccgcgatattggcgccgtttgaatagccgattgcgaccacccggcttctgtcaaagtgaagttccttggctgcttcatctagaaacgtttttaattcatccgtccgttcgatcaaatctttttcgtcaaacaccccttctctcagccgcctgaaaaaacggggcattccgttttccagcacatttcccctgaccccgagcaaatttgcatcgggatcaatcatcttgccgatcggcagaagatcgtgttcgtttccccctgttccatgcaataacaacagggtgagatcagagtcccctttttcatatatataattcatttcctttcactccttttccattttggaagtatgccttcaattggcctgcaatcatttcggaaagcttcaattcaccgaaagagactctccaactgttcatcaatcaaagagccctgttcactgtctctttcccatacattactttggagcctcctgcaatatggtgcaccccttctgtttccatcatcatctttttatcttggattcaagatattaattattgtaagttatgtttcgaatatgcaagacagaactattgtttaaataatttaaaaaatcacttttttctaataattatcttgtgattaaatctgacaactgctatgattatgaacatcaaaatggcttaaggaggaaaaaaggtgaatcaacagattttcaaatgggttctgttcatcatcccttttatcggacagcttgccttgctgccgtttgtaaaccggatcgatccgatcgttttcggacttccgttttttcatttttggctggtgctgtggattgtgctgacaccgctgatcacatttgcgatttacagatttgagaaaagaaacggaggttatgagtgatgcagggaaatctaacagcgctcctcattaccgccggcatcattttggccgtagtttgtatcggatttatcgccggcagcaataaacagtcgcggaaatcggttgaagaatggtcggtcggcggaaggcggttcggcgggctgctcgtctggtttctcgtcggcgccgacttgtatacagcctacacgtttttaggattgacaagcaccgcttttacaagcggaagcgttgcttttttcgcgatcccttattcggttttggcctattttatcgcgtacttttttctgccgaagatttggaaggtggcgaaagtacatcagctgacgacgctggccgattacgcaagggaacgtttcagcagcaagctgctgtcttcgcttgttgccattgtcggcgtcttgatgctgatcccgtatatctgcctgcagctcagcggaatccaggatacgcttcaagtcgcgggtacagggtttattaacgtcaatgccgtcgtgatcatatcattcatccttgtcgcgctctatacgtttttcagcggcatcaaaggtcctacatataccgccattattaaagatattttagtttgggtgatgatgctgtttatggtcgtttcgttgccgctcatccattttaacggctggacgccgatgattgacaagcttgcaaatgaagcgccgcatatgctgacgatcccttctgacggaccgcgcgggatcgcctggttcatcacggcatcgatcgtttccgcgtttgccctgttcatgtgggcccatgcggcgacaggcgtcttcacggcgaacagcgcggatgcgctcagaaaaaacagcatgtttctgccgctgtacaatatcgtattgatcttagtcattttcttaggctttatcgcatttctcgtacttcccgatgacattaatccgagatttgccttgctgtatttaatccaaagttcctacggcggcgtcacgcaaggattcgcctattcaacaattgccctggcaagtctgatcccgtgttcgatcatggcgatcggggcgtctaatctattcgccaacaatttataccgcgatttgatcaatccccgcgtttcggggcaaaaactgacgatcattacgcgctcaatggtatttgtcgtcatcggcctggcccttttatttggaatgctgttccccgcagcgcttgtcacgcttcagcttctcggcgtttcaggcatggtgcagatattcccggccatcgtcatcagcctgttctggaaaaaccagacgaaggaagcaacgatcatcggtcttctcatcggccttgccgttacatttaccgtttatttgacaggggccactttcggcatttacgaaggattctggggccttgcagccaaccttttgactgttgtcttgttgaatccgttttttgtgaaaaatgtaaaacacaattctgtgatcaactatttgtttcatactaagaagaatgtgcaaaaaagcgcctgatcaccaaaaaacccttgtgctccgtgtgagcgcaagggtttcttttatttctctttttttaagatctcaatcgctttatccaactgcgtatcattgtcggaaagcttatcctgcagcttgcttgtcaggctgattgtcgtctcgcccgttaggatgcctgtcgttttcagcttttggtctttttgaaaagccttaacggcagcttccgtctgtgcgtcgaaagctccagtcgcattcagcttatagccgagcgcttgaagcatttgctgggcggctttcacttcgtctccggtgctgccttccttatactcttttttggaatccaggtacggcagtttggcatagcttgggagctccgctttatattgaggtttgattcctttttcgtgaatccagtccccattcggcgtcagccacttggcaatcgtcagcttgacggtcgatccgtcggagaagctctccgcattttgaaccgtccctttcccaaacgtattttcaccgacgatcgggatgcctgaagactggtgaagtgctgctgccatgatctcagcggcgcttgccgttcctccgttgacgagaacaacggtcggcttgttcacttttcgctccttctcagctttgtacacttctttttttccgtttttggattcaacctgcatgatggttttgcctttatcgacaaacatgttgctcatcataatcgcttggtccatcagcccgcctggatttcctctgagatccagcacgaatcgttccgcacctttttcagacaagtcatcaatggcttttgtcagttcttttgcggtattttcagagaaagacgtaatttggatttcaccgatattgccgtcgatcattttggaataaaccgtttcgatcggaatcgtatcgcgcttaatcgtaacatcgatttggccgacgccttccctgttgagaacaagtttgacattcgtgccttttttgccgcggatcatcgctgtcgcttcgttgacggtcttgccttttacgcttttgccgtccactttctgaatttcatcatgcggctttaagccggctttttctgcgggagatcctttaataggcgcgacgattagaatttgtccatttttttcttctacttgggcgccgattccttcaaaagaagatgtaatgctttcttcaaagcttttagcttctttcttatccatgtatgtagaatatggatcatccaaagctccaagcatccctttaatcgcgccgtcagtcagcttttcatcgtctgcattttgataatagtcgctcttgattttgtcgtacgccgccatcagcttttcgaatttctcggaatctgaagcggaatatactgaaccgccgctgcctttgcccaccagataaagcgtcagtgcggaggcggcgacggccgtaatcaatacagccaaaaagagtttcaactgctgtttcaaacgaacaccaccttttcttcttaccatattatcatggacgaatctttattcgtcaactcgaatcacttaaataccgatttttccgggatgctggcattcgatcgttttcaaccattattccgcttttgcatatgcatacaaaaaaggagggatctcaatttgagcgattatttagacatgctcgccagcttcggcgtctcatccgctcatcccggcgggatgtccctgtcaaaggcagtgctcgccaaagccggcatcgaccctgagcagccgattcttgatgcaggctgcggaaccgcccagaccgccgcttatttgggtcagcttctgtttcctgtcactgcccttgatgccgacccggtcatgatcgataaagcccgacagcgttttaaaaaagaacagctttccattccggctgtccgctctccacttgaggaaatgccgtttcagtctgaaagctttgcctgtgtattaactgaatctgtgctgagcttcacaaatatccggtctgctttacaggaaatccggcggattttaaaacccggagggatgctggtcgcgatcgaagtctgccttaaggaaggaaacgcactgacagacgaagcaaaaaaagaaatcacggaattttacggattcaccgcattatatgacgaggatgagtgggtcaatgtccttcgagaagaaggattttcaaagattgacatcattcctgtcgtattggaagatgcaggagacccggatgacgccgttgaaatggatctgtcgcctgcaatttccgacaaagactatgaaacgatggaaaaacacctgcattacctggaaaaataccgggactctctcgatcatattatttttatatcacatctataaatcatcatttgtcctccttctttcgtccaaccttttctattaaatccgtcataagctgactaggaatagattagatgatggaaggagcattcaagtggaccgatattataggttttgccaccaaaatattggcagagttgcgagaatcaccgacaaaggaggccgcgtccatgtcggaagaatcgtccgtgtttcaccaagcaaagtatatattgccccgatgatcagacggggaggccgcgggttcgcctacggatattacggcggctggtggggttggggccctgtatacggacttgccctcggtctaattgccggtgtggctcttgcaggcttgtttttttggtaatatgaaaaggccgattgatatcggccctttcatttttatatctttttcacctgtttaaaatactcttcaagcgtcaagtcgtgttcttggatggctttagccgctttttttcctacatagcgcaggtgccaaggttcatacttatatttcgtgatgtcttctttatttttcggatagcggatgatatagccgtatttgtaggcgttcttctcgacccattgtccgtctttcgtattgccgaattcctctgataaggcgaagccgttgcttttgctggaaatatccatcgcaagtcctgtctgatgctcgctttggcccggatatgccacagcttctttcgccttttcttctcccttttggctgacttcgttgttatagatcgctttttgtctgtcataggatctgtagccggacactgcaacgagttcatagccttctttcttagcggcgctgaacatctcttcaagcgctttggcggcttcttttctgatataacgcttgtcgatatcctcggtaaaagaaaacgcgacatcaggcactgtcaggtcgctcggtgcatagttgccgggaagcgcgtattctttatttacaagcgccattatgttttccggattttgaatcgtcggcagcccgtctacatcttttatttgattaaagtacttgctctcgagtatgaagtcctgatcttccaggctgctgtctgacttttggtcttttgcatccttgcttgcatttgcagtattctgtgttttagccgtgtcattttgcttctgttcggtcatggtacatcctgtgccaagcaggaccgctgcactcagcaatgaagcaatcgtcacgtatttgtactttccgttcattcgaatccatcctttttcagtgcatgtatgcttttacaaagcagtatccagagccagcagaatcatatcattaaaggtcgtctgtctttcttctgccgttgtttcctcgccggtaatgacgtgatcgctgaccgttaaaatggagagggcttttcggccgaatttcgcagccaatgtataaagcgccgtcgtttccatctcgaccgcaagcactccgtgtttggcaagcttctcaatttggctgtcgtcgttatagaattgatccgccgtaaacacattccctgccgtaaccgggatgttccgctcacttgcagcgtcataagcagcttttagcaggccgaagtccgcgcagggcgcaaagtcgatcgagccgaatgccactctgttgatttgtgaatcagttgatgaagtcatcgcaagaatgacatctcttacattgacgtcttttctgatcgcaccgcacgatccgacgcggatcaggtttttcacatcatagcttctgatcagttcattgacataaattgaaatagacggcacacccatgcccgtcccctgaacggaaacgcgctttcctttataagtgccggtaaacccgtacattccccgtacttcgttataacattcaacgttttccaaatatgtatcagcgatatattttgcgcgcagcgggtctcctggaagcagcaccgtttctgcaatttgtcctttttctgcgccaatatgtacgctcatgattattcctcctgcctttttaaagctgattggtgatgatgattgcagcatccactcgcatatgtattataaaccaacatcgcggaaaaagaaaataaagccctgctccgattcggcatcattctttttcttgtcatgtttaaaaaaggacaggcatacctttaaaaaagaatcattacgattagctatttcaggatggaggaaaagcgatgtttcgttcacttaacagttatttaatcgactttaccgggcttgttgtcatcggtgttctgatatgccttgtgtcagccggcgggtcgctcgcctcaggcctccccttccagattccggcttccgttctgcagctgaatacgattttcatcagcattttaatcgaagcccttccctttgtgttaatcggagtattaatcgccggtttcatccagatctttgttactgaagagcatattcgctccctttttccgaaaaacaggttttcaggagtgattgtcagctgtttgctcggcgcttgttttccggcttgcgaatgcgggattgtcccgatcgtgagaaggctcgtgtcaaaaggcgttcccatctatgccggcgtcggctttctgttgacgggtccgctgatcaatccgattgtcatcttatccacttatatggcttttggcaatgacttgcgaatggccgttttaagggttgccgtcggttttgccgcagcggtcgtcatcgcttttgcgatcagcatgatgttccgctcgagccagctgaaaacggaaagccggcagacagctgcacactgcgcccattccggcagaccatcccctttttcggaaaagctctttgatatgctgaaacatgctgttgacgaattctttgatatggggaggtttctgattatcggcgctttagttgcagcgcttgtgcaaacatacctcccgttaaaatcgctgtttgtgttcggagggggcatgcttgactcggcattggtcatgatggggctggcttactttttatcgctgtgctctgaagcggatgcatttatcggcgcttccttcaccaatttgtttccttcctcatccatccttgcttttctcgtttacgggccgatgctcgacttaaaaaatacggtcatgatgctgcatgcgtttaagccgaagttcgtcatttgtttgtctgtcctgatcaccgttgttgtctttgtttgtatcaaagttgtgagtttgctgtagaaaggaggttttaccaatggtttttcagcttcggcaatttttgcgcgcacttgtgctggctgccttttccgtctttattttcaagctccattacacaggggaaattgataagctgattaatcctaaatacgattacaccagcctcatcgccgcaggtgtgttcgcgtttctgttcatcattcagctgaccaggatctggacggtgaaggatgaccgcgctggggattgcggctgcgggcatgatcatggcgagtcaaagccctttctcatcaggctgatgcattatgccgtcatcgctcttcccctcatcaccggattcaccctttccccggctgtactgaattcgtctgtcgccgccaataaagggacgatgctcaccaaaacggagatcgcccctcaaactgaaggcgaaaaggaacatgtcatgacaccggagattcagcaaggactcgccgattcagcgatgacgaagtcggcgtatgacaggaagatggatcagtttaaacaggaaaagcggattgtcatgaatgacgacatgtttgcagactattatgatgaagtgacaagcaatcttgatcactatattggaaaggagatcacggtcaaaggcttcgtccataaggaagcggggctgagcgcacgccagctcgtgctgtcccgatttatgatcacgcactgcatcgcagacgccagcctgatcggatttctcgccgaatggaacggtgctgagcaattgcagcctgacacatggattgaattggaaggaacgcttggcaaagcgtcttataacggctctgtcatcccgatcatccgcacgaagcgatggaaggagatcagcgagccggagcagccgtatgtctatccggccgcgattagtatgacagattaaagacagctttctcctggataaataacggggcgtttagtcatcctattttttaggaaggaggtcataaatgatgggcaaaaaacagcgaaacagagtcaccggattgaaaaaaaacaaccacatcccgacaaaggacgtcatcgcggcagaggatgcgcatgaaaaggaatacagcgccagaaaaagaaaaaatacaacataaaaaaactgcggacagcgcttccgcagtttttcacttcttacgaagactgcagcaaaatgcggttgattttgctccaccccgtagacagcagtttataataggtttttccctttcttccttcatcgattaaaacgatgtcgccagttgcaagaaatctcgccttataatcattcggcaccgtgtcataaacattgaaagtggaaaacgtccgttccagcacatcttcatgggttctgccgtttatttccgttctgtaaaccatctcgtatcccttatcttcaccaaagcaaggcgtttgaaaaatcgtcacatcataaggtatcagcttttttttaaacagttgaaacattaacggcaatacagatccctcctttttttataaaattggcgcttcggggctcaatccctttgactacttttgtcgaacaagcgggtacttttcgccaatttttttgaagatgaaaaacagcgcgagaccgagcgaaaaacctgagataacatcagtcatgtaatgaacgccgagatacatgcggctgattccgatgagtccgacgagaaggcccgtccacacgtaaaccgcgcgactgtgtttttgaaaaaaaggaatgcagagcaaaaggagaaatgcgataaacggatacatgctcgccgcattcatcgaatggccgctcggaaagctgtatgaccgttcgtgcacgagcgggtttatcgcgggccgctctctggcaatccagccttttaaggcttcattggccgttctttcaacaaaaaacagcaaataaagatacagtgatgccgctgcttttttatagacggcgagaaccagggttaaagcaagcatcagcggcagcatgaagccgcttgaccccagctctgtcagcgctttaaaaaccgctgtgagaaccggatgtctgacagactcgagagcctgtatcacgctcacatcaaatgattgaaccgccgggatgcggataagaatggccatgatgacaaagacagctgctgaaaatagtgctttatacattagaaaagtcagtgcctccttgacattgtttttaaacattttacacccggctcccctgccgggcaaataatataggaaaaaccggagcaggtccgccccggtctccattttcaatcctctatatgctcatctatcatacattttgcaatcagataatcaaaggtgatatcggcaatttcgaacagttcgtcctcgttcggtatgtagcctcttcttgtcagctctagataaaaaaaatcagcgatttcttctgtatctatcatcagttcaatttctttcattgtgatcgcctccttattctgatgtatgagctggcattcggttttataaccggtttgtcataatgtttgtcctctttcatatacatgtcgtaacaagacaaaagccggaaggggaaaagaaaatgatccaaaaaacgcttgaagcacttgacggagaagggtttgacctggtattggggaaggtcttgaaagccatgttcgctcttattgtgttcggctgttttccttatttcttatatttgttgtttatcatttgaaatattctttcaggcagcttaacacaaactccatcatatctttatattccgcatcctgaaacatttcatacaatactttatagtcattgtagatatcaagcagttcatccacgacagtaactgccatattgcgctcatgatcctgctcctcgtaatcaccagaaaatggcaaaaacactttttcagatatcggttcatcaagctcttgtccggcttcgccgacataatgaacaaacagaagctgatggacgaactggtccatttcgtaggttctaagcacgagcgttaaatcttcttcttcagtttcaagccattctccgtctttcaaacgggtcagctcgtaaatgatatcttcccagccatcctccacatatctccaaatttccgttctgtgcccggtgattttaaacaattctttgccgtaatcttttacatagacgacatctccgattaaaaattcatattcgatgtcaagcttttccgtatcgacaatgaccccgtcataatctttgtaaagttgaagagaagtctcgaaataaagcacttcattatgattgacttcatacaaaaaatgcttatcgattttatgaacttttgtaatcgttccgaccgtcccgtacatcacgacgacgaccacatccccgactttgaatttaggcgcgtttgacttcatttggattcccccttgccttgaagcttccgtgttacgcttatcgtatgctgagtgctgtcaattcgcatgggctaaggctacaaggcccgatgagttttccgaaaagcccagtcggctcgaacgaacgcaaaaaaaccgcagttctgaacaactgcggtttttttatcgctttgtttccgaaatatatcgttcccaagcctcatcaaatgtcgtcattgacgataaataatccccattaagctcaaggtaagagctgatttcatcgtaatgagttgatgccttgggaaatccgtgatcaaggtaagcatggttcgcgaattcgctgatcgcgtccttcggtttcggatggcggtatttcattaaataatggtaaaaagacttcacggtctcccctcctgtcctcttttgatgttctattatacaggccgtctgaaaaaatacaaacaaaaaacccgttgaaacacgcaaaaaaaccggcaaaagccggcttcatgaggaaaagtcaaagtaattccgcttcagtatgcgctctgttttcatcagcgcatcatatgaaacggacgatggcagtttttttgtatcaatcaagagcagctgattttcaatttcccaggtgacactgtcctcctgatagaccatcccgcacccttcgcattccaccgcaggtgtgtcggtgatttcaatcgctttcgtcccgtcgggaagctcccaatataccgccgtgcgggctgccgcggctttttcttcattgcaccattcacacttcttcattgcgcatgcccctcagcttcgccttctttcttttgctgggcaaggaatttcttttctttcaattcatcgcgctttgcccggcggcttttcaatgtttcatgatcaggcctcttggaatagctttctcttctctcgagccgttttaagccgtccggtgtgtatgaaagagcttgatccgcatagattgccgatatgccgatctcctctttttccttcatcacatcagggaagatttcggcaaaatagtcgtccgctctccccggaacatagttttcaggctcaggatacgacgtaatgacgccttcaaaattgcggagcacgactttatcggggctttgcgaaatcaagtaattcggctggatggcgattttcccgcctccgcccggcgcgtcaacgacaaaggtcgggacagtgttttttatttcatgtaaaaaggaacaatggattcaatccactgctccttttattttaagtctataatataaatttataaaggcatctgccataagatcgtaattcggctcatttttgaaaatcagaatacaatttgggctactgtctctttcaagctcatatcttactccaggaacatatttcaataagcatcaccaccccttttcaaaagggtatgtggttcaaatcttgtcttatgaccatactgttttataagctcatcacagagcttgtttaagtaatatgtataattgactttcttcttcatccatctgacttcagttccaatctcttcacagatgttgatcggaatacttgatttattaactttattctcgtatgtatgttctaactgattttcagctatatgtttatatgtaaggaattcatcaatgtgtacgaaatacactttattttctggttccctgaattgaaacaaaaaaccagggattatgtatgggtatttggctgcttcagcaagatatttgatttgctgaggctttataattttctcgctgaacgagaatgacttattctttgtcgacttcatctcaacagggaacaagtaccccttataatgaatgaaacaatcgtatttatttttggatactgcagtccctctctttaaaaacattggattaacatctttaattctgtaaaagaatatactctgatcttttgctgatttttcaacattcgcttcaaatactttaccttgattggttgctgccaattaatcactctccgattaagttcttttaattcatctttttgtttagtccactcttttcatggccaacctacattgatacattagttcctcattatcgtttgcaaggttaattagatttctgttggctcttagataatcattgcccgatacagcttctttcgcggtatctagttttctctgaatcttgttgaaaagcgattcaagttgattgctttcctccatgtgaaacctccttcagttcttttctgactctcattaaaatttttccaagtttgttttctccaattccgttacaagctccccatactctgtctccccaagtatttccttctattaaagttgattccccagtttgtaaaagtcgattcttgagttgatcattttgttcaaatttagctttcacgatctcatacatatacgtttctttgacttcttcccaatccggcctcagtttaactctacgccctttcctttttgctagattaggaggtaaatctgaaaactccaagtgaattgatttgtctgtcactttcattgcttgaaaagctgcttcattattttgatatgtgattccttgatacataactagtgctgaatagaaattgcttaagaaataatacttacctttaaattcatcaattacatccatcatttatactccttttaattattcttttttgaaagacataaatttttcatcttcccttgaaatacttttcaagatcttctgttgtagccgcaatattgttaattttcaaatcatcatcccactcaaattcttcggattctttaacatctgaaacatgaacaagtgcccacctgaatgttggcgattcttcaattttttctttaagatcatcaacactgtaaaattcattagacatatctgtaatataaaattctgctttataaactttcgccattttattcacctcgaaataaattattctttaccacacactaatgtctgtgatgtctttttgggttttacattttgagcaaatcacctctactcttgtaccaatacttgcacctgttaaaagaaaagatgtgttacctttacattttttccaatgttcttccctaaaagcatccgcttcctccctttctttttcagataatgtatgaaggctgttaattctaagactctcgttttcttttaacaatttagagatttcttcatcttttttgaagttcctcagcttttctgcaaatgaatctctttcacccatcagattgtcgatgaaagtacttagctcatccatcaacttattcttctccttattttctatccatttgagaatcattccaccactcctgtcttatttttaattaagcagattaacggtcattctccttattaatctcattaaaatagccctccccaaatcacgcctgcagctatagcagctataaagacagaaacaaatttcattattatgaagaacttgatatgctttgtttcatcttcagttaagttcaaatctgataaggcgaataaaccaaacataatcaacaaaatccaagctgtaacggtcaatacttttccacctttctaaatgaaatcaatattttatcaagtcatttttcaaactttcctaagtcatacattttgtcaagtaatttcatagagacactcaatgcctcactgtatacttcataactcattatccctgttgaatttaaaccatttaggtaatcagccatttcagccttcaatttctctttatttgccgcatttgatgatataccccaactcatctattgcacctctcttcttaataaaattagaatttcatttcaaatctcaaaggttttgacctcaaacgttttataggcatctacttcattacctggtatctcgtttacactcggatacttatcgtagtcgtatggatacccaatacagttcatgtgaaagcctgtcccctcatgatcaaactcagtttgcaaatgttcatgcccacaaatccaatgtttagcgttaatgaatggtacatcaaccatataacaactgttaggctcaaatggagaataaggattgtgaataggtgggacgtgagaaacaaacacatcgacatgagtgttttcgagcgtttcataccaatccatcgaatctttccacattgctcttactccatcttctttactgtaaccattaatgctaatgtagtttgaatcattagaaactcctttgaagaaatcccacccttcaattccttttggtaaataccacataacatctcctgcaaagacttttcctttgtatgtatccgttgacttgactaatggagtcacattcttcatgtcagcagcctttttgattagatcattcaccctgcctaatgaatcagagtattttcttttttgacttttactgagtaaataaagatcatgatttccatatgtgaagtaaaccttctcgtactgctttgctacttcatctaaaacccaaatggcttgttgattccattcagtaaaatcaccagcaatgattagtacctctccattgccgtttgaaattagcctattaacaatcttcctcgttcgcttctcccatttgagctggttattactccaaggaatccaatgattgatatggagatctgatacatagtcaattttcattttatcctcctttctttgcttaagctgttttcttcttcgctaagtttaacttcatttcatagtaatcagcttcagtgatttcatgtaagtaatctaagtactgctcttcttgagactcaatccagaattcttcattaaaataattaatttcaattcgtcctctaaaattatgaaagaatctgaccaccatggttaaattttgacgagtaatcacattgttcaaatcatgatcttttacaaatttcaagaatgctttataaggctttgaccttttcttgaactcataaaaagttttgtctcttgagcatacagggtgcttttttaaatcactttcttcgacttcatttttgaatttgctctcgataaacagaacaggttcagaactcctactataaacaaccttattgtaggcatcttctattccaatagcctggcttatttcttcgttcatctccttaagaaaatttcctttgatatgaaaaacgtattccagatcactatgtaaatcagaacttttgtcaaccttataatatttagtcattaaatcccttctttcataaagtgcgaataaaaaagtttaaaattgaaataataaccgtgcgtaataccattacatattcaacaggagatgatttgtatggcacgtaataacaacaacaatgaattggttgtaccaaatgctcaggcagcaattgaacaaatgaagcttgaaatagctcaagagtttggtaattaggtgctgagactacttcaagagcaaagggttcagttggtggagaaatcactaaacgccttgttcaaatggctcaacagcaaatgggtggacaatttcattaaattacatgagggggctactcccctctacattcctttctatatgaaatacagatttcatacagaatcatttgtgtcagtagatagatgtcagcgcctaaaaactgatctaaatcgcctccgtccgactgtcgtcaataatgagggcataacgacgcgcggcttcaacatccttgtgatagacataatcgcctgttagcggcggccaatcatcatcagaaattactggtgcaatttctgaagttacggtgtgcattacaatgtcgcccacacgaacctcagtcggctgcggcgtgttaagatattcgtcaggcacttcgcgaccaagtgcgcgatggagagcgatagcctttccgatatgaacgttgaaacagtcgtctgatgcggcctcgtcgattccttttgaccttacgacacctctcctaccgatttgaggagagctacaacagtacgtttctctttattaataacgaactctacgttacagacaatgttgcgatatccgccttcgcctgctcaatgacttcatcacggcgttcttgtacggtcttttcttgcttccatagacgttcttcttgagttgtacaaactggtgttgtaaccgtattagtgtcgcctgaaataacaacaacatcttcatttgttttcgcgtaatgaactacgaatgcgtaagaataagttccgcctataacaatatcgcctagacgagatttatagccgaagtatttatcgcccttcttttcaaaaaccgttttagcattttcgttagtagtttattttccattccgtcagcctcctcgtttttaatttcgttattgacgatgacttcgtactgctcgttgtttaaatatatcggccattctcccggctttcgcactgcaactccgtgcttatcaccaccgcctataaccggaacaatatcatgaagcacgtactttagttcgttaaaatcgtcgataatcaacacacgctcgccaactttggccggacgcttttctgtgacgataagttcggcgtcttcttgacgaatatacaacgccctgtctggactattgactttatatgcattctcccatgttcccagtgaaggaaagacgctcccgatctggtttgcataccaggcacctttgctatacgccctcttaatccgcacatactttttaatttcgctcattttagcgcctccttcgcgtgtaaatttatttcgaacagctcagtaatcggaactaaatcgactggcttttcgggaagctctgacttcgattcaattaattttaacgcgttcttcaactgctcgttttccccaatcagtccggcaacggcacagcgtaggtctgcaatttcgcccttcattctttcgtaatctttcttctctgtcatccttcgcatcctcaattaaatatttttaatttgtttatttcatttaacttcattcagctcaccttttattatgaaaaattcgtgctctaattctttgaatcttttatttactatgtaggctttaccatctttcatttcaaataaatcagagtatttgtctggattacttctaataatcttaaaagctattgttgcactaacccatttcttattttcaatttgctgaagaacttcactcatttcaaacaataaatcaagctgctctttatcctgttcagtttcgagtcgtagtatgtcacgttccttttcgagtatttccccttgaaggacttcgctttccttttctaattcaactttttttgctgccagatcaatcttatgcgtgtcgctcgcttcagaaatcaatttctcacctccttaaaatgctttttaattttttctttgcttttctctaaatgaatcatcccctttaccaggtatcctatagaaaaagggtaagcaatgaactcaccctgattatatacttttaatttgtgtttgtctattattttctacattctttataaggcaacctcaagtttgatttggctatgtggactatatccttctagaatgaagtgttcaggtttatagtcataaaaattctttattgaattatccattactaactttggtgctgccaaggattcgcggttaataatttctttggcttgttcgatatgtcggtcatagatatgtaagttgttaatatagtgatgaaatttccctggcttataaccacaaacttgtgcaatcatatgctgtaataatgcatattgagttacatttatgttccctgctacaagataatctgacgagcgttggacaagggtcatgtttaaaaattctccgtcataatcccacattgtcaagaaagcgcatggatataacgtcattccatgaagatcttgatgattatacaaatttgtaatgattcgtctgctgtatgggttgtttttcagatcccaaatcaacctgtcaatctggttaaagtatccttctttgtatttgtgctcatactgcatctgtctcccataagctaaccctaaattgccatcttcattagcccagctacgccaatatttaactccatatttttcttcaagcaactgaacatcgtttgatttatcttggtatatccagagaatttcttttaaccctgatttaaaagccgttggccttagagtagcaatagggaattctttctgtaaatcatattcattcaacactccaaagcattttaatgtataagctggcgtatcatcagaccacttaggtcgaatcttttgccctttatctgatttgccttcggacagtattttatataaatttgattttaaaactgtatccgcagtgttaactatattactcacctcattttaattcatttattagttcatccatattctccttgacatttttctgaactgtattgggtaaagctttaattttattgctgattgtttttgtaccaacattgcgtattttttcagttaattcacgaaaagcattcaaagctaaatcactgatctcatcaaattccccctggattttatggagcacgtcaaggtgtaattcgtctgactcctcaaaaacaaccaatgtttgttctagcttattaattttttctaagtgttgctttatttcatctacctttttcattttgcacctccttaacaattacgataaaagtcttcttttattgaaaactcaaaggttattaatacctgtattttcaaagatttgataaaattaaattgttcaataaattctgcaaaaggtggttaaatttatgcaaacaactcaacacccaattattcaaggatcaattaaagatgtaggctttgaaaacaaaagcaatttcaattacacatatgaagttgacaaagaaattcttcatgtttatgataccttgaatcacaacagcacttcggcaattaattgtgtagaagaaattattgctgtgttaaaagaaacgctgcaaccaaacaaaactgggataaacaaaattgttgaagcaattaagaacacaatatcttcaagttcacctttcaaaaaagtcatcatctataccgaagtaaataatttaacaaaaggatacaagaatagaggaagctttcttgatatccaagcctacgatccaaaacaaaaggattttgtcggctgggatcacgaagagctttaccagttttattacgattcacaggaactcagctttacgattaaaaaataagataagtttggacaaaccttggctgcactccacactgtctgtacatcaagaagacagccaaggttctttatttacttagtgccagttgaaccgtgccctccacggtttttgttgcctaaatgatcgacctcgaccaattcaactgcaggcatcttctccataattctgaattggcaaattcgatctccctttttaatttcagtatctcgcagcgcataagccgggaaaaaccagaaatcatcgtcccctttgtatgcctcatcaatcacgcccattgaattggtctgaatgataccgaaatttttatatgtacttgaacgaggaacgacatgggcttcatacccttcaggcaattccatcgccactccgagaggaatcagtttaaactcatcctttggaatagatacatcttccgcagctctcagatcaatccaatcaccctgttcgatttttgaaatgcgcgtttgtgtttcgtctgcatatttgattttgatatgtagtgtcattttttcgatctccttttatttaagtgtcttttatattcttcagaaacttgaaacacaggatataattcatgtagaggtatttgatcatgcctctatttaaacagattattgaatctatccaaatcaagaatcttagtgccttcctctgtcctccattcaaatttcaatgctagtttgcaatcaagtgttaattccataagtctttcaaagacaatattcaaatctaatttcgtatgcgagcttacagtagttggatagaaaaaatcaagatcggttaattcttcaataaaaaaatcaactttccacttagatattttttattccccctaatccttaattggctctgcctgattttcaaactttgctttcaactcctcatactttttacgttctctttcttcttgtttcttacaaaatctttccctttcagcttcctgtttcttttttagttctttttcatattctccccactcagattcgtcaatgattcctttttttatgcaattctcttctaagaggatataatatttccttggcttcatgtgcataaaatactcttgtctctttatctccatcgtcccagccaacttcttggcaaaccataaatacacctttatcttttgtaatgatagttgtttgctcacaaaactgatttgcccagacataagcaatttcttttccgattaattcttcttgtttttcaatgaaatacattcaatctctccttttaattctcattaaaattaccattttatttacagttttcgattttaaaaattaattcatctaattcatttggcttaaaaccgctgctgcgttttacttctttaccttctccatcgagtagaatagtgacggggactcccatcactccatactctgctgctacttctggccgtacagtaacatcaatcgcctcaaattcaatccctttttcttttagataattagagactaattgacaaggggtgcatgaaggctgttctaatttgattaatttcattattgtggtgcctcctcaaagtaaaaatcgtcgtcttttaacggttcaactgttgcttttttgtagccgttccctttcattgagaagaagtcgtgtgacttcgttttcgtattcaacccgttcaacacgatcggattgatctcttcttcttcttcaaagtacggatcgaatccgagattggacaacgctttgtttccgttataccggatgaattttttaacgtcatgtgtgaggccgacttgatcatacagttcttcagtgtaggcgatctcgttgcgatagagttcttcgataaggcttaacgcaaacatttcaagtcgatgctgcgtgccttcgtctttcttgttgtaaatttcctgggcaagcaaaccgacataaacaccgtgaatcgcttcgtcccgaattatgaggttgataatttctccgcactgcatcagctttccttgaccgtagaaatataacggataataaaatccgctgtagaacaggaagctttctaaataaacggatgcgaccatcgccttgtataacgaaatgtcatcgcctgcctcaatcgcgttatacagtccgccaatgattgcggctttccgctgcaagtagcgattcgtcttcacccattcgaacagttccgttatcttctctgtcggggcaagcgtcatgaaaatgtttgaataggacttggcgtggaccgcgttttccatcatcgccatgaagttcagcaccgctttgcgctgatgcccttccacatgctcagcaattgttggcataccagtattcccttgttctgtgtccagtaaggttaaaccggccaacactttcatatatgtatcttgttcgttggctccgagatatttccacgttagaaggtcgccgtttagcgaaatctcttccggaagccaaaactgcttaacgttctgttcgtaaaacatctgcgtgaatccgtcttcgtgctgcgaccagttggccgctgtatatggtgcattgttttctgccatatgtttgcctcactttttcagatcaattttattcttcaaatagtttctaatgactgattagcaacttctgttttaagttcctcttttaataactcttcaaaaatagactctaaaacttgtacaacaatactattgcctgctagtttatataaagttgcattgcgcttatttggttttgtaggatactcttttaagacctcttcaaagtcagaatcatcaaagcccatcagcctccaacactcacgttcagttaaatagcgatattttaattcacctatccgaataattcccgcattcggacatctatcttgtcgagtgctgattgtccagcaactgtcctcaattacatctaaataacgatatttctcatctgcgtttggattgaactcttctatacgatttaacatacttggaatattaatcatatactgaggagctgtaacattaacttctaagaactctttgatgtgttgtgctgtttttcgatttagcttactgaagttaaaagccttattccccaatatagaaattgtaaatactcgttctcttcgctgagggacaccaaaatccatagcattaagaacttcaaatgaattcgtatatccaagatcgctcattttcgaaagatatttgttaaagttgtgaatcatatccttatcaagtacgcctttaacattttcccaaataacatactttggtttccaattccccatattttcaataatccttaacgtttcccacatgagcgaagatcttgttttatcttcatcatttcctcccaatctttgaccagctctactaaaatcttgacaaggcgatccatgcactaaaacatctggtcgcaaatcgtaccccactacgctttgtggcttatagcgatggtcatatagtgcgttatatgcccttactgccttttcgtcaatttctacataatcaattgctttatgatccacaccgaggttaactaatgctttcctcggtgccccaattcccccaaataactcaagaatcttaatcaatataattattcgtcctccttcttgtaaccgtctagcaatgccgttaatattctaggcgtgattgtagcgtgattcatagtatcgtagcaccatcgctcatatcgccgtaattccgcgatttcttcatccgtcaatggttgcgacatctattcgtcctcctcgtcataatctacttcctcatctgatacggcgctgaaagaccattcgcgaggaaagtcttcgttgaataaccaatgatcgattccatgcgtcacacacgttccgtgaattaattcgtcctcgttgtaaatcacgtagccctcgattttaaccttccgcatcattcgacctccttcttattgagaactttcctttaggtaaaatcaaaacctcgccgtctgcttctttaaaaatcacgttccgaaaagtactgtcatatacaaacgttctattactttgtgatttcacttgaccgccatccgcctcaaaaccaataagaacagacctttttcgtcttcttaaataccagattgctaacgaagtaagcataaccgcctctcccttctttgtttaaaccacgcacgacaagcagccttcctgcccggtatcttttgttcgcgcgtagtacagcgtcttgattcctttgtgatgcgcgtaaaggtcaattcggttaagatcgcgcgtcgtcatcgtatcctttaagaacaacgtaaatgaaatgccttgatcgacgtgctgctgaattgtcgcgatcatatcgacgactttgaacatatccatgtcgtacgcttccttgtagaagaaccagttcttcgcgctaagccccggcatcggataatacgtcttggaatttccgtatgtccgttcctctatgcgctccataataggcatgacaccagctgttgaggattgaacatacgagatgcttcctgtgggagctattgcttgtctataagaatgatataagccatacttcatcacagcttgtttaagcttcttccaatcttcaattgttggaatatgctgatctccaaacagtttttttactttttcatactttggactaaagctttgttcttcgtatttcttgaaatattcacctgatttgtatgtagagccttcaaactggtaatatgtttccccggcttctttggcgatttccattgaacgctcaagagaataaaagttcatcatcataaagaaagtgttcgcgaagtccctcgcttcctcactttcgtaggcaataccattttgagctaagaaaccgtgcagattcattgctccaagcccaactgacctcataagcttatttgccttagcaactgctggagcatttgtaatattggttttattcgatacatgagtcaatgcatcaatagctaatttaactgtattcttaattgaatcgttcttcatgacgttgaagatattgatcgagcctagattacatgaaatgtccaagccaatatcgtcctcttctccgtaatcggtgtaagacgatacttgggaagcctgaaggacttctgaacagttaccagttacaattccattaaaaattagagaatgataatcttcttgtgttgtgtcatagacatcctctaccccatctttttcaatgctgataatttcggctgtgaaatcatgttttggctttcgtgattttgcttgcaatttttcagtcaacatgttgaatttgtacttatcatattctttcaaattaacaatgctcatgaacaattctctcgacgctctgtcctgaatactaagcttgtgagttggtttaactttgtataatttggaaccgccccggccatcagggagaagctcctgtgagcgtttgttattggtataaatggttgtatatactcccatattaatgagtaacttttgcacatcttgcaaactctcaaaatcaactgatgttaattcaattgttagtgccttcgctttataattggcatttacacaaccatccgtttgaaacaatccagacaaataagctgcttgtgtttccttgtcagcttgatataagaactctggaactcttgtttttgtatcttttgtcattccatatttatttaaaatgtcaaagagcactgtactagacataaataataaatcttgtttctctggatcagcaacattaaattttggagtaaaagaagtgttgtgcttataaacacgattaattttatgtctattaattacaagatgaacactctctttaaccttttgttccaacacctttttattgtcatataaataaatcttcgctgtcttatctgttatggttccatccccagctataatccccatgatatatgcgagatcaggttcatgaatattcccatatgccccttcacctgactgaatcagtagtttgtcccccggaacaagttggttaagctgaagtttctgtatttcgttatttcgtttaacataaaacttgtgccactctgttgctctgatttcaaatccttgcttagttttaactttaaaaacacctgcgtcctttttagttagctgcataggtatcgcattcacaattgaagtccctttgcaatccttgtcaaaccgttttgtccgattgtcaataacgacccttaaatctttttgacttttataaagatctgaggctttttcgtacccattttcggttaaaagaagagtatctcccgtcacacacaagttagaaaatttaaccttcgaaacatgactgttcgcgtggaatcgatttacattgtcggcaaacatcaggtaaggataccctgactctgatcgtaacaatgcaagcttttctaatagtttacgagcattcgcttttttctttctgacatttgggttttcgaccagtttgtcatacatttttgcaatgtccatttcgtctaaatgttgtccgtattctttataaactgaatagggataaaacatgtagaagtccttgtcttccctagcaagttcaataaatttatctggaataactacgccaattgataaggtttttgccctaacatcctcatctactgagatttttttcgtatcaaggaaatcattgatgtcagggtgaaatacgttaagataagcagctcctgatccttgtctttgcagactattcggacgtgttcgctacacacgccccgcctttcggccgctccatgttaccacgaagattagactatatcttcatcccattgggatgcctcctgtttcggctaccaatcgcttgtagcctacgccttccggctagtcgttgcacgttcaagacgttttatcaaggtgtttccaccttgacaaattttatcgacaattgatttactcgcatatgggtgagcttttcttacctcagaaataccgttttgaaaatcttttaaaattgatagtgcctgtttttcagtaattgtagcatttgggctcttttcaccaacacgaatcaagccatgttttaaggcgtgttgagcatttcctttttctgtcacccattcaagattattaatacttggatttgacttatctccgtcaatatgattaacttgcggtaaattattcgggttaggtatgaaatgaagagctactaaacggtgaacacgtctgtcaacagctttaccgtttttgttaagagtcactttaacgtagccctcacgatcaattttcgttttaactaaggtcatgcgttttagattgactactcggctgtgatttgtgaccccgtagttgggaagctcttgtattgggactaatatttctccctctcttttcatgaaaggtatttgtgtctttcgtaatcccattttaattactcgatgattaattgcttcccgcgatacacccaaaacctcaccaatttctcttgcgctcattatgtaataatttttgcgaataaattcctcatcgatatctaatttgttgtgtggccgtcttgcttcgctcatgatcgtccccctttattttggtatgaatttgacccaaacccgtattttggggagttcccatgaattaaagaggttttcgatcgccattgctgacgaaaggggccaaattaacccatctggtctgcataccgaaaagcgttatcgagcagtttcattacacctacaacgccttttgtagcattctcaacttttttaattggctcaccttttgctcgaatcttgctcagattaagtgcaacaccaccaccaagtttagataactgcattgaaatatcaactgctctagaaatgtcattcaatgaatcattaacttcgagtaagaagcagctaaccatttcacctcttctttttcgtcctgcattaagaaaagtaggtgttgatggttgatattcctgtttcatcataagtgaagtgaattcttttgctttttcagcatctccattggcgaaaaacaaagcaacaatactcactcgatcttcatatcgttcaagaattttcgttttatcgtttgtcttcaaggcatagtcattgtaaaacttgaatgcactcatgaatgaagggaatctgaatttgaagctatacgccaatttgaacacttctttaatctgtgcaaaggtatatttgcttaaaaactcttcttcgtaataatcattctctaaaagatagtccagtttttctttgagatcgtgaaagaagacagtgttttgattaacatagtcaacaaaataactgtgtacagcttccctgtccttctcgaattgaaacttcccgtctttttgaatcataatttcgttattcagttgaacccactttggcacctgattgattactgtcaataaacttaacctcctgtattaacttgtccaagtctgaatctgatccacttaattcaaacttaagaagtactggtacttgatagtgttgtgagagtttatctgccgccgcagcataatagctaccccaatttcgattcccgcttgaacaaaccccgtacaaaaaatctttattattatgtataaacttctgagttttttcaggaatttgcccgaatttaattgtgtatgtaatatgtatgaatggctcatcaacctttaaatcctcagtgatttccatagttttaatttgcattttttgctcaagctttcttacaaatcttctaacattacctgtcatgctttcatatgtaacaagcattattcgtttatacttcctgaaacaaatttctctgtgatttcttctgcttgattttccgcagaaaacccggtgcttgcctcttctaaattaattgcagccatttcttgatatccttttgccattgactcgtataatgaagcatccttaaattgtttgacttcgacatatttgttcctgtagcttttaggtactacgtattgctctccttttggattggtggccacaagctctcccactgcaacagggacagaatagccttccggtgtatgtattgtcatattacttttagcttcttcaatgctcacaagttgatcttttttcacatacagttttttagcagcacccataactcttcctccttagattacttttaattagtatataaaattatgattttatttaattttgggatgctctatttgcttctaatgtagctacaaagctgtcatcaaacactcttttggtgttcacatgattatccaatggctcaactgttgcttgcattcttctcccttccccttcaatcttcgcagcaaatttttctgcagcttctaaatcagtaaatgtgacatcttctcctgtaacaaaattgttgtatacttctccgttagctgtttctccatcaggtttaactacaaccacccatttttccattatatatcatccttttaatttatttagattaaaatccaatcaccattcttgatatactcgtcaacgttagactttgtataaataaaagcttcgtcatacatgttgttagtcacatcatacaagtcagcgttaccccttctttttgcctcgaatacaactctactgaagtcggcgtcagatcttgattgtattttttcagagagtttaaatttgaaatggtttaaattcgttgtttctttaatttctttcacttcatgtggtactccactttcttcttgagcaaacacagcgtcattatgagcctcgatagcatcgtcataagtgttaacaagtgatcccatacaataaagtccatattttttatccattatcatcatcctttgaatttattttcatcttttaaagtaaacttccgtccatgatcaaaactctttcctcatcactttgaagctcttcgagaacatccgatattggagatagctcttgatcttctgttactgtacgactgtgtttaactgcagcatatagcatgcccacttctttaatcgcatcacttaagtgtccatcatcatctgcaactgcttctgtgtaaagcttcaatgctctttcttttgtatttgctttaattaatgcgtagtatgggtcacacacctcaaagaatttcatcttattgcatcatctcctaatttatttttgtgaacctatttatctcttttccatcaacaacaacttttccaaagaacatgtccttaggccttgcccacagaatgccatccatgtcttcatatgtaacaagcttctcttctgtctcagtatgaatgacctctccaataaccttatatagaccacctttatagtgtttaaaccgacaaccgattacattatatgtgtctattgtagctttcctccttaaacttcctctaaatgcaacacaagaacatttttatatggatctaattgaatctcatcccttgcttcttcaccatcaatcctgaagttaactggtgtgtcgccgtaaaaatcaagttgatcttgtaatgctttaattacatcacttacttttgggttaattaacttgccatcaatctcatcataagccacaggctttcctcctctcccttttaaatcatccttttaattagtttagtttaagaaatagttatattacacggttcttgaacttcaaattccaatctggttactttttttgctaaatgaacatctcttttaaatttaactggaataaccgaaggcctttccacttcattcctgcttacatttaagaatagtttcttatctaaataattatagagagtgtgataatcaatagcttcttcatttgtttctaagaaaatatgctgattttcctcatacatctcacaattttcgaattccatgattccgattctgtcattaggtaaatatttattttcaatgactctgtacagttctacatttttgattttcatttttttaaaacccctttattatttttttaaataaaaaacttttatttaaaaaatgtgcgctctttaaaacttgaccagttaattaataaacggccgtcaattagagcctctaaattgctatttaaattttcagaaggaatcccccaaaccatttttccttttatgtagattgctaacccttcatttttgcagttctcttctgtttccttgtcactcctcttctcttttttaggttcggttttaatactaaaaccacttgtcaaagcagcgtaatattcaacacgatttttttctgaatctcggacgaaatcaacaatagttgcaatttgtttttgtgtcttcttttcatatttattactgtgtttatagtgacaaagcaagttctcaaatttgtaaagttcctcttccccaattgtctcaaccaattccttcaaagctttgcctacctcatttggtaattctactctcttcataaataaaaacatctccttttattatcttctcatgcttacactgccacccgcgtctacacttccgcctacagttccacaacggacacttcccccagcatctacattccctttaacattgccacaatttacacttcctcctgaatcaacatcacctaagacgtcacctctcacttcaacagaagcatcagagtaaactttaactgggctgccttcgattttaaccttaaccactccagatacagagctctctacagccttcccatcaataagaacttcgttattggttatcgtaatgctatttccttcatatgtaaccccattaatattgaccttaccgttaccgctaatgaatgtgcttgttttacctctactgaataaattcaaaaatctcacctccttaaaatcaaacatccgcttctgctatgattttcttgattgctttaatgaacaagtccagtactgctaagcaaaaaagcaagtccttgataaagaatattgatacacctccctttattaaatcaaaccgataatcaataacaatgctgctgttataaatgataatccagccaataatgctataatcgtatgtacattagagtgaaaccttcttctctcttcatccaaagagataatcccaatcagaatacaaccaatgatttcaagaatattgatagctaactgcattgcttttatcttctcctatatctattttgtcacaacgtgcgcttgcctaggaaattacaagaggaatatccccacgctctattacaaattatctttttaattagttttatggggataattacgacctatatgatttaatgttttctcaatattcatccctcggcattcgtttttaaccttgtaaaatatttcatcaccacacttcttacaacagttgatttcaattctgtcttcttctgttttaactttctcttcagatacccttacacataacggttgtgcggtgtatcctttgcagatatcacatatgtagttcattattcaacctctaaaatcacgttttaattatatccttttaatttgtttatgtaaataagaattcaccaaatttcatttttaatttctttgattttcataagagaaaaaatcaaatcttcctctactcgtttccatgctcttctttcttcatgtgtaaatgtattctccaaatatgtatacagcttatcaagccgatcttcaatcaaatctaagtgatcaactatgaatttataaggatggctaatgtttcttccctccgatcagtatgtatggataatccaactattcaccagcttgtgatcatatgtgcgctcttgaatctcacaattgaacgctcttcgtttgtttatgtatgcaattgctttctttttagtcgggaatttaagattaacccttgtcccgttccacaatactctaaaataattctcccccaaattcacttacctttctctgtttaaatttgatattttattcagtttcacaaacacttcacacattactaaatttttacatgctatactagacttgtaacacaatcaaaacctagggggtaaatcttatgaaaaagttttacaaaggattgattgtttcagcattatctatttcttcattggctcttccagcgttagcaaatcaagcatctgcccatgaaccagcacaaattaaacaagttgtaaaacctgccgatgccattgcaacagtggattttcatatgctaaggaattctaatgttttgttgttaaatggctatacaagatgggaaatagtttctggcagccatcttatcagcataagtcctggtggtgttgtgtcttcccattcttcactcggtacagcattggtttatgcttatgatatcaatgataactatgtgatttataagattactgtagaacctcgataaattcttggtagaaggagtgattattcactcctttttatgcgcctaattacaaagttaataacgtcatcctgagacaaataagccgtgtcaatctcgatgatcttcatacttccatttttaaaccaatcaatatattcttttaattcgtttatgtatttataataagcatcttgttgctttaatgactcctctacactttcttccacttgtccaaactgaatcttatctctgtttagtctttcttttaaaacttccttattagataccgtaaaaaagaaaatataaatatcatcatccagtgtgggcagcagttggcaaaggctcttaaatttttgatgaaaatcatattccttatatagggatgaaaacaccatctccgttgggaagaaacgatccaatattgttgtataatcgctcactctcgccttccatttgtataagaggtcgaatattccttcgtaataatttgatatcttagcaagtccctcatcaccatcttcgtgaaagcctgttgggttaatcaatgtactgtgctttaaccgctgccttagcctatacgcgactgaagactttccagtccccctagctccctctaaaattatcagcattcatccaccttccctctgactttgtgccatcccaacacttcataagatccatcttcatattgaacttctacttgatgatatcgttcatccactgtttttacagttgctttttcaccagagagattaacaataaccttctcgtcgactttatacaccccaatcaactccttttaattactgcaataagataagatctttatcttcaaaatcatattcttcataaccgataccatcaaactcaatacccactattttattctcataatctatgtaagaaacaatgcctgtccccatttcatctacaaaagccttttgattcaatctcaatatgtatcactcactttatgtattaaattcaattctgattctttgtatctcccaatctcaccgttgtaatgaagtacatcataatcatattgccagctgtttactttatcaataataacgcccttaagtcctacaaatgaaggcatcccatactttgcgttactattaatctctacttcatcgttcaaattgtaagtccaatactttggcaatcaatcagctcccttttgtaatgatactcacatcaacatttcttcgaccaaagtctcttgcgattgattctgattgaaccagaagatcgattcgattccctttaatatcacctcctgtatctatagcataagcctcaaacgaatcgttattataagataccttcactaaagagtgcagaggaattacagatggatcaactgcaatcactcttttccctttatagtaaattgtatttgacacgtcatagcctgttttagttgtccctatacagccagtatcgcaaaatggaacataagccgtggcctccattttaatggcttgattttgttcgtgaggcctcttttgagtcttttgcttgggtttgaaagaaactttcctctttgtattttcttttaatttgctttttggtttattttttttaacttcttctactttaatatgtaaatacttatcttgtgccttttcaataatctcttggcgagtctctaaatgaggcagcacctgcctttcaaacttcacttcacgaatgaagtctggctttttataaaatggctcttttattgaaactttcttttgctgctggatgtgttcctctatcatcttatagcctaatgttgatcccacccccaatagaaagattacagaatagatctgcaactctttgtatttattatatacttttaatttgtttgagtctatcagttttttgaaaatttccatcacatccgtattataattgctttctttctgaggttaagattaaatttccttccgcgtctacaccttcgattttacacaccgtatgctgatagacactattcttatatgtcttagggataaaattgtttcctcttctaaagccagtaaacattaacagtgtgcctcttgtataccaggacttttcaacaacttctttctttccgtttatgtttcgtgaaatttgtttattgtaatgactgaagctcccagcccactgtttgactgtaacaactcctgttggtgttaacaatgtaattgtgtgtttgtttttatctcgatcaagagctgtacctataattctatgagtttcatattcataaagctcttttcctctccacttgtatggtcgaccttttactggttcatcgggcagtttatgaaaatcaacgatgctgtactttgaaaaattcacattgcttaactcatgatcgtgataataataactaagtgagtccatctcccattttccatatgagccgtttgcgtacttttcccattcttgtctaaatagacaatcatttagcttttttaaaggctcttgggttccaatccaatttttcaatttcagcatttttctgtcgtattcctttttaaatgccttttcagatatcacaagattaccgttatgtacatcaactatgccactttcatcaaagtgttcattatagaaagtagatgctatatcatcaagcagcaataatttgtcttttggtgaatcgacctttttaaaaactctcttgctaatataatctttgaaacgaaagaaccgtatttctaatgcaaaatcccctggaactaaatcattttcaataagcatcttcaaattggacatggttagcttacttttaggttcggagattaaagaaataaacgatttcattaaatcttttctctctccaaatgaatcaaagcagcctccctttattaattgaatgacctgtcctttctttatgataccgctatagtacattctctctagaaagtcctcaaaatcagtataaggtctattgctgataatttgatgaacaacctcgtcgccgataccgttcatccccttcatgccaaaaataattgagttattttcaatatcagctttaaagccaaatccggccttgttgatatcaggtaaatcaactttaattccccggcgtcgtatattccctattgctgaagcaactttaccgtaatctgttttttgtgtcttcttctttttgtctaggtcatcagattcttcttcattttcgactcctccgctgttcacagttagacaggctgtattccagtataaagggttatatcgatagtttaagttcaattcctgtagagcaatgattgaatatgccaaagtatgaagtaaactaaaagaatcttttacaccctcggtttcccgatatttaaataggggaatagactatatcttcatctacgctttttttgtagtcttgctcataaacccatttataacccgcaaacgaatttctatttcctttacacacctgagaaattgcaccattgtctgttttattcaatactttataagcatcagtaatactactaaaatagtttacaaagtctccttctattgttaattgtattacccctctggagtaaaactttacgctcttcgagatattgctgacttttcgtttgtcatttgtatatctccattgataaccacaagcctgacttccttctttgttaatcagtccattacaaattgttcttacatcaatgttaagtgctcgtgctgcttcgctttctgacttatattcagcaattttttgtcctgttagtgtatattgaactatcggctttggaatattagataagccagtgtcaaaacaatgacgcatattctctttccctgttacccattctaagttatttttgtgattattttgtttgtcaccatctttatgattaacttgtaaattcttattttcttcgaggaagtacgttgcaactaatctatgtgcatacatataatatttcttactttgatgaacaatacagtattgaacatatccacttttattgtttactctcggccttaaaaccccctttgttttccatgattttttttgtttatgtttctgcatctgccagtgtttgatatttcataaactgtttctgtcccatttatataaattcttttccattcttccatctttatcacctccttaagcgtagatgtgtggcgcttcgtaagtagggatttcacctactaactactcccaaatgggatagtcgttacaccttcctagtaacctaggcttggcacggtattgtcataggatttctcccttagagttccaccgttagcatccttagaagaggacacaccctgcttttacaggttcaccacatacgggctatcatttaacccaaactgtcttttaaattgaacattccatacataattcaaaaggttatctgacgctccaatttccttcccctttttgaagaataatttctgaacctcttttaatacgtcctcttttttcttagctatggattttcttaaatagtttgattccttaatatcgaaccctgctatttctttatccattaccatttgcatgacaacttcttgcgtgtcagcaaccccatagatgtcttttaaatgcttctcaactacctttattgcatcatcacttaggccgtatttacgcatttcctcgtaccacagtgacaaattgtttttatatttcacataagtgtctacgggttgctcttcgccatctgacatgagtctcattaaagaatttgtaacagcagcttcaagcaaatttttaggttgaacttttattactgcttgatggccgacctccgttgaaaactgaaacaaatccattatttctccattcccggccatttcccataaccttgcgtcttcatactcaagcacatcaggatgaatgtatttgttatacgtctcttttaaagagccctgccattgaatttcttcgttttcgatcaattgatcaagagttacacggatcttatctaatgcttcaatcgtaagaagatcaaattttacagatcccattgcttcactgtcacccatattgaattgggtaatatatgccccattaggagtcttcatcattgcattagactttgtatacttatcattaaaaataattaccccagcagcatgtgatgagcgtttattggttagtccttcgatttttaaagcagtttctttaagattgggatagcgctcaacttccctaataaattctttaattggctttctacctgtttccgcgtctccataaaaacagtgtttgagaggccagtttgatcccctttcaaatggaatcatttcacttagaaattgtgatatgtcattatctattcccaatcccctacacgcagtttgaagtgccgatttagatccttctgtcccaaatgtagctatctgcagaacacgtttttctccaaatctttcgcgaagtgctttgagtatcttttctctttttgatccttcagtgtctatgtcaatatccggaagatccggcctcgatttatgaatatgtctccaatgcggcaagtcgtattgcattggattaatctgtgtattatcaagcaagtaattgattaagaatcctgctgcacttcctcttgcggctccaactaaactgtctcctccacattcatcatcccaaataatattaatgatttcccttacagttacatagtaagatgccatcgattgatttagcttttgactgatctcccataactcacccaattcaacattaattctggatagaattttatgaaattcatctcttgttagatcattttttagaagtttattttcaaacccgtcttcaataagctttaataaatacctgtcttggtcatcctttgactccgacatttttcttatgtattcatacttatcgtaggctggtttaaacaaatgcctcaatttgaagtttggcagttccattttaggaataatgggctcatgctcaatcgtataatcttcaatcatttcaccaattaaaagagtgttttgaattgcttcttcaacaatctctttatcgatataattcattctttcatggatctcatctacattttgcacaaaacaagcttcataaaatgagtcaacttctctttccccgtctttggcattcaagaatgcttggtgtattgctctgtcttcgggtcttaaatagtgagcatcagtggttactattctttttaagccatagccatccgctatctgaaccaactttttattacaataaatctgctcctcactcaaagcaggttgcaactcaataaaaaatttatctttcccaaatacatcaatacaccaagtaataaactgatgtatttttaatttgtattctttaattagttcaggatctccatcgttcttttcaacttccatgatcttctgtaagtaaatattcacttccgaccctagacatgccgtggttgcaataatgtgaccaggatctttcttgagaagatcttccacgtcttttttcactgtaggtactctttccatagttccagtgtagaaagaattttcccatgctttagatgataaaatccttagctgttcatgtcctttttcatcaacagccagcattaagaagtgaggaaattttgttttaccaggctggtagttgtctcttacttcttctaaagaatcaaccagatatgcttcattgccaaggataagcttaaaatcttgaggcatttccccctcttttttcatgcttcggacagtctgaattgcttccagatgcgctgacagaacttcatgatctgttatagctagtcctttataattcatttctaacgctgtttcaagcaacccttttactgaattggtagaatccagcagcctgatgttgcttttacacgtatgacaatgacatccaatcacagcattccctcccatttaaaaaacaagcacttttttctttgctttcaccacctccatctcttcgatttcgatctgaggtgtttctttacccttatattcatttactttagctcttccgattacagtaagtaccaatcgatctcctctattgatgagagattcatagaattcctcatcacttttaaatttcatgtattcaattccgccaaccttgaactttacagtattctttgtttttttcccaatatgactgatatcttctttgtttatttcaatatcagtaatagcgagcaacggttcctctactttgtatccccaatagtcttggtaactattgattagcttaataaatcgttcagtgaggttgtccgcagcaatctcaaaatcaacctcatactcattttgattaatcacaatatctttcaatttgtgattaagaatatcattgacctgaattaaattttctggtgttatgctgaatccaaatgcttcagcatgtccttcgacaaactcgaatttacctgtttcctctaagagctgcttgaaatttttaactgcccctttgtcgtatccccttcctgatcctcctagagttctatcttcaagttccctagccaataaaactggtcttttgtattcagctgctaactgattcgcaacaagccctgttaagttcttgtttaaaattccttcaatataaactattaaaatcttattttttaacagtcctttttcttcaatccgcttctcgatttccaataccgcactgtcaaccattttcttttggcgctgtttaatattccccaatactctagctgtatcccaatgaatcgataccagttcaccctcatcttttccacgttttttgtaatatatctcttcattagattcgagcagcgatctcatcatctgatctttctcatcttgggagcctatacgaattgctgcattaattagtgggttgatatagaactgtgtgttctgtatgttctttttccctttggttgagtacgcttgttttatgaaaagctctttaatcaaaggatttcttacctttttgagaccttgattcatgtagtatcgcgtctctggctcccttgaatctgccgaatccgcaatgttcccgacagacacaagatctataaatcgttttgcttcattttttccgagtttttcatctaaagcttggcagagcttatatgccatacccgcaccagtcaaagctttatttttatacttcggtgagagctgattatttaccacaattgcatttttggactccttatcacactcgtggtgatcaattactattacatcgatccctttttgcctaaggacgagatgttcttcaaattgattagagcctgcatcgggtattaagacaagatccacgccttcaggtatagtttctaaaattatcccgtgttgctttccttcatgcattctccattcaatattggcctcagggaacactctctttatatagttaataataatagagcttgaagtaactccatcaacgtcactgtctacctgaataaaaattctagccttttttctgagatgctttattaaacattctgctgcttcatcaatattaattaggttagaataatgatttactgcgtcctcagataaacttaaaaaaccttcaatatcttcaattcctctgttcttaagtatggtttttaaaggagaaaaacaaaaatcattattgccaattaatttatatttcaaaaactattcaccttctcttgttccaatttcaattttattactcatcaactcctcaagaacttccttccctttgtcggctgggctgtctttataatcaagtaacccttttgtatcccagagaacatatacacgcataaatggcgtaaattttgctgctaatttcaaaattttttcttcatagttttttagcttttctttgtacttatcgttgctttctccttccttaatccccctaaatttatctaaggcaataaacacttcgtctacatctaacgaaagaagaatgtctctatggaagtttgaaatattgtttgaacaaacagcgcaggtaaaattcaaatccccatagaaatcctgacattttaaaactgatttttccgattcaaaaatcattgcttttttcaagcgtttaattgctttttgtgttttatgtagtccatacaggttcattactgtttgatgattgtacatcatattcccaacggttaacggcatatattttcgtccattgtctatgtcttcttgaatcattgagcgtcttcttatgccgattagccttccagcgatatctctatgaggaataacaattccttcctcccgatttcgaaaatagtacccgatttcgaaatctgtaatagtttcatggctaatcccttcattaagccaggcctcatggggatatttcataaaaacatccaagacattttcactgtatgctggcagccttgtttcaattttctttcgttttttgaacttggaaatccaatcccaatcgtcaacaatatgttcatttttagttgaagaagtaaagcccagtccaaaagttttgcctgacacattaaccacaaattcaatcgcttgtataaatgtgaaagaaatcccttgctgctttttagccctgattaccagctcataaatatcaaaagtgtccccacattctgtataacagtgaaacagctgtttttcatggtagtaataaagcttaaaactcccctttgttttattgtggcagactgttctgtagattggatttccgctgttatctattttatatgtctcactgccaagttcttgcaaaatcttatgtatgtctttaattgataaactttcttttaatttatctttgtcatatctcaaagggctttacaccccactaccctgcttttataattaatttctcgatttggattaatttattgtccacatctgtgacaaagcaatcttttattctcatggtacccatattaatatgtgaaaagactttgactttatcgtgttcattccctctgtttttaaacacatgagtaacgaagttaggctccggatagaagccagattctaagatggcgccaatagcatctttttcttttttacttaatggcaaaacaatcattgcagcatcagttttatcggcaatcgctttactccctcttaaatatgtagcatcaatttgaagccctcttagccatgcatctttccaatcaccatttaactgtgttgcgctcatcatatagatgtcgtacttgttgcaaagtcccttaagcttatccgacataagtaataatatttgatcttctcttaaattaaccccgcttttcttactcatttcagcaaaaatcgttactgaggaatgaatataatcaaaataaacgtattcgacttcatttctgattacgtttttttcaattgttctctctatctctttaatattgaaatctggtaaatgctcaaaccaaataggcgactccttcaacaccttggcagctttttttacacgcgttttttcatcttctgtagtggtgtttctaagtatttttttttcttcaactccactgatatatgccaaagctaaactttgcagttcttcagaaatcatttcagtagaaataactaccgacttttcttgaaaatcgtttttaacccatttgttctgctttaaatcatataattcagttgcgctaagcctgcaagcatcagccaccatattacgggtttttcctccaccagtcatgcttgacctcaaataaaatttctttttcctagaaccgcgaaaaatagatgttaacatctcactgttcataggaactccaatgtccggtgaatcttcaagtcgtttgagtagctcctctactccctctccgccttgaattccaatgctttcagggtttgtgctaaacttctctttaatatcaacaattttcatttcataaaaggaaagaatatcttcgatagatgttttgtcgaatctctctttcatggcttcttgttctttgggatcaattatggactcatcgtatatttcatcaatattaaagcctaagccgaccatctctctcaaaaggctaaattttttcagccttgtgtaataataatcaaagttttcgactacagctaacttttgaatttgctcgacataatcatgtccgttgttttcattgaaaattttgtattgtatatcgaaatctctaagatagccatcaatttcaatttcattaataacttctgttccctggtgaaataagttatacatcgcaaaaaaaagaattgaatgaaagcgttcagggaaatcgtttgctgtaatttgatatttgttgctgtctgataaaagagagggctcctttaatatactgcctaacacttgaataattgctttcttatcttgtagcaattgaactcccccttctacaaagtagatatatcaacaatctttatattttttctattttgtttttttatcacaacaattctttcttttggtttatgtttttttgctttttcaactgattctttaatcgcctttttctgaagataatccgcttttgcttcttcataaatgaatgggactattcccaatccatctccttcacggacaggattccccagcgtttcatgaaagtaccttaaagctaattctataccttttaatttgtatttgtattcttcctggaattctttaatctgctttaacatcattccagttggtgcatcaatcttatatagttcacatatgtatttaattaactcttttcgatgttctgcttccatcttccaagtatcaaaacaatgctggtgataatatctttttttataagggattgcatcatctttgtctaaataagtttcgcagtatggacatttaactcgacgtgccatatacccacctctttaaaataatgagggagatagactccctcgcgccttaattttcaagaaggtctttaagatcgtctaaaataactgacattacatctgtctgttttttcgtacattctgttaccctcgccccttgaccgagatgcttttcggttacctcatttacttcctcaagtctgccttcttcacttagctttgtgccgatttcgattatctgctccattaattggtcatagtccaatttctctgatgagttcttttgcttctgttcttcatatgtaacggcctgaattccttctgcttcttcttgtcgtttaattgcttcgataacagccttttcaaggttctcagcagtaaactcctcaatgtatgtatcaatataatcaaaacggctacgagcaaaaaatttctttgtttcagctaaccaagcgctagatttaattaccctattatcttcatccacaccatttgagctaaggaataagactatatcgctattatcgattactggtgcgagcactcgcttatcccctttaggaatgatttttccatccttatcttcgattgcgtgagcaataaagacaacagtaaatcctacatttaagagtttgttaatttcctcccagatttcggtttcatactctttccataagccaaatccatcgtttccatccttaattcgatcaacatcatattggtcacatacatatctcgtagcatattttgagaaagcatcaacttcatcaacaattatggtttgataagcttctttagccttttcgggattttttgtgagctgcttgttcacttttttgaaatctccccagctattaatcggcatgaaagggactccagcaattgcattcaatcctttttcaaatggaagatagagtggctttttcattctggtactttgttttgtttttcctaagttgttagatccatatatcgtaataacttttccttcaagtccttttgctactacagaaatctgagggttaaaaatgtctattgtcatttatattctccttttaattatttttatattgctttcttaatatccattaattattaaaatggcaaaccaccatcttcaaagatcgattgagaagaacctgtgactgctttccctccgaatccagttttcttctcatttttattgcttttctgagtgtcattcttcatttcctctagtttaagctctctctcagtcaatgctgctttaactgctgcttcgtcaaaagctgctttatcgtcttcgtcatatggttcaaagccacctgtaattaagaattcacgctttgtgttatatgtaatgttttctttgtctattccaaatgctgattcttgaacggtcactttcacttctttaaaattaatgatatccccgaatactttaacggtgttccccttttcgtaattcttttctacgtaatcagagccctcttttgttaccgcaaatgtaaaggggataatttttcctccatataaaggaatgtatccttccaatagaactcttcccgtttcctcccctttcaccttttcttctttaaccccttttacaaataattcaacttcaaactttgctctcggattgtattcttcatctgattttaagcggttaacaaagttagtggataattgcgggtatgactttaaattgtcttggacataatattcattcagtccaattttcccttgtgttattcttactttgtcagcttcttctttgccatgagtagctacagacttatagtcattaattattgttttataacccttagcaatcccattttctgagccgtcttcttttttatactttgacattccagtgacagtatgtacttcgtttggagctgtttcgatatctagttcaatatttagcccttctccacttttccattcgttgtgacgaacttctagaagcaatccctctaaaactactttgttttctgcttcacgcaatactgtttgattttctgacatttcacaacactcctttttgttcttttaattgatgtataattgaatcaatagacgcaaggttattcagatctcatatgtatgtactaccttgtagcggaatgctttctgtaatactttatgtctttgatacctaaagcttttgataattctatgtatcttttcttcgaaaatcttggtctcttatggtttacaattttagtcaccttgccatttctaacagtgatatgaagatcatgatacatgtaaaccttagaaaagagcccgctactcaataccctctctggagcctcagctagtactaagttaacattccgagtgagctttgctcttgcctgatcttcacttatgtttttgttccccttgacgcactccctgtaataatttaaagcgtcttctgacaccttcagcattttcatataatcacctctttctcatcaatatgttttaattatatacttttaatttgtttttgtctattgttatttcaaacatttttttaataaaaggttagttttaatcaaatcctaaatatctttattttcggggcattttctaataagacttttgaatctttataaatcttgaagcttaatttataattataaaaaaagtaagaaagggtatttcatgggtgtttttaaaaaaatcattattggctttttgctttgccatgtaattttgttaaccttgttgtacttcaacctttatattattggagcatttgatgattggaataatacttttatctatgcagcaattatcttttcctacattccagcaatggcattaatcgaatattttacacttagctatataattcggcgtttaaatttttaatttttattttttttcgtccgcattggtttctttttttaactgcattagtcaacagcattttcgttttattttcaatctaatgaaatctatatgactatcattactgctataagcacattaataatgagttcttttctgtcttttataggaaaaaaaagaagcgcgctgaatatatatcagtgcgctttaattttttatggtttaatatcaatgttcattttagctgaaggcattggtgggaatagatattcgaaccccttgttacttgccttaaaaagcgtaatcatcgcatcagaatatgggatatatgcatacatttcatgactaggtgcttggtctcttgttccacttaccgtaatacgaccgctcttatatataactactccggccgtataatctattgcaggagttgtccagccaaagtcgttaaagccaactgtagcagcatgtttaataacaaagtaattcatgcttttatcttttttcccttgggtgaaagtaatatttttatccgttggcttttgttgctttttgaaattaccatccttgtcgtataatctagtatagtttacgtcttttctgaaataagtacttgatccactgctggtaaatctcgcaactgcctcagtttgagttcgatgtgatcccccagaaaaactaaaggatctattgtctccaccaaatttatctccgccaatccagccactaaaaatggatgcagcaggtgcatacttagttggaatgaatgtgcgatatttaatacccatttggtttgggtgcggccctactggtggctcccaagccaaactgttcagattctctttttgttccggcactttaatggcctttatatattcgtaaggacgataataataatctttgaactggtcaaaacttaacttttgatttcttttttcgaattcttcatttaccttttcgatttcagccgggcttaacttcttcaatacaacaaatttatagacataggttttgccagattcaactttatcatctacaaaagtcgttcctgcattattgtctattaattcatcatctttataaacttcaatcttcccatcaaaatcatcttggatttttcctcttaagtttaaagttaatacattatcattaatagtactatcaatgtgctcctcagcttttaacgggtcaggcatatcctcgtctgagacgtcttgtgttgatatacgttgctctggtagggtcgttgtatcaacactaaccatatcttttctttttccattttcatacgatacaatatcatattcctgtggacttctgggctttaaattcttatgtacatacttagaatccgtacctttccatagtagcttcccatctgaatacacttcatacttatcgccagtgtcattccaatctaaagtaattgtgttttcatttgatataatctctgtctccaattctcccccttttgcaaaagctgtttgagccgagaaaacaagtgccatagatgtcaatcctactagtacctttttattcaaaaaatcccctccctttacattactagtataaattaacatacaactttaccaaaaacaagtttatttcttgttttttgtattttcaaccaaatatcgcagattttgaaaataaaaacaaggatgcctatatttaagacatccttttttatcagcttataaagtattgcttcaaaagccctcttcatgccatgctttctccaagcaacccagttcctctagctcacactgaatctttcctagctcacatttaactttttcaagcttgtcattttctaattgcagtaaatctgttagacgtctaatcttagcttcaatgtttgcctttttagtaagtaagcctctttgctgctgcagtaatttctttctaaccaattcaattgtttcttctgtacattgtcctccgcatagttgttcaaccgacacattaaacactccttatcattttaattagtattttattctcaaattttctctttgcgtatagggctaagtgcaaattacgattcgattaattttctccttttcttttaaaataatgatcggctgcatcagtaaaagttatttttcccccctctcaattgaaaaagctcgcatttctccatatctcggagttcatctttcttctttttgcaatatctcatcttccctcttgttactgtcttgtctttttgaagcacatctgcagtcttgtattctgaatagaatttgcactgctcacaggtatttggtttaaataaactaaacaatagccacttactttcaaataaaagattgtttttattcaaaagttgtgtgataatttcacctccacctcgcaataacattcactttcctgctcgccgcagtcctcacaaattttttcaacctcgaatcctaaaaattcatattggggcatagcataataatcttttccgcaccaatgacatgtaactctgccgtcgctgtcctgatctaaattttcaaagtgctcttcctctgcatgatcgcaatgcgggcaaatttgtctttgtgaatatccgctcattcttccgccgcctccttattgatccggttactccttctatctgcaaacatcatcatttgatactcctgcaactgcttttcaacagtttccgcaagcactaaaggaaaagcagtcttttcccacaaaataaaatcgcactgcttatcatttgcatcagggaaatactttctcactaagtcaatccacgtcattccgccgcctccacttcgcatttggcacctttgaaaacagtttcgtaatgttcgtttgtataatgccctctcaattcccggtcgacttcaagtgtgacctcgccgacattaccaaacttcttttctaaatggtttttaattatttgtttcacttcttcaggtgataaagtcacttgcattttcattcttccgccgcctccattagctcaggatttcgatacacgtcgccgatgacttctacttcattaaatcgcatccaaaggtatctatctgcccctttttgattatcgatatgtttcattttgaggatgccgctttcccattcgatcacatagcgatcaatcacttttttaccggtcataggatttatataggattcctcagcgatgtctttttcgtaaatctcccggccgttttcgtccttcaatccagtgtataaatcccggctgattagttcatattcatctaaaaataccggggacagtttggcggccgccctttcttccaattgcccgatgttataccatttcatttcaatgttgccgctacctttatgcctaaatgtgtaacgaatcttgataatgtccattccccttacctcccgtcatcttgtaaccattgttcgatttgtttttccctgtatccgactgctgcatcctctatccaccttgtttactcacttttaatttgtataaaatttctgttttatctaattttcagtgcttttaatgccgctaagcatgttgctttctctggtttttctgcccaagcttcatactcgtcaaaagcagcacaccaatcttccagaccgataaaatcgtgttctcttgataaataaaaatttagtccataacctttttgtagcttctcaactacctgcaatgctaaactcatttctcccgcaaagtttttaagattaaccactttcccatcattatcaaaagccaattcatcggccacaatatcccctaaaagctcaaagcattcatctggagtgattttcctcttcttgtaaccgttgaataatcggtcttgaatcaattcattaatttcaacattacttctcatctaatccctcttctcaatttgtttttatccatcacatcaacaacaaaagcttcaaattccttatcccaatatggttttgttcttgctatgtacttttttaaaactccatcttcctcgatcataaacgtctcgccacgttctatttcagtgaatttcttctttgtccagattcccctaatcaatactttcacatctttaagctgcactgatgtttggtgcattacatccctccttttaaatccattaagtaccatcagcatttttctttaaataacatctctccttagataagatgtttaaatggaggtggttttttgtttatagctccaatgctgcttgattcagccaaagagccatttgatgatgaaaactatattgctgagcttaaatttgatggaatacgaatcattctatctaagcaagatggtaagattaagctctacacgcgccataataatgaagtcaccaataaattccctgagctgcatgatattgatattcccgaagggacagtcctagatggggaaattatcgttaccaattctgatgggatgcccgattttgaatctgttatggaacgttttcaatcaagcaaatcttctcatcaaattgtttattgcgtgttcgatgtcataagattaaatgaaatatcaatagcttcaaatccactttttaaacgcaaggaattccttagatcactaaatcttaaccatccaaatatctttgtgattgaaggagtacaaggcaaaggaaaagcctattttgaaatggctaaagaaaagaaccttgaaggaatcgtgcttaagaaagcaaactccccttacgagatcaacaagagatcggaaaactggatcaaggttataaattatcagtacactgacgtgctcattactggatacactaaggaagatatcaagtttcttctcagttaccctgacggtttatctgccgggttcatggaatttatgccattcgatgaacgcaaatacttccactctatcaaacaaatagaatatgaaaatgacgattatgtattcattaagcctttattatgtaatgtgaagcaccgttttaagactaaaaatggcaaacttcgtatcccctcatttaattcctggagagattaatactctccgttacatagcttcttctaaaacaaattcaaaaattttattcttcacatacgatttaccttcgtatacatcgataattctccattttttaaacatatcgcaataccatgtaactgcatattttgcgtgtttcaatgaactgaaagcttctgcatctcccggacaggccacttcgatataggggtgttctaatgactcgctcccattatgtttcaaatagaattccgtctcgatgttttgaatgataaacacacaattcctccttcataataaaataactattttatcgacttttcagctccacacttatgttgaggttattggcaattcgtttgcctacttcattagatactgtttgagacactctttctttaaagccgtagagcaaccttcctccatctccaaaaatttttgaatttataaatgactgaaattcccctgactctgttgcttttttaacttcatttgatactgcaatacgaatcatttcttgaatggcatctttcgttatacctaattcattatgtataaaagttttttacttctttgtatccccttttcttatcttcgaattcttgatattctttttctttagacaatggaacaaggacacgatagcatccatgtgaaaatccgcacgtgatgtctccgtctggatgttcgtattcgattacatcgatcgtgccaacgcccacattagtaacctcccttacccttcctcccgatttatcgttattcagatgaataaccttctcgcatacttccgccttgcgttcgaccatttcgtagcgctccccgtcaatgtagacgaagttggtcgcttcgagtgtacagtattcgttattaccaacatgatgaccgcattttgttgctacaccactaccataacccgtgtagagctcgacggtaaaaaaatccccatttgaataatgatctccataacctgggtcagcatcgacaattacgatcttctcacccagtttcgccttcctattgacctctacatattcgcgtttgattccgccaagtgattcgtcagccaatacgtggattttttcgttagttttcgtcatttatacgtcctctctattccttatcataaatcccagagtgtgcaagttcatatgctattttttcaatcaattcagtaacgttttgcccttctaagatatcacttatgtttttcaatgcgatcttgtattgtgcagccttttcaacctgttcgataagccattccatatcatcgcgctcgatttcatcttcattaaaacattctttgatttcgcttattttgtccatttcctaccttcccggtaggccgctgatttgtgtaagtgtgaattaatcaatatgctgttatgattaagcttttatggcattttttaagaaaatataagcagctaaaccctgacatttctattttcattttatctttatcccctaaacggttacacatatcacatttaattttaatgctcttttcttcttgtctgtttcgttgttatggcgaggctgcattacttgtattcaaaaataaatccctcttcttcttttggaacttgtgaacattcgtttgttttcggcttagaaatgacatatatgaactctttatcctcgcttaatatttcatattccttcccctttttaaaaatgggattactgtgatcattctcaaaaaaaacatctcttttaaagacaactaaatccattcttttcaccctttccttatttcgctttatcgtttaacagctatagcagcttcactttccgatttacgcccgcactttctttcagtccatcacaaagatctaaatattgttacgttccttcatttcttcaattaggcagttaattttagtaacaaatcttgttcgcttttcaagtcatcatctgttatacctttacgttgcacatactccaataaagcgcgttttaatgtgtacagctgtttgtatgaaaatttagtgttaatgccgctcatttcctcatcctttctcagtcactacctcaatattttatataaaccactattgcttttttccacgctagattctctatttttttcttagcttgcttatctacaaaagctgattgatcattagttagtggaaattccgtatataaatcctccgcgacactatcagcaatctcctcaaacaattcgtctttctcttcattaaatagccatactcgatcattcaatgtaatataagaatcaattaaaattctagatggataaccaagcgtgtaagggtggtcagatccttcatttggatacataaaaataagttctctttctggatacatgctcaatatatttaataattctgatgttttatccagtttcctcatctccttataaaccttttcgaaattgttcttttaattgatttatgttttatccaatagcatattttgatttgtgtggtcttttatgtatgaattcaggaatatcaatacgcttattgacttttgatttagttcttacaaggacacggttttcaagaaactgtacttcttccactttctgaccatgggactcaaaataaaaatcaaaaatctctttaagagtcttatcattaagattgtaattcatcaatgcccctccttttggaatctatatagtctttccagctgcaattctcaaacacttttatatctgctcccaaatgccatttaaaccatactaagttaaaccatgctgtttccaatatgtatttgatgtaaccgatactttcatcccctctttggttaaaataatccttgtatctagaattaatatgcgtatgaaatgtctaactcaaagtcatatttaggatacaacctccatatttgatgtcctaaatagcatctccttgcataatttaagcagttcgctgtaccgcctttacccccatcatagacggccactattgattgactgtggtcaaccatatattcattacgtttctgcatcttagcaagtgaaaattcacctggattatcgtcatcagttttatacttatcgacttcctcaacgttcacgatttcatcagccgactcaagcattctctgataccaatacttctgttcatctgaccaaaccttatcttgattcctgaatggaatcgcgacaatgttttcaataaaaggatgtttcttcttcagcatatgtacacaccagaatgcagctatgtccgttccgagcgctcctcctgaaatgaatcgacttttattttctcgtgtaatcaggtcttcaatgacttcaagcagcttgtccttcaatttcagcattgtggggtttttcatatcataccctccaagcttgtccggtctgtgaccagtaaaacatgcagttttttgcctcaacgcctcattttcttcataaagccgctcacgttctcttttttctttttcccactgcttaatccactcaggatcgcttagttttttgaaatcgaccatatcactcacctctttctcttataggcaaatctttttaagttgaaattctaatttctcaaataactgttgcactttattgatgtttttatcttcaaaaatgatggcatcctcttttaaaacagcagcttttgataatgcggtatttaattcatgatcaacgctgtgtgctacttcccctctatttaatacatcaaagtacataccgattttatccttgtaccagtaagaaacatctgaacatttcattattctcaacttcatatctcactatctccaattctctttaaaacaatctttttattaaaaatttaaattttaaagtacttacttccctcatgaaaagttatcaccatacctacttccccaaacattttaactgatcttccgtctttactaggtatgccctcgtatttcttccctttttcaaaataaatgccactgtcaattccccaatcttgcatgcacaagtattctctcatagatattactccttttaatttgtttaaaacttcaattttattcaatttcacgttcatgaattgtatagagtacatacggacagtcatcaaagagtgaatcttcttcaggctcttgcacttttgttgtctgatataattctttaaacttctttacctcctcttcattacgtaatttaaattcaaagagaggcatccctacaacactcactcttgtgtttccagaccacccttcttgttccagttgcttgattgtttcccacatctcatccaaggaattatgaaacacttctataaccatctttttggtttgttttttgacaatcatcttcatcctccatttaatttgtttaaagttttacttttattcaaattaagctttacaccactaacactaacttttctgaacttcgtgttattgctgtatagagccatctgtggtgcatatctctgtctaggacttcatcaatgactacaaccttttcccactgcgatccttgtgatttgtggcaagtgatcacgtatccataatcaaaagagttgtaaattttatgctcatgtggctgcagcttaaatccgtcatctgttaacgaatcatttggaataataattttatcgaaaaaatcatcagtaaaatctggttgaaaatcaataacggtcgaatcgtatttaagcttccctctaacagcatctacttgatgaactttgcttacgtatccagtcataccattaaccaaacttatgccatcaagatttttattccagtcattctttaagcagatcattttatcgccttcaactgggaagtcactttcatatcctaagaactttcttatctcagaattcaaatgctttcttgtcctgttataaccacaaataatctgatctgctttctcgtaaaaatgctctttcattgtttcccaggtcgaatgagtaatcactaccgcttcgccgtttttcccatacgcgccaggttcaattttttgtttagttcgcgcaagcattgacaggtatatgattggattctctgcagcttgtcggtgaatttctgtcaatgtgaaatcagggttattgaacatctgaagaaattcctcatttttattttgtgagactggcggcaattgccctgtatctccaataaaaagaatctttactccaaaagacctcagatcactcataatctgcccatctaccattgaggcctcatcaactacaattaatttaaggtgtgacagcatatcttttgattttttctttacagttagatctccagtttttttatccacgtaagtgtcgtaaatcaaactgtgtatcgtgcttgctttatactttccttgagctttctgtgttactaccagtgccgcttttcccgtataacatgcaaatgctacttcagaaagcttgatcttcaacttatcaattacgtaattaacaagtgtggttttccctgtcccagcataccctgctaagaagtagggtgctttaccctcccctttaaaccaatcttcaatactttccacggcttgttgctgcattgttgacaatgtaattgaagttatatgtattcccccttttaatttgtataaaaatattcttttatttacttttaatttgcttatttggtctttttcataacaacataatgctcaaaacgcctaacatacgctcgtttgtactttagcccactatcgacacagttggtaataactcctctttacatctttttgagataggttgaatacattcccatccagctgcctccttttctcttattctctttactaaacctactttactgtagtctttaatttcaattcttgttggatatgcagcgatcatgttacccctcttccttttctctaatcaattcatttaatatgtatacaatctcttgtgcattctcaataacaaagtgcaaatcaccaatgacccttctgtaatcactctgtttcaaattttttgaggctctagtgtgtgaatcaagtatcttacccatttttttaaaaataagttctaattcaatcactccttttaatttgtatttaaattgtataacgcaggaaaagtttagtcaatagggattttcaaaaagtaataaaatttgattactttttaaccctattgactgagaccccggtggcatcatctcactttgaatagaaactcattgatttcatccctcaatttcacaatatcctcaattggcataattaattttaaattgttgttacttgtatcacttagaatcataacggccgagaactgatttgatgaaagacttttgcttttttaatttgatgtctacgctctctagagcaacatttattgagatatccatactttttcccttttatttagccatagctaaggccagtggttggccacattcatcttcttcagtattctcaatttcatattccaagttacagatctcaaactcctcagtttctccgtcgactttcacaaaaacaaccttatatgcctccataagttttcaagaataaactccgctttattttttgaatactcagttgaacttgctgcgttttcaatgactgtatcaatttgcaaagaacaattgtttaaatactttttgttttttcattctcatttcccctatatcctataatgaatttaaataagaacgtgtgttctgtttttgttcgtgagtttattatacctcttttttctaagcatatccagagatatttttatgctctagatatccctagtcagaggttgttcaataatagctcacttacaaaaaggactttagacttattcgtttcaattgacttctgttaacatatgcctatattactacatattatttatcatgagaatagctacttttgtcttatcatgtcgaacaaacacgtataatccgatttttccgatattttttgtgtttattttattaaaaatgaagatttttatttcagtaaaaaagcgcccgattccggacgctgctttaacgcattctaatagtaccctcaatcccaagctctttcgcataatattttttaatctcttcttcattcatatattctttaaccttgtaaacctttttatgaatgtcttcatatctttcgcttctcttttgaattatattaatataatcttctgtttctaatttccctttttctttatacactttaaatccttcatataaaacaccagacctatttattctcgttgggttaacatatggataatcaaaaaactctggtgagaaaatatatctcatcgtgttaattatgacaaaaaacgaagatctttcttgatctttatctgaattggttcttcggtttctaataacaaaattattatcagctaatattgtttctttattaaatgcttcagaatatccatttttcttttgatacactggttcatttgcagcttcaagacaaattttaagacattcatcactcactttgatatctctctgcccatgcttatcatcagttacggttaaaatgttgtcattctgtaaggctttttcaatatctgatttttcaagatttaatatttcactgcatttgaaaccttgaaccccttcaaataggagaattaacatagctctgtctctgggattcactaaggtatttaaaatttctttgagctcatttaaagtaatatagagcttcttcccttcatcaacgcagttcttaacatcatcaatagttaagtctctagacaaatttgtagtacctctagtgatattttgataaattgcccaatcaatataccttgtgatgtgagaccagcaactcattatagaagaaagcgtggatctattcaacagagttaagaactcaagaatctctttagaattaaaatcgtaaatatcttttttcaaatattcttcaagttctgcaccttttcggaatattgataataactggggctgctcttcctttttgacttgttctataaactttttctttaccgtatcattatacagttccattatttacacctctgttgtcaaccgactaaaaaattcgaatgtatctttaattgcattattatttagttttgtatcctcgcttactaatttaagctctcgccacagtttgttatccaaggaaaaatctaagttagatagcacatcctccacatcatctgcagattttgattctaacttcattttaatccccaatgctaaaactcctaaaatgactggagaagttgttatagcacttttactttccccaaaggaatggtttgtaaaatcatctatatacgaattaaaaaccgtattaaatacgtccgtcaaatacatgccaagctttcttgcttcggctaaattttcaactgtatagtcaaatgtattcaaagccctttttagtcctttgagacatctttcgaaagtggtgatataaggctctcccttgcgtatgctgtcctcattcactttaattaattctccgatgtcactgttgtctttaataaagttaatgacaacagaaagataatcgttctcactcatttccgcgatctttgatttggccaccgggttaatggtattttgttgtccgaagtgttttcttgcttttttcattgtgtagttatacaaatcaactttcaaataaaaatctttgatatttggatttcttctgaaagctctacttataccagtcagtctgtgccaaccatcaattacgtccaaacgagtgcctttagtaacagttatttttctttcttcctcatcgaataaaagctcgattccttcttctgagctccctaatagtgcgttaaatgtcaatactgactttatcaagtcgttcttttctgttaattgcgctatagcttcgactgaagactcaaccaactcaggaacgggtatttcatcatctacttcttttaaatgaattgtcctgtcagttcgttgagcctttggattgtagcgaagcaattgtgattcataaagcttaaataattcgctcgctttcaccttaaagaaataattgtctgaagcaatctttgtaacatctgtaaatgtgtacgggaacgatacttcatccgttttgtagccttcccagttaagttctatatcctttattctgttcggagggaaatagttttcaggagaaattctttcctctttagtgatcctgtgtaggtttttcgcgagaaaatatttttctccagtcgttaatcttgcatgtggactgctaagcttattgaaaagttcttgcgctttccctggaggaaatttgtccttcatcatagcttgtctatatgctgtcattaatttattatcatgttgtatttttaatttagtctcaattaattcttccatcaactttttatctgcttccatatcaaaaatcacaggagattccatgatatcacctcacctaatactatgttaaatgtagcagatcacctcactttaatcaaggttataggaattaacgattgaaaaactgtaaagcctttcttaatgtttgtttatcacattgttcaaaaaaatctaagaactcttctttagtaacttgctgtagaatagatatgtctaattcttcatccattattatccccgccgtttgggagatgtctgtttcgctgttcaagtatctcaaggttgtatcaaagttactatgattaccttgtttcatggctgctctataatcatttcctgtggcttcgaatacttccgttatccctactcctttaaatgagtgaggagatatcccgctttcttctggaatgcccagactttttaatgagcgtttgagagaagctctaaatgcatcttcagtaagtccctcgaataccctatctgtgtcttttgtgttatcacttcttaattcaagcaactggtcataaaacactctgtgaattcctgtagtgcacagctttgcccctttatcaatgacagtgactctaaaccaatctgggttctcattagatacttcaatatcacaccatctaacgtcaagagccgcggatattctaaaagaacttctcaaaaggaagtacccaaataattttttcagaagtggtttctgtttttcataaatgaacatgttgtcacaaatcatttctgcttggatctgtgaagtattggctcttgtccttcttatttctttgctccttttaacgttataaaaaggatcatcttcaacatagtcaggataaagccttttcagttcaccatgtaatgatttaagtgctgcgatctttcgattgatagttgtgttagctgcacctttgttatgctcaagataatgtttaaatgccaaaacatctgaccttttaaaagacagatgttcttcttttaaaaattcaatttcagtcttacagtaaaaccaaaaaaactgcttaatgtcgcttaaatagttaactgctgtattagagtgcaatccgtatttcgattttttcttcttgtttttgttataccccttaatgtttccagctgagctatctgtgtctttttcctttagaaaagctaaaatatcatcgaacaccctgtattttcttatcgattgaactacagcccccaactgttttccctccttggtttatattatgaattatgtatttatacacttttaattcgtttattgttatcagaaataaatatgctaaattcgtttttttgcttcttctctaatattaattagtatctctaaggcagccatattcatttctttcttctcaaacagatcactgcaggtaattttaattaattttattgaatcattgatctgtttaaaaaattcatctatttgcaatttagcataataaagatcaacagcgctatttgaatgaatgatttgttctctaatatgtaacttacctttttgaaatgtgtcaatcgcgtcaattatataatcatcttctatttttaattttgttttcaagaattttcattatttattctcctaattgtgcacttagtagcgccatatatccttttgtaagctctcttctaattttctctttcttttcacgcataacttgtttttgtttattttcaatggcgaaaatccactcttccccatacttcttcattttactttcataagccaacttgaaatactcaacattactttcgctttgtttgccgcacggaatcataggttaactcctttctactaaactaattaataatgttatattctcattttaattgatgtcatgtgctttgtaaacccttttagtttatttttccacgacaaataacacattctttattatttttttgaatgtgttaactgaactatgaaaatttactgaaaagaataattgcaattttgataaaaaactctttaaaatggaaaagacgcttaactcaaaagagtcaaacgtctaattatgtagtgaaactaaacttttaattgttatgtattacgcccctacagtaaaacctgcaacagagaatccactgttaacttgagctgcagcaataccgacagctaaaagagaaacggatacaacaattccaacgaacaactttttcatattcttcacctcctttcaatgcagtctagaatcaaattgatattatctctaaaatttgtttttcaacacctaacttttcgagttcaattattggaagggtgcaggaaaacttatcaccacttaatttaaaatatttgactgattctaaaaaatattcgcgagagctttccaaaagtccctttaaataataatgtaatcccagatcgttatcatcgtgctccatgagatctaactggtcaagcatttttttggcctgttgcttagaaccttttcttataagataatgaacaacttcttgcctatctattatttcattagattgtatattcaaatattgattctctttcccccatagattttctaggaaacaaagatttctaatcgcatgttgctcataaattttgtttcctttgccaacttctaaacctttcaaaaaactgctttttgatttctcgtaatcatctaacattaaagaacttccatacgtgaggtatgagaaaaaaatgatcctcttcacatttgaattctctatcccatgtcttgcgtattcttgtgctttctcaatctcattgtttccaaagaagcagtttgccagtaatagcatatagcgactcttaaacgaatgataaacataattttgattactgattgtgtcaatcaagacactatcactcatatcttttaatctaccaaattgctttaaaggtagtatggcatacatggggataatcctagagtaaaccttcatttcagatgatttgggttggatttcagccaacagcctaatgcactcttcaataccaatgttgcctttgtctagctctctttgggctgcatagacttttccccattctttactaactgaattctttgcagacaccattttcttaatatgtttatctagagtgtcatatagctgatttacactaagatattctaagccttgccttgctgcagatttatttatgtctaatgtaaatatgtattcactcattaaatcaaactcatattccggggaaatcttctgaatcacgtcaatgataccttgaatattatccatttctttcttttcattgtaaatgaaatgatgaaagcctgacgagttagagtatcctgctattcgtgcaagctccttttcgagtccgcgttcttcttcacatttattctttaaaaaatttttcaactccaattctttcaccacgtttccccttagaatatatgtttataatagcattctaaatccaaacggtcaatatatttcttttaattagttttaataaaattcgtattttataagcgttacatagttcttttcactataactgatgattgaagaaaagaagccctaaaaaacaaaggcttcttttcttcaatcaatattttcttaatgggatctttccaataaagtttttcaatgaaattttataatggtgctcaatgtctcgtccaagtctttcatgaagcatttccatttgttcaataatgtaattaaggccaaatacattatataattgttgagtttcccaaatagtcgttagtcgagccttattgtcaaatggtatcaatgaaataatgggctcgtcctcctcatactccatggtgtaatatctatactctacaactttgttttttttcttgatctttttaatccactcattcaaagaagcgtaaaactctagtagggcaatattttcttcgaaatacacaattccatttatttttattttaaattccccctcaactctcatcgctgctgaagggtcttttttctattttttttgggatatctgcttcttcggatgtgaacttataaataaattctacttgattggatacgccgtccatatcttaccatcccatcctattactatttttatttttgtctcaccttttgttccgattttctttttttaaatttgcagtgatgacaaatgataattttttattatcatttatagtaaaggaaagattcttggattgtaaagcctcctttatccatttattcactgtgcttttacttgtagtattaaattttctgtatctacctccggcattactgagatgtttattgctaacagaaaactttgtaaacttttttttatagcctgcttaattgctgtttttttaaattgtttttataataagttttttcccgtattttttaatagcccactttataccaaacttagcaacaactccaactattattgcagggacgatggaagcttgagcttctaaggtgctaattttataatgttcgcccgttttttgatccacaaacgtagctttaaaatcagtcccctcaatctcttcaatcaatacattgtaatggttaatttctttttcaccgttttctaattctctaataccagtaactgtgatttcaccggtttcctgattaatattcatatcagtttgaatattagcattctcagcttcaagcttagtagtaacattcacttcatctgaattttcttcaacagccatctcaatatctttttcaagagcaaccccaaactcttttcaacatttacttcatacgctttatttgtattttcttcaatacctacagttttggtatcgttctcaattttattttcaattgtttctgcgcttgcaaacccaggtaaaaccccagataaaactaacgtaaatataagaattcttattaaagtctttttcacactacttctctcctttgttacaaataatcattccatgaccaaactctttgtcatacccggaactacctaaatcaaccgcatacttcttgagtgtttgatgaaaattttctttagatattttctttttttgaaattaaacagccaatagcaccagttgcaaacgcagttgcaaaggatgtgcctcctacctttatataacttccgtctttatttattgattttatatttactcctggagctgaaaaatcaattttgccttttgctgataccggatcaattttctaatttttcatcaaaagaggaaatagataagactcctctatatttcgctgggtattcaacagtaaggcctaaagtatttccagaggcagcagtaataattatgttgttatgtaaagcattgttaatagcattacgcaagtcatcgtagtctttttcaaatccaaagcttatattaataatgtctattttttgttcaatacaccaattgattcccctaacaacatccttaactttgcctttgccactactatctagtactttaacatcatataaagtagcattctgtgaaatcccttttatctcttcaccgcctgcagctattattccagcaattgctgtaccgtgaccatactcatctttaacggatttactaggggcaatagcattgtattcataaaaggttatattattaaactctttatgtgacttattaatgccactatcaagaatagctattttgacaggctctgtatcattattgcgcgcttcttggccaataatttcatacccccacatcaggtcttctttcttatttgtactagatgtagcactcctatctttagaaatatcaccaatacacatcaaatataagccaactgcaaaaatcacaaataagcaagaaacaaatagaaacacaatcttcgatcttttcattcaggcttccttctcacaaacaatatttaaaaattcaaataaataacctcattcccccccttctcactaaaacacaagattatattaacctatagtataatgtatgtaaacaccttttgttacaatataatcatttttatcaatgtatttcctttcatgtataaaaggaacaattttattgttaagtctacctctctcctattacgttattaagatgctcttttaggaacatctcaaactcatcatccctaataaagacttctttctctacatatccagtctgccgcataatgtagtcacttttcaaagtctcaatgagttgcaaaaagcttttgtcgtgctgctgctcccatatttgagtaatcacccctgcaattctgttaattcgctcatcgtctctcatgaaacacctccaaatgattagaaatatttattttaaccaaaacttccatgctggataatgtttctgataataataatttgttttatttttaattaagtcattaagtttttccccattgtccccaattgcgcttaatccaaatagatacaatttattatattgttcaattttctcagaaggttgttctgaggaagtttttttataagcaaattccgtttgcatttgtttgagttctttaaaagtttcttcaaaaaaatctaaagtttgattatatacctcggaatctataaataatgctgaatgagtcatttttctttttttgtcaaaaaaatgagttgtaaagaattcattgatctctttaattttttcaattaaattttcaaaagtagaagctcgctctaattcaaacttaagatcatcacttttaaatacaaatgattcaagctccttgtgaatatcgtataaagcttctaatcttctctcttgctttttcttagtctctgttagtaaataaataatgaacggaacaattcctgcaactgttgcaccgattattcctgctaatatagtgtctgtcaatagctttcactccgatttaagtccacagttctgttcacaaaaaacctttgtttctgcaccttttgcttcaatctcttctaggattgatttagcttcattttcattccttcaatgaaacaattattttatctatatttacaaatatcctctagcttgatattatctgttatatctggtatcgagccattaaaaccgccatagccctccttcattggattattaaaattctttactttatgaagaaattcttctttgctacttacatcaaaaatctttttcactttttcaaaatgtcttgtggattccattttttgaagtaaagtaacttttccttttaaataaatataagaaaaagggaaccataaacgactattttctttcattaaagcagaaatatagtaaagtaaaacatctgcattggcaatctctgttttagaaaaacctttgctcaatctctcattcagttttagaagcccattattatttctatctgtttgagaaggaatataatgattaaaaacctcaaaattagttccttctattccatctgcaacaaaatctttaaatacaaaaaaacgagagtgcagtaattcccctaatatttcataatttgctgtttttattagagatgcaattgtgtaaaggaagatttctctaatgagaaaattaaaatgatcaaattgagcgtcataatagctactaatttccgcttttatttccataactgtattatgaaattcttcgaaaaattctattaaaaactcaacatttaataaattatattgtgataagagttgaataaattcaacatagtcatttttcaatataagcatatcatctattttattgttaacctcttgatacaattggccgtgtttaatatctacaatagagaactctcttaatgtgcctataaattcattcttgaattgttttgccttacttacagcattttcactctttcctttggacacatcaattagaagttgttttaaaataaaactaaatttgtagtggttgatttgttcatcttcaaaaaggtgtgctggtgggttaccttttttaggttttctatgtaatggtctttcataaattattctcagtaattgttcgtagttttcatagaataaatcccctgatagatctatgtattttcttccactcataaaagttggtataaaatcatttccttgctcatctctttcgaagatcactggtatgaacttttcttgctttgcatctttatatatttcgggtgtaataatttgagtttcagttcctactccaccttgacgagaatctgcttttaacttataccccttatcacagataaccaaaactttatttatttcagagttattgaccatcgattccataaaaagatatacatcttgaccttcttttaaatcccactggtcaagaatgacttcaattccgtcattacttaaccttgttgccagctcttctcgtacccaatccactaattcatcgtttgtccagctataagaaataaatacactaacatcctgcatttgttcaatctccttttaacatttgcttacttttttatattaatttcttgatatacagcaattggttcaactgcgatattcggatatgacactgatgcaaacatgtcatttattttggaaaactcttttagtatttcatttaaaaatctctctaaagacttttctttacctaagttctcagtattaatatctttgccaaagtccctaaacatatcttctaaatttcccgccctgttttttggaagtcttgtaatttgacaaatcatttcccaatcacctattggcttagatccatatttataaaccatatttcgcattgtttctctcaggaaatctgaattaacagcgcctatgaaatttatttctttttgatttcttatttctattgtcattaaatctgagtaaacactgccaataaactcagcaaaatcatttagatcgctcttactttgttcctcactatttattaactttgcaactgctccgaccttctccaatgtatcctttaaatctctataatcatagattgataatttcccttttacttttacaaacactctatcatttcttcccaactgactcctatctaactttgaggcatctttacaaggaagaattttaagtagttcagttaaagcgaaatcatgaagaattttttcttcttgcaatccttttgcattattgtatctataatttccttctgttgaaaagggaaatcccaaaaattcgagcactttacttgttttggctattccttcaacttcatgatttcgttcttttgtttcaacaagtgattcaacaactcccttatttaattgggcaaggattgattgaatcttatctgcattaaaatagattatatctcggtaaatcatcattttcactcttttctaaaatcatttttatattgacagaagtttttgtaacacctacgccttcttctattcaaaaattcgtataattaaacgatgtttttatttgaaaatcctcgaccatatcatcttcatcagtctttatttagtcaatactttggtttccgcgccccttgctttaatctcttccaaaattgatttcacttcactttcatttctagagtgatgattgaaacccagtaaataaacctcatcaccactttttaagccggctataagttcattgagggcttgcttttcctctctgctttcagaagcaatttcgcaataaactttttctgcgcctgcttgattaagttcttcaatattttaagcagcataggtttctgtatctcagaactctttcgggcatatccataaatcataaatgaaccctcctctagatttaatcattttcattgtattcaagtataagttaagccatttttcccctttctaaaaatgactcatttgttaggctataccagacattaaagtatgtagccaagtgaaccattatcttctccgcttaccctgaatgataaaccacttctataccaaaattaaccccaccctacataaacataaaaatgattatttaagctaaaattcatcaattattaaattcaaagcaataaacaacagaacaattgctattacaattattgtttcgatagtataggttttgtgatttttcttcttttttatttcctccctatattttttttgaagctctctcctcttctcatccattttcataattagactcccctttcgtcacaaccaaagtatgaacctatgttcgagttgtcttaacaaagggtgagtaaggactaacgtaagacatatgaaacgtctgttttggttccattatacaacaaaggaaagaattattgtccaaaataagcaagagataatataaacgcagccaatcccaaactcattacaccaataaaaattaaactgtctttccaattttctatagtcagctcaaccattccctatttttacttttaattcgttttaatctgattaaaatggccgcaatcattatcggcggctgttatgtcttatcaatattttattcatacttttaattatgattaaaatgataatgctttattttttatcatcgatgtaatcgtaccaagaatatccgaaaggatcatatccgttaacatttaattttacgccagctttttcaaaatcatctaatgtccaaacaggtttatcctttaataagttgtttaattcatcaagcatatctccattatagtcgccgcgaaagcgtagttcattgattagctttacattgtccgcttttttgataataattgctgtttcagtttgaaaaactcttccgatgccactttcaatatcttcttcctcaaggtcataccctgaaacattcacaaacactacagcattttcatcttcatgcaattcaaaaaagtagctgaaatcattgttgtttaatttgtttacttccatcaaaccttcaatatcttcaatccttttatcactgttaagctcattccattcgatttcaattttgactttgggcagtttcattttgtctcctcatttctttgatattgatctgtatttggatttcgaaatttgctattcttataaagctgactttattttttgaaggtgattttcatggagagagagtttgaaacaaagggttatgatacttctattgtctacgactacaaagaatatccagatgctcatcatggccgatgtgacaattgtgacaataccttgtttaaaagctcagttaaggacggcatattcttgcgggaatgtcgccgctgcgggatgaagaagagtatttaaccgctcttcttccgctgcctgttatgttaaaatgcttcttttatttaaagctacttaacgggaaacatgtagctaacataaacatcaacatcgccgttcttaaatactgcaactttatcagcatcaggctcaattttgttaatgatctctttagcatccttgtttttcttcggtgtatttgcagtaacaatccaattccagtaattccattcagaaatgcaggacttaattttttttggtatctcatgacctattgtgtaaaccttgatcatttgtatactcccctcctaaaactccaaattggagtttaaaactattcattatttaacccaattcgctggtggaacatttaacacatgatattgttcatctaaataggcatgcttcctttcccaattactttttttccaagcttcttgatttgaatatgatggatctttgggttttggatagtcttcatttatccatccatcttcaatatgatttagtttcgcttcgctgcgcttatcatcgtatttgtaccagaccgtaatcatttttaccattgtattcaccaacactttcttaaaaaatcgtagttttttaacctcgaaattcttcaagcatttgttttaatatgcgagctgttacaatccttctttggaatatttcgttatccgttttaaaatattgcttagattcatgttctagcttattcttgaaatcagcctctttgtgataaacgaaatttacaaaatcttctttctcaatactgtttttaaacgttaaagtaacttccatgaaatttttgtaagcgatcattccatcttcgctttcttcatcaataaagaaagaatgtaaattatatctaaggtcatcgactataaaatacttaaaatcaaatacatcattgaagttgaatttgatataaccccactctggcgaaggtgtggtatacctcccgctatctaatgttattaactctatttccttaagaactgtgccatttacttcaagctcaatttgctcaactgacgtgtgctcactatacattacataagaatagaactctgatatagtctctcttaatgaatcagagaacttatatttcattgcatactctggactaagagtatgatagtatccataatcattggagttccaattatctttatctttcaaaagatgactgaacctttctagtcctgttttgttaaagccaaatcgctttttccataacgattcaatggttgatattgaagaattttgattaattggagtattactatctccagttcttgtatagatgtatccttccttaacttttctgtacggtttcctcaaaaaataaggaacatttattgaatttggaatgattaatacatcaatgaattttccatctattaataatgattttaaaaacactttcggtctgtcaccagcaaagctaatatttctaagcatatctattagatttgcttgttttttcttttcatgttcttccaaacctttaatttcacctaaatcagaaactccaactataatataacaatcatggtcatgaaaagtattagcaaaacataaaatatcatgtaccaattttccattgtcatcatgccatttttcttttaaatcccaatactccccttcatagccaagttcaattaaactcttaattttttcttttaaaactcctgtcataaacctttcctctctctttcgttaaaagagttgttttatttaaactttttgcagtgtcttaatatcattagcagaaagacactgccacccgttttcctttgtatacaaatcatatcttcctgtatcatttaaagtttcattgatagcgtgtattgagctgagattccaccctattgaaggatcgtttaaaagcgtctggtcatcattcaaaattattcgtagcatacacagcgcccttttttcggtctattcttctatcttaaacaatcgttcaccgttcttaatctgttctatttctaaatttgttagttgaggaggcttcccacttccacatttcgcacatcttcttcttactacttcgtattcgccaattatgtcttgttttgtgggagcataatgtccacattcatagacttccataggtattgaatatagggcgtcagatgaaaatttaacttgtattgttcctattactttccttaacggatttcgattaactctcatagttaacaccctttaaaattgtcattttattcagttttatccttataatcataattccaaaaaggtacattcatattattcgtctcagtcgttcttgcacctttagatgtattgcacgattcacataacaattgaagattagaagaatcattactgccgaataactctagaggaattatgtgatctatgtgtacagttccggttacactgagtgtctttgttaaatcagttctacatataacacaatgacctttatctctgtagaaaatcgcatgttccaaccaagtattccaatattcggttcgtttaatcctttgtttcactgtgaaatgttccgggtatgtagaagcaaggtatactatattttttttaacaatctcggagacttttttgtgaaagtcatgaaggaagctcctgtccaaaaacaatatctgaaatgtcgaatgaactaagtgatctataattaacttattattacgggtaataaactcttgcatatttttaatgaattgatcatagtcgttattgattctttcactaattacaaaatcatcaaaaataaatccctctatattatcgatttgtttatactcttttaagattggcaaaataattttcaatgcttcctcttcatctaagtttttgtgtaatgaatcgatatcctcatatgggtcacaaaacatttcaataaaatagtgtaataatgtttttttattcggcttaaacatacgttgcacaacgtttatatcgtaaatgtcaatggcatcttccagcgaaaagatatcatcatcgtacaagtattcattaactatgctagcaattcgtattgcagaggaagtagcaatattctcatgctttattttggacattttcttgctccttttccgttaaaagactggttttattctaattcttgatcagaaaaatctttcttttcctttttgctttccttgatcttatgtagcagctcatttatttctttagcatcgtcttcaggaagcaaatcagactttaaaagaaattcgtttgcttccccaaccacatgcgcggtcattcccatacactctaaatggatcttggataattcccggagctcttcttttgtaattgatccatcatgcagtttaaacagcaactctttcaatctttcgatatgcgtgctaaaaattaaagatctgactgaagttgagctgttatccatttgatttatcatcctttattaaaattaggaaatccacaaagatttctcatcgttaactcttgagtctctagaaagtgttaccgtgtcaccaatacatacaggcaattaaggtattcgtttaaagcgtcaacccagttatcaaaatcaaattctgcaggatctccaccattttcaataagccaatcaagggcatggacgcttcctttttcaattcgtctttcttctcttcttaaaatgaatttcaatttaggaagtgtgtttgttacaaattgaagcacagcgtgacccgactcttcatttgttaagcattgtttaatcggtaatctcatgtctccatactggcattgtcataccctcctttctctttttatgttcgcctatcttcaatccactttgctttcaacaaaccgtgatgccatttccttgtaaataacctgactaatcatgtgaagttgagtaatattcaaattaaacgactcatacagatttctgaccttcccctgccccaagactctagattttccccattcctcaatttcattaaagcaatcgattagaaaggcatctgtttgctctttcaaatgttgttctaagttattcatttccctcaatccttttccttgttttttaatttattttaaagtatgatttcattcagattcattagaattaactatcctctgatagacaattttcatagtacagcttataactttcaatcgtatttgtttcaacatctccagcaaaattgccgtcattatattcttgctgtaaatacacttcttcgtcattctttaaaatgctttctgcctcctcagtatcagagaccgcatcagttcctatcccatcatttgtggagaatacgaggcatctgttcaaaagcgttccatctttaaggcttatatcagctaaaacaaatccatttggtcttagtttttcaatttttgaatttctgtcccaaattgcttcttgtaatacacctctaacagtattagtttccgcttttcgtaaagcctcttctaattcaacgatctcttctttaagatccattattagtgaccgcattggcatttctccttttctttctttatttcttcaagatcatgaagaaattcttctataagtctcttttcagcttccagcatcaaaactttgtattcctcttttactgtcaattctatgtctcttcgcttattatagagcttctcaagcattatttttcttcgctgcagtcgatttttatagtcctgtaaagcatcctccaaagtgctatatggcttcatcattcgatcaactcttttctgttagtccgatttcttgcttatttgcaattttaaatgttttatatttttgtttgagcatccctgtggaaataatcgcatttatttttttgaaaagtcccttttgcgtctacttcttgtaacactcctgttttatcaaattcaagataaagtcccttatcaaagaattctccctgaacaaagcctgctttgccacttaccagttcttccaatgcctctgtaaatgatttattaaattgatttgtcattaccattacccctcattacatttaatttgtttaactctgatttaattatatagcggctattttaaatagtcaataattaattagaaatttattcatctttttcgaattttatcaagtctcctggttcacagttgaaatgcttgcagagcttatcaagcaattctcttgggaaccgctccatgtcatcattgtacattttcctaacggtttctttcccatgatttatttcggcacttaatcgagaaattgaaatacctgcctcatcagcaatagcctttaaatttgatctaatcatttttctcacctcatatacaactttactttgactatttaaaaacgtcaatcaaaatttacctatttcagaaaattcccgcgttttttcaagttggctgttatatcgtttttgtaaaaattgcccgcaactttttaccgctgctgttatactgttttaattttttaagtgagctatgtggtatcttaaaaaattcctttgcgtatcaaaatttgcacgcaataaaagataagagctgttatacacttttcaaagcaatgccccttctcttcagaagtaaacttttcataaaataatgtttttattcaaaatcagcattagtctatagtgatgattgttgttttaattagtatttcaatgatagtaaggcagctctatacgccaagagatatattcgttaatgttgccgtgatgttcctttttaaactcaaaatatccctccgtaagttcatcaagcacttgctcctgcatcccccattctttgaccatgtcacaggattctggggtgagtaagtatgaaatgacctgttctctcgtttcgtggaataggttgttatgtaagttcatttaaagccgctcctttaagttaagttcgttttttatgcacaaaagacagcaagttcttttgttgttatacagccattgggacacttcacagttttaggatattccgctcctaacacttttagcattttctttttacactttggacatatcctatgcgtcattacagcatattctttttctgtcttcatatttggttctccttttctgctttcatttgtgctatccaatagagcaccttgtcccctacttctgtatcattccagccccattgatcagcaaggaatttaatttccgcgggcaaagtctttgcaataatttttaattccattttatttggaactcttctatatacacttacaaaacaatcatgtatttgatcaagcaattttactgcatcccttttaatttgtttaaaattcatgttttatttggaataaaccagtgctttttctatacaatacaaatctaaccccattcgcataaattcaggcacgtacttgcctattttctcgctttcagttattttcctaataactaataagagtattgattcaactttctccggtgcaatatttattgtattctggagaagcgttttaaatttaaaagttgctccaaagtctttattaaatgcctcatatgctaaataattttttcgagcaattgtaatttcggctgatattgctggagctccagttatttttgcccacagtgtacggtgcgttccatccccgttaactgcataaaaatcatcatcttcaaagtatattaactttactgggaattgtttatagaatttttgaaaatcttcaaggggtttttttactaagtgttcaaaagcttcttggcaacgccgttcatctatattaactcctttaccgcaaacatggtcaaaccaagataaaccgcttgaacctctgaagcctagactttttattttcgaaagaggtatattactacagattgtttcttcttgctcataataaaataaaaatgtatcttccctaaagttaaggattctcttcatttcttttatatgcgattctggaactcctttttgaagtaatagctcatgaagcactttcaattccattcccccccttatttatctttcttatcgtaacttattcggaattattaagacaaatcctatttttgcttagcaattaaaataaaactgctggtttatttcaaccaagtttatttattttcttgagctcgtccaccaactctctaaagtttctaaaccacgctccgtatttagtatccccgtccccacaatatacgtttacgcaagtttcctctccctctgaatagtaaccttcaccatcaacaaatataaaatactttatgtacattgatttcaaatagatgtacgttagtttttgagtccgattccttctgcttctaacagtttcaatgaccatattctctttttctaactcttcttttaatttgagataatccagtgcacatttatttgttttcattttgctctctccattctgttttaaattgttgttttatttaaattaatatctgcttaaaggtcattctggcttccttttgaattcatttcttctcgccttctagtttctccaactttttcagaacagtgttaagcctactttcgaaccgaactttatttgtattagatagtaaagtatctccttgtccgtagaggacttgatgtaattttctatacttaaaccatagagactctaaatcacgttcttttccaataacctcatcttttaagttagctatctcattatccaaaacatagactattgattttttatccaattttccgaagtaaccaccataactcatttcaatctctccattctgtttaaaatatgcattttatttatttaatagttgatacaccttttccatactatccatcatgtcatgatccactgtatgaaccacttctaagtcatactcttctaataggatattttctaattcttcgtacttctcatcaatttttacctcgtattctctagctaccattagcattgatttaaacgcatgaattaaatccatttcattcatattatcatcccttttctttttaatttgcattttattgcgatgaaatatagagttattcctgttgcaacctccccaatgtggggaacgctggcggcttaatgcctatttaacgtcgccgccacgactgttataccgatgtctgttacatccccttttacacaataaatcattttaatttgttttatcttggtttaataagctattttgtgtcattacccagtcacctatcttttcaacaacttcacaaaaatcattatcaaatggataatcatcacaaagatcactatctgttatgctgtcagcttgctcccaaagatcccgaatttcatatgctgaatttttgaactgcattaatgcgtttagtaatttttcattgtgtgtcattgttaactccttcccatctatgtaaaatatctttactcgcaatattcttctgttacactgatttcaaaagaactgttatcactctctacactgctagtatttaagcctttcataaactcgtatacttcataagaattgtcgtttttagaagtgtaccattcttctatatgttcgttccttattgcgatagcttttttgtttgcttcgtgtcgatcatagaacaaacctttaatgccccaagtgtgccctcctctccctctgtcccgaatatgcagagtatagacgacaaacaccctgttaggttctttggcttcttcccatttcctcccggtgaactcctcccactctgctatctgttgcggagtaggatatgcaattaatttatattcatactcgtcttggacaaaatctattttttcatcttctgtgtactgtttaaattttgtttcgttctccccggcttcttcatcagtccaatcattagaaagataatcttgaaccaagtcctcaaaaatatcgtttagcgtagtatggtgtgaaaagtctcccgtttgaagatctttaatgatatactgttttgtcattttaaccgctccattctttttcaattaacatatgtttcaaactcatctgctaagctagcattaaaaaatcttacagcgtcaataaaatagtgaactccatttttaaactcttttattttatcgatatcatttttttctttaactctgtttaggaattttaattcactatagaattcttttcttatttcatcatcggatagaataatctctctctcataatctcttactggcttgttgatttcatctcttttaactccaaacgctttcatgattattgctatttgtatcattactcttgtactatgctctcttgtgcttaaattttgagtacctaaatcatttactttttccattaactttttatttctcattttcttctcctcttttatgctttacttttaattagtgtttaggtttttattaattgctttttcttatgtttttattatactatgactattttaattagtcaacatatatttttaatttatttttaattcatttttgatctctcttaagcattcaagacatcaattactggtgtctaccacaatattcacaacgcttattagaccataatccataacgcattaaaaagggcttacctttcaatttgcctttggaatattctaaaatggcaccttggttcccatttccacaattattacaaggattatctttatgttttctttcataagcccgctgttcttcgattaaatgaaaagtttcttcctttccatatttttgtaaacattctttttcccatttatacgccattataatcgctcctaatctgtttaaaatatagattttatacaattacttttaattagtttgttaggttgtcaaaatcaattatttcaacatctattccctttcctttatgagtgcactctgctacacctccgaacacttcaacgattacactgttttcttctctgtccgctaatgaactttgttggtcttcattgtcccagtcgattatcataacgctagtatttgtgtcattttcttctatgtagggcactccaccatgaacatatattattactttagacattttaaaaacctccgttcctagtccttcgtatgtttatagtatactacggctatttaaaatagtcaatacttatttttaatttatgatatttttgtattggattgatttattaaataggtcgcgtatttcttagcatcgtttaatgtttctgttgttagcattgtatggacttcttttcctttataaaaaatcctaaaagccccacatatcttgcagataaaccaattcccgtgagtgtaaacccgcttttttctagattattcataaaagtaaattctttattttctgctttaaattcaataacattattaatcttcgaaaccaattttttgtattttttctttctttgtatgtctaattctgtcctttgcttcggatagtttatttttaaattcctccggaattcccgtaaactcaagcattacggcgttttctcggtctactagcttgttatatctattcatattacgcccagcacgtccagttaccgcccaggagaggttattccctcttagggttaaatacttcacgtacagatcataataacgctttttgaaccgttgcaagtcctttttaagatggtatataacgcttttgttatcagttgttttaattagatttttaacttcatcattccacgaattaaacaggtgttggatttcctttgtatggtctcttttggttgttctaaaaatccaatgtgcatcatgttcgcggtcttgtatcttttgatcaattacatatgtttctatatcatcaatatctatttcaggatattcaaaggtgtttttttggttattaagatcattcgagcttagttttttagccagtgagattgtactgtctgactgtttggcgtaccaacgtttagaataacgtgaccaccggaatccggccgctttcatctgctcccgtatctcttcggatggtttagaactgaaacggatttcaacaccgtttttctcttcgttcagtgtatatgtaacggttgtttctttttctgtagttccttgtacgttttcatctgccgctttgtttgttgtttcgactgattcacctgttaaaaggttttctttttgggctgtgtctctttttgcctttacatatacagtcttttccgttacctcttccacctctttcaactctgcaaagtgaaagcaccctttttcaaaaagtcttttgaaattagattcggaaaagtacatagtgttcgctggattgcttgaacccgtaagctctttatttaattttttattcattcttacgaaagatacagataatttaccgttaaacgtttgtttcctagttaatttataaacatatccttgttgtacaccatatgtcaaaggcttatcaattacaaggtatgtttgtccctcttgagcttcttcaatagtcagatcaattgatacaggtttaacaacctttttgataacctgttttttaactggaattagctttgattgttcattgattttgttttctaacccatcaatgaatttaacaagtttagcttgcgattcttctttattattccaatcaaagaaagaaaaagcgcgattaccttttgcaatgatttccccgtctttttcaatgtgccaatttgttcgtcctgggttggtatgtttaaaaacaggatattgagagacgacaaccgtttccatttcttctttttgtctcatcttttcgatgatttttctggacgtttctttttcattttcacttgctgcactatcattaattgttgcttgaagttttgcaattttagcatgatcaatagtataaccttttttcgttacctttttgcctgatttacctaggccatatttagaaatatcaataagaattatgtatccgtctttttctgcaataccatcccatgatgctggatcgaaatagtcggtcattggatcgcttttgtcttgtttatatccatataccttccaccctctttttttaagctctcccataatttcaacctttgccgttcttttgtcataataagataatgccattttaaacatctccttttaattgttagtttgatctattattagattatcatgactattttagatagtcaattatttttttattaatatttttaatttgtatgtaattatatttattagtctgtgaagggtttgggatggtgcagaccaaaacatttaagacggcgaagctgtttaaatgtttgtcagcatcccaaggtctttctttttattcttttaatttatatatttaaattattctcttttcttttaaaagaaacagggttaaaaaccccagtaatatcaagggttttagaattgctttgttgcctttttcttcacaaggatacttatatctcattattcagccaggattcaaggagtgtcctcattcgtcttgatggtacataaatatttattaattcaccgttcctaatggctgacctccatatccattgaatcatctctgataatgcatacatattttcatcaattttaacacccttagatgtaaaatagttgctaataacaggattcacgaacctatttaaagcatagaccaaagacgttttatgactgtattcatttgtagcttttatattacaaggtaaaaagcctttagtgtatccctttccttttaattttgttttgtgatctttgaatgtcgtccataggttattatttgattttgttttaatgatgtgctgataataattcaaaatattatttctaagttttttatgtatgacagattttttttcaaaccatgcctttgacaatgcaaaatggtcatcccctattttgtttagatcaccatcataaatattgattaatcgttttaattgttcttttctgagcttgtcttgtgctttgcaatacttaatcatttcacaggattctttatttcttctaattgagtaaagttcataatcaatattattaatgtcaaaataatatttttgcaagtgtgcatcaaacaagtatgtaaggttatatacttgtttaaactggttaaatatttcatgcggaaacgtccagaataaaacatgatcattatatgaaattaggttatttcctaaagctagtcttttcaaggttctaaatttcccgtcatactttctgtttgttttttcttcatgttctgtgttccaatagactttcccccctttatttatcaaccaattatttttaaatagcatatgaaggtcatcagttgaaatctttacttgtttaatgacttctattgtttcatcaagaataagcgtgtaattccctgaatagatcaattcttttgtggtttcgtttgccatgctaaaaagagcatgtgttgttacaatgtccttatgttcagctaaatatttatggagcgaatccaatttaaacagggtttccccttcttcattatgtatttttggttcgtaaaattttctgtttgtacatgatttctttatccttgtaacctcatcaagataaggcgtaacaaaaataaagcgttcatcttctgatgaattattaatcatgttaattataaatgttgttttgccgcttcccattattgaatcaattactttaattttcactataacgactctccttttttattctgttttatccaaccttttaggatatcctccattctttttgaagcaacataaatgcgaataggtttatttatatttgaaacatctgcaatccatttaagtaaaaccgaaagcgcataagtctcttcagtaagatcttttaattcttcatatttccgtttcagaaatggatttagaaaacaattcgccgcaaaacaaagagtattacgtctgtcatcctcttcaagtttatctgtcaaagggacaaaagacttgatattaccaacataagataaccttttatactgttgtgtaaatgttgtccatgccctgtcgttatggacagttttaacttgattcgcaaagtaattgtttatgttaagccttaatctttttactccttcactatttttattgaaccatagtttagaatagtcatatttagtgttaccatatctagatagattgcctttcttttcgtgtatatttagatttttaactagtttatttttgatttcttcatccattctgtcagaaaagaaaacactgtttaagaagtctacaggtgctgactttctctttaatgaagtgtccaacatcacattataaagattaggcatctcttccccatctatccacatttgttcgatttttaataagtctttcttgtcgtcaacatattccaacacttcaaaagtgaaatcattcaaactgtattttttccagtctttttgcagtaagtgtgaatgatgtaacccgtaatgcagatcagtaacatgctgttcccatcttttgaacacatttgtgctactgcctatatacttcttcccgttttgcttatttgttatttggtatatgcctttcattcactatctccctttaatttatatattatgtaatgatgagcgactatcatcactcatcttttctgatttcggttgactgtataataaataaaccataaaacagctatggctatgagcgtaactataaacactgtataaacaatgacctgtgttgagctgctgaagtattgcctattgaacaggaatagaataaaacatacaataaacaataaatgagtaacccataatggaatacgtttcatgttttaaattgtgtttgattatgttatactgtaggtgaagctagaggattactcctctagcctgctgtgttataggcgtgtacgtctgcggtgccttgcccggtttcgctttcgtagacgcttttttctttgctgtctatggcttgtcttatttctaatcatggttaacttctcaataatggttagtatattgattgtcagcgttgaaagagataagacaatagccaacacaacacctaccctatcaaacacaatgttttcccctcctttctatacctataattatatcatatttaaacacaaattaaaagtataaagtgatgtttcgaaagaggttttatttgcgggttatggcttgaactgataagggttagcggtaataaatataaatatgccaggaatggattaaggcttgtctgtgaggctgtgagtgtggttaaaatggaaataaaaaagactcagttataaaaccaagtcgtgtatttttaatttgtttatataacattgtttagctatataacctaaaataggtttattactgtaaagtaacgttaattcaacaagcacatgccctttattgaatacagggttttcagttattaccttaacccaaaaattataattgttttcaagtaggttatctatatcttgttctgtgatagtctcagtcgttttttagttggttgtacattatgtaatgtttccttatgtcattattccattgtttattagatagctttaatacatcgtagctgttgaaataaaatatttgtttttgtgtcattgtgtgttctcctttcttgattctcgacgtttatttacaagctctttaagtctttgtgttgcttcagtttcctgacgttccccttttacaactgacaggcgatactttgcccattgtttagctgaatcgtctaagccccaattgaaacgtaaaagagccataacatttagatttttattatgtttagcatgtgcaaactctttaaaccatttgccggattcgataaatcttaacgaacgctttctagacttcttgcattgttttcttgtgttcattgttgttcccctcttcatttactatttttaattcgctttttacggaatggatttatttaactttctttccgccaatcacttgaaactctttctcagcttctttaatcatgattttcaattcttgaatttcatcggcatgtttgttatataattctcttttataaactttttcccatgaatctttcttctttgttttatggttttatgtaaggagaggagagccctcttttttaaatgggaaacgcataattgcaaaatgttttggtatcgctactctgagtcacttcacgagcatcataaatgcaatgatggccttccttgtaataaacacctaaatacctttcaatcggattgtaaacaatccaatgatccataatgtaataaatgtagctgtcttcgcgatatctttctaagtgatcgtcaacaatatcataaatttgtgaaagtaaaccggatggtgatgcatatggattttctataatacccgctaaaactgtcccgcgttgttcaaaatctaacattgcacgatattcgctatttaacatccattcagtttttttcattttttatttcccctttcggttatatatgtatcgcttaactatatttaaattgtatcatggctatctaaaatagtcaatatatttcttttaatttgtttttaatcatatctcaacaataccaatctattgacacattgaataaagagaagtactaggctatgatttctttagatgggattatttatataaaattccatctaaaagaaggagggtgaaaaggtgaaaaaagttttaaaagcaagtgttctgtttggtgtcagcatggcaatcttcttggggttctcacctcaaaatgcttccgcggcctggtctagttggcaaagttttgatggatttaaacaagggtgcaaggttcgtgtttatactgatgctacaacatatacgcgtaatgcaaaaacagttgatgtcaaagctgaacagaatggcaactgtggaactatttattataacatgttcttgtcttggaaaggctaccctcatacaggtttaggagagaatactccaacaggttcgtttagttcagtgacacctttaaaatctattactattatacgaccaataggcgagccatctacttggggattagtttatttagagatgaaaaaatcgtctaatggtgatgttatagcaagggcacaatctcctcaattaacatttacagagtagattttactgagatcggttaatccggtctctatttttatgttggtaaatatatatgtaatttagaaaataagtcttcgactcgccgcccgctgttattcaaacgattctttattaaaaaagagtgtgttccctcatctgattacagtttcaattttttaaaaaatatctgttgaaacacttgactttttaacattattttgttctcactgtttctctgaatcaagattcaataaatcaagttataactacccttataaccgcaaatggataccatatattaggatattgagggggggtatattaacatccaaaataacaaaaaagggaacgaatattcccctagcacttccatttccacaccatgattatttttcgatttcagtcaaatttcaatcgtattcgctatcgtaaaatcctttaacctcaatacttttcatcccttggattttctctatgccactccccttctcactctattcattctcaattccttctctattagaggttttacgattcaaatcccctctccctaaataaataacacataaatcccttgcagccactttcttttctctccttcaatcactccaatacgatatcaacatattcgttccctgtaattaaaatcactatccaatccttgggtgaaaagttacaatatctttagtggtgatttaataatgaagctaaggttgctgggtatcgttatccattccgctttatttgcttatagacaaaaacaaattaaaagtatataataagaatataaaattcaagtaaggagtgattttgatgtgtaattgagatcatcaattgtgcagtgttaaatactctaagaatattcaataggagtgattcaatgaaaaacatatcgaaaattttggaggagaagcatgttactacataatacagaaggatatacattaacaaaagacgtccaaattaaagaaaacggtcatacatacattaaacgagaagtattaaaccgtgctctcaacataggtgaagcagcctttgttggtaatagcagaaacaagattaagagattaagtgaagaagaatatatgtttattagaaaagaacctgttaccagtgaaaacactgttgtttcaaaaagattattaaacaaattaaaagaattgattgaagatgaattcagagatgatatttgtctttcttcagaagagaaagtgacacacgttaaaatgatcatcaagaggaatccttggattgaagatatgtcatttatttcttgtccatccgatatgagcaatgaggatcttcactatttgcttgatcagattgcatcatacataactgaaattgaattatttaaaacaaattaaaaatacatagtttgaaaggaggggtacctattggacaatcaacaattttatacatataaatttaattcttcgcgcctaaaagaatttggatacaacattactctttcttttcaagaagcacaggaatacaacgaggtaattaccttatttgataatcaaattttaagatcaataagagacattaagaacgaaatcatcgattatgcttaccttgagactcttaacaaagagaaagagcatttacaaaaacaaaagcattctcaagaaatctctaaaagattaaaagaaattcaatcagaaatcaatgagatgcttttcgtaccagaatacataacgatcaaaatggatcacaacagccattatagagacttacataaaaatggattgatcttaaataacaaacggtttgtccgcttctcttcttctgcaggtcaagcaagagtgtccactgtcgtatttatcgaagaagagacctccaaaagacttaatgaaatcctggataacggaagagatttaaataaagccctagtcccttctaagtttaatgcatataagggattggctggcagcgccactcaagtagttagcgctccccggttttgtttagtccctgattattatagcgacactaaagtaaaagtaaactttgtgactgaaacagattttgaagaagatgacattatcgaagttaaagatattgttgaatcatttaaccgttttgatggccaaggcttaattagctacgaaatggctaaaaagtgggcagaggaattaggtttagactatgtcccagcgcaatggtgtatcagacagaactttattaaaggaatgctaaataccttccctattcatgagttttgcgaaaaagtaaataatgggaattatagaatcagaacatcttataaagactctgacgggaacccaaaaattgtggatttaagggacattgatgttatcctcactgaaagccaatttaaactctgggacagcttcccttccattgaggtttatgaaaataactgtgaaaagaataacttgaaatggggagtttcactacacagccccaaaaaagataaagacattttgaaaatgaactatcaatttttacaaactctgaatctaaaccatgaagacattgaaaagatctgtgagaaattcgttaactggataactggggtcaattcagggaacatctattacaccatcttgtttcttctgggaactgatgtgacagatgaaaaaattacgaattacatagagaaatctgataatcattgggttaagtctttaatattgaaccctgacttaatcaacgacaaatacataaaaaagaaaatttatgacttaatgaaaaagaaaatccaacgcggatgccttggggacataatcttagatggcaacttccagactcttgttagcgatccctatgcgatgatgcagcacgtttgtggtttggaagtaacagggcttttaggtaagcgagagtactactcaaattattggaatcaaaaaggtgttaaacatgttgacagtatgcgggcacccctcacctatcgtagcgaacatttaattttaaatctaaagcaaactgaggatatggattattggtacagacataattacacaggtatcattgtgaatgttcacggctctgagacaatgaattgggctggtagtgatttcgactatgacattattgcaacaacttcggataaaacagtattaaagggggtttataaagatgagttgccagtggcctacacccctcccacttcaaccaaaaaggttttgactgaggaagatttattcaatgcagaccttttttcatttggctcgattattggctcaatcaccaataaaagcacgagtggctatgctcttctttctcagcttgattctgattctaaagagtatctcaccacattaaatcgagtaaaaatgtgtaccaaattgcaaagtgctcaaattgataaggccaaaattggacgagaagttaaaggcataccttctcgctggattaattatcaaaagatcaaaaaagatgactcggagaatgttaagacgactaaggaattttacaataaaatcttattggataaacacccttacttttttatttatttatacaaaggaactaaaaacaaatacaaaaaacatgtcaaaacctatgatatcacttgcaagcagaaatttgggattagtcttcaggagctcaagaaagtaaaacgaaaaacaaaggagcagcatgaatttcttaggttatttgaaaggtttaatccagtgattgagagtgactgtgtaatgaacagactctgcaagtatattgaatccgttgactttggtattagaaacattgttaacaaggatgtcgatgatgaaatttacaagatttatatgaatgatgcagttcaatttgatgaatcacggtacaggaaagtagcaaaagcatatcaaaaacataaaaaaagcattaatcaatcattttcattgggagcaagtagtgatgcagataaaaatttatatgattcagatctctgcagcaatttctccaattccctagatttattcaaacaaagactcaatgatatttgctccaatgtttacgaggcagttaattaccttgttcgcttattttatgttgatgaaaagagctcaaataaagagattttatggcatctctacggccaatacatatttgaaaacgtaaaagcaaaacaaaaaagtttcaacatccctgtacttgatcaagaaggtgatattaactaccttaataaacattactcattaagaaaggtgtgtctacaatagacaaatacaaattcaaagagaaggaatatgtagaagcaataattgaaaacggatttatctcaaaaaacctgagttatgaactgaagctattggccaagtattataaagaattaggatataaacctaaaaaacgagaagaactcctttatgatttctgtgaaaaaaacatagagaattttagccgggtgctatattacaaaaaaattaattcagtgctcaatcatgcaaggaaaaaagaaaatattttaatcaatatagatgaaattgatataacagagaatgaacttcgatttattgatcgtttagatatcaaccatcaacaaaaaaagctctgctttacccttctcgccttagcaaagttatattcaacagttcactacataaaacatggtgaacattcgacagagcactattatggtggaaacaacaaaagatacaaagaacttatagatacttctcatacttcgttaactgccaacaagctgcatcaaaatattggagagttggccacgaaagacattgttgaaattcgaaataaaggattcattaaattaagttttatctatggtatcgaccccggtggagaaacggctattaaaataagatcgtttgacagtatcggcctctattacgatctgcacactggtcaaaagaaagttaaatcatgcgtcaattgccaaactccatttagatttaaaagcaacaaatctaaatactgcccttcttgtgcatccgctatagcaaaagaaaaaacaagggcaagagtaagaaaacatcgaaatgtaacgctttagaaaaacgctaaaacccttgatatataagcgtttttgaaccatacataaatttttattatatggaaggatacataaaattaaacttacatttaggaggaaataagaatgaataaaaaagaactaattggtgcagttgcagaggctacagaactaacaaagaaagatgtcgaattggttgttgactcaacatttgatgtaatcacatctgctctaaaagatggtgaaaaagttaaagtgcacggttttggcagtttcgaagtgcgagagcgtgctgcacgcaaggggcgtaaccttcaatcaggggaagaaattgaaatcccagcaacaaaagcaccagcatttaaagctgctaaagctcttaaagatgctatcaaacaataattaaaaggataattattctgttggttgagtttaactatgatgatttagaaaaagtaatattaaaaaatgcaaagaagcacaatattacgattaccaaagaacagatcgagcttttcttcgcctcagaggaagagtatatgaggagtattggtttaatctcttcagaataattactcctcttccctccacttcaatttgaagtgggtcggataatagtcatttgcgagggattgaggttagctagctcgcctgtatctctaggagacaggcaagtggctattatcggacgaaaactgtcaataagacctttgctactaactactttgtagggtgaacccatcacagtcttattatgggcgatagttttgtcttaaattaattgcggtgtacagcttcggcttgcacttagatgaggcggatgcgtcttcctcatctgaatactgcccttcgactattcgaatgaggcataaaatttttccgggttagcgatttttctataatcgtaaaataagtgaattggcatttgagcgtttgatcaccgctcccatttcactgaaaaggattattttcggtcttgtcttttcaaaactattctatttgtgcttgcgttgcctacggggctttccggaatgtgcttccgagccttccggtgcgcaggcaatcctaggggcgcatgttcctcggtggcgatgcggtctccaaaaccgcgtgggcaggttcgatccctgtcgcccctgtacaaaagggtcttgcaagatgcaagtcgccttattaacgaaaaaggagaagatgtgaatgtcaaaaatcgcactatttgaagctctccctttaagaaatactatttccaaacgtattcaagaactcttgcaagaaagagatagcgttgcctatcttgaacacgacaaagatgaaccatacactaaaccaacaaaaactattgataaaatcacaacagagttggaagttgcaaggaaagattatcgtgaccttgtagtgttgatggccgaagcaaacctatatgctaaagttgtatgggatgaaaaagagttgtctataacggaagctcttgagttagctcaacaactaagaggtgaagctaataaacttaaaaactatggacgttcgaaacaaactgaacgactagcatcatattctgatgttgtgagttatcgtgaagccatgtttgagcctgagaaaatgaaatctaaaggattgaaacttgaaagaatggcgaatcgcttatcaaatgcaattgaaaaagcaaatcataactatgaaattgagtttgaagctgctaataagtatctataaatgctgggcttttgccttagctatgagggtgaaaattatttcaccttgatagctggtgtaaaaatcatcagcttggagcaacagaggagtagagagccgccttggtttggagcgtatccatactgcaataccgataaaattacaatattttttgtaggatggaaaacggataacgtttaacagcttaccatttacgtgatttacgactttccggacatttgatatttagtgtggtcatatttatactgaaaaattcactctgttctctgttgctccatttttatctcatctgccaagtgcagaaggagtttctaatgacgttgctaaagcgtcttttgttatttttacataataaagcgttctggctgtaagggttatatttcactcataatcagccatattccctgtcgatccgaaggcttgcgtccctacgtgagctacttacgaaggatagatggggtttttgttttatgtaaattccttcgggtgttttccctcaacacctatccgatttattcatttcttatttttcccctttatctcctcttttcggattggccgatgctatcggatcatcgggcttccgaaggaatttattttagttttatatattaattaaaaggataaggaggaatacttgtatggcgaaaggtagatcaagtaaaaaagttaaccaagtgaatttaaaaggttttttggatatggatttaatggagataactgaacaaataaaagaagatgagtacacatatgatttaagggaacgattatatgagtttaatgggacaattaaagaagagaatgaacttcctgttaaagaagctgaataggatggtgattgaatgatcgatcctattcaaacgaagcgccgccctgatgagaatttaaaagaatggaaaattagaatttgctccaataaagatgtttacgatttaaactgggaagaaattaaggagcttattaacaaagaaactggtgaaaataaaggagaatccgcttataggaaatggttcaaaaacttcattgaaggcgttgaataccaaaaagaaaaatcagtagattccaacgctgccttgatagaattagagatgaaaaagcttgaagttatggaagagagaaagaaacttcaggcagtaaaacatgaatttcataaggaatcgcgaataaaaggtagaacagaactgctttatgaaaatgtatctcaagcaattaaagaaattggcactcttccccctccctcatttcaagcactggaaaagaacgagaaaaaaagagctgctgtcctcggctttggtgatgaacactttggtaaacaatttaaaagttgcaacaatgaatacaacgagcaaatttatcttgaacgtatgaaccaaattctctctgagactattgaatacataaaaaaagaaagcctagatgaattggtcgtactaaatggtgctgacagtgttgaaggaatggcattacgggtatctcaactgacggctttgcagtacggtttcattgatcaagttatcaaatactcacgttataaggttgagtggcttaaagaactttctaaatacgtaaagatcaagtacatacatatcccttctgctaaccatacagagttaagattacataattcaagtcgtttggaaatgcctaaagaggatgttgagcgtatcattgccacatatattcatgacatgcttaaagacaatgagcgaattgaagttccgcttcaagatgaagctatcgtagacttcaaattactggagtttgaaattgcagcttgtcatggtcaccaattaaaaaataaaaagaacgctattcgtgacatttcacagatgaagcgaaaattctacgactatttatatgtgtcacacttccatcatggaaacatgcttacagttggcgaagcagccacgcataatattcaggtaatacaactcccttctgtgatgggatcagacgactatagtgatgggctaatgacaggtgctaaagctggagctaacctttcaatttatgagtctggtaaaggccgggttattcaatacgattacatattaaattaaaaacctacttaagggttgcgaccaatcgcaaaggagaaatacataatgaacaatatggaatttgtaaaagaaaacataaacaaatgtctagaaaaactcacgaaattgcggatagacggaaatcattcagcatataagactgttgctaaagctttaagagaatacattgcaatgttcaatcatccaaataaagatgaagctgaacatttatcaaaagttattaagttagttcttgttgaaagataaggtctagaaagttttattcggaaatcctttgacgaagaagattttaaagcctattacagtttaagcaacgtctacgaagatataaacaaaatgcttattgatttagtgtcttctgtaaatcagattgaggaaaatctagataagcatgagtatcacaattacccaattaccgggaataatctttaaggagggattttaatgaaactaagaaggtttttaattgaaaagttggctgggaaccgacctgtagcccttaatttaaaagtaaatggaacattggatgcagataaaacaaaagaaggtttgtttaaaaacattaagtgtatctgaataaatctttaattttattcaaaaatcgatgaggatgatgaagatggataaaacagaagaaattgaattgatgagcagacatttggaacaacttattaaattgaaacagtccagcagcatttgaaataaaaaggaaccctccgttaagtggattccaataagggctatttctttttaaagatgatgtccagagctaacaggataatacaacctacaagaatgatgattgagataatatttgacccgaagccagtgttccagtttttcaaaattgagtagacttggaaaaggagcaaaaggataactgctaacctaaatggcaatgtaaatgatttaatggttatcacctattctctatacgcattgtcgtattacgtttgatatgttgaagaaatcaagaaaagcctctcctacatcctttggcaggttattggttgttctttttacagcttctttccaagcgtctactgttctccatctttgctttttcaagcttttgtacttagagtaaattctgtcaacggttttctttacgccgccgagtaagttgatggcttttttcaatttgacaatcttagagagtgggaagccgacagtcccaatcataagaccaacagcgattacgcagtcccacgctccagcaggttgaattgcagaactgtcagcagatgttttagattcttttacatctacatcagataaagacggaacaactaaattatcaccgtttgtagtgacttcaacccctgttttttctgttaaccaactagccactttttaatcggaccttgtttttcaacactagctggcaactgctcaatgccttctaagaatttaacaaaatcactgcctggtgaaagaagttcactctctaaacttcctgttggtgcatcaatttccccctcttcctttgctgatgcaaaggacggtgtgatggtcgcaaaagctagtagaaaggctaaaaagaatggaaaatattttttcatatcgttccccctttgtttttaatattttttaagccttttcaccgcaactatatcatattatcaaatataaataaacaatttataccataattagtacttagttaccaccccctctgtatttaactaatctttattaaatataaatacttaaatacagagaggataaaataaaaacacctttttagaacgcccagtgatgattgagtttttctcctcgacctctctattgctgggcgttttataaaacgtgtttaacttaagtattggaggtgtattaatggctacacaaaaacttatgtgctcctgctgtgggaaagctcaagctttttctcagttttataaatctgaatccttgtttaacgctgctacaggaaaactaacagtctgtaagatgtgtcttcaaactgaatataagaaagaccctgaaaatttaacacatgtacaaaacattttacgtatgattgatcgcccttttatttatgatatttggatagcttcaatagatgaagcaaaaacaaaatctaaaaatggggatgccaatgtttttggtgtctacatgaaaaatatcggaatgaaagatttcatctccaaaaattggtcagatagcgaatatgattttgaagaagaacaagaacatacaaagaaaatgttgcttgctaaaagcgatgaaaatgtgacacaggaagacattgatgaattcattcagttttggggacgcggtctatctattgaggattatttatggcttcagaatgagtacatagactttacaaatagatatgaatgcgattctaaaggaatggaactgcttataaatcaaatttgtctaacaatgctggatattcgtaagcgtcgggaaaatggagagaaagtcgatcagcagcaaaaaacactccaggatttattgggatcgagtaatctaaaaccagttcaagaatcaggcgctagtggtgttgaacaagagaccttcggtacattgataaaaaaatatgaaaacgaaaggccaattccagaacctgagcatcgttggaaagatcctgataagattggtaagtacataaaagtatttttcttaggtcatttatcaaggatgcttggtattaagaatgactattcaaatgaatattgggacgaaatgaaaaagcacactgttgaagagcctgtagatgaagaggaagacgaggtaaacgaaaatggcctcatacagtaactttacaacagatcgaaaaaaacatagtagagggattaatctcttcaataaaggcaagaacttcaacaaaaaatctaaatcagaaagactgatggatggcattggtgcttgggcttctttttatcgagctaacccccatcgatttgtaaaagaatacttaggaataacccttaaattatttcaatgtattttgatttacatgatggtacataaccattattttatgtatttagctagtcgtggacagggtaaaacttggttaacgtcggtgtactgctgtgttcaagccatactatttcctggcacaaagatagtcattgcttcaggtactaaaggacaagcaagagaagttattgaaaagattgatgatttgcgaaaagagtctccgaatttaagacgagaaattgaggacttaaaaacttcaactaatgacgcaagggttgaattccataatggtagttggattaaaattgttgcatcaaacgacggagctcgctcaaaacgtgcaaaccttttgattgtggacgagttcagaatggtcgattttgagatcatcagtaaagtattgagaaagtttcttaccgctccaaggtctccaaaatatcttgaaaaagaagaatatgctcatctaaaagaacgaaacaaagaaatttacttatcatcctgctggtataaggttcactggtcatataataggtttgtcacctattttaatgcaatgatgaaaggatcaaaatattttgtatgtggtcttccttatcaaattgccattaaagaaggattgcttgataaggatcaagtaaaagacgaaatgtcagaagaagactttgatcccattggttggtcaatggaaatggaagcattgtggtttggagaatcagaaaaagcttattttaaatttgaagaccttgaaaagaatcgaaagctcgcctctccccttttccctcctgattactatgaccttattaaagattccaattttaaatttgaaaataaaaaacctggtgaactaaggttaattagcaacgacattgctggcatggcaggtaaagataatgacgctagtgtgtacactatttttagattaattccaaattcaaatggttatgatagacacattgtttatatggagagcatagttggtggacacacaggttcacaagcaacaaggataagacagttatttgaagattatgcatgtgactatattgtgctagatactcaaagcattggtctaggtgtatatgatgcgctttgtcagcctctatacgataaagaaagagctaaagaatatgaaccactctcttgtatcaatgacgaaaaaatggctgaacgttgcacatatcaaaatgccgaaaaacttatttacagcattaaaggtaacgctcagttaaatagtgagattgcagttcttcttaaagacggatttaaacgaggaaaaattaaaatccctataaatgaaaatgaaggtcgagagtatttaaagcgattcaagggatacgaagccttaccagaagaaaccaaggccaaatttatctcatcttatgttcaaatcaccttgttgatcaatgaaatgataaaccttgaagctgaatacagcgataacggacaaatcaagctaaaagaacctaagagtaaacgaaaagacagatatagttccgtggcctatgggaattatgttgctacccttttagaacgaaaactcaacaaacaaacagaatatgacattgatgatgatcttgtctacttttaaaagaaatgaggtgaattatggctaatattaaaaaaatcgatattgaatcagaggaatatcaaaagctactaaacgattacagcacctatgtgtctacttttgcatctggcttcgtttctaacttgttctctcaaggtattataagtgaagtagatgctaagcagttaaaagaatacttttctaaccctgataagttccagaaagagatagaagatcttgctcaatatttctatatttcaaccgctgagatccaccaactttttgagttaatcgaagccctcccaactttgaattataaaattgattcctttgtgaaaagcaagtcctctgataagcacatctcccttttaaataaatccctccatagagtaaaacataaaagattaacacgcgacttgctaaaacaaactgcaacagcaggaacgctcgttggaatttggctaggagatgaaaaatccccctacccttttgtgttcgacagcgttgaatatgtttttccagctttcaggagaaatggtgattgggtttgtttaatcaatatggagtatttcagcaacttcaaagaggactatagaaaagagctgctaaatagcttctcccctttcattaagaattcagattatgaaaacttcctaaaagatcgtgagaaatacagatataaggaactcccacaagaacggacattcccgcttcgaaccggaactttaaaaaggaatcaagggttaggtacatcttgggtaacaccaggtttatatgatgttctacataagaagaaacttaaagacgttgaaagagctatcgccaataaaatcattaatgcagttgctgttttaaccatcgggactgataaaggtaaaggcgagtacacaaatcttaagcttccaagaccagtaaagcaaaaaattcattctggagtgaaggctgctttagaaaaaaacaataaagatggagttacagtcgtttccatccccgactttgcaaatttggagttcccggatgtaaaagccgatggattagacggaacaaaatttgaccacatcaacagtgacatacaatctgcttatggtttatcaggatctttgctaaatggtgatggcggcaactatgcaacgtcctcattaaacttggataccttttacaaaagaattggcgtcttaatggaggaagttgaacatgaagtatatcaaaaactctttaaccttatccttcctgcaggtcaaaaagataattattacatgaactatgacaaagataagcctttaacacttaaagagaagatggacattctcattaagcttaatgataaaggatggtcaattaaacatgttatcgacaatattgcaggcgtgtcatgggaaagttatttggaacaaactttatatgaaacagatgaattgaatcttcaagataagataaagccttaccaaacatcctatacatatacaggcagtgaagctgggcaccctgttgtagatgagagtactaatgaaaacaccattaaatctgcaacatcaaatggaaacagcctaccagactaatttgcaatgttttgaaaggaggtgaataaacgtttgaccaaagagcaaaagaaaaaagtttttcaattgcagcttaatgagataaagaaaacagatgatcccacaaaactcccctgcacttttatcatttttgactttgagacatctcacaacaatacagtcatttctaaggaagttgctttggacgcctcccctactattatcaataagcctattgttgcaaaataccatgaggttgaagaaaacaacactgctactgatgcacttggatctcatgaagcatatttaggtactgataaacacggtgaacttgaagttaagacggatactaccccaatcggcgtgtttacttctgaaggatacattatggagatcgatactccggaaggaaaaaaagaagttttggccgccgatgcagttttatggagttcgcgtttcagcgatgcctgtgagcttttattggaatggtattcacggggcatcaatataaacacaagctgtgaaattctatactcaaattactctgttaaagatggaatagagtacattgaaacgcctatttatttagaaggtcatgcgatcttgaattctgagaaacgaggagagcacgatatcgtcctccctgcttatgattcatctcgcttagtgagttttaatgagatgcaaaaattcgagaaattggttgcacaagctgcaaaccaagaaaaacaaaaggaaggtgaaaaagtggataaatttaaaaaagtgtttgaattatcacattcggacataagaacgcttatctataatcaacttgatccaactctcgaatcaaatgagggatcatatattgctgatgtgtatgatacatactttattgtaaatatttatagttggtctgaagataattcttacgacaaatattacaaaattaactacaccaaaaatggggatactctgacaattgatttagactcaaaaactgaagtcttcttaaaacgaaactgggaagaagttgtccctgaagaaattcaaagtcagttaaatgaaaaagacacaacaatttcagagctctctaatcagtttaatgaaatcaaagagagtaaatctaagcttgaggaacaattcaatgcagcaagtgaaaagctcgttcaattaaactctgttgtagaaaagcttaaacctttcaaggaaaaacatgaaaaagcagagttcgaaaaaagagctcaagaaaagaaagaattctataagcttaaatttgaagctcttaatgctgaagagaaatatgaaactgaagaagttcaaaatcttattctagcatcagctaaagacaacgaagaagccgataaagcagttcttcaattgaattcaatgttggttgaacttgttgatcatgcaactgaccaagatggaaattttattagagagatgtccagcaaacgtgaaaaattactaaaagatgatgattcgtttgaatcgcgttattcgtcttaaaaacttaaaatggaggatttataaatggctactagactacaaactgctcttacagaagtaggcacccacactactggtaacttgaattcattaaaaatcaaaactcttgctcacggtgctaaggtatctggatcagatattgacaactttatgcttgtggaactcggttttgatgaagaaggaaaccgcattgcaaaaaaactttccgataaaaagcacagagcttatttaattgcagccccagaagttcgctatttgggcgagtctttgactgatttctataacgctgaaggtgaacacggtcgtatcgttattttggaaccaggatacacacgttttgatgtttctgctttctctttgaatgaaggcgtcaaagaagttaaacgaggacaagtggcgcactttgatattaaaactgaaaaatatgttttaagcgaccctgcttcacctcatgctgactttgcagattcttctgctaaattccttgttgtaaacagcgaagatgatctccagtacacaatgggacaaaagctggtacgtctcgaagtaattacaggatcagaaacgggcttagtacctggaacaagttcagagactcaagcaaaagccgtagacattggcgattaatagaactttaataaacacttattgaaaaggagtacaatatatgaaacttgacactgtaaaaattaagggcttatttagccgtgtggtcaacaataagatggaagccacagataaatcggatatcgaaacttatattaaaaaagtatttggtgatggaactgttactcctgacccttctatgttgcaccagtttaatacgcttgttgtacagcaagcagatgaaattgcaaaaccaatggttacaaatctaatcactctatttgcaaatcacgaacaagagaaaccagggagtctaaaattaatcaaaatccctaagaaaaacaaagcaaaagtgatttggtctgctaatggatcaggtgtagatctagtccgtgttgaaggtcgagaaaatgtacctgctgttccatatacgctatccactggtttttattatgagccacttgatcttgtaactgattctgtcgaatatttcaacaaattagttaatgacattgccaatgcaaaagttcgattgtatttggataaaattcatcaattaacggctgctgctattgctaaaggaaaaatcccaccaaaaaacgtggctgttgggtcaaaccttacattacaaaaatataatgaagttgcttcagttcttcagcgttatggaggtaggccagtatttgttggagactcgcttcttattgattactttgcttttcagcaagctacagattctacatataaaaaccttctaactgatggcattaaaaatgagcttctgactgctttaaaccctactacaattggaagaactactgcagtaaacctcacaaacccattcactgatgaaactaactcaaaagttgagttgcctgtaaacaaaggttatatgtttgctggtggagtgtcacaaaaaccattctctattgttgagtacggtgggcttaaacagttaactgaacaagacatcgaggatgaaagaattaaaatgaaaatcactcaatctgcttctgttaaccttctgtttggtgaagcgattggaattatcgaggaacaagcagcagtatctatctaagtatttattttaaaggataaactaggaggaaattatgtctgataaagttaaattggctcgttatagaaacacttcttattttgttgggtacaccggagatggtggacttaaacaattcacttggtcaggtagtaaaaatggtaaggctgagatcaaggaagtacctagagatgttgttgactggttgacaatgaatagtgtctgctttgataaaggtgaattagttattgttgatgaagatgactcaacaaaacaaatcaaagaatcaattgttgatgcggaagcatacacgaacaacactcacacaaaagaagaaatttcaaagatgattaaaacaggtaacattgcacaaatgaaaaataagcttgaaaagattacagttgactcagaaaaacagtttgttattgatgttgcttctgaattcagtgatgatatccctgctggaaaacttaaagccttagctgaatggatgggtgtcgaagatccttccctgctctttgactaggaggttcaataatgacttcttatgatgaaatttgggagtttttcttgctaaactgtaaaacgtctgatatcaatttacctacggaagaatctttaatttataaatctataaggaacgcagtcctgcgattcaataatagacttcgcgacaaaaaattgaagtgtaacgatgaaactgaaacagtagacagagtaatgaacgaggatgaattgttaattctcgttcattatttacgtttaatttttttaattaatgaacagactttttttcagactacatggcagccatttgcaaaagacgttggtgttaccaactatggtacacaaatcaattcattaacaaagtcaattgagaaacaaacagcagatattgaccgcctcattatgaatacagaggtggattacttatgagagaaaaatatattaatgaaggacaagccccctcctctttacaagaacactgcataagactaagcaagaaaaacaactctgtcctttataaagtagagcaatatttaaataaaaaaatgctgtctgatacagaactagctgaaattcgtgaaatcattttggacgtgagtgctgaaatcgtaagattaggtcaatccctatctggtgatttagatgaaagactttaaaaattaccatcagatcgacgttaataaaaagattgaacatgatgggaaattaatttttcaggctggtttgaagggttttcagtcagagactgtgtcaattgatgaaaaagaatcagtaacatgtttgattacttcaaagttttcaaatggcgatggaatgactaaatacattctagggcttcccgaagacatctatattggaggagtcgtcaaatgggacactcaaaagtggctaatcactactttcccaagctttaataaaatttataaaaaggctgaaatcaggctatgcaactcctcaatacagttaactacaaatgacaaatggattgattcagacaagataagcgaagttactggaaaaccaatcaaaactaaagtccctggagaagttattgaaataccatgtgtttttgaacgttcaacatctataaatgggactgatctagccgtcaaccttcctgatggtcaagcaaacatcacaattccaaatataaataacgacaaaataaaaattgggctactcctctctttctttggtgaggactatcttgttaatgacattgattactctaaggtttatggagatcgtggcacaataaaattaattgctaaaaagaaagtcagaggtgatggtagtgcatgagtaatatggttgaacacatgaccaagatttttagaacattgattaatgactctgagctcaacagacttctgtattataaggacacccccctctcccctgacctccctgatgttcaggacttagaaggctatgaagttgaaacaaccgttgaagaagatggaaaagtccgcattatcccccctatttttaagacaatcttcaaaagagctccaaaaaccgatgacattactgaatcaccaatctgtagagtgtgtatgtatttgggaagtggcttatcaaagccctctaatcaaagctatttgcttatggatcaagaccttcacattgatgtctacactcatattgagacatatgaagaaaatgaatttaggtcattgaaaattttggacagattatctgagcttctcttcaataaaaatatcgctggcttcggaaaggctttagctccgaaaagaatgctgattacaaaccctcctgctggttacttgggttataaaatgattttcacatttggagcaatgaaatgaacgaaatttctcaagatctctttatcttaggtattcccgttgacacccctattggcaagtgccatttcctcaaaatgaaggattacaacgagtatgcggcatacctggacttaataaaaatgagtaaaaacgagattgtttatagatatagccagcttaataaaagtggtgaattaaataaccttattgaagagatgaaaaagctacctctttttgatattgtcaatcaattaccaaattttaatgaggcctactctgaagtatttaaaaaaggttttcagaacgacacagtctttgaattaatagatcgaaacaatttcaattcaataagaaaactttttttagaaatgcattgcttaaaagaagagaaaattagccccaacccagaagtgcaacgaaggattgaacagagtaaaagattaaaacagcaagagcaagaaccacttgaagtatacgatatgattagctccatagcgacttttgcaggtatttcatacaaagaaattgctgaaatgacattgtatcaaatgtatatgacgttctatcgcattagctgctttaaagactatgataccgcaattttatttgcgacagtatctcccgaggcaggtaagaacattaaacattggagtagccatgttgacctctttgaagaagagagccacgcactgtcagatgagcaagttaaaaacttaaaaagattgtttcaagactgatttattatcagtcttttttcatttaaattaaaggaggatatttaatgaccaagaaaacagttattcatgatacagcagatgtctattggagaagaaaatccgatggacatgtaatttctgctgcagaagctcaattggcttccatttcacaatccatttcagaagaagaattaaaaggtggtattgggaatagaacactttatcttcttcgcacagataagtcgatcgatgccaaggtgaaaaatgctttctttgatatggaattcatggctatgactcaaggggtagccatcgaggaaaacaaatttaatgtatctgaacgtgaagatgtaacagttcaggtagatggtacagttaaacttcaaaaaactcctgttggtgtagtatcactcaagaacagcaaaggagcaagcatacaggctgaatacaaagatgaagcagttacggttccagatgattttgcaaaagaaggcgatgttctaactgctgtttatagaattgaggtaacaggagaaacagtcgagatcaactccaataaattttctgaaatgtatgagcttgaatatcacactattgagtacgacccagataccggggtagtgtacagtgacctctatattcaatttgacaaggttgctccatctggtgaatttgaaatgtcactagaaaatggcgctgcttatacaccagagctttcatttaaagtgcttgcagcagacagcagcggtagatacggtaggtttgctcgtgtacctcgtactaaaacaaatacgcctgacatcccctccccttctccagacacaggaactcaaacaaaagctgtagacattggtgactaataatcaaaatctaaaacaaaaataaggagagattatattatggctgaacaatttctaaatgaaagtaatggagtatttacatctgcagaaaatgatggcacaggaaaaccagtaacggctgtttatttaaaaaacaacagtgaagagaaccctttatacattaaagggatgcaaggcgagccggggccaaaaggcgataaaggtgacaagggtgaaccggggccaaaaggtgataaaggtgacaaaggcgatcctgctgtcattgaagaaaaaagcattactcatgaaatgcttggtgacaatattgtcagaagtaacaacattggaaccggcagcgtcttgctcgttaacttaaacagcgaagtcaaggctaagttcgatgatttacaaaaacaaattgatgaattaaaaggcggccaagcatccaactaacccaaaataatatctaattaataaagattatgagggggatttcccctcttcttttttatacaaataaaatgcgtgttttattaagaaactatttaaggaggtttccagtgtcagtttgcgattataaaacactaccgcgaaaagtcgaacctcaaatcacccccttcatctttcatgattctgtatctgagccaagtgaaggtgaaaaacttattgtaggtgctcatcgtacacttactgttgaaattacaggcgactgcacttcaagagaagttaaattttatagtgttacacaagatgggaaaaaaattgttctagaagggataaactcctctaatcatatgtttggcgcaagcactctgggaattgatgaaatatgggagtttgatgtcgccgggaaaaccgcaattcaatttgaaatatccaagattaatggtggatcacttaccattaagggaaatgcggtgacatagtgatggataatctttctagggcacagaataaagaaaatgaaataaagattgagaatttaaaagacagatttgatttttttgaaaaacataccgtagataacaaaaaagaagttacggaaaaaatcgaagagtttaatgagctgcttaattctcatgtgattaataatgaaaatccccatggagtaacaactcagcaagtaaccataattaaagacccaacaccataccaagatgcatcttattctggagataattatccaatgggcatctcaacctttcctctcttacagggatcagttggtttcccaagtcagtacggagaatgcttaaacataaaatcaacaaaatatcgattcgcacagcttttcttccatgcaggaaatcgagaagattcaagaatctatcttcgtcattggtatccctccacaggctggacggaatttattacagtcccctcctcttctgatgtagatgatgcactgaaatcagcgaaagcttacacagaagctcatgcaaatgataaagacaatccccacgctgttacaaaagaacaggttgggttatcaaaagttgataatattaaacaagcagcaaagaccgaatttgatacgcataacaccgacaacactcgccatattactacggctgaacggacgaaatggaatggcgggcaactttataaattaacagatgacaacggcagcagaatgcgaattcctgatggcactgacttattaactttaccatccggactttattatggtgtcagtaacaaagttgtgaattctccagatccgaaggcggtcgagtggtttcattacgatgtttcaactaatagtgcgcgcaaaacaattgtggtaactgctacggccaatcctagaaggtggttcggaacaatccacactgacgggtcatttaaaggttggcacagatttattacagatgccgacgtgtccgtaacctggcaatcgcctactttattaaacggatggaagcagtatggaacccataaggttcagtttagtaaaaatgtacttggggaagttgagataattggctcaataaccggaggaactattggttttgaggtgcctgcttttacgctaccagcagggtatagacctttgcaaatgacacattttataggcgtagcttcaagtattggaacaggttcagcccctcaatttcatagaacacatatttccaccgatggaaatgtatatatacaaagctgctccaatacagtcaatccaaatgaatttatcacttttggatttaaatttaagtcggcttaggagggattaaaatgaaatggctatacaaatacgatgaaaatttcaactacttgccaggggaagaattacagatcgaagacgacgataaaactcctgatttttattgtgatgcaagaccgcctgacggtctatatttacctaaatttgatccaaagaaaaataaatggttcgaatcggccgcacaggaatatatcgatagtttgcaacctccggagccagaacccaatcccatagatctattaaagaaacaaaatgccttactgtccttgcagatagctcgccttcaatcagaggtttcagaattaaaaggcggttacacctcatgaggtatcctactttccaagatataaaacagttttatgattggggatgctataacgacgaggaaatgcgcgagtacgtgaggataaattggatcactcctgctgagtatgaagaaataacaggcagaagttatgataaaccattcattaatgtcagcgtggatttaggaatgtgcataacaccttaatggtgtttttattttggatttataaggaggaaatatgatggcaacacaaaaattaacgctcagtcatattaaagaggataataagaaatacaatgagaagcagagaattgaattgaatgatcaatatcatacttacatttatccgaattttgactctgcaagaattatgaagatgtttaaatctttaattcgggatttcacggatattaaaaataaaaaaggtgttaaaactgaacttagcccaggtgacttgctttatgtgtatacaattatcgaatttagtgatattgcagaattccctaaaaaacttacagataaactaaaaatgttcgaggaaattgcaaaatcggatttcgcttctaagatttacgagtcattccctaaagaaagtttgcaaagaattgataaaacagctctaaacgttgcaaaaattgctcaacagagcaaggaatttgtagattcactagaagctaatgaagatattctaagaaaagttgaagagcttactcaagaggatagctaaatggcgacttataaagatctcgccattttagtagagacagaagctttaaaggccatccaacaatctaatagcagcactaagcaaacgttaatcaaaactgggcaagaacatgttgaaactgatgtttacgacgtgtacaatcccttagtttatgaaagaactcacgagctgaaaagttcctttgtaactgaaaatgaagctaatgggctctcattggataacattcgagaagatgaaggtcgtgatgttgcaactgttgttgaaactggtgaaggctatacctatcctgatacatatggttatggctatggtagaccaagacctttcatgactaacactgctgaagctttaaagaatggccgcttaattgaagctgtgaccaaggatattaacaaacttgggcacaagacaattaaatagtggtggtgaattaatggcgaaagaaataaaacagaatatgatacgtccccgtgcaaagaagctgcctgatgttactgatgagatgtggctgcaggttgatgaggagcacagaaatttaacagaagaattcttggatgctcactcattccgtgacaaaacgagaaagcaatacacctcttcccttcggcaattcttttggtgggtacataattctctaaatggaaagaaactgtataagatcactaagcgtgacttcattagataccaaagtttcttaaaaaacagaggcatgtcttccagtggtatcgcactaaaaaaagctggtgtttcctctttaaataactatattgaaaacgtcgtggctgaagatgacgacaattataaaacattcaggaactttacccgcggcctccctgctattcctaagacaatcacctatgaaaaagtaaaaattacatatgaagattatcaaacaatgatgaaagcacttgaagaagatgagaactatttagggatggcttggcttgcaactgcttttaatgtaggagctagaagagctgaaatcattcagtttaagacagaaatcttagattaccctatccctgaaggccagcaatatgtgttatcgcataaagtatttggcaaaggcagtggtgaaggcaaggtactggaatacatgatcaatacagaagctctaaaatatttaaagctgtggcatgaaaaacgcgggtacgatcatgaatacctctttaccactacttacggtggacaaccaaagcaaatgtcagaaacatgggctgattatttttgctccgatgttttgtcagacattcttggccgcagaatcaaccctcacctttttaaagcctcttgtatcacctacttactcgaagtcaagaaaatcaagattgaacttgtcagcaaatacattgctcaacacgaagatgtctccactacaatcaaacactatgatcttcgcgattttaaagaagaaaagaatcaaatatttatgtaaaatcactcttttattcaaaatcaagatcccttccctaaaggggttttgcttttgtgtgaaatgaaaatttgtaaaaaaagaaggtatttcctcctattctgtcgaatcgattattcatcaagttttgggaggatcaaatgcttaaacctgattttagcaagtttaacaatttatcaaataatattaaggcttctgattcagaaaaagtatggagagagtttctcctcacatcttttaactttgtaaatcactgttcttataaagttaatgaagatgagctgtcagaaataacaaaaagcttacagaactggattcaaagaaggcggtttaatcagtataaggaaaggaacaatatagtaacaccacaacaaggggaaatctttttagccgatttaggactaaatttcgaatttgcttattgtcatcctgttctaattctcgatgaaattgaaaacaaattgatcgtgttacctgttacatcaagtcctgacaaagtgaaagatgcttttcatccaataacaaatccttctggacttaaacgttacaggagagttactcctgctgatggatttgaatctgaatcagctattgtaatggatgaattgaggattataagtaaagggcgattattgaataagatatcctctttgaatgaagatatttatttagtgggatcaatttttcaagaagtaattgaaacttccttttcattgctttatagcttacagtatcaaaaaatcaatgacatggaacaagaaattgctgaactaagagatgaaataaaggttttaaaagaaaaaaaccatcaagtttaaaacaaccattgacaaaataaaaacttagatgtattataatagtaacaaaaatgttaatcgctttttaagagtgcatccttacagagatgcaccgattaataaccaatcccacttatcattaagtgggattttatttttatatttgatctaggatagctaaaagttccgcgtcattaattttgaatactaaatataatcaattttgtttgtgtcagggaaatgcaaagtggttatagtaaagttcgtagcgtgttttcctaaaagtccagcaatacgcaaggcgatatctacattctcaaagtcaatatcgaaagatacaaattcttgatactcttgattcacgtaatagttctttatttttgtatcctttggatttgaaggatttgacgcagaattaagaagtttcttgaatttctcaggatcgaagttcatcaatggtcggcctccaatattttggtaattaaagtatagcacattgtcatatccccttctttaaaattttccacatttgcccgataataggatcgaggtgaatgatgggatgtttagatggtggattaggaaaaggaataaactaaaaaaagagcctgaagatttaggagaggtattgctaacgtggcctgatgaagaaatacagaaatacattagagattattttggttatagttcaaacaaaaacaagaaaattgagttacaccgaattagacggcttgatttagatacaataatacttggcatcgcaaggatgaaagaaatcgaggagtctttcgacaattcgaagacggttcccagtttcatagcggcaactgtgtttatgcttactcaagttttcaatttttatacagatgacgaaaaatttcagttgatcttcattctggtatcatactttattttcttcgtggttatattcattattaaaaatggtagtgatcatcgatcccgagcagctcaatataggagcttactggaacaggtgaaatcggaaaaagagaaggcatcctaatggatgtcttttttatttggcatatatggtgaattatccaacattggtctgttatctggtcttttttccataacaatctctcctcgtttagtgatcattctaatcgtactacaatttagggaggtttcccctccctcctctttaagattttccatttatgtacgataatcactatgaggtgatttggaaatggatagtgatgaatattataaaaaatatttagaagagagtttaatcaagttaaaaactcgtgaccttatagagtttattaaaagagaatttcctgaagaggtcaactataaccatgagattcaccaaaagaaagttgaagcgttgaaatctctatcaaaaacagacttatctgcggctatagccagactagctagaattcaacgaaagtttgatcatactaaattgtggactattggcgcggtttttattggtacagctcttgttaatttacaaattttatttaaagttaacctcacaaaaatttccgaggaaaattatattaattatttaatgtatggtattactgccttaactgtgtgctttgtcttatatagggctatcagaaaggataagaaaatatcagatacagcagcatatttaaaggatttgattgaacaagttaaatcagataagtaacaaaaggcatctcaatggtgtctttttattttgaatgcaggtaaaaaacattgcaccggaaaaagtctgctaagatggaacgacaaaagcagaccgcccggtcgagtttgacaagatatttgctgatacaaagcaatacagatgatactataaaaaagaaacagattaattcttttttggtggtttaatttgttgagattcacaataatcatttatattagttacgatctccataaccatgttcaaataaaattcaagagttttaactataggtttactactaccttcaaaggaaaagtatgaagtgaattctccttcatactgatttatgtaaggatggttatgtggattatcaggatcaaaaggaacatcattcactgtcaaaacctgccctactccttcaaacttattattcagcatagtaataccctctgggaatgacaaataatccaatgttccagaatagagctttttgtttcgtgtgagtcttacgtgtttggtttcattacaatgttttttaaagtcagttaaccaagatgagccgatttcgaactcttggggcatcttaaatacttcataaagaaaattatggtcttcctttaagcccacaaaatgtttattaacctgctcttcaaaaattttttcttttttataggccggaaaatatatttttctttttatgtattcaatattatcgtaaactgccgatgcattttcaagacaaaacacttcaaagatataatatgcagcgtaatccaaagaagagttcaaagcagccaaaaaatttttaattttaaaggctaaggtacgttgcaaatcttcagaagctagagccttatcgtgtaatttagatatatcctctaaagcctgttctgcttcatcgagcaaatagagcgcatcctgcatagaataagtcccccttttttcatgaacaagaataatataccaaagaataggtgaaaagcccatgaaaaactattgtgaacttttagaagtattcgaggaggttcttgaagagtggttttcagctgaatcgattcttataagccaatgtggtgatagtactgatgaccttgaaaagagaaaagaactgtataggcagcgttttgttgagactttgagtgggaattgatgaacctctccccttcccttatgctcaagataaataagagagtgattccactctcttagctcaaataatttcaactttttccagatcaagtctaaattgcttagcttcattttccataaggttaatcatattcaaaaaatcagtgcatacctcttcatcagtaatatctgggcgatcatatgcaacatttcttgagtacaagaaatcttctatgttcttaaccgcttcaatgactttttccccaagcagatgataattttgatacaatataggttttattgaatttaaataaatatcgtaattaaacttacatgttccttcctcagcattaatagttgcaacataatctttgttttggattttcaagatttcattataaacgtccattctttttagcttatattctcttttaactttaatttcttccatttttatttggtttttaaattggaagcactgaacaaaaagagcagataccaatgaaatagctcctccagcaacagcaagaccgattgtcatcaatttaacaaacccccattattgtaatatgaagttaattgtaccacgatttgcttccattatcatgacttcccttctgctcaagataaacactcctgaggaagaaaattgtggtataatttaggcatattgtttgatgaggtggtttggtgtgtttatcgcaatgttaattattgcagggtttattgttttctttggatatgctctgtctgagggtaaaaagcaagaagaaaaacaaaaagagggtaaaaaaagtgaccgaaaaaaccttgatcaatatgatttagatttttctccgaacaaatcatatataaaccctgacggaaaaatgaaaattgccttcaattcagaaaatgagctatttaaaatatatagggtgtccccaaatggggcgattcatgaagttgctatcccctttgataaaattgtcgattcagaaatacttattgatgatacaacggttatgaaagcttcacgaggtcaacaagtagctggagctttaattgggggtgcaattgctggtggagttggagcaattattggtgggagttctcccaataccacaggcataaacactgtgaaaagaattcggttaaagatcacaaatgaagattttgaaaatccagtttattatattgatttcctccctactcgtgataagttaaaccgtagaattaataaaggttggaacaaagaagactctacagtgtcttatgcattaaagaaagctgaatattggcaaggtgttctggaattggccataagaaaaacaaatcaagtcgctcattaactgggcgacttatttgttttcttcttcctcttcaacttcaaaaagttcttcaatcgtgatcccaagaactcgcgagataataaataaatgattatctaggtgctgcttatttcgatcaaagcgattaattgctgattggctaatacctgtaatttgtgaaagttttaattgcgaaatacctctttcatctaaaatttcgtttagccgcggtttagcattaataaatttcaaaacaatctctccaatcgaaacaataactgtacattgaatgtatattatgtatacattatgccctaacttaattttcatggcaagccaaaaaacattattgactacccattaatgattagtgtagtatgattacaacaaccgaatgggagttgataataaaatgctgagcaaaaaagtatatgggactattatgcttacagtgtcgcgtcaaacagcagcttctagcaaatgtttagcaatacttgattcatactatgccatatccgatgatcgagttgatttgactgagttgactctactacacaaaaatggaaaagttttagggacggtcaaagtacataatgtgaaaatttcttgggatggatttaaaaagggagagaacatcattggctcaaatatacactcatgaatttgtgcgagattatttcaagaaacatggatgtgaacttatttcagaatttaaaaacgttaggcagaaactttcttacagatgtgtttgcggagaaataggaactacaaatttctattcatttagaaacagccatcataaaaaatgcaataaatgtgtaagaaaaaaagcaaagaagccgaataaactagactttgaatatgtgaaaaaattttttaaagagaataattgtgagctccttgaatccatgtatattaatagctctactaagatggcttatatctgttcgtgtgggaaaaaagattataagacttggaataaatttagagcaggacaaaggtgtaaggattgtgcaataaatcagagtgctgaaaaacagagagcagattcttcatatgttgaaaactttctaaaagaacatggattttcaatagccgatgggaaatatgtaaacacaaattcaaaaatgttgcttatttgtccatgtggaaaaccaactgaacgaacatggagttcggttaaacagagtccaaaatgcaactgttcaattcattacacaaaacccttaaaaagaaagtttacaaaagaggatctgattaatttttattggaaattaaagaacgatcttggaagataccctagtttagaggatttaaagaaaaacccatcttgcccttccccatctgtttacgaacgaaagtttgggggatggataaagtttttagagagtattggcgtaatgactagcgacagatggtatgttgatgatatcgaaaccttaaaacgtatgtatgctgactattcttatgaggacataaacgatgctctcattaagaaaaggagcaaaagcacaatacagcataaagcaaatagcctcggattaaaaaaatcttataaagctaaatttggaaaagaaaaattctcaaatgattatttaataacttttctgaggaacttctacgacaaatacaatcgaactcctgttgcaaaagattttgcggaaaatgatttaaactatgatactttcactaaacgttttggctcttggaataatgcgctaaaaaaagctggtctaccaattaatagagaacgatcaaaaaatctctctaataatgaattacttaaaatgaaggaaatgtatgaagcaggagttgatatgcgagatatagcaaaacactttaattatacacatactgcgcctatttattatcatttgaataagatgaatgttaatctaacacgtaataatcgttggtcagaaaaacaaatccactatttgaaagctcactatcctaacgcagagtggaaggatttacttaaaaaccttgcacctttttcaaaagagagtattactacaaaggcttataaactcggtataaaaagaaactcaaatttttacaccgaaaaagaagaaaagattcttcgaaaattttatggaaaagtgtcttttcatgaactccttaagatgttgcctaatagaacggaatcttctgttgtttctaaagttaatcatatgggtttaaaaattagagaattttggagcgaagaagatattaacatgctgaaaaaacattatcagacctctactgatgaagaattattaaaaatgttcaaagatagatcatggtcttcgattcaaagtatggcaacaaaaaacttgaatctaaagagaacgaaggaatattacaaaaataaaaaagaaaaaattagagatcatctaatcaaagaacttaaagagtacgctcatgctttaggaagaacacctacatcagtagaagttcaaaagaaccgaaacctacaaggaatttcaacatatattaggtattttgatggttacagaaatgcttgtctaaaagcaggtcttgatcctaatcaatctatttttggtaggtcaattcactgtatatcattaaatggggatgtatgcctttcaaaaaaagagaaagaaataaccgacttatttatagaaaataacatagcgtatgtaaaagaggttctttataaagatatactgggcaaaaataatattccaaatataaaacttgactggtttgttaacaacagagtcattgttgagtatttcggaatgacagataaagattattataaaaaaagagctaattataaaatagagttttgtaagaagtatgacattccattgattccgctgtaccctgatgatttaacgaataactacaacggcttaaaagaaaaatttaaaactcatggaattaactttgggaatggagatgaacaaaatgaaaaaataccttaatcacttgacattgaccatagccgcttgtcaaacaactcacggcaactcagaagatgaagctgaacgatttaccgaatatgatttattggattttggagagtttgaagaacttaaagaaataacattaataaattttgacggtgataagataacccttcaagcctttaatatggggcttgaaattgaggacaccgaagaaatcgatgaagaagatgaactgctatacataaaataaatgattttcttgactctgctaatgcagagtttttttgtccacctctcccccactcttggctttgaaaggatgtgattattattgagtcaacagttgagaattgtagttactccagttgccgacacctccgctcaatcagtcgagcaaattaacaagcagcttaaaacactacaatctaagttaaactcccttcaactcaaaacgaatattgatgcttctgctttaaaaaccctcaaagaattctcttctgcagttgaaacatatcaaaaaaatctcaagaattacaaccagacagttaaagaaacacaaaccgtcattaagaatgctgatgggacaactgaaaaaaccattcagcagcacaaaaagaatggtgaaatacttcagcgagaaattaagacgattgataatcgaaatcaaaagattcgtcaagaaactcaagaaacagcaaaattaacctctgaaattcaaaagcttggccaagctcaaaagataattgaacgtcaaaatgctcaaggtatcaagacaggcactactcaaaaaaatcgtgatggttttaaggatattacgtacaatctcgaccaaaatgggaatattaaaaactcaaccactgtaacaaatcttgatcaacaaagaaaagcaatcgaacagcttagagtaagcttacaaagactaaaagagcaagggcaactgtctgaagtcaccctctcctctcttggaagaaaaattaatttagctcagtctacagaacaaattgaagcactcagagtcaagcttaagactcttgatgacaagtcagcagcagttgcaaagactaaagagcttgaaaggcagttagaactatatagaagacaagcacaggtaaatactcagaacctgcaaaacagatacggcagctcattgagcaatgcaagtaatcaacagcttcaacagtatttgaattcagttaatcaattaactgcaaggacacctaatctaagaaatcagatggctagtcttaatatgcagtttagggaaatgtcctctaacattgctgctactacaaggcagacaatgggttttgttgagcaattaggagtcgctgccgcccgcataccggtgtggtttgctggtatgacaatgttcatggggccaattcgcgggttgcagtcgatggtcgatcaagttattcaaattgacacacttatgactgaaattcgaagggttatggatgaacctgattataagttcaatgatatgttgcaggaagcagttgaaatgggagatcaactttccaataaaatttcagatattcttcaaatgacaagttcattcggaagaatgggatttgatgaaactgaactaggaagcattactaaaactgcagaagttcttcaaaacgtatcgaatctgtccgttgatgaaacggtcaatactttgacaagtgcaatgttaaactttaatgttgccgctgaagactcaatatcaattgccgattaattatagtcgccttatatagtaatgtataagtgaaaaacccagtgaaccctattgctcaggggtgtgtccttttcacaggatgctaacggtggaactctaagggagaaatcctatgacaataccgtgccaagcctattttaggaaggtgtaacgactagcctttaaggtgtagaacagattttgagctactgttcgaagtgctgggcatcccaatgggatgaagatatagtctagtcccctacttaagtatcgggaaaccgagggtaatattcgaaattgaatgaagtcgacaacaactatgccgttacaacacaagacctggctaactccataaggaaggctggcgcgaccgcttcaaccttctcagtggatttaaacgatttaatcggatataccactgcagtggccagtaccactcgtgaatccggcaatatagtgggaaatgcattaaaaacaatcttcgcaaggatcggaaacaatgaaagttctataaaagctttagatcaaattgggatctccgtcaaaaaagctggaggagaagccaaaagttcaagtgaactaatcgaagaggttgccgataaatggaattcattaagtgatgctcaaaaacaaaacacaagtattggtgtagcaggtatttatcagctttctcgattaatcaatagtcgcctagttaagtaattagctagtgaaaagtcagtgaacctaatttagggtgtaatgtgatcgcttagatttaagtaggaaatgacttattaatcatattgctaacagggaaaatctaagtcagagttgatatgatgaccctgtgccaagtatttgcatcatgctgcgaagcacatgcaaatgaaggtgcaacgaccatcccttttgggagtagtttgcaggtgaaattcctgcttacgaagcgctggctgccctttagttaaaaaagaggcaaagatatggtctactccgtttaaatattccgaaaggaacggtacaaaggttaacgcgttaatgaacaacttctcgattgcccaggattcggcaactacggctgcggaatcaaccggaagcgcatggaaagaacaggaaaaatattcagaaagtctccaggcaagaataaatcgattatcaaacgcgtggacagaattgagtttagcctctggggatgcagtagtttcagatggcatagttgcacttacagaaactctaaaagaccttgttcaaatcggaacaggtataacaaaaacaatcggactccttcctcaagtttttggcattgcaactactgcagtattactctttaacgcttcacttagaaccggagccatagctaatggtaacttattcttgaggctacttaacaacttccctacatcattaactgccttctcctcttccatgactggagcagcaataagagcacgctttttaaatattacattagctacattaaaaaccaccgctcgaacaacaatggcttttcttgcaggtgctgtactgcctatggcagggttcatggctttaggctttgtaatcgaaaaacttgtctctgctttttctgatgctaaacaagaacaagaaaagcttgcagagtcacaaaagaaaagcgttgaagcaataaccacaaataaagaacagaccgatcagttaatacaaaaatataaagagttgcaaaaagcaaaagataacggttccctctcccctgacaaggagcaagaatatctacaggtcacacaacaattagctcagacgtttccaaatttgatttctggctacgactcccaaggtaatgccatcattaaaaataacgaagcattagaagatgctataaaatacaccaaagaattagccgaattaaacaaaaaagatatccaaactggcgcaaatagcaactttaaagaaaccctgagtgatatcagcaagctgaccgatgagatgaaagagtatcaaaaagttgcagaccattataagaacaacgatcggccattctgggatatcttcgacagcgacagtgattataaaaattttgggattaaagctgaacaacaagctcttcaagtcaaccagaagctatctagctcacaagctaaacttagagagcaagtgctgcaaactgttgacgcttataactccattaaaatcaaccctcagttaaccaaagatatcaacgaagccttcaataaaattgactttagtaagatgacttctgatgaattagagtcgttttccattaatgtttcaaaatacatggatgacattcagaaagcattagaatcagggaataaagttgatttctcaagagcatctcaagcacttcagaatttaattaaccaacaaatcaaaggtgctgatgaagctgacaaactttccttatcttatgatgacctaaagaatgctgtagactctacaaaaaatgctgctgattctgcaaaggtcacttgggatgaaaatggtgaaggggtaaacgaattaacaggagaagtcgaagatttaagtcaaaagctcaaggatgctaaaggcgatctagaggcaataaaagctgtaatggacgatttggtggcttctcagcaaacagaactagctatttctgcccttcaaaatgaagcatatgattcttttgctgactccatctcccctctcaatgaactgcttgagaaaatggctgaaggaaaaagcatctcagctgctgaagcaatgaaactggttcaaaaagaaaaagacttggctggagcaattactgttgaaaacggcgtagttaaactaaaccgagacgcaatcataaaactacgtgatgcaaaacttaaagcatacaacgacatgcaaaagtcagttaaacaggatctaatcaaccaggcaaacgcaacagtaaagaaaataaagaactatggtttagaggtcaaatcaatccagactgttgccgatgcgcaagccaatctttccaaaatgagaaaacaagtagacactttaatggaaagtggcaatatccagatggcaatgccaatcattaaagaaataaacgagttgagcgacgtcactggacagttagaagatctggataaaatggctgaactggccaactcatctttaaacgaagttggtacgtcccttgagaaatattctgacgaacaagagaaagccagcaaagaaactgagaaatccaaatacgtcgttgataaatataaagaagcccttgaaaaagtaaatgcagaaattgagaaatacaacaagcaaaccaatgattatcctaaatggtcacaaaaatacagagatgcaatcaataaggaaatcaaggcattagagcgtaagaaaaagctaatgcaggatcagattaaactgctgaaacagcaaattaaatctggttatattcctcaaactggacttgttacctcctcttctggttcttcatcaggctcatattcttccggaggatcatattctggcaaatactcttcttatattaatgctgcagcaagcaaatatggtgttgaccctgctctaatcgcggcaattattaaacaagaatcaaacttcaatgccaaagctcgttctggcgctggagcaatgggtttgatgcaactcatgcctggtactgcaaaaagtctaggtgtaaaaaatgcatatgatccctaccaaaacattatgggcggtaccaaatatattgctcaaatgttaaacaagtttggcggtaacatcgagaaagctttagctgcttacaatgcggggccaggtaacgtaataaaatatggtggcactcccccttttaaagaaacacaaaattacgttaagaaagtactctccaactacaataaaagcttatctacagcgacatccaagattgcaaattattacacgagcagcaacggatttagggtaagctctaaatttggtgcaaaagaaagtggtctccgctcctcccctcacaaaggaaccgacttcgcagctaaagccggaacacctgtaaaagcactaaaatctggtaaagtcgttactgccacctattcaaaaacagcaggtaactgggttgtcattcaacaggatgatggaacagttgcaaaatatatgcacatgcagaaaggtctcaaagttaagaaaggtgatgttgtatctgctggccaaacaataggtaaagtaggaagcactggacactcaacaggaaaccacctccacctacaaattgagcaaaatggcaaaccaattgaccctgaaaagtatatgcagggtttaacctcagatctttctcagtctgaagctgaaagacaacaagccctttcacaggcaaaatcggatttaatcggtttgcaaggtgatttagatgcagttaatgatcaaattcaagatctgcaatacgaattggttcaatccaagcttgatgaatttgataaacggaaatctgatctagaagtcaaaattgctcaaaatgagtctttggccaaacgctacctttctgacagcaaagaatttcgcaaatatacaaatgagcagaagaaagctgttgatgagcaacgcaaaattcaacagcaaaaaattaactggatcaacaaagagttaaaaacaaataaaaaacttaactatgctcagcgcgatcaactaagagaagagctgaaacaggctaaattagacctcatctcccttcaagatcaagtcagagagctgcaaggggaactaattcagtcacaggttgaccagaccctcaataatattgagaaatctgttaagaaaactgaggctaaacttaaagatgttgatatcaaaattcagatgactgaagatgacaataaaaaagtcaaatactacagtcagcaagtaaaattgattcaacaacagcaaactgaagccaaaaagtacattaagcaacttgaagcacagaaaaaggcagccaaaggcttccctgacatccagaaacaaattacagaggaaatcgaaaactggaaggataagcagaaggattacaatctagagctttataacaccaaaaaggctattaaggatatttataaatcactcgcagatgaagtcgtttcaatttataaagaaatgtacgaaaaaatgcgggatattgagctggaagcacacagaaaagcaactcaagatataatcgacgaaattgacaaagaagatgacgaagccaagttccagaaatcccttaaagaaaaacaggatgccattcaagaaacaaaagacaagattaacaaactgtctctcgatgattcagatgaggcaaaagcaaaactaaaagatttagataagcagctccaagaacagcaacaggatcttgatgaatttttaaaggatcgtgaaaattccaaacgtaaagaagcattacaggatcaacttgaaaaagatgagaaatcaataaacaccaagtatgatgatcttgtcaacgacgaaagagcattcaaacagcttgaggataagttgatgaatggaaagattaccgatattgccaagcagcttaatgagttttcaaagttcattaacagcaatatggagtctattggtaagagtatctccaacaatctaattgataagcttaaagaagcctccaaagctttaaatgttgtggtcgcgggaaacaccacaggtaagaaagttgcctcttttgatgtaggtggctatacaggaacatggggtagttcaggaaggcttgcaatgctccatgaacaagaacttgttttaaataaagctgatacaagcaatgttttgaaaattgttgaattaaccaggaacatttttggagatattcaaacaaaagctacactcccttcccctaattctgcatctaatcaaacgacaagtaaccaaacatttaattttaactttaatgtagataagatgactggctctaaagatgatgcaaataaatttctaggtgaagcatttaacattgtatcggctagaggagttaagatctaaagagtcggcaaattgtcggctctttctttttgagaaaggatggtgatacatcatcaatgataagagaaagcctgtacttcattttcgggaacgaaaaatccacagatatgggtgttgaaaacgtcaatactgatggagggttagtcgaggaaacatttctagctacttcatcaattaacgaaacctccatcaaggggaatgatacacccttctatgaagggaaaaaacgtgatccaaagcaattcaatcttaatttttatataaaggatcactggaatcaaaaaagaatcgctaacattaaacgatggctggatgttgatacataccagcctttttctttcagtgacaaccttgatattgtttattacgcaatgcctgtagatgcaaatgatttagttcacaatgcgagcaaggaaggctatataaggttaactatgaggtgtgattccccttatgcctacagtaggactataaccactccgtggtacgatgcttctaaggaagacattacagttgagattaacaataaaggtgaatgcaccattattccatcgtttaaaattcaaaagatcggtaagggagatgttaaaattgaaaatttaagctacttctcctccccttctgtattcaccgatcttgaagatggtgaaatgataacagttactggagaaaaagaaattgtcgaatcatcaatatacggcgatgaacgttacgataactttaatgatgagtaccttctacttggttatgggataaaccgtattagagtaacaggaagatgtagaattcttttcagttatagatttaaatatcgttaggaggtgcctttactgtttcaacaagtaacgcgatcatttaatttaagaaagccgaaactctctcttgctaaagctaacaaaaagaaaatcgcaaatcttgtcgatatctcaaatgttaatttgacattaagactaggcgaaatcaatgagttgtctttcgcagtacctttaaaaattgaaatagacaaacaatgggttaagaatccgcatctcaagcgcctgaaattacgaaggctcgttaagctttctgcctacaatttcaaagatgaatggttcattattaaaacaaagcaaaaaactggtgcagacaatgatttagtgacgtttacgtgcatgtcacttggacatcaattgagctatcgaaaagttagaagatatgaagtcacttcctacaatatgcaaaaggttacaaatgactgttttgcaaacacaaactggaaagccggatacataaatcctctattcaatgaaaaattccgcagttttgatattacctcttctacaaagttagatttcctctttaaaatatgcgagacattcgaagctgtccctgtatttgacaccatagaaaaaaaggtgcatttctatactgaagatgaagtatcaaattacaaagggatgagattaaaatacggtcagtatttggattcgatagaagacactgaggaacttgaagaagtctgtaccaggctttatgtaactgggaaagacgatctctcaataaacgctgctaatccaactgggcaagcttatatagaagatttcacatattttctttatccatttgagcgagataaagatcgcaaggtgataactcacagttacgaaatgagcgatgaattatgtcatgctattctcgattttaatgagttcatcgattctcaaactgaaacattctcttcccttctctctcgacaaaccgaggaagaaaagaaactttcaacacttaacgcagaaaaggcaaagcttgatttagaatacaaaatcattttagataaaattgcagtagcaacagaagcgaaagatccaactgccgagcttataaaagagcgaaaagctaaagaaattgaaattgaatcgaaaaagaaggaaattgaagaaaaagaaaaactgattaaggacattcaagataaaataacccttttaaaggggaaattgacgctcgaaagccaccttaatgatgaactcaaggaagagttggcggaatttataaatgagcaggaatgggctaatgacaatctttatgatgaaactgatctttatgaagccggacttgaggaaatgaaaaagcgcaacacccctccaatcaatattacaatgagcatagttaatttctttggaatcttaagtgaacatcaaaattgggacaggctatctatcggagatattgttcgagtacagcatgatcgccttggtattgatgttaaaacaaaagtaattgaaatgacctttgactttgaggctaataagattaatttgactgtgtcaaattcaaaacgagttgaaactgttaaagaaaagatggtcaaactcgtttatacagtcagtcatataaacaacgactatgcaattagaaaaattgactggatgaataccgctgagaattttaaaatccggaatgatcgaatttccgccccagttgcagctcctaccgtcgcatcagatggaacggcaattactcatgaactgaatgacaatggttcagtagatattgttttaaaatgggaatacccatattctgatgaggataaatacaatatagacggatttgaagtttatctctactccagtgaatcatctgatgaatatgtttttggttctaagatgagccatgaagaaatggttaatgtgaagtatgacaagcgttcctacaaattcacgggacttgcctcgaataaatactacactgtaggtgttagagcctaccgcagagttgatgcagacattgagagaactggaatcattctctctgacattgttcagtcaaaacacattacagaaaacccctacctcccttctgctattgcagaagtcaaagggcgagtaaatggactaattcaagctgtttctgaagaaagaccagaaaatccagatgtcaacactgtttggatcaatcctaaaactaataaacaagaactttacgatggtgaaaagtggattgagcaaacagtatcttcggcagattcgttaaatggatatagtgctgagatagcatcctctcctaacacgatagctgttcgggatgaaacaggaacaattgatgcttcaattacaggaagcgcaactcaacttggcggctatgatgcttctgcatatgttcttaagtctgaactcccctcttctcctcaatacgcaacaggagagtacattggtgacggaaagcaaagcagatcaatcggattaaactttatccccaatacggtaaagatttattctacatctccaaccgattcaacactcattattcaaaacagcttaggtggttattccatagaaaacggagaaataggctcctatctaaaaggcggcgataaaacatacgggtcattgaatttgaattattttattactggctcagacagtaacactcgcggaaacaaactaaatgttaaatatatttgggaagcatttaaacaaaattaatatgggggtgatcctttggaagatactccaagattttataacgaccctattctatctaagaagagaaaagggtcgattgatgatccttaccagctttacaatgaaacacaggtgatttataacggaaaggctcaattaacagaagtccccaacagagaaatgagagttgaagtctctggtgacggcaagctatggaaagaaattgaagatggtgaattacaagacgactactttaaggttgattaccttaatggagttgtcttttttaatgcgtcaaatgaaggaaaatctcttcaattcaaatacagcggtgaaggtgcttattatttccctggttctcgtatttggacagaacgtgacggaaatgaagtaactgagacattagattcactaacagaaagagctcgtaaagctactgaggaatcggaaaaagccacagaagaatccaaagagattactaagtggacacgagctacgacatcagattatgaaaatgtagttgaaaacacaagaaaaatatacctcccaatggtttacacatacaaagatctgctagatacctacccaaatcctcaaattggttggacagtcactattagagaaacgggaatcgagtatcgttgggacggttttgattggatcaacattagtatctccgataaattcgatggctataacgttgtttctagctatgttgagccttataacattcggactgtttggttaagaaccaatacatcaccaagtaaaaaaagggttaaaccatcaaaagatgccccagaaactaatttgatctggattaggaaagagtaaaaaaggaggaatgttatgtcaatccctgtaaacacaatgggctatcatgatgaagaattacagaaatggattccaatagacgccgtaggattaaaatctgaaaacaatagatataccgctgatgatattaaatctttagatgatataaagattgacaatgataatcatgtttactcatcagctaaagaaagaattgactctgactttctcaaaattaatgagaaagtagataaattggataaaggcgttgataataaaataactaatctggaggaaataatcaatgaaagctccagctccctaaataaaaaaatttattttaaaaatgctcttagttatggagcagaccctactgggggaaaaccttcggccgaggctattcaaaaagcgctggatgatattcataacgaaggcggagggcaactttttattcccggtggcaaatatttaattgaaaaaagaatgtttgtctatgaaaatactcgggtcactatggctcaaaattgtattctgctcagaggatgggcaggtggattttttgctaatggaacgccaactgataaattcaaaggttatttaggaagaggaaacataatcattgaaggcggtattttagatgggaattatgcaaacattgataagtaccctacgagcgctatggattccataattcttggacatgccaaaaatattacaatagacaatgtaacatttaaagatacgataagcgcccatgcgattgatgccaatggatgtgataatcttcgaattacaaatagcaaatttactggttttattgatcttactggacagagaaactactcagaggctattcagcttggagaattcattgaaataggacttaatcaatttggagaatttgatgccacacctaatacaaatgtttatattgcacataattattttggaaaatctaaactgttaggtggttggggatgtgctatagggaaccattatgccgtttatgatgtttttcaaagcaatatcaccatttttaataatgttatcgaggactgtggatttgctggagttcgaactttcaaatggaataacgttaaaattacaaacaatgtgttcatccgtaataaagagtgtgtacgtatttcacaagctgcaggcggaattgaaagctctaaaaatgcagatggtgtacagatgaatcgaccacaaaatggacaaaacgtgttagttgaaggaaatgacttttacgattatacatccagtggggttgttgcgtttggtcaaatttataataaagaaatagcctggaacgatgaaattcgcatatcgggtaattactttaaaataaaaggacaagacattggcaaatacaatgatgaacaggcaataaagctagtctttgctagaaacattttcgttaacaataataagatttacggtggacgaagaggaatgtggattgaaggttgttacaacacttttatttccggcaatggtatatcaaatgtcgatactgaagcagtataccttgctaagagtagggacacttcctccactgttacaaagtcctaccatgtatcaattgataggaatgagatcaataccactggacgaaacggtatatttgttcaaaaatgtgactactttgatgttagagataataatgtactaaataataataaagaacaaagtagcgaaagaggccgtggaggaatttatgttgagaatggctacgatggaagaatagaaggaaatcgaattagaggtgttgaaaaagaattcgctattttagtagaagctgaagctactgaggtgaatgtagccaacaccaaaggaactggccgtatcattgttctgggtgagtccaatttcaatggctactatgggacgaacaaagatgattacattcgtaaaataactactaagagtgaatcctaactttaggaggtggttaaattctgaataaaatttagatttcattcaaactacagtttagcaaaacagagaaaacaagagcatatgtgagaacgagagagattggtaattagccagtctcttttttaatgctcaaaaacaaacaggagtgatttaatttggttaaagtcgtaaaaaattttgtgaaagtcaatcaatacactcgtccaggtctaaagctttctggtgttaaaggaattgtaatgcactggactgcaactccaggagctagtgcgttaaatgagcgaaattatttcaatggtacatgtattgctgataaacgttatgcttctgctcattactttgtagatagaaatgaagcgcaatatattattcctgaaaatgaaatggcttatcatgcacacgatcaaaaccgctgctttgtgagcttcctaaaaccaaatgcgaaccaaacatcgatttccgttgaaatgtgcgtggagaaaaacggcaccattcatgatgaaactgtgcagaatgctgctgaattggttgctgatctttgtaaaagattcaaattgtctacagataaaatcgtccgtcattatgatgtaacaaacaaaagctgtcctgccccttgggtaagtgactcaagcaagctggcagcatttcgcaaaaaagttgatggactgctcggaaacaaaactgtttcaaattctacagctccctctagtaaaggttcttcctcctctactgctgcaagttgctccctgaaatcaaaagttaatggtcttcgcttctattctaaaccttcttgggaagacagagatgttgttggtacagtgaataaaggctatggtttccctactgttgttgaagaagttaaggttggaagtgcttatcagtacaaagttaaaaactctaaaggagcaacatattacattactgcatctgataaatatgttgaagtttcaggaagtttgaagactgcctcctccccttctaaatcaacagcatcaaaatccagctccggttcttcttcaattaagtctgtgggaaaaattaaaattgttggagtatcaaatgctgcaattgttatggacaaacctgatcgcaacaattcaaagaatatcgggacaattaaactcggcagcaaaattgacatttccgggtcagtgaaagggaaaaataaccctaaaggctattgggaagttatttacaatggcagacgcggttatgtttcaggtcagtttggcacaagagtctaattgatatttaagtatcattaaggatatctgttgattttaattgatcaatggatatcctctatttctactggaggtgaacaacgtgggatgacgtacacctcctttattattgataaaggacggttgaatttgtggctgaagtagatgtaaatacacggttaagtgtcttagaagaaaaaatgaaaaatcatcaagaaaaaattacaaatttagaagcaagaactgaagacatgagtcgactaacaactcttatggaacagcaaatcgaaataaacaaagatgcccaaaaacaatcgcgcgaacaatttgtcacattgactgagatgaataacagcttaaaaaatctaagcaaatcatatgaaaaactcgacaatcgagtgggcattctggaacaatcagattccaatagaaaaattgatccaggtcaattcggtaaagacctcatgtacaaggttttacctactgtaatcgcaacgttagtcggtgcatggttgcttatacatttcggacttaaataagaaaaggagattgatattatgaataaaatcaactggaaagtaagactgaaaaagaaaacattccttgtaacaattttctctgcaacacttttatttgttcaaacaattgcttcagcttttggatatgacataacagtatacagtgctgctctaactgaaaaattcaacgctatattaacattgttggttgcattaggcattgtagttgaccccacaactaaaggcatctctgatagcaatcaagcaatggaatatgaagagccaagacaataatagtaaagggctgatttaatgaaaacgactgttacatactccccctatccatcaaacttttcagaagtacatattaacaccggagaagaaaaatcaattaagcttagtctcgttgcgtctcctcctgatatccctcctcagaatgattcagaagatactgaagaaaacgctgtagagatttcatcagccatattggctgaccctagtttaagaatggaaatcaatgatgggatttcgactgaggaattgatgacattaaacaaagaggatgctaaggttttagtgcaggtactcagagactttcttaaacaaatgtaatatgcttgatctccctctgagcacaataataaaacacatgcttccgttcgatatatccaatgtgagacaactctttagaattgcataaaagacatacaaaaaagacaaccacaatttggttgtctagtgtataatattcattgtacatataagctttgctcactcaagggaagtcttgctcaccctcattggaagggggtgatgcatatgacaacatttgaaacaatctcattaatgattgcttttggcatgttaattgccgtgttgtcaaagaaaagaaaatagacctcccttgagcctctaaacttaaagggataggtctatcatcaagatcctatgagcaagccccttggtgggctgctttttgtacaacgactcgactgttagccgcagtcgggtcttttttattttatgctttttacaaattaataaaccattgcaatacttttgtttaatgaagtattcatgaatacctcattctaaaatgtaatgcattacattaatgattataacatttgcaattgactataatcaacagtatacttttcgtcaaatatgcccttgtttttcattaaagaaaataggctatccttctttgtaaaagatagcctaacatatattgctttaatgatgttttttagtccttaaagggactgtttgaatcataccctttaactaaaacacgcatcagaagacagctttttcagcgacttgcacttgctcaccttgttgaactgctattttcccagtagacactccgaatgcaaccaaaccagctaagatgactgtagaagcaatggtaattgtctttttcattttaattcctccgtcacttttagaatttgatcccttgcgtgaatacatttttcaagatattttgctgcattcttgatatcatcggattttttgtagtagcaccccacttctagtgtcaattctgctacatcattccataaatccaacttttctaaaatgtcaagggaattcgttaacacactttcattgtactcatcgtataaggtgttaacaagtgtaagtttcgccaaatattccttatctccttctttttctgcacgtttcaatcctttgtcataccattcccttgcttcttcaatctgtcccgatttatacaagacatgagtaaggttatagattgatttaagtccatttatgctttggatataatcttgaagctgcaaagcatttttaaaacagtcttttgcttcagatagcatgtttcttcttatatagagtatcccaagattatgatatgcctttccttcagactcaggaatctgcttagcctttgcaaattttaaggcatggctgtaatgctcataagccgattcataatggaataaatcaagtttatttgcacccaagatcatttcactgctaattgatctatgtgcatagtcttcaaattccctgaagatagttagagctttttcagcataagctaatgagaagaaatattgatcaatgtaataatatgatatggctaaatgataataaaattccgctttttcaatttcatcttcaattttaaccagcttatcttcagctaatttgtaataattaattgcatctatgtacttctttttgaaaaacatatattgaccagagaaaaacaaaaaataatattggagcatatcatccgttttctgcatttcaggacttttccgaatcttctcaaggatttcccctgacgacttaaacatgtctaccgacatcttgtgacgcgcatctaagagattgtaataaaggagcaaattttgattctcctccatatcatccaacaagcaatcaatttcatctttcaactttatggcatcttcaatttcacgctttttaatcatcgtataccactggttaatcttattggctacttcttcatatgcaatttcagtcgttgtcaatcccctctcatcctttctctaaatacaaatcaagatttataatcatctgtattatcgcaaaatttggaagtctttaaaagcattttgttagatttatttgaaaattaaactcaagccttcaaatttccttctttctctcgtatcatatcaatacgttgagctttcccaagctttgtgaacagtaggatagcaatacctgcaatgatctcaactatccctccaacagcaattactcttcctgaaccaaaaactgttgcagcataaccaccaactatagctcccaatggaatcatgacgtaagaaatcatacttattactgaatacacttgtggctgatcttcatcatcaacagatatttggattatagtgtgctctggtacattaattgcactaattgtagctcctaaagccaaggcagccaaaaacactaatggtaataatgaattcattcctgtgacaaaaaaagcaatcccttcgactattccagcagttacaaataacagtccataacgattaaccttaaccttagccagaatatatcctaacaaaaaagctcctcctgctgtagtcacttttagtaaggaatgaatgatgggatctccacctaattcttcagctatataaactgcagaaagtgcttcccaaggcgcggaagccaaattagaaaaaacacaatagatagctaacgggaataaaatatgatgacttcgaacaagcgtaaatcctctttttaattttttgaagtatgtgcctttttgttttggtctatcgctttcagattcgtctgctccctttattttgtatttaataaaaagcactatgctggctgaaagcaaatacagtggaagtgtaattaacattgctcgcgctgccccaattgcaacaatagtaacaccacaaactgttaccccaacaagtcttacaatatgttctgatgactgcataaccgcatttgccttttgaatgaggttcccttttacaattttcggaatcaacgaaacactagcagggttataagacgctcctgtggctgaatgaatcaacatgagtaataagataaaccacagtggcgaaaaaccgctgaaataacaaattggaatcgcaagcatgagtagagctctggttatgtccgcaaaaaacatccaaaactttaaagtgtctaccttcattagtggagttatgattggccccaataaagcctgcgggagaaaagatacagctagtaatagagcagttccaattgccccttttccttcaaaaatcaaaaaccacagaattgtatttactgcaaagcagtctgctgttatcttcaccagcttagaacaaaaaaggaacgtgaagtttctttgccatacagtatcactattcattttttaagatccccccttaccacaaatccctcattcttacagcaagtttattccttaaggatatcctatttttggattgtgtcaatggagaattggaataattaaggtaatttttatttcggagataaggggtgcattgttttataatccttcaagcattcttttcatatggagctttaaagctgctttccagtaccgagaagttccttcttttattcccccttcttcggttcttatataataaggatactcaacaaacatatcatcacatatgacaacttcttgaattttcgtgttttcatttttcaagtatgaattgatacgtttcctcattgaaagaagcttttttaatttcctttcataataaccaatgagcttcttgtttttaattaactcagctttgttgactctggtttccatagcataaatacataaatcaataatgatttttttatgaatagcattagcaagttcatcagaaataatcggcctcataatcccatcaccttaaaaacgaatatatgttcttattatacactaagattaaaccaaacataaaaagccctactcaaaggacttttcacgcttaataacataatgaccgcggcctggttttttgatttcaggatggtgtttcatgagtccgctcataaaagttgtcatatttttaactttcatgcctgtttctttctcaatttccttacgaagccctgcccctctaatgccttctttatgcatactcaatattttaagtgctgcttcacgctgtatagatgttatagacttattaaagggttgcgaggcattgtttgtctgaatgcgtggagatgagcttttagactgtttcaattcttgggctgctgcgctaactaaatccatcaatgaagagctttctctgacttgaggaggattactctggtttttgtccaactcgcgcaactttgaataaataccttctcgttcttctctgagctctctcatgacaataatttctttatcgtttagctgctcaagcctcaaacgtaacgcttctcgttcattaaacataattctgcctcccaataatcactatttgattatagcttataggacttttgtgagtttaacaattgaattttaaatctttcaaaagatggttaaatcaatcttttaataattcatcatctaaccaaatagaaacaattccatcgtctccataaggttcaactagttcgtcttccagactttaaaaaaagtcctcatatgaagatgaagaccatcatcggatttttctcgatttaagcaaaaaagcactcaatcaaagattaagtgcttgagattgaatatattaaatcattcttcctcataccaatcttctttagcttgatttaaatattcccataaaaactcaaggaagttagaagccttttggtgatcatatccgctttgataaatccatgtaactacaggacactctccattatccattttttgagtatctaggcaataagcgaatgcgtctacatcaacgatcactacaatgtgatttggtaagtcataaagttctctatagtctttggtgaactctactacttcaggagatacaagtccatgacccaatatttcaacgccaaaagagccgccagaaccatagtttcttaaaaaccatttataactttcaggaagagtggtttgtaagtcattttcaatttttttgattttttcttcactaattcctcctgtaaaatcatggggagtagcatgtttgctgtcatttttttttatgaatttttccactttagaataaaccattgtttcatatcctctgctaagggaagttttatccccggtgtcactcccagttgtctattgcttcttggaagctatcttgtaaatactcatcaaaactagaatatctttcaatctcctttttgcttatgtcatcccatcttattacacaatgattttcttcagtattgagacaataaacaaattcatctacattttcaataactaagtatttctcaggtaaaccaaagtttctaaatctttctgtagcctcaactactgaagcatagccatctccttctacacccaaaacttcaaccccacatatacctccagaaccataagattttatgaattctttatattcttgtggaaatttacatcttaactggttttctgcatttgtgatatcttcgttggttactgctccgacaaagtcgccttcttcaatatactcatttatcatctttgatatttgtttattcataaattattatcacctcaatctagattttgtgatctccaaacccaatattttcttctaaagttgttgaattgtttgtctaatatctcattgtttctaaaactatctccattttttatcaacccatgcaaaatctttttgtattcatcatgtgtagtcgctattatttcaaccatatttccagcttccttttggagtatgtgatgaagctcaatttgagattctaccccatttttatcaactgcatatggcgctctacctttctgctctttattcgataacccacagttacatatcattctcattatttttttataatgtataggaaatatatagttttaaccatctgtttttttcaattaactggaacgaaataccccctactcaataccgagaggggggctaacgttatttttcatcttttatttgactctagatgttgttctaaaaatactttatcatcctgattttttggccaaagtccgagatacttatgcttccaaaggattcttcttttatgatcattcgcatctgacaagtcatcataattatagtcaatgttgagttctccgtcattttgaatcatcatcgttaaacttgtccaaggctcgtgatcattgttccggaattcattccatagctcttccaaattgtctaataattctctccaaagattgcgataatcacttcgtccaatgttgaaaagttctgggatatcgtgtccatgaactggtgtatcctgtcctttaggataataataaaagaaacctttacggacatcttcagtaatctcgccataaataaacactcttgaccactcttcaggtatagtctctactattgtctctgcaattttttgatataaagggtttaatttattttcatccattggctatttacctccaggcttatttttaaactctacaaatacccaatcttcattatcaattcgataatcaatatcaaagcttgttggtctttgcgaatctcctttgtatactgggtgtatttcaacctctaccgttttgccatttccaagttcttgcgaccacatgttctcaagctttttccattctcctttatttaagttaccatccattgggacaaggttgtcaagctttccagacccttcaaatatacttgcaatgagatgaccgccttcatcggtttttaatcgatcctcgcggccgacaattctttgagcgtatttgtttctctttgctgctcccaaattcagtttgcctctgacatttgtaatacgtcctttatgatctgttttataagtatagcctacaggcgttgtatactcaatgttcggttttaatacctttcttcttttcactcttgtgaaatggtcgccatatttcactttatgtatggtttttgagtctactttgatgtctgttttcgtttttgaggaaccacccgtaaggatgctgaccattcgatttcttgcttgttttgcttgatcagaaatctttttggtttgttgaattaatttatttttcaatcgagacccatccatagtgttgaatggaactttgcctacattggccatagctagttggggggaagcgatttggactttcggaagaagatttttaatatctttaaaatccctgacaactttatctgctgctttcttacctgcctttttcgcactctttatgcccttgctagctgtctttttagagacatcctttacctttgatgcggcttttcccatcttgcctgccttagccaacttgctaactttatctacaccttttgttccgacaatggatgacgcaaccattccagtagcgtatgtaaaccatctcgccctgctttctgcatcaccattgatgacgtccctcacgaaggagtcctcgatatctttctttataatttcaaaggtttctacagggtgagtgactgtgtaggcaataccctctagcgtctcttttggattggtaatggtatctcgtattcctgtcactgtatcgacggccacatcttcaattccttcttcaatgccctgcttgatacgccccatgataccactttgttttcgttttctatttatagtgtaaaaatagtaatactgctgcttttctgtcagattttcaattccaatctcttttgcaatctcaacaaattcatcaggatcaatgacattttcgagcttcttctttagtttagcaattttattatcctgtttgctaacctcgctaacttctttttcaagctttgatctcttatccagcttatccaacatgacgcccatcgctgtgtcttgtccaccacgcaaagcatccatctcatccggctttaaaatagatcctttttgatagctcgcaatctcaatttttgggccagtatacattttctctagtctggttatgtatctctgcatcgtctcaaggtcgttttcagcggttttaagagcgcttgtctgttccctgtcgaacgtatgcagcttttcaattgtctgattgatttcctttaatgctttcctgttttgttcatgaaaatcgctgtcattcaaatccggtaaatcaacgatatgactgacttttgcgattgtggcgttggccttagaaaccaaatgtttcgttgttcgatcagcagcatttaagccattctctagttggtgttcgagaaaggactgggaaataaatccgttctggtttggttccagggcgttcattgcacttttcattttcttcagcgtagaactgtattcctctataaaggtatcatagaactgtagaaaaggggtgtgacattctttgtaaaaggcacggatcgcgtcgccgccttttccttttaaggcatcattaagtgatacgatatcctcaacgctttttttgacttgagcaaattcgtctgactgctgttttaattgtttcagcgtttgatcaatggctttgtgcaacgcctgcacgtccaaagtcttcatggcactctcctctaatactaaagttacaatcattttagagtttaccactttatagaagggaattggggaataaatcctgactatccatgaaaatgaatccttggaattaggataaataacctattcagattcaaaaaagacgaccagaaatctggccgtcatgttctataataattctccgctgtgtaatatctccactcccaaaatggctgcccctgacacataacataccggtctaaaaatatctcaaaattcaaatgaagaggcttatactccagaccatcctcaagtaaataaagatagttgggatctttatctttaagcttgtctttgtcaatcattagatcgcactcttccaacaaatgtccaattggaataccgttaacatccgcataaaattcctcatctttcagttctgtatcaatttccttgaggttaaataaatgcagacctccaccaatattcactccatctaaaagactatcaaaaattctggctccattatgcagagttaaaaattttttataatcatcaggaagagataattgatgatgtgtttcgaaagctcgtatatctctttgagaggctccgctgtcagagaatgtgacaagagtgtctgtaatttcaccttcagagccaagaatcctaatgactccattttggtctaataaactctttaagccattcacggtattctgaacaaaacttgtcaagtgcatcccctcgcattatagattatttatttctccaccaacgtgtgactttcttatgcacatttttttgaagtggaaacaaattgctcatatgattacttccaccatattgaagaggaatgacgtggtgaatttcgtaaccgctccaattccattttgggtttccatactgtttagtataccatgtgatgaatttatttcgtaagttagaatccctcttctctctctgatcttctgggacaaccttcatttgtgcatcggcaggagctcccattacttctttattgtggctgttcttaacatatggatatagattagctatcttatttgccaaaaaaggagagctggtttgcgcatcgtaggatggaggtgagtctttccatacaacgattgctgaatactctctcttatagtagcttgctgctccaactttaaagctttttgatgaggcagccccaggtttaatttcaataagagtgaatttcttcttgtgatctaagacctttacatatttcccgttgtaataacgactcgcaaaaaggtcatgagaagcattaatataaactggtttttctcccataactctaacaatctttataacagttgtaactgttctggttttttctttaagtagcgtttcaacttgaacctctacaaaacctggcacttttccctgaactttgtgactagatgttttttgctgctctgaaggatacaaattaactgtattgtttttaacagcactataatcagaatgatataggtagtcgtgattaaaattttttgagatttggtcagctttttctatctgtttttctgtatttacttcttcaatgtctacaagtttagcatttttgtttttatcaacttcaaatttgagaatttctttagagacagaggtaacaccatcctctttatcagttgaggcggctttagctcctaaagcttcaaacccaaacaaggcaactaacactaacagactcagcaacatactctgaacaaattttttcataatggtttctcctttatcattgatttagatctaacctcttatgaaagttctaaggtgatttgcaccgcttattttacagataatccctccttccgaaaaagagagtaccattatacctaaatttttacaatacatttcataaacatttaaggttatatttatttaaaatttcatcaatgaattgtaaagacctttgtgctatttccaataaaatgaggattttatctagaataaaaaaagaaaaacccttaataaataagggtcttcagacatcattcaatgaattctatttctatttcaaatgggtactcttttctttgtttattgcgtgttgatttatttaacaactctgggggcaaaactctcgtgtatacaatcttgcttataaacgtttttaaggattgattgacttcttcaggctccatgttaggtagtttctcaatcagctcaataatgttcattaaactgtttatatgatcgtttatatcaatattgctcattttttctttcaaatcagcaatcgctgactctgtgtatttaatctcatcaatcaacccttgttttttgttacggatttcttcttcgttaaagatgccttttaaagctaagtcaattaacttgtcttgctggtcgtttaaatcttttaatttcctttcctgttgttttattttccgtttgatatctgtttctacaccagcttccttttcctgttgaagcctctggacacttttcttcagcagacttttaaagttaggaagtgcttttgcgacctctttttcaactaattcaagtttgattccgcgatttggacatttttctccgttatacaaatgataacaccgttgaatcacatagcctgtactacttctgtcgtcaaagaatatcctcatcttccttccgcagactccgcaataaattagatcctttaacatagtggttccagtggtactggcaggtttttcacgtattacagctgcctgttttgctctatttaaacgctccctgtttgccctatcccattcatcagggggaattattgctgggtgtgcattttctacccgaattgtttcaacgggctcataaacaaacttgccatttttttttaccttttttcggtcattaaaaacaattgtgcctttatacgttggattctttattatccttttaattgtaggtagctcaaatgcctttccagttgctgatttatacccttcggagtttaagatgtctctgatcttaaaacttcctaagccctctgagtgaagtttgaatatgtacctcacgactttggcttcttcttcataaatttcaagcttttttgtttcattgtttcttctgtaaccaaaaggaacattcccgctgacgtgaaggccagctttagacatttgttttttgtttgccttacttcttttcccgatagtgccatgttcatgacttgaaatcatgctaccaacatcataaagaagtctgtctgtttctgaatttgcaagatcgtaggattgataaggggttaatataggcttgtcataatcgatacagtattgtttaactgtctgacttatcagtccattacgtgatagccttgttaattcaaaacaaagtatagcgtcaaacttttcaatgtcttcaagaagccgctgcaactcctttctttgttcaatttcagacttccctccgctgattacttctccatactcttcatacgtatatccgttttctttacagaattcaaaaagaatttggcggtggttctcaagggtttcaacattttcccctcttttttcctgacttattctcagataaattgcaacatgttttatatgatcaaatgttcttttcataaattgttccctttcctggcaggtagtgctattttattattaataagaataccactacgcagagggcttttcaacacatgaaataaaaaaatgcagtcggcactgcatagccgctcgtgtggccgcgcaagccttcaatgatttcaagcccctttgatacaggcgctcggaaatggccgattccttcagacaagtcgcattgataaatataatacggacggactctgattttcaccaaatcatgcatcagctttttcataatggaaacgctgtcattaatgcctgccaaaataacggcttgattgccgaccggcaccccggcattgaccagcttctcacaggcttccttcgcttccttcgtgatttcaatgctcgtgttgaaatgcgtattcagccagacgggatgatactttttcaaaatgctgcatagcttgtcggtaatccgctgcgggaagacgactggggcccttgtgccgatccgaatgatttccacgtgcggaatggcgcggaggtttttcaaaatatattcaaggatctggtcgttaatgaggaggccgtccccgcctgatatcagcacatccctgacatcaggcgtatcccgaatatagccgatcgcctgatcgagctgctttttcggcacgcccatgccgatttgcccggaaaaacgccgccttgtacagtatctgcaatacatcgagcattgattagtgacgagaaacaaaacccggtccggatagcggtgggttaagccggggacaggcgaatcttcatcctcatgaaggggatcttcaaggtcgtattttgttttgtgcatttcttctgcgagcggcaccgactgcattctgatcggacagcgcggatcatccggattcatcagtgaggcgtaatacggcgtgatatttaaagggatcgtctttgtggagattcgcaccccttcttcttcctctttcgtaagattgacgacttttttcaaatcttcaagcgttctgacggtgttggtcagctgccatatccagtcgttccatttttcctcgggaacatctttccaaagctcaatatccttccagtgccttttcggcttaaacagaccgttttccatcttccatccccctatcagcattttccctatacttttcaggttatgtgaccggcatgaaaagtgtctcttcaaatgtaaaacccgcggaagaccactttttaagaccggcttaaatttttgcaccagatgttcatattctcaatgcttctataaatgaggcagttgttcaaaagccggcccctgtatgagtatgataaatgataaagactggcgttcattccgaaagaagccgctcttgcgattgaaaaaacgcaaaagatgcccgattgcttcaagtcggtttcaagctcggcaatcaaccgcctcgtcaatgaaaagcccctgtattccggcaggacggcgcagtcggttatttccgcattccccaaagcgggattaacgtctgcgcctgctgatgcaatgactttttcgccgtcaaaagcgaggtagtaaacagccccctttcccatcgcttccttgagatatgccgaatctgaaacaggtgcgggatatacaggaaagacgctgttgtagaggtcggcgagaacaggcgcatcaacagagacggcccgcctgattttaaaggaagcgttttggatctcggcgatgcggggtgtgctgaacagctctgccagcatttgatcctgcataagccagtcagcggtttttcgcctgtcttcttttacatattttacgaacacgtcagcatcatgcccgttaaagtatccgtcgattttcccttccggttcaaacgtccgctcaagcaatgcgtctctgtcagtcgttttggtgaaaatgataattttccctatatcatgtttttttgcttctttcagtatgtcgggaaaaaatgaacacacattgccttcataattgacaattctgatccttttgctgaacaagtcgacatccgcttcaagcgtgcagctgtcattgctccattttttcaccataatttaacctccgaaacggctgatcttttcacctttcataatcacaccaattcataataaacaggctgatgatcttggctgactggatcagggcgtctttttcaatgtattcgtttgcctggtgggccattttcgtttctcccggcccgaagacgatgacaggggtgcctccggcgtgcgacaatattccgccgtctgtcgcccacggggaagcttcgatgagcggagcctctgccgtgatggtttgataggcggatttcagcactttcgtcagttcatggtcttcagccaaatcgttaggaagccacatggcgccgaaccattctatatcaacaggatagtgcttaaaccattcatcatggtactgaagatcgttgagccagttttcaagctcggactggacggcttcaggggattcgttcggagcgattccgcaccttccttccagtgtcaccgtgtcggcaaccgacgaaggccaggcgcctccgttgatcgtgccgatgttgatcgggaccggaatcgggatattgtcatacaaagaatctgttattctcttattcctgacctgttcaagctggcggagcgattgaatgacaagcatgcttttttcgatggcgctgacgccttcatatcttgtgccgccgtgcgcagaaagccctttgaccgtgattctgaaccacattgagccctgctgtttaataaacattttcatatttgtcggctcgggaatcaaagcgccgtccgctttgtagcccctcattacggccgcaagcgtcccggctccgccacactcctcgtctacgacactttgaaaaataaggtctccttttagttgaaccccgcattgctccagcgcttccatcgcgattaaaagagcggtattgccgcctttcatgtcagttgtgcctcggccgtatatccgcccctgcttcacaaccggctgaaaaggctccgtctcccagtcttttctgtttccttcaggcacgacatcgatgtgtccgtttaagatcagcgatttcccgccgccctttccttttttaacagccgcaatattcgggctttctttaaagcttgttctgtctgatttaaacagcggatgctgttccaactgctttatgcttggctcccagacatcgatttcagcttcgaattgcctcaatttctccaggacgacggcctgggcgttaaattctcggcccatcgtgcttttttctccgacgagttttttcaaaaggcgaatcgctttttgctcatgcgaatcgatccaatcgcacacctttctctctatgttctccatccaattcctcctcttacgaaagcggcccgtcgatccggatctttccctccgtcagccgcagcacatcatcaagatcctcttcattcatcagctcttgtaatacaaaaccgccgctgtcaatggtgatcacggctttttctgtaattaccatgtcgacgcagccttttgctgtcagcggcagagtacagtcagcgacaagtttgggtgcactgtttttatcggtatggctcatcacgacaatgacttttttcgccttttgggcaagctccatcgcccctcccattccaggaacctttttgcctgggacgatccagttggccagatctcctgactggctgacctgcagagaaccaagaatggtgacatcaatcgcaccctttctgatcatgccgaacgacagagctgaatcaaaataagaagcgccttttactacggtgacaggccagcctgccgcattgcaaagattctcatcttcctttcctttttcaggcgatccgccgatgccgagaagcccgttttcagattggatcattacggaagtgcccgggtctaaaaagttgggaactaaagacggaatgccaatgcccagattgacaatcattccgcttttgatttcgcgggccgcccgtttcgcgattctctcccgctctatgactcccaaacccatttccagttcaccccttccgtttcagctacaccttcgacaaaaacaccgggtgttacaatttcttcttcatcgagctctccaatgggaacgatccgctcgacctcggcaaatgtccgatcagcagccatcgccataagcgggttcatgttgcgagccgttttgtcgtagatgatattgccgaattcatcggcggtttttccataaatgaaagcgtattccgcactcaaggcttcctcggcaaggtatgcgcgtccgtttaatgaaacgatattctttccttggcgcaccatgtcattatcgatcccgatatcggtcaaaatgccgccaagacctgtgccgcccgcacgaattcgttcggccagcgtaccttgcggagaaaattcaacggcgagaaaaccgtcggtcatttgttttcccgcaacgggatttgaaccgatatgagaagcgatcagccgccttacgcggttattgacgattaatgggccgatcccgatgccgggaaatcctgcatcattgcatatgaccgttaaattttttacgccttttttcaaaatcgcccggatgaaagaaggcggtgaaccgactcccccaaatccgccaaacatgacggtcgcttcgtctttcaaatcggcaatggcatcttcaacagcaatacgtttgttcggcatcgtcatctttcgcgcatcaccttttccgcttgtttttcaatctcatatacggcatgtttaaatatttcaatgagctcttccatttctttgtccgatatcgtaagaggcggcgcaatgatgaccgcatctcccccgccgccgtcaatacccgcctgggacggataaagaagcagtcctctttttttcgcttcggaaatgacgagagccgacaccggcattgaagaaggaaatgtctttttgcttttttgatcggcgacaaattcaatcccgagaagaagtcccttgcccctaacgtcgccaataatgctcgactgtttcataacttctttcagcattcttttcagcttttccccttttatctcggcttgtttgacaagatcgtgcttcaggatgtagcggagaacggcgagcgcagcacgggctgaaaaggggtttgcgctgtacgtatgcccgctcatgatggcccctgagccgtttttgaccgtttccatcatgccgtcggacatgaccgctgcggcaatcggtgaatagcctgcgctcagccccttgccgagtacggcaatatccggagtcacaccccaatgttcaatcgccagcatccggccggttcggccgatcccgctcatgacttcatccgcgataaagagaatttcattatcttcgcatatttcttttacttttttataatagccagcaggtgccgtaatagctgctccagcagccccaataacgggttcggcaacgaagcccgcgatgaattgctttccgatccttttaacggcgagctcgatttctttcacgcacgcttcctggcattcaggatgagaaagccggcatctgtagcagtttggcgctgaagcggcgggatacttgtgcagcatgtgcgtaaacctgtagcggcgctcataaaatcccgacagcgacagggctccatttgtaattccgtgatagctgttccatcttgaaaggaaaatcgttttgtcgttttgtcctttttcctgccagtattgaacggcgattttcatggcggtttcaactgcttccgatccgctgttgacaaagaaagaccaattcagatcacccggcagccattcagccaggagttcggcaagctgttcggccggctcacttgtaaactgcgaacggtagacgaatgaaacagcatcaagctgctctttgagaggctcaatcacttcttggacaccgtgcccgagattgcaggtaacagcccccgaacaaccgtcaaggtaacgctttccggaatggtcgacaatccagcttccttttgcatactgaacgaccggatagcttgcgtgcagatccggcttaatcaaaaacgacatgaaaacatccccccttccccaatgagaggtttttctttacattatatgagtcgggaaaaggcggcattctcttttcacgcggaaatggttgatttcggagcaaacgccgttttcgcaaacaaaaaaaggaaggacatgtccttcctttttttcagggcgcgctggtttatattgacgtttcatcctgcaaagcgaccgtttccttcgtctgtttttcccataaataaaatgatctcatcattgaaaacgcagcgaacggcgcgggcagtgcgacgatgaggaataaatattccggactgacggcctccgacaacatccctgcggcagcatagccgagcggcataaaagagctgttgaccgcaaagaaagcgcccagcgatctgcctctattttcaccttccgttaccctttgcaagtaaccttcaatatagatgttgacgacgccgctgatcattccgatgacgatcaaattcacagcgcccagcacgacatgatcaatccagccgagaggagacaaaagcaggccgaaaatcagcattaaagcaggcacagctgcttttgcgtgctccggttttgcgataaaggacaagaaaagcgccgcacacagcgtcccgcacgcccaaaatgattggaaagcgccgcccagccaggcctgatcttttaaaagcagcgaagtccaaatgacgatatatatcggaaaaccgctgaatacaagctgctgtatgctcgtcccatacaacaaatacttgagcggcttattttgatacaagcttgtaaaaccgctgaacaattgtttattggtaaaaggaatacgcttttggctgcccctttcatctttgattctccactccaaaaagatcgacaagaaggaaaggcttccgcacagcacccataaccagccaaaatgcaaaaaggaaaacagaactcctgtgacaagcggaacaatcacttggatgagctgtgtgagcacttcttgaaatgcgattcctttttcaatttgttcttttctcaatgtatctggcaagagcgatcttgcagcgggttcgattgcggtcaaacatgccgatacgatcacccttgaagcggccagcaaaaaaaccgaattcatgcctgacagcgccaaaaatccgatcattaaaaatacagctgaaatgatcatatccgaagccgcaatgagctttcccctgtgaaacctgtcggacagccagcctgtaaacggcgataccaaaatcgagacagttagcccgatgccgatcacgacgcttcccgaaagggcgctcccggtttcagataaggaccaccataccaatgaataatagaaaagaaccgaactaaagagcgataaaaaagttccagaccacagtctgaaaaagtccccttttatgacccaagcatatttcaaagtttctcccccgtttgtccgatattttcacctcatgaccatattacatacgaatgcaaaattttacaacgaaaacaaaaaaaaccttaccggatggaaggctttgtgagcatgtcaagcgccgggcgtcgggcttttagctagcaaatgaaagccgcaccgacaatgatgagcaaaataaagaggacaacgatgagtacaaatgtgtttcttccgtgaaacccgtagccgtatcctccagtaggacagcaataatgggagtaatgcacaggcttatcatcctttcgtataaagtctacaccccagcctatgcaggcgaagtcccaattggtatgtgcacctgcctactttatacgaacaaatatttaaatattgtcgtgagcttttccttctgctgaaagcccagcttttcataaaacgttttcacctgatcgcttcccgaagttacaagatagcacgattccatgcccgattgtttggcggcggtgagcatctgcttgataaggcccgatccatagcctttccgctggtatggctccaaaatggcgacttcttcgattttagcaacgttttcgtcgtgatcgagataaagctcagcacatccaatcggttcgccttcttccgagtagcagacacacagctgaatgatgccttcctcataaaaaggatacttgcgcagcagcttttccttcgcaaacgcttcattgatagacaatgtatcataagcctgcatcatgcggcagccgtcaatgagcgatttctccgtcccccactctgcccgtacaccaggggaatctcctttccaatctgcaagcctgatggaataaaacaattcttcatcaagaatatagccaagatcaaagagcgactttttcatcgtaaaaggcagatcccgcttataagagcttttcacatgaacataatttcgttttaaaatttcgggtgtccgaacgagcagggagtacagctctgtcagcggaaaatcgtcctgcagctgcagaaaatgagaggaaaacatctgcgggatctcctcatctgtgtatatatgataatgggattcaatttttttgctgcatgtcagcattaaataacggtcttctgtgttcgaaatggatgtcacaacggctgcctcttttctcaagatgatctattgtaatgttttttcgctttcagagcagaaaatcctctaaaaaaagatgaccctttgaaaaaaggatcatcttgcatgctgctctcctcagctttcctctccggatttcttgcgttcaaacagtttgacatattcgccgtatccttctttctcaaggtcgtccttcggcacaaaccggagggcggctgaattgatgcaatagcgcaggccgtccggtccgggtccgtccggaaacacgtgtccaagatgggaatcggcagacttgcttctcacctcagtccgaatcatgccgtgtgaagtgtccagcttttcttcgatttctccggcatcgaccggttttgtgaagcttggccagccgcagtgtgcgtcaaatttgtcaagcgatgaaaacagcggcttccctgaaacgatatcgacatagatcccgtcttcatgcaggtcccagtactcgttttggaatggaagctccgtcccgtttttctgcgttacttcatattgcatccgggtcagctgtttcagccgttcttctttattgttcgtcatgctttcgcccccaatgctgttgtaaaaatccttcccttccgcttccgatccgatactgtgtgtagcgttcagggtgctttttatgatagtcctggtgatactcctcagccggataaaatggcccggcctccagaatgtcggtcgcgattggatctttaaagatgccgctttctccgagctttttcttcgattcttcagcgagtttccgctgcttgtcattatggtaaaaaatcgctgtccggtaagactctccgcggtctgcgaattgtcctccgctgtcagtgggatcgatttgctgccagtagagttccagcagtttttcgtatggaaagacatcgggatcaaatgtgatttgcaccgcttccctatgtcccgttgtattgctgcacacctcttcataggtcggattttccgtatggccgccggtatagccggattcgacttttagaatgcccggctgttcgtcaaaaggcttgaccatacaccaaaagcagcctccggcaaatgtggcgagttcgcgtttttcagccatctgttctgcctccttctcttcaacacttgttgggaaccattatatcacagcatgctcatttttaagcccgctcccgctcacaggaaacaacttttaacacattcatcagccgctggctaaaaagaaaattatgacaataatatgtcattgccatcggcatattctaagaaacagctgtattcatatataattgccatagaccgttgttcaattgatggtcaaatgaactaaaaatcttctgaaacatacacttgaaaagcaaaaattatggtatcatagtgatatcatgttcatgaaaaatgataatcatgctgattcggtcattcctttttaaacaaagctgaaatttgctaattatatggaggggcgaaattttgaaagttagagaacaaatgatgtatgatatggaagcactgcttcgcacagtatttaaacagatacgtgatgagataaatgagctgctcgaaaaagagatgtcccgcaatgaattcatgattctccgcctgctgagcgagcaaggtccaaagaaagtcacggagtttgcaacgattttaggcgtttcagcaagccatatcacagctgtaaccgatgcattggttgaaaaaggctggatcacgagagtccggtcaaaagaagacagacggatcatcaaaatccatctgacagacgcaggaaaagaaattatcagatatttcgaagaaaagaaaacggaatattatttcaagcggttcagcagctacagtgatgaagagctgaaaacgctgattgaactgttcagcaaattggacaaaaaacgggaacagcgctaacccggactttacataaattggcctgaatccgtgcaccttaaaataaaaaagaggtgtactgacctatgactgctccttacctttgtccaaactgcaaaacaaaccgaacacggttcaacttaatcgaacagtccccgacatccgttaagattgatccggcaacaggggaaatagtggaaacgtattcagatgacgagctttcgccttttcacctgccgtacagcggccctgccataaaagtgcagtgcggcgcgtgcggattaattgaggatgagaagacttttatcaaacttgctgaattcgataaacgaacataaaaaagacaggatagatgaacctcgtttcatctatcctttttcattcagctgaatgcgagttcaaacggaggtgcacactctgtttctcccaaggtgtttagccctgtacaaacattgatcggctttttcaatcagctctcccgtactgtgaatcacctccggaaatgccgcaactccaatcgaaaccgtaatatgaatcttttttgaatgagaaatgaaaaaagtgtgtgtctccacttccttgcgcaccctctcagcaatctctgcagcctgcgaatgggaacagttcggcaatatgaccgaaaactcttctccgccgtttcttgatacgatatcttccgatcgggcagacttttttaaaatcgttcctaattcttttaaaatcgcatctccatttgaatgtccgtacgtatcattaatcgttttgaaataatcgatatcgatcaaaagcaaagacagtttctcgttcttctcttttgcgtttgaaatataagcattccatatcgcatcaaattgccggacattattcaatcccgttaaataatcaatcgacgattcctcttcatacttttttaacagaaaatgagattttcttaaatatgagacgatgtatactgacgtaaagccgccgatagtagataaaatccagaaccacgtcaataacattttcattaagaagaaatcatgaaggatcatcaagatcacaattgaaatcgccacattggcaaaaataactaatgcaaatgtctttcgataagtgccggcgtctttatccatgatccgaagaatgagataatatcctgcgaatatcacgatcatacctataagcgctgcaatcgaggatgtattcgtcccgtaaacaaaccttcctcctataatcagcagagaacagataaaggccggaaaggcgcccgtaaataaaaacaaaatcatgacggggacataacgcaagtcgacgatcgtctcatcggttgcctggatcgaaaagaacataagcacatttccgagcaccccgccaagaatgccgtcaatccaatcaagttgtttgtttgtagcttttcgggaaaaaatattccactttagctgagtgtaaataaagagcgaagtaattaaaatgcacaaattcaaaaataaatcgattaaaaacatgacaagcccccagcgccaaactcattttatattgtatatatcgtcaattattaagacgttaaaagcatttttgttcctttcttcagacgcccggcgggatctggtttccgaggcttgccggaggagcttgctttcatttttcaaatagaacgaggtgcttccacttcccgtagcggtaatataaaaaggcggtcaggctgctcagcataaagctcattccgatgcccagcgctatgccgttctcgccaagccactttgaaaatagatatgtaaacggatagcgcaaagcccaaaaagaaatcacgttctccggctgcccttacaacaccgttcaacacaaagttaattccgataaacggatagaaaaaagcaatcgtttttaaatactcttccccgaatgcggctgaatcggcttccgatataaacagcctgaccgcgtgatagcctgtcagaaatatcgcggtgctgacggcagccataaacagcaggacataaatgacgccgtagttggcgatttttttcgtacgctccatgtcgccgcttccgaaggtttggccagccatactgttgacagccgtgccgatggccatcgctgggagaatcagcaggctgtcaagccgctgtaccgcgccaaaccctgacacgacgctttctccaaatgaattgacaacgctcataatcgccatcgagccgcctgaaatcaccatcatttgcaagccggcaggcactccgagcttcaaaatgacggacgtctctgccagcgatggaagcgccggctttgaaaatggaacaagctgctttctcaccgtatagaccactccgtaaataaaagcaatcccttgggacacgacggttgcataggccgctccggcaattccgaggttgaataccgagataaacagcggatccatgaacaggttcaggatgacggccaacaggacgaaacgcaaaggtgtttgactgtcgccgaccgctcttaatactgtactgatgaaattatagccgaataaaaatataatcccgataaaatgaatcctcaaatagcttacggccaaatccatcatattgccaggcgtttgaagtagcgagagcaaaggctctgtgaaaaaatagccgataaccccgagcaatacgctcatcgccgtcatcagaacgacaaacgcgtttacatatgatgccagtccctttttatccccttttcctttttgctgcgcaagaatcgtcagcgccgcattgttgacgcccaatacgaacgacagcaccgtaaagaaaaccgttcctgagacggccgcagcaccaagagcttttgctccgagcagatttccgacccacaagctgtcgacgaattggaatgaaatctgcaaaagattggctaaaatgatcggtccggaaaaatagaccagctgtttaaatacatttccgtatgtaaagtccgttttcattgttttctccttttcatctgtcgtcttgatcacatgtgaccgatggcttcgcagcctcatatgatgtcagaaagcatgcaaaggggcgtgacaagatgttctctgcagttcataatgcccgttatatggcggaaggcttccaggggagccgctatgatgttctgcctgccgaggcgcccttttattttcgaaacagcggaaaagcagtgatgatcagactgctccacgcggctcctcataccgacaatctcgacgttttcgtaaacgggatatccgtttttcgaaacgtctcctatacagatttatcttcttatgtccggtttcctgccggccgtattcaaatcgacgtttttcgaagaggctgggcgaacggtcccctgcttacggtacagtatcacctgatccacggccggtactgcacggttgctgtcacaggcacagccgcaaagctcgttcccgtcggaatgtatgaccagcctgcggctgatccggaaagccgcagcattcgatgcgtccatctctcgccggactctcccgctcttgactttgcagtgcaaaacggacctgtcctgttttccggcgtcccctttcaatctgttacccggtacatcccggtgcgttcacagaaaatggacgtcgagctgaggggggccggttcaacagcagtcctgctgaaggccccgaggatcacgcttcatgccggcgaatccacaacgttgtatggcctcggtttcgtcaacggctctccttctctcgaaataaaagcggcgccgtttcccgtcaaagctccgccttcatagcgaaaaaaaagagacccgatgtctcttttacagtctgctgaatgcagggacaacaaaatcctaaaacgatctcatgttttaggattttgccggcaattattgattgtgatggtcagtttttttgtgtttttttgcatcaagagtaaaaatcataatgcttaaaaacaacgcacaatacccgatgttcaaatacatcttgtccatgttttcatcaacgaaactgaaggcggcgagaccgccgaagtacagtgaaaacaacatagacaacaagctgaaatatgtgtagatacgttccatatgttcacccctgtaaaccccgctgcacgatttatgaatctgtttgtgcaggcttgtaataaacaaattcgatttgatctttttctaaatcaatgtcttttgctttcacatacattccgtttttaagcggcatctctgacagacgaacttgaatttctctagcgtctgaacgaacgtgtacaaaatcaggaaggtcataaaattgatccatgtagttgagcaccatcgatatcggaacattcaacttgccgatcgaaaatctcgtcacgtcaaggaccacgtctccgtttttttccaccgtcggccgaaaggacaccctcgcatcgactgtcgaggaaaaggcgcggatcgcaccgacgatatggaattcatcatcgatttcgatttgatagtcaagatcaggcgaagactccttttccaagtacgtgttgatgaatgcggccaatgaatctttcgtgctcgtcacgttcaattgatattcgctcggagtcggacgcggcggctccttttgtccgccgggcagggaaatgagaatgaaaatcccggcaagtatcatgacgttgactgctgctaaaattaaaaataagctcttccatttcttcatttttttcaccttattctgctgggaggtcttcgtttttaatttgttcgtaaacgcgtttcgctattaaagaatacccgtattgattaggatgaaactcatcttctgcaatcttcttttcatcgctgtattcctcaaaaatatcagcgatatccgccattttcgtgttggagaccttcttcagccttttttccgcgccttcattccattcgtctacgacttggtcaacttcccgcagttcagacagcgtaaacttaaacggattatacatgctgacataaatcaattcagcgctggcgttttgctctctgatttccgctaaaatattcgaaaaccgcttttcaaacagtttttgttcagcacggaaaggtgtgagcgttaagtgcgcgaagttttggcggacgactttcatcaggtcgttgcccccgattgtaaacaaaatgtagtctgcatctttcaggccctcttgtacttctttgtcttttaatctttcaagcagctgatcagtccgggagcctttaacggcataatttttgaccgttacggacttcacatcgctccggctttcaagctcatcggccaccatgccgacatagcctttcttttcttgatcgcctaccccctctgtcagagaatcgcccaccgctgcaatcacgatatcgcgcttaggggagaccgatgttttttcaacgcccgcattccactccgtacaggctgaaagcagacagacgagggccatcatgactgtaataaaacgtatgttcaataatgatgccccttccttcttgataacctaaaaaaaagtgtaccatgttttgattcttttgaaaatcatttggccgatgtaaaaaaaagcctgttttccggtgttcaggaaacaggctttagcggcaggtcgcccgtttttatcaacggttttccagcgtcttaatatcggcgatgatttcatcgtacggcgtatttcttgcaccgtcataatccttgacgactttgccgttttgatcgactagataaaatgacgattggtgaatcacctgatcctcatcttcaggttttttcacgattgatttaaagcttttcagcgcaaacttttcgatttcttcctgcgagtatccggttaaaaagtcccaattttgaaaactgagcgggtagttggccgcaaatttcttcaatttttcaggcgtatcattttcgggatcaacgctgaatgagacgatgcgggcctgcaggttttcctcttccatttgtttttgcagttcagccatatgtgaagtcatcggcggacagatcgtttcacagttcgtaaatataaagtcagccacccacacctggccttttaaactttcaagagtcaccgctttcccgtcttgattttgaaaagaaaaagactgtacatcatagttcaaaggattatcaatcttgctagttccgcaggacgaaagaaacactgtgagaatacctgcaaggaaaatgccaaaaacgtttttcaatccttccatcccctttttcaatcggtgtaaaaggtaaaaccgatcgctccttttccggtatgaaccgagataatcggtgtggtgtagtcaatatcaatatcgattcccgggatatgttcaagcaaggagtctttcagccgatgggcgagatcgagcgcatcggcatgggcgattccgatcgcctgtaccgtccttcccttaaccgctgaaacaaattgaccagttaaataacggataagctgactgctgctccggacatttttttcaggcgtatagattccgtcctcaagcctcgcgatcggcttaaccttgagcaatgagccgagcagcgcttttcccctcccgatgcggccgcctttgatcaagttgtcaaaatgatcaattgtcacatagagggaagtccggtcgcgcaagttctccaagtcttttacaatcgcttcggccgtcatgccctcttcggccagcaaggcggcccgcacgacctgaaaaccgaggccttttgaaatatacatggaatcaatcaccgtaatgttcccgccgaccatatttgaagcgcttacagcagtctggtatgtcccgctcaattcgcttgagagatggatgctgatcacttcacttccgtcagcggtcagctcttcatacagttcgataaaagcgcctagaggcggctgtgaacttttcgggagttctgcggcgctctccattttctcaataaattcgtccggctgaatatcgaatctgtctctgtatacagtgccgtcgatcgatatcgagagcggaagaacggaaatatgatattttctgagcagttcttcgctcaagtcagcggtcgagtccgttacaattttaatgcttgtcaattcccttcacatcctgtcggttcaaatggtgtattttctagtgaggccaaatccgcatgaaaaattctttgccggcggatgccgtcttccgctcttttaaagcggattaggctctcttcatgggccggcaaagaatgccataaatatttatgcattatgcttcaattcatcctgttgataaatggccaggtaatcctgccatttcaatgctctctttaagtagtccctaaaggagtagacgtttttttccgtctttgagcaatagagcgtctttaaaaagatttcaagcctcagattggccataaaaaaatgcgggtcgtcctccttcagcagaggtatttccgtcaccttcaccttctgtccatccgaacgtttgaactccaggcttttaagtaacaagctatcaatcctcatttatgagatattttctttattatacataatctctgaagccgttgtctgtgatttaggtttgttttcaaaaaaatttacttaaatcagcaaatgaaagagcccttcatctttattgacttcgacatagcggaagcctttcctgtccattcttgcgatcagcggctcgtaatcttcgcgctgcttcaattcgatgccgacgagcgcagggccgctgcttttattatttttcttcgtatattcaaaccgggtgatatcgtcggtcggcccgagcacttcatctaaaaattcgcgcaaagctcccgccctttgcgggaagttcacgatgaaataatgctggagtccttcatacatcatcgatctgtctttgatttcctgcattctgccgatatcgttgtttcctccgctcacaatgcatacgacatttttccctttaatttcatccctgtaaagatctaaagcggcgatcggcagcgctcccgcaggttcggcgacaatcgcgcattggttgtacagctcaagaatcgcggtgcacacctttccttcaggaacgagcaaaatatcatcgacaacggtttcaagcgttttaaatgtctcttcgccgattttctgcacagcggctccatcgacaaatttatcgattttctcaaggatgacgacttcgccttttttgtttgattcaaaaagagccggcgcgcctttaggctcaaccgcgatcagctttgtatccggggacacgtttttcatataggttcccactcctgaaagcagaccccctccgcctacgcttgcgaataaataatggggttccgtttcgatatcgtttaagatttcgaccgcgaccgtaccctggccagccatgacggcaggatcgtcaaacgggtggataaatgcgcgcttttcttcctcgcagcaggcgactgcgctttgataagcatcatcaaacgtgtcgcctgtcaggatgatctcgacgtattccttgccgaacaattcgacttgggaaattttttgcctcggggtcgtcgacggcataaaaatctttccgtgaataccgagatgtttgcaggaaaaagcgactccctgcgcatggtttcctgcactggcgcagaccaccccgtttttcgtcgtttcttttgaaagctgcttcattttataataggcgcctctcagtttaaaagagcggacaacctgcaggtcttctctttttaaatatacgttgcaatcgtacctctcggacagcctctcatttttttggagaggggtatgaataacaacatcttttacattttggtgggcttttaaaatgtctttgacttggatgagagagttttctttaagcaacggtttcatgtataagatcctttctgtttaaagctttatttaatacgccattatatcatgaatattcaaaatttaaagggcaattctttgttatttacagaatattatacactttctcaatatatacggggttcttttcgattcttaatgtgcaggccacatgcactttttttcaaaaaactctttatttgttctaattgggtgttataatagaaccaattagaaccaaaaggagagccgccatgattaaacacacatatccgtccgtaggtttctccgagctgatcggggaatgcgattcctttttgcaaacgaaaaacagagcgatacaatttgcagcatcttcccatccgattctgattcatggggaaacaggcacaggcaaagagctgttcgccaaagccattcattccggatcatctttcaaggatgatcccttcacacatgtaagctgcagcacgctggatgaagatgaaacggctgaagatttttttctttcagagctgaatgagcccggaaccttgtttctcgacgaagtgtggggtctatccttgcatctccagggcaggcttttggcagccattgaaaaagggatgcaaaaaagattgatcacctcttcaagcatgcctctcattgaacggattgatagcagcgaattccgcaaggacctgtactacaggctcaatgtgctcgaccttccgcttccctctcttagtgaacggcgaagcgacatcccccttctcgtgcatcattttttaaaaagcggggatcatgacatatatgtcgaaccggtcgtttggaaagctttagagcagcatgagtttgaggggaacgtcagagaactcaaaaacatgacggattatatgataaccgtctcagacggaaaaacgattcagctttacgacacaccgccctcgttaagagaacaaatcaaaaaaaagaagcctaaggacaaaaaaacggcttcggcatcacttaccttaatggaaaaagaggagtttgcgtttttgctcgatgcaatcaagcaattaaatgaaaaaggagagcctgccagccgcagggttctgtccgagctgagcaaaagcggcaagtcggagcttacaccccagcaagtgagaagcagattggattatttggaaaaaagagagtttattacaaagggccgcggaagagccgggacaaaaatcacgcttgaaggcctccgctttttaagctctttaaagcatcacattattcaagattagaaagggtgtcttggtatgtacacgattaaagaagaaattgctaatgcaataacccatggactcggcgtcctcctgtcaatacctgccatcgtatttttggtgatatttgcgatccgctacggaagtccggttgatgttgtcagcttttcaattttcggcgcttccatgctgttcctgtatttaagttcgacccttctgcacagcattcagcaccaaaaaacaaaagatattctggagatcatcgatcactcagccatctacgtactgattgcagggacatacacaccgctgctcctcggacctttgaaaggcgcgctaggctatacgatgcttgctgtcgtttgggggcttgcgattggcggggttgtgtttaaaatcttttttgtgaaacggtttatcgttgtcagcacactggtatatcttgtgatgggctggatggcgatcattgcgatcaagccgctttatacggccttgaccggagaagggttcgccctgctgcttttagggggaatcttgtattctgtcggaaccatcttttatttatggagaaagattccatatcatcatgcgatatggcacactttcgtgctcggcggcagcgcctcaatgtttttctgcgtgcttttctacgtggcaaaagtgccgtttgtatcgtaaacggcgaaaaccaggcttccattatgggagcctggtttttttatgcccgaagctgtttgttttcagtcatgacgtatgccgggtggatcgtcaaatcgatatcaacaggtctcagcctcttgaacaacgtgccttttttcatgtcttccgtaccggctgtttcgactgcaacgatcggaatgccgagccttttggataaagatttgtaatcgagtccgtcatcttcagacataataaagctttggcctttccggagaatctcttccacttcttctagcgatgcttccttgtcggcgctttttctgaccgcggccattttattgagccagccgctgatcagcggataacgaaaggcgcgcggatcagcaaaaaacgaagcggttttgtcaaggtgtccaagcagcacggcaagctctgacaggccgagctttgggtgcacataaagcacgggccagccggcgatcttccgttctgatggatggaaacggttgaaccggttaagccgatgcaccctcgcaaaaaagctttcggcttatcaaagacagcttccatctgattggcatacgaaaggcgcggatcaagtgtctgcagcgcctgcagaagcttgatatgcttgatgagcatataggccgaataaatccataaaaaacaatagcgcaacatgaaaatcctctcctctatccttttctttgataaacgaggaattcgtagtcataaggatttttgtcatctttcaggcctttccgcctcgaaacgatttcccactcagcttcgctgaattcaggaaagtaccggtccccttcaaaggtttcatcaatttttgtcacatacagcttgtccgcaaaaggcagaatctccgtgtatagtgttgaaccgccgatgacaaaacattcttcgtttctgtttttcgcaaaccgcaccgcttcctctgccgagtgcatcacctgacaattcgggatatccagttctttattggatgtgacgatgatgttctcgcggtggggcaaaggtctgccgatggactcgaacgtctttctccccatgattacggcgtgccctttcgtcacctctttaaaatacttcaaatcttgcggcagatgccatggcaaatcattgtctttgccgatcaggcggtttctgtccattgcagcaatcaatgagatcattgtttaatgcctccttatgatgtttgtagcgaaataatgccggatgatgctcatctttttgtgtgatcatctgtgaacatgatgcatgaagatggaggttaaagctgtgatgagaggaacctttcttcgaggttttcattctgatcaggccgcccgaatgcatttgtctcattccccgttttgttcaattccggttttcttacatatgacggcacatatccgcatgatgtttctatttttttcatccttttgtagtgtatcttgtttaacctttcgaaaacaagacatttttcgagaaaggcgtaaaatatgccgcataaaaaacccgcctgatggcggggacgggcgagtctttcagcggcttttcgcaacgctctgtccgtctgttctctcttcctgcacttcatcctcaagatcctgatgcgaatgggcaattcggcttgccgccgctgccgccaaagctgcgacgatatcatcaaggaacgtatgaacctcatcgtccggacagtcgtccagttctttaatgatgccgaatttttctttatccagatagccgaagtttgtcaagccgatcgaaccgtagacgtttacgatagatagagggataatctcgtcgatcccgtaaaggggttcgtccgtttcgaccaaatattgaagcggttcaggcaacagctttttctcggccagctggtcaagcgctatccccgttaaaacggcatgaacgatttccctcttatttaagaccttttcgacattttcaatgcatacatcaagcgggagatcaggatggtatttttcctgcagcttttgtacgatcagcgcgatatcctcaatcgcaaccccgcgctcattcagcatatttttcgttaagtgcaccatttcattcatcgtatacttcttcatctgcatcaatctcctttagtgactcatccagttaggcggtgtattgcggtcccagtaaatgcttccgagatcgtgatgtttttgaaagccgtcttcggcagtatggtaatgaaagttaaaccagtaccctttatgcggcggcttgtccctgcgcacatggaaccttagcacatcttcccccgttttccgattgtaaacgtggaagattctctccgacttccccgccgtcggcgttttggaaatgacaagatcctggtaagcgtcattgtcctgcattgtcatgagatggctgacgatgatctcctcgatctttggaagcacttcttccctgtactcgtcttcaatgaccggcgatatcctgctgccgaattttacgaatgatagatcttcagcttcattgagcagttcatccctgtaggtgtcaaatgaagatttggattcgccgtcttcatcaagctcgggctcttcttgcttttgataaacagccgtatatccggattctttcacgctctgatgctcctgcggcttgtccgccatcaatgccgcaggaggagatacaaggccgaacgttgcaattgtaaataatgcgacaagcgcttttctcatccacatcttcatgactgattagttcccttctgatcgctttttcgttttctcttattctatcataggttgaattttcagtcattcataaagtggagatgctgatctacaaaacgccttttcttttagcgataaaacgtttacaatcaaagatgaaaattccaaatttgggagtgatcgttcatggttgaaggtctttttatagccgcttcattaattaccctcgcttattttatcgtcatggaaatcgcagattaaaaaaacccaaggtatataccttgggttttcatttttcgaggacaccgtaatgaaacagggccgttttgcgtttttttacggaaaatccgtatttttcaaagcgcggactcttccagtggtctttcagaaccactctttttctggcgacccgaagggcttcatgtaaagcgccgtcaagcgtaaactcggaatgcgcccactttcttaaaggggcgatgccgtctgattctttgattccatcatcaaacatcgggtcgaagtagacgatatctgctgaagcatcatcaagttccagcaggtaatcaatgctgtcgcctgaatgaacccgaatccttttcatcgcctgatccaaaacgtcaaggccggtctcccacgattgaagccccgcctcgacaagaaaagcgagaagcgggcttttttcaattccgcgcacttcgccttgttcgcctgcggcaaggctcgcaatgatcgcgtctgatccaagaccgagcgtgcaatcgagcaccttgtcccccggttcaacttgtgcagcttcgacaaaagggtccggttcgcctcttaacatacgcttggcccggaacatcgcagagttcggatggaaaaagaacttttcaccttctgaatgatacagctcaaagcgctcttttccaaccacgagaacatcatcctgctctgtttgccgaatttggcgaatcggccgttttctccgctcggaaaagcgggcgccgagcgtccggctgattttttctgctgttaaaatcgtgctttcagtcggtctgtagcttgttgtgacaatcatgtttttctccgtaaaaaatgcccttcaaagggcattttagcaatgtttttcaaaagcgtccgtaatgtttttcataatctccgtcatttcacggccttcaatctgttcacgcggaatgaaatgaacgacttctttgcctttcagcagtgccattgaaggtgaagacggttcatatccttcgaagtattccctcatttttgccgttgcttcacgatcctgtccggcaaaaactgtaacggtctcgtcaggccctttttcgcttccggagacggcctgaacggctgccggtcgcgccagccctgcggcacatccgcagactgagttgacgacgacgaaagtcgtgccttctgcgtcttccatgaatgtctccacttcttccgcggtcgttaactctttaaagccggcctgcaccaattcctgacgcatcggaagaacaagctggcgcatgtattcttcataagctgttgacatattaaaaagccccctctataaaccttgactactgatgtttcaaggatactacagagggggctgaatttcaaacgccgggcgaaaaaaccgctagattttcataatgccgccggtattggcagatgtcacaagctttgaatacctggcgagatagcccgttttcactttcggttcaaagccgggccagtttgcttttcttttttcccattcctcatcggagatttcgatgtttaaaatccgcttttcgatatcgacaacgatatggtcgccgttttctacgaaagcaagcgggccgccttcggctgcttccggtgaaacgtggccgatcgaaagaccgcgggaggctcctgaaaagcggccgtcggtaatcaaggcgactttcgggccgaggcccattccgacgatctgtgaagtcggcgcaagcatttcaggcattcccggtccgcctttagggccttcatagcggatgatgacgacatctcccgcttttactttacggttgatgatgccgtcaagcgcttcttcctgtgaatcaaagacaaccgcaggtccttcatggcgggtaatcccgtcttggacgccgcccgttttaatgatcgcaccgtcaggagccaggttgccgaacaggacggcgagtccgccttgctctgaaaacggctgatcgatcggatgaatgacctcgtaatctttcacttcgcgtccggcaatattttcgccaagcgttttccccgttacagtcagcgtatccaagtgaagcgcgccttcttttttcgacagctcgtttaagactgccgatacgcctcctgcttcatgcaaatcttcaataaacacatcggaagccggtgcaagcttcgataaatgcggaacccttgccgctacctcattgatccgttcaagcgaatagtctacacccgcttcattggcgatcgcaagcgtatgaaggatcgtattcgttgatccgccgagcgccatgtctaaagcgaacgcgttgtcgatcgctttttcggtcacgatgtcgcgcggtttgatatccgacttgatcagctccatcagctggcgggccgactgtttggcaaattccctgcggtcgggcgatgtcgccaaaatggtgccgttgcccggcatggcgatgccaagagcttcagaaagacagttcatcgagttcgccgtaaacatgcccgagcatgatccgcaagtcggacagccgaactgttcaagctcctcgagtcctttctcatcgattttgcctgattgataagcgccaacgccttcaaatacagaggaaagcgagatttttcgtccgtcgctcgttcttcccgcttccatcggccccccgctgacaaacacggtcggaatgttgatccgcattgccgccatgatcatgcccggtgtgattttatcacagtttggaatacataccattccgtcaaaccagtgcgccgatacaaccgtttccactgaatctgcgatgatttcgcggctcgggagagaatacctcattccgatgtgccccatcgcaattccgtcgtcgaccccgattgtattaaattcaaacggaacaccgccggcctctctgatcgcctctttgacgatttttccaaactcctgcaaatggacatgacccggtacgatatcgatgtatgagttgcaaacggcaataaacggtttgccgaagtcctcttcttttaccccagccgcgcgcagcaaactgcggtgcggcgctctgtcgatcccttttgtaatcatgtcactgcgtaaacctgtcatcgtgatcctcctaaacatcttcgtatttacattctatatattctgaatattcagttttaaaaattgtctgttaaccgcttgccggactgatccgcaagatgacggctgttttgatcttcatctgtaaatcattccccatgaatcagaacctccacattccatatgattgctaactactatatatattttcagcttgtttttcaacaatattcgaaatatttttatagaaaaagtgatattttattacaagacgcgtgacttttttcagaattcccggatcgatcgccgcttttgaagcataaaaaaagacgctgtttccagcgtctttgtcagctgtcttttttgcggctttccgtcatttgcttccatacggagccttttgcttcttcaccgtattcgatccgttcgatcgccattttgatctgaaggctgacttcaaattccggatcgttttcagcttcttttaaagcgggaagcgcgctttcatcgccgacttcgtacagaaacatggcggctctccagcgcacaagcttgctcggatccttcagcgctttgatcatcgccggaatcgcttccgggttgccgatgtctgacagacaatcgccggccgttcttctgaccgtgatggttttgtcttcgagcgctttatataaaaggggaagcaccgcaggcgtttcgatcatgcccaaataaacgacagcaagccttctgatcgatgttttcgggtcattgagcgctttttcgagtactggaatatcctcttcagtaggatccatttgttcaagatgcgcatagcgtttttgccaatcttcctcatccatcatttcaagcgttacccggtaagactttcgctgcacagccgtacgtttagcctcagcatcgcttgatgcagctgattccgtcagcttccgcaggcgctcttcatcgtaagccgcctccagctcttccgttacttcgcggccgatttctgaaaaatcgccgaatctgacgccttgctctttccaagaccgttcgagcacgacgttggaagacgcggttttaagcttcaagatcgcttcctggaaacgttctggaaggccgaagcgctcctcgcgctcgccgtcggtcaatttcacctgcatcggtattccgctgaacatttgcacgaaaactttaacctcgccgaacgattctttttcttcggaacggccctccgcctcttcggcttcatccattccgaatgcagcgcgcaccttaggaaggatgtctttccaatcaaatctcgcattgcgctcgacagcgataaaatcggccacatgatagacgccttttactccgtctatgtttaaaacttcctggatgacgggaggtgcgccttccgcatgatcctttttataattattgctttttccacccggcagttcctcggtcaaaatcaccttcattgtattcggactcggtgtcggttctatcgatttaattttcatcattgtccccctctgtttaaagatccggtcttattctaccataacccccagccctgatctatcaaggcggctttctctagagaaggcgcattcattttccagttcgccgaggaattcgagcatcagcttatgccttttttctgcgagcatccgtcccgtctttgtattcatcaaatcttttaaaaggagaagcttctcgtaaaagtggccgactgcagtaggtgcattgccgcccccatagaggagatggccctttgcacccgcatacatcaaagccctggcgatcccgacggcgccgatcgcatcaagccgatcggcatcctggacagccattccttcttttgaaagaagttcgtctttatatttctctctgtctctgaatgaaattcttgtgatgatagcaaaaatcccgtcaaccgtttccggatcgaccttccattcttcggacaggcgccttttcagctcctgcagcggaacccggtgctcatcggacagcttttcatcaatcacatcatggagaagtgcgcaagcttcggtcataaacaggtctgcaccctcttcttttgcgatctgaaggcttacgttcctcaccctttcggtatgcagccagtcatgacctgtgccttcggcagaaagcttctcttttacccattcggacatcaagcggatctgttctgtttgttcctgattcagcccagccatttctgaatggtctcctccatctcctttggattggtttgcggtgaaaagcgcacaacgttttctccggtttgatcgacgagaaattttgtgaaattccatttgaccgcttttgttccaagcatgcccttcgccttgttcgtcaagtggcggaacagcgggtggatttgatccccttttacattcaccttcgaaaacatcggaaacgtgacaccgtaattgacgctgcaaaattcttcaatgcttttttcatcgcccggctcctgattcatgaattggttgctgggaaagccgagaatctcaagcccccggtctttatatgtttcatacaagtcttgaagctgctgatattgaggtgtaaatccgcacttcgaggcggtgttgacgatgagcagcactttgcctttatacggccgcagtgtcgtgtcctcgcctttaatcgtcttgacgctgatatcgtaaatggacatgacggtccctcctttttagaataaacctttggctctgccgctttcgtcgacatccatcttaagcgcggcagggtgtttcggcagccccggcattgttaaaatactgcctgtcaaagcgacgataaatcccgcgcccctcgatggttttaattcgcggacggtgatgctaaaatcttgcggcctgccgattttacccgggtcatctgataaagaatactgagttttcgccacgcagacaggcagtccgtccaacccgttctttttcaattcaagcagctgttttttcgccttttcggtaaactctaccccttcggcgccataaacggtgcgggagatcttggctaatttgtcttcgatcgagtcggttaattcgtataaataggaaaacctgttgtctttttgctccatgacatgaatgacttcccttgcgagatcagtcccgccttttccgccctcttcccaaacattgcaaagtgcagccggatgtccgttgtctctgcaccagccaagaacggcctcaagctcgtcctccgtgtcctgtacgaatctgttgacagccacaacgtatggaagaccgaaggcatctatcgtttcgatatgcttcgcaaggttggcaattcccctttttaatgcttccaggtctttttgcttcaaatcggcgagaggcgttccgccatgcattttcagcgctctgacggtggcgacgatcacgaccgcccccggtgtgaacccgccggctctcgttttgatgtgcatgaatttttccgcccccaaatcagcgccaaatcccgcttcagtcacgacatagtcagccagcttcgcagccgtttttgtcgcgatcagactgtttgccccgtgggcgatgtttgcaaacggtcctccgtggacgagcgccggtgttccttcaacagtctgaacaaggtttggtttgatagcatcttttaacaggagggcaagcgctccctgcacaccgagcatgccggccgttaccggctgtccgtcgactgtgtaggcgacgatcatcgaagccaggcgcttttttaaatcggccaagtctctggccaggcataaaacggccatgatttccgaagcgacagtaatgtcaaagccgtcttccctgggaaatccgttcgcttttccgcccaggccgacaacggtttcacgcagcgccctgtcattgagatcaagcgcccttttccagacgatttttctgatatcgatgtttaattcgtttccctgatgaatatgattgtctatgaaagccgccaaagcgttgtttgcagctgtgatcgcatgcatatctcccgtaaagtgaaggttgatgtcctccatcggaagaacctgggaataccctcctccggcagccccgcctttcaagcccattgtcggaccgagtgaaggctccctcatcgccacgatcgattttttgccaatctgccagagcgcctggctcaatccgacggtgacagtcgacttcccttcgccggccggtgtcgggttgatggaggttaccaaaatcacctggccatcgggtttttctttcaaacgctcaaaaattttcaaagaaattttcgcttttgtgcaaccaaaacactctatttcttcgtcatttatattgagtttccgtgcaatttcggtaatcggttttaattccgttctttgtgcgatttctatgtctgataaatgggatttcatttgcaagaggagcctccttttggttcatcacacgatgattttccatatttttcacacacttcttttattgtaacacaattcacacattgaaatatcgccaaaaagttcctataatgaagaaaaatcagcggagaaaaccggaggtggcgtgttgcctatcaacatacctatcaatttgccagcaaagcagattcttgaaagtgaaaatatttttgtcatggatgaaaaacgggcttttcatcaggacatcagacctttaaatattgtgattcttaatctgatgccgcagaaaatcaagaccgagacacagctgctcaggatgctcgggaattctcctttacaggtatatttcacttttttaataccgtctacacacacgccaaaacatacaccaaggcagcatttggaacagttttatacaactttttcttcaatcagggaccgaaaattcgacggcatgattattaccggtgcgccgatcgagcatttggagtacgaagaggtatcctattgggaagaactccgggagattttagactggagcaaaacgcatgtcacgtcaacgcttcacatctgctggggagcgcaggcgggactgtatcatcactacggcattcgcaaagtcaaactgccgaaaaagacatttggcgtttttgaacacagaataatggagaaaaatgaaagactggtcagaggctttgaagagttctactatgtcccgcactccaggcatacagatatcaatatggatgaccttaaagccgtttcccatttaaaagtgctcagcatatccgatgaagcgggcgtctgtttaattgcttcaaaggatgaaaaacaagtttttttaactggacatcctgagtatgatacagatactcttaaagaagagtatgaaagggatttagccaggaacatggagattgatccgccggtgaattattttaaagaagggccggatggcgcggtacctgtaaaccgctggaaagcccatgcgactcttttgttcatgaattggctgaactactacgtttaccaggaaacgccgtatgagtggaaatgaaattctcatgccctggtctgatgcaagacattcaaaatgtgttaaaatacagttgggttagtcttccacaatggggattcggctttgccgcgaaagcgggaataataaggaacccagcgctttcctgccgatccatactttaaaaataccttaatttttgttcttcatttataattaaaataatatttatggtatggtatgagtggactttgactcctgtttttttaccattttagctcttgctgtttgaattaattgaggtgaatatgcttgaataccaataaaaatatattaattttgactgcaaattacggaaatggccatgttcaagtagccaaaacgctctaccaagagtgcgaaaggctcggttttaagaatgtaactgtttcgaatttgtatcaagaatcaaatccgattgtgtcagagattacgcagtatctctacttgaaaagcttctcaatcggcaaacagttttatcgccttttctactatggagtcgataaaatttacaataaaaggaagtttaatatttatttcaaaatgggaaataaacggctggaccaactggttaaaaaacatcagccagacattatcatcaatacgtttccaatgattgtcgtgcccgaatacagacggagaatgggaaaagtcattccgacttttaacgtcatgacggatttctgtcttcataaaatttgggtccacgaacatattgataaatattacgtagcaactgattacgtgaaggaaaagctgctcgagatcggcactcaccctagcaacgtcaagatcacgggcattccgatccgcaggcagtttgaagaagaaatggacaaagataaaatctacgagaagtatcagctgtctcccgacaagaagatattgctgatcatggcaggcgcccacggggttcttaaaaacgtaaaagaactgtgtgaatctctggtgacgaaagaggatgttcaagtcgttgtcgtgtgcggaaaaaatacgatgctgaaatcttcattggaagacattgaagccctttatccaaacaagctgagaacgctcggttacatcgaaagaattgacgagctgttcagggtggcagactgcatgatcacaaagccgggcggaatcaccctgacggaggccacggcaatcggcgttcccgtcatcctttacaagcctgttcccggacaggaaaaggaaaatgccctgttcttcgaagacagaggggctgccatcgtcgtcaacaggcatgaggagattcttgagtcagtctcttcccttttggctgatgagaaaaaattaaacgaaatgaagaaaaacattaaaagcctgcatttatccaattcatcagaagtcatcctgacggacattatcgagcagtctgaaatcatcatgaacaaaaaacagactgtccgggcgctgtcctaaaaaacgcccgattcaaaaaaacacttgctctgcaagtgtttttttgatgctaagattccgagtaataaacttcttcaaatggctgtacaacgacaaacccattccctgaaaacttcatttggatggattccccgcttcccctgccgatgaacgtcttaaaagaaacatctgtcacaaattcaggctgaaggcttccagaccaggcaaccgttgcgtttggatcggtatagacggggctttccggggttacgatcaaagtgagcggctcgtagtggcttgtaatggcagccattccagttccctcaagcttaatgttaaacagtccgccggccagcatgccggaaattcttttcatcagtttaatgtcccaatggatcgacggttcaaatgcgagcagatcatgtccatttacaaatatggagtcatctttcaagtttaagatggatatcttctttccctgatccgctagatacacctttccgtttccttccgctttcatcagggcagccccttcgccgctgaacacttttttcaccatccgtccaattccgtgttcaaataccccttctcgcttaaatttgactcttcctctataggaaaccattgaaccggcctttgcccacacttttccgtcgagattgacttccaagagacggggcgtttccatttcaaacagcccctcccctttgtcttcctgctgggttttggatacaaactcatcaactgaataacggttcatctctaaacactcctgttcgcattcctgatattggttttattatatacggaccgacgcttaaaatgtttcacccgctttgcgaaaaatgatgatgaataaccataaattgaaaacgatttcaaagaaattcctaaaaaaaagacattaaagttcatttttttctcttgacagcttgacgaagcatccatggatagtgtatagtgaaaccatcatttagcagaacaccgttagatgatgaaaattttttttagcacattgtgctacagtactaggaggattaagcaatatgcaaaacggtaaagtaaaatggtttaacaatgaaaaaggcttcggcttcatcgaagttgaaggcggagacgatgtattcgttcatttcactgcaatcgaaggtgaaggatacaaatctctagaagaaggacaagaagtttctttcgaaattgttgaaggtaatcgtggacctcaagcatctaacgttgtgaagctttaacaaaatcaagacaaaatgagacttcaaataagaggagaggcaatttctgcctctcctatttaattttcagctgaatttcgatcgccagtatattttgcttcagcctttgctcgatttcctcaatgttcttctcgagagatggacgcccctttttcgcgatatcaacgagctgttcaagatctttatatacctccacaaatgtcttgtgaagaacggtttgcagttcattgctttccactgttcctcagactcctttttttatgattacctaaattagtaataaagacttatattttttaggttcaatagttatatcggattaattttactttattttttctattttacacataaaaatgcctttttagaaaaaatacttgtcggaggtgtatgatcatgaaatcagaccatcgcgatgatctcgaaaccggatttaatcagcgcaagcagcttgaaattgccgtagaaactgctcaaaaaacgacgggaatggcaacgaggcaaaagagctccactttgctgaaatcggcgtatcaatccattgaagatgccagacagctgtcacaggctgaggaattagccgcactggatgaagattttttaaacgaacagctcaacatactaaatgattgccagcatcagcttgatgaatcacagcattaaaaaaaccgctgaacgcggtttttagcgtggcccgaaaaccccagattgcatggattatggcctataggggaattttcggggatcaatttttgtttgtcagcacgtctccataggtgcggagcttttctccgaccgtacattttgaaatgcaaaatgcgtgggcatacgtttttccgtattcttttctgaagtgttttttgatgaagcacccttcacagtaggtgtcctgcaaatgtgtcagttccttaaagatctctttcttatccaaaacgttcatctccgttattcatctagtttgattgtgctttccacaatggtatgctcaagcattttttttgcgagctggtccgcttccttattgtctttacggctgatttgaatataggtgggcgtgagctttaatttttgaagctggctttcgattctgtccagccatttcgaatgaacgggatcatagcatggccagctgccttcaagctgattcagaacgacgagcgaatcccctttaatgacgacggagttcctgcttgccccgaggtctctaagctctttaacggcttcgtagagagccgcatattccgcttcgttattcgttgtcagccgaaagctcttattctttctcaatcgatacctttccccgccgagggagtaataaatcacaatgcctaaaccggcgagctgactttctttatcatagctgccgtcaaaatacacggtgatctcatccggttcagccgcaagttcttctttcagcttttccagttctttcagggtccaaaagctgcccttctcatcttcgaattcaagttcagtgacatacgggctttgagaaagctgacgccccgccgccactgcctctttcacttcgatccattcatcggctgtaaattgaatgggtgaagaccctttaatcttgattttcattcctgctctcagtttcacaaaatcacctttattcaaattatggcttgttatgctataatcaaaacagtttattcagaaaggaagtacccgttcttgtttaacgaaatattatggattagttttgcgatcattaattttatcattgttctcttcttttttaaacgatttggcaagaccggtttatttgtctggatcggttttgcgacagccgccgccaatatcgaggtagtcaaaacggtcgagctgttcggtttgactgcgacgctcggcaacatcctgtacggaagcgtgttttttgcgaccgacgtcatcaatgaaagatacggaaaggaagaagcgaaaaaagccgtttcaatcggttttttcattctgattaccttgacgctcgtcatgcagggagcgctcctattcaagccgcatcccgaagacatcgcacagcctgcgctggagacgatattcggcttcttgccccgcgtggccctcggcagcctgctcgcctatatcatcagccaaacgcttgatgtttatgtatattcgggaatcagaaggttatttccttccgaccgggcactgtggcttcgcaacagcggcagtacagccttaagccagctgcttgatacgttgatttttacgagcgtcgcgtttatgagcgcttatccgctggatgtatggattcagatttttatcacgacatacgtcttgaaattcgttgtagccgtattcgcagcgccgtacgcttatgccgccaaaaggatcacccctttggatgaaaggagcgaaaacaatgccggttgaggtgtatattgacggagcaagcgccggggatcccggaccgtccggacttggcatttttatcaaagacggccagaagaccgagtccttctcccttcccgccggctcactgagcaaccatgaagcagaattcatggcgctgatcgaaggaatgaagctgtgcgccgaacgaaactaccggatcgtttcgtttcggaccgattcgcagatcgtcgagcgcacggcggattcggagtttgtcaaaaatcaggctttcaagccttatctggatgctatcatccgcttaaaaaaggattttgatttattttttatcaagtggattccttcgaagtcaaatcaagcggctgacaagcttgcgaaaaaagcgatattgctgaaccaacccgagtaaattccattcccgctgcacatcataacgagtgaggtggttcatgtggaaaaacagcattcagcaggaagaggccgtctgacaggcggtgtcacgccccagggtgatattgtattgaaccgggataaccgtcatacagacccaaaaaccgagcttgaaaaccgggcgaaaaaaagcaatacaaaacattagagagatcggtttatccgatctctctttaaatgattgacaaattcctaaaaggttttattttaggaatttgtcatcccattcagcgtgtctgaaaacccttgcagtctaggaaggctgagcaccggagcggagcgaatgttataattcgtgagcaccggagcacaggcctgacaacgaatgcgagggtttggcagcacgctgagagagatcggtttatccgatctctcttttttcgaatttcatcagcagcggctcgattccccgtatttgatgaagtctcagcatctcctttgccctgtcatgcatcaaggtgaagtccgcatcgtccaatgagcaggaaagcggtacatcgcatttaatttctgcaagaattctggacatcttcagatcttctagacattcggttattttcgtctgctggcccttcgtcagctgaccgatgttttccagcagccggtcaacagtcgaatattccttgatcagcttgtaggccgttttttcgccgatgccttttacacccggataattatcgcttgtatcgcccatcagcgctttaatgtcaatcaaagctttcggttcgatacctgtctcttcactgaatgattcttctgtgtataccttataattgccgattcctttttgaagcagggcaactttaacattgactgttaaaagctgaagtaaatctttatcaccggtgacgatcgtgatgtccgcttcttcgctgaacatcgctgtcagggtgccgatgcagtcatcggcttcatagcccgcaaggccgatatttaaaatcccgagctcttccgccgcttccttcgccatgtcaaattgcggaatcaattctagaggcggctcgctccggttcgctttatagtccttaaataaatcgtttcggtacgttttgcttcccatgtcccagcagcagatgacatggctcggttcaaacgcagacgcagcggttaacagatgctttaaaaaaccgtgaaccccgtttgtcggcacgcctttgtcattcagcataaaattgcggtgcaccgcagtcgcaaaaaaagaccggaataataaagccatcccgtctacaagcagcagcttcttgttcattatggaaacttcctttcatcatacaatgcacttattgtaccacaggagcaaaaatgatgaaaacagcgtctagcgacgctgtttctatttttggtgctgttttttgcttgagattaattttgcggcttccatttgcgaataggattcagtcgcaaattcagtgttaaagccgttcttctttttagcgttgttgtttcgctgtgcattcgcgttgccaagctttgttcttcccattacacttcacctccagcgggcgggtcatggtttatgttttgcaaaaacacatgacgccacacgcggaaggatccaccagctaggcctgcggatattttcggctgacgtattcggcaaccatttccttcgagacgagccgtcttgtgggaacgatgccttttttggccaattcgttcatctgcactgtaatttggttgatgaggtcggttgaaaatgcttcgttacgccggcacttatcgaccacatcatcgattgctttttccctctcctgttcgagacgcacgaactgcttgatgtgctggtgctgtttttttgaatgtgctgtaatcgcttcatgaacgtttgtcatcgtctaattcccttctttttttattcagtctatcatgcctgccagccagatatccataccaatatcaatctgattcaacatgagcggagccattcgcctgccaaggcatgcgctttttcaatgttttcgcgctctgcgctctccagcgcctcatgaaaatatgcttctttttgttcttcgagttgagcttttgcggatagaacagccgctttctgtaattgaccggcgctcgttttgcagcggtttaaaaatgtctgcttttcacgttgaatccaattgtccgtgatcgccgaaagctttgcagtaaacgcctcgacaagccgggctttgccattttgctgaaaaaacgttttaggtgttttgaacattttcagttcatctgtaaactccccttcatccgctgacgcttcagtcgtttcccagctttcggtctcaggccggtcagcctggatatgaaccgaaaaataaggattgccggcaagccgctcttttacggcatttgcccattgttcgcccgcaaatttcagcatcaaattttccattctgatatcaagcgcttttagttcctgcaaaaattcgaattcatactcctttaagcagcttttcaaagcggtttgcagattggcgcgccaatctccgttctgaagcccggggtgtatcgcagctttaaataaatcgtgtgcaaaaaaggccagacgctgcttcatgtggtaaaattgctcttccacatccttttccgtcatttgaaggattgatgaccccttctctgcttcttcaatcgcagccaaagcctcttgataagcttttgcgacgcgcttttgctccgcttccttttcttcagcggaacggtgcagtgaaccgcggagctgaaagacggtttcacacagttttttgccttcatcaagcagctcttcgacagctgttctggccaaaccgttttcgataaaatcgtcgagctcccgctttagcctgctgaagtcgttgtacggcgaagtttttttgttgagctcctgcttgctcgatacatggtacaggtgcggattttggatgccttctttcaagagctctccccttacatagtcttcaaccgtctgtaattcgaccgggcttttcgcgaggtcagccgcatttaaaataaaaaacattttatccatgctgaaagcgtctttaatgagccccagcttgcgcaaaaacgaccggtccgctttggaaaatgaatgctggtagtatgttaagtaaagcagggcatcagcatctttcatgtattgaaacgcaagttcagtatgccgtttattcatgctgctggctcccggtgtatcgacgattgttattcctttctccgtgaccggtgtgctcaaataaacggtgacttcgcggacggcacaggccgtttgttcttcagcgacatacggatgcagatcgtcagcggaaatcgtcaggatttcctgatcattgatatatgaaccataacgcttataagccttgaggaagttcttgatcagcagccgttcatcatcgtgcagttcctcttttttcaagaggtttttaagtttttcgccaaaagcggagccttttgctgaagccatttttccatctaaaagctgatccagttcagctgtgatttccccttccgttttaaaagcgacttcggctgtcccgtcccttttgattcccgacggttttgttattttattaatcgttgccgttgtcggcgtcggagatgacggcagcactttccgcccgcaaagcgcatttgcaaaagacgatttgccggaactgaatgcgccgaagagcgccagggtaaactgccttgtatgaaggcgctccgttttgtgcaggaatgcttttctctgcttttctaaagccgggatatccgccaaaatccgggcaagttcgaaaaagtgctcaatggactcagaaacgccctttttcggatgaagagcctcgtctttacggctgctgttttccccttgtgcacggaccggttccgctcgcttcgcatcaagcgttttttcaaggggctttctttcggcggcataccaattcgccggcagatcgctctgattgccgtgttcccattgatcccagagacggtttgctttttcatatgacttctgctgctcaatcaaccgtctttcgcgctcggcgagcttcgcttgttccgcatcatattcagcttttatcgcttccgcctgcaggacgcttctttctttaataaaggttttgagctggtcgatgagcggctgcgcttgtctcttcgcctttcttctgatgttttcagccagttctttcgtgtagttcagcacgtattccggtgtaagctcagccccttttttccgggaacgaagcaggtcgttttcatctatcacggtccgaaattgaagaacttcccgaagcatttcatcattctggacgttaaagcatttcatgaatgccttgattgcttcaatgacatgccaatcgatttcggcttgaacccttttttggacgtcggcaagaaaagcttcttttcgtttttgtttttcttcaagcgttttggccttactgaaaagaattccttttttaaagcccttttcgattgattccaaatacgatttggccagctctctcatctcaaacggcgttatatttgcgttttgggcaatcgtttggatgtcttttttgatttgttcctccgcccgtttttcctgttctgtcaaatcggcaagctgtgattttaaagtatcgacggtttctcttaaggaagcggtttcttcagacagagccgtatcttcgtcactgatcagcattttgatatgttcatgaatcaagctgctgattttttgctccgtatatgcctgcagctgctgttcggattgatgctgcagtctttccagctcagcacggagccggttgaattcgttgagcggatgatcggctgcggtgaccgatgtaaaaaagaggtgttcttcactgatcccttctttcagcagcatatctagaacttgctttttataggcgtggaagtctgtttcagcttcgtcatggcggtcaatctggttcacgatgaaaaaaatattgggtatcttatcttttattgatcgaagaaatttcacattttcttcggaatggacatgattgtagtgcacgacataaaacaaggcatccgcctggtgaagaatcgaatacgccgatagaaaatgagcatcgtctgtagaatcaattccaggcgtgtcgattaagacggcctgaggcgctattcctgaaaaaggccccccgatttccaccatttcaatctggctgccgtccctgcagtacgcctgcactttttctttatcataagagtcgtccatctgagcgtatcttccatcgaccgtatggagtgttgttttcatttctccccggcggaccagcacgagattggcgctcgtcggaatcggacttgtcggcaggacgtcttcctgaagcagcgcgttcaaaagcgatgatttccctgctgaatagtgtccggttaacgcgatgtacacttcttttctcagccattttcggatgatgcccgcaagctgcgccgaccgcttgtcatccccgttttttgtgagctccccgaaaaccgctccggctcttttcatcagatcgtctttcgtgtttatttgtgccatgtttcctaccccttttatgcgttgttgtttgccatcttagccctttctcccattttacacaaccttgctgtatttttcttcacaatcggaaagaaaaacgagaaaaagctgccggtttcggcagcttcagcacgtgtatctatttatttttgcagattcgctcctgcgattccttttaagacatatccaatcaataaactgtatgtactgacggccgccagtagaaaaaacatcgtcatacgcgactcaccatcctataatgagaatgtttatcatcattataaatgaaatgataatcattttcaatggtgtaatttttctaatgcctgttcttccgtacgaatgcggatgtacatgacagcagcgttgagcaccgtaaataaaagtgcggtggcgtatgcctgaaaaagcaggggcaaaagcagaaattcaagagcgaccgccaaatagttcggatgtttaatccattgatagggcccctttcggacaagattcgttccagggatgacaaggattttcgtgttccagcatttccccagtgaaaagagcgcccaataccggagaacctgcgtgaagatgaggcctgtcaatacgacaagcgccatcggaagggttccgcgttgaaaagcggtcgtttcccaaatcaaagatacgaaaaacgaaacatgcatcgcgacgatgtaagggtaatgacgtttcccgtattcgaccgctccctctttcagagcgttttttttcgttgaacttcgcgactgccagctcaagcaggcgctgggcggcaaaaatgcttaaaatcgtccaaaacatgtgtcagtcactctctttttgtccatctcaagagcagcagctccgatgaaaagcccggtccgagcgcccctaagagaccgtattttcccggcacggggccgccatgcaagcaatattcctttaaaacatgcatcacagtggccgatgacatattgccgtgcctggccaaaatttttcgtgaacagtcgatgtgcgcttcggaaaagccaaggatttccatataagcgtcgagaactttttttccgccagggtgggccagaaatacttgaatgttctccaaagcgatatgttctttattcagaaatgcttcgatatcgttctttaagtgtgttttgatcaatgtcggaatgtccctggaaaaaacgacgcgaaaaccgttgtcattgatttcccatcccatgacctcttccgaatcttccaaggtgctggattgtgagcccaatacttccggaagaacctcaaatctggcttctgagaaatccgcttccttgccgcacattaaaagcgcggcgattccatcgccaaataaagatgtgccgataagattgcttttcgattgatcatccttttgaaacgttaaactgcacagctccgccgcaatcacaaggacatgggattttggaaacgctttgcagtattcgaatgctcgcgctatacctgaagcccctcctgcacagcctagcccccagatcgggatccgcttcgcccgttttgaaaaaggcagaatgttcataagcttcgcttcaatgctgggagtcgagatgcctgtagaggaaataaaaaaaatcgcgtcaatttttccgcaagggatttcttttttcaaaaaacggtcgtccgacagacaattcgaaacggcttcagcactgtgtctgacagccatatcaatgtacgtttgatttttctccttgaagctcttggcctctttgtaccaatccaaaggcatgacaaattgccgtgaagcgatttcgccattttgaaaagctgacagcagacgatcaatgtctttaaatgaatctttgaacatctccctcgcaaaaacggctgcttccttctggtcgacatggcagcgcggaatgcttgtccccgccgaaatgacataggccataacaccacctctgtttacagcttctcccgaatttggcggccttatgtggacccgttgaaaaaataggccatcagcacttcatcttcatatttcccgtccgacaaaacctgttccttttgaaccccttcaacgataaagccgcttttcttatagagcgacagcgctgcttcattttcggaaaaaacggtcaagcagagcttatgcaggcgatgcagcctgcaccatttcagggtgtaggacatgatttccctgccgatcccaagcccctgcgccttgctgtggagccaagttctgaacagacccgtgtgccgcttcattttgagttcgccgcgtatgacccgggcaattccgtacaccgtaccatcgatttcaaccgccgcatacatgttgtcttttttcatcatatcgctgataaatgcacgctcttcctcaagtgtgcgcggccgttctttttggatgtaaacgcccgtttgaatcacatctttcaccgcctcgatgatgtcaggggcatccgccattttgacgggacggatgacagcttcaccgccgtctttcgtcctgattcgttcgacaagctcattcacagtttccattcgttacgcctcctcttcataccggtagtatggcttatccgcaatgagaaaacacaacaaaaaaacctcacaatccgtgaggttttaaacggcagatttctcagcagaaactgcttcaggctgttcagcatgacgagaaaacggatgaatgtgaaagatcgcattcaagagaatggcggtaaagcttcccgcaacaattccgttctctgtcaaaagcttgacggcgtccggaaggttttgaaacatttgcggtacaaccgtcacgccgaggccgattccgattgaacacgctacgatcaacaagttctcctgcttgccgaaatcaaccctgctcagcattttgatcccgtaggcgatcaccatgccgaacatcgctaccatagcgccgccgagcacaggtttaggaatgatcgtcgttaaagcagcggctttcggaaacagccccaacaaaatgagaaaagctccggcaagcgcgatcacgctgtttttcttaactcctgtcagctgaacgagaccgacgttttgcgaatacgccgtataaggaaaggcgttgaaaaccccgcccaacagcacggcaatcccttcggcgcgatatccttttcctaaatccttttctgtcaggcggcggtccgtcaaatcgcccaatgcaaagtagacgcctgtggactcgacaaggctgacgatcagcacgagggacatcgtcaagatcggggtaacttcaaaaacaggggcgccgaagtaaaacggatgaatcatctgcacccagccagcgtttgcgacttctgtaatatcaacttttcccattagagcggcgccggctgttcctgcgatcaagccgattaaaatggaaattgacttgataaatcctgatgtaaaacgatataaaaggacgatgactagtaaaacggaaaaagctaaagcaagattggacagctcgccgaaatcgctgctgccttcaccgccggccatgttgttcatcgcaacgggaatcaaggtgataccgatcaccgtgacgacagatcctgtgaccacgggagggaaaaacttaacaagctttccgaagaaaaaagaaatgatgacgacaatcacaccacctgctatgatgcttccatagatcgctggaataccatatgtcgaggcgatcgaaatcatcggagaaacggctgtgaacgtacaccccaatacaacaggcaaaccgataccgaaaaagcggtttttccaaacttgcagcagcgtcgccacaccgcacatcaaaatgtcggcagatacaaggtatgtcagctgagccggcgtcagaccgagagcgccgccgacgatcagcggtacgacaacggctcctgcatacatggcaaggacgtgctgaatgcttaatgaaacagttttaccggctgtaagtttcatgacccaacctcctgtaaaaaggtaacttttccaccggcaagagaggcaatacgcgccagggattcgactctgattccaagattttcaagttcctccctgcccgtctggaatgatttctcgatgacgattccgattccgcacaccttagcgccggcctgttcaatgatggaaacgagccctttagctgcttgtccgtttgccaaaaaatcgtcgatgatcagaactttgtcatcctttgaaaggtggctggctgatacggcaaccgtactttccgttttctttgtaaatgaatagacagaagccgtcaacagattttccgtcaaggtaagcggttgacgctttcttgcaaatactaccggcacgcccagcttcaagccggccatcacggcaggtgcgatgcctgaggattcaatcgtcacaatctttgtgacgccttcctcccggaaaagcgaagcaaactcttcacccacagcaagcattaattccggatcgatttgatgatttaaaaatgaatcaactttcagcacttcgtcagacaacaccgtgccctgctctgcaatttttcgttttagcttttccattaaacccctccgttcatcaattgcccttcataaaaaaaaagacattgtccgctcggatttgaaatgcgagcgggcaatgcttaaaaagacgaattccgtcagtttgactaaaagacgttcgttttcttatcgcccactcatagtcggacatttacggtgcccggtagaaacttggcgtgccatatccacgcgattatatgagtgatataatgtatcaaattatatcaactttcgttccgaatgaaaagggataaaacaaaaaaagacgaacctgcacacattttttcatttgaacgttcgtatttaacagataattctgacccgaaaacccctcccatacagacgggaggggttttcttttacaaatagagtgttgtgtatttttcttccagatagcggattaaatgacggacgtttaattcttcgcctgtcgcagatttaatgatttccagcggtttttttcttttgccgtggatgtgtacatgctctgtcagccactttctgatcggttgaaaatcgccgttttcaatcagacggtcaaactccggaagatctttcagcatgcttgacttcagttgagccgcatacatatatccaagcgcatatgaaggaaaataaccgaaatctccgccggaccaatggacatcctgcaggattcctttagcatcgtcgggaggcgtaatgcccaggtatgcttcatatttgtcattccatagttttggaaggtctccgaccgatacttcgccgctgaaaatcgctttttcaatttcatagcggatcataatatgcagcggatatgtcagttcatcagcctcgatccgaatcagcgacggctttgattcattaacggctctgtagaacccttcggcagtaacgcctgcaaactggtcagggcttgcttcctttattttatcaaaataccgcgtccaaaagctttgatgcctgccgataaagttctcatagaaaagggattgagattcatgaatgcccattgatgcgccgtctgataaattggttccgcccagcgcttcatcaatgttctgttcataaatggcatggccgcattcatgaattgttccgaaaacagccgaccgaaaatcgttttcattgtatgctgtggtcacccgggcatccccttggctgatcgtcacctggaaaggatgaaccgtctcatccaggcgccccgcctcaaaatcatagcccagctcctgtaagaagaagtggcaaacatcgcgctgccgctctttcgggaaatgatcgtgaacaaagcccgtatcaggctttttatcactggcggcaatcttttgcacaagcggaacgatagcctcccgcaattcagaaaaaagggcgtcgagcttttcgactgtaacgcctggttcgtattggtccagaagcgtgttataaggatggccttcatatccccagtatgagataaaccgttttttaaagtcgatgattttttctaaatacggagcaaagagagaaaaatcggacgcctttttcgctttttcccagacggattccgctttggaagtcagtgtcgtatattctttgaactcctcttccggaatcttgctgtttaaatcgtactcttttttcgcttcttcaaccgctttctgtgtatcaaaaggcagatcttgtttttgcccggctaaggtatccaaaagctctttcatccgcggggacgttctcatctgaaagacgtctgccgacaattggccgatagcttcagcgcggctttcctccccttttctcggcgcgcccgttctcatatcccagtacatgacattaatcgcctgctcataccggctgattttctttaatgtttctaaaaactctttttcatatgtattgatcgacatcattcatcctcctcttcccgtatacgatgcgaattgtaatcagactaatggaaatatttacgaaagtcaacttttatgcagccaaaaaaagaaaagcgggatgtccgcttttcttatacatagactggctgaacaggaagaacagattcgacttcttttatcacattccattctttttcatcgcccgcaaaaatgctgatcgtgccgctgtcgctgtttgatctgatcagacgtccgatcccttggcgaagtcttagcagcatgtaaggaaggtctacttcgcgaaaggcgttttccacgccgctccgcttcgcttcaaacacgggatcatgcggcggaaatgggagcgaccagatgatgacattttgaagcgggtctccgggaatatcgagcccttcccatagatggacagagcacaagacggattcttctaccgtttgaaacttttcaacgattgtactgatttcttcatccccttcaaagtaaacgggaaacgaaaatgattcctgtgcagtccggcgcttgaaggacagaagctcttcaaaagacggaaacaggatcagcgtcttccctccagattctttgattgcacggattgccgctttttctttcgcttctttttcctcgatttgatggatgtacactttcatctgctcttcataatcgtacggcgaatcgacggtaaatgataagtaatcgcggatcccgaggctggtcgccaaataatcgaacgatccgttttccgataatgtcgccgatgagaaaataaacggaatctgcttggagaacaccttttctccgagaacttcagagacggttctcggcatgacgacgaatgtcgactcaagctctttttgttcaagccagctgatcgcatttttcctgtagagcgaaagggagtaagccatctgttctaaatactcttcgacaacagttaaagcgtactggtcgatcgtgtacagctcgccctcaaaaacgagcgcctctccgattttttcaagcaaatcatacagctcggcggccgcttttttcacatcggtatcgtctttgatgcgcatgcgctcagagccttctgctttttcggcattttccgtaagcaaaccgaaaaattcgtcgttggcgcgaagcgcttcttcgacaagctctgcaaattcttctctgatgtcattgccgagcaggcgctcaaggaacatttcgagcgtggattgtttcaccctgtatgtcagcgctttttgggccgcaaactcgagcagatgcccttcatcaaaaaccactgcgctgtgctccggcaaaagcggaagctggccttcccgctttctcgcctcttccgtccaaacgtgctccatatagaaatcatgggaacagatgatgaaatcggttgattttcgataatggtctcttgacagtgtgagcccgcagcggtgcctcatatcacatgtaagacagtcctgaaaagagtcgtaaccgatttcagaccactcatcgtttgataaagacgaatactcttttcggtcgccgtacggataaaaagtctgcatgccctgcgattcgtgaacgaaagacggcagactttcgtaaaggtcaagccatttttcatcatcagagcgctgcatcgttttctccagttttttcaaacataaatattgatcatgcgacttgctgagccttgcgtcgatcgtcaggcctaaatgctcggaaattttataaatgtcgccttcttttttgacgagctgttcgatcagcgtctcatccgcgcaggcgatgaccgccggcttgcccgtatacctggcatagctcaaggcaaacagaagatagacgagcgtttttccggtgccgacgccggcttccgcaaacatgaccttcttttccttaaatgcccgctctaattgaaaagccatgaatatttgctcatcgcgcaaatcaaagcctttttcaggaagaatatcgtaaaatacatcaccgatccaattgttcagttcttcataaaagttttttgtttttgttaatgaaaaaggcagacgagatgctgtcaccctgctccaacccccaactatcgagttttcagaacttctatcctatcactatgattcaagaaattcaacaagaaagatttgaaaaaaggagcaggaagcctctctcaactatttccggtaaatcgaatgcgtcaaaaacggatgatctgtcgattccatatggctgatcgcgtttttcaattcttcctttgcatatgtaaggcgctcttcgccaatgtcctcgagctggctttctgacgtctccagcgctttttgaatcatttgaatatgatcgctgttcaacatgaaatcacctcttttcaaatcgaataatcccgagtatatgcaggatgaatcgtttttatacaggctgattttatgttttttctttctatactcttagggcggaccgttttcgcagcggtcaaacacccttttttcagtcaaacaaaaagcttaacaccagataacaaggactgtgttagacaatgtgctctttatccatcataaaaacccagtctattccatttttctatcatatcctgtagggacttaaaatttatagactaaaggtggagagtacatgtattattatgaaccggcaaagaaagattattgggattatgattatgatccttacaagaaggatcacgactattgcaaaaaggacttttactatcatgagccttgcaagaagaattactactatcacgagccttgcaaaaaagacttctattaccatgaaccttgcaagaaggattacgattattgcaaaaaggattatgactaccatgaggattacaaaaaagactacgattaccacaagccttgcaaaaaggattacgattactgcaaaaaggacttctactaccatgagccttgtaaaaaagactatgattaccacaagccttgcaaaaaagactgctattatgagccgcgcaaaaaatgctatgattcgtcttataaaaagaaaaatgattcatggatttattagtgagtcgatgttttgccatgcgcttttaaggggctaactccgagcgggcgcgaattcaatacgccgttcagcggttccggctatggaaagaaaaaaggctgccgttttacatggcagcctttaaacttcacttttctttgttcggttttggcggccttttcccccaatactggtaatagtccgtcttaataaaaccgttaaagagcttccgttttttcgttgcttttttcccgtagcactcttcaaaacgctcgtttgatgtcagcatgtagacagaccatgtatcaagctcggcaaatgctttgcccatatccttatacatggcttcgactgctttcttttcaccgaggcgttccccgtacggcggatttccgacaattacgccgtattcctctttcgtccgaaaatcctttacctgcatttgcttaaattcgatgaaatcggcgagtccagcttcctcggcgtttgccttggcgatttcgatcatgcgatgatccaggtcataccccgagattgaaagcggctgatcataattcgctttttcttcgacttccagcctcgcttgatcccacacttctttaccgatccattcccatctttcagatgcaaaatccctgttgaaacccggggcgatattttggccgatcaaagcggcttcgatcggtatcgtacccgaaccgcaaaacggatcgacgaaaggcctgtcaggcgtccaatttgtcaatagaatcaaagctgcagcaagggtttctttcagcggcgcttccccttggccggttcgatatccccgtttatgaagcccggctccggatgaatcaagcgttatgaccgctttgtcttttaaaagagagacttcaattttgtataccggccctgtttcctcaagccactcgccctgtgtctgatattctgatttcagcttctcggcgatcgcttttttgacgatgcgctggcagtccggcacgcttgcgagcactgatttaacagactttcccgtcacggggaatgacgcgtgttcaggaagataggcgctccagtcgatcgcttttgtcttctcaaatagctcgtcaaaggtcttggctgtaaattcggcagcctgcactttcaccctgtcagcggttctcagccacagattggctctgcagatggcgagggcatcgccttcaaacacgactttaccgttgtcaactgtacaatcatatccaaggtcgcgcacctctttggcgacgatcgcttcaattcccatcggcgctgttgcgattaatgtataggttttcattatatcacctgtttttatgtatgttttttacatgataaaagctctcctacctgcggagagcttatacattgtcatcatcataatagtgtgtaacgttctgtaagccatgttttgttccgtcgtactgccgtcggctgctaagcctcgtactcgggtggtaatcatctatctacagagtcaactctgtccttccttccgttcatttccgtccagaaggttcccctaccaaaatttgggtttctcgctcgaggggtttaccgcgttccactctcaccatttctagtgagacttcgtcactgtggcactttcaaggatactcagccatatccataaaggacgtaggcttttttcctgccgtcagccttctgcaaggctgccctagcttatgacttcgctaggcacgaacactacgggcatctcagcaccgtgcgagcatggactttcctctacagatgtaaaatctgcagcgattacccgaacgttaagacattcactattatagcttagtttgttctaaagggcaagcggttttcatcaatcgtataatttgcttccaaatacatgtttttccaaattggaaagtcgttttagaatatcaaaattggtcgtatttgattgagccggctgtcgcttgttggcttcttcaagctgttttttcaactgcaggttttcctgctgcaattcttcgatttcctgatggaaggcttcatagtccttaataaccatgtccaagaatttgtcaacgtcttcctgcttgtagcctctgactcctgttttgaattctttttccaaaatttctttagcagaaagcttcactttatcagcaagcatctttttcacctcatatcgtgaatcatcatcttatattttttcagaaaacgtgtgcaatgtcaaattttctcttgcactttttactcttcgtaaaagctgcattcttcaacagtgactctcaagtcatccatcgtaatcgtgtagatcggaaaatcgcgtttttcctgagccttttttgcttcattcagcatatacacaggcgagccttcgatttcttcatcgtacagaatcaataagccatccgccttttcgatgaagaaccggtttttttgtttgaattgcaccgggctttcgtacggcctgtgtgtcaagctttcagtgaaatcgctggctgcgagcacggcttcatactgctcttgatttttctcgctccacttcttttcctgttccaaaaacggagtgatgaccgccactttcaagtcgggatattcttcctgcagcgaaaacgcgacttccgccgcccatagttcagtcccgagctggcccgagataaggacccattccaggccttcctcaaggagagcgatcatccggttttcaagcgctttttttatgtagaacagggccttgtcatcgtgtttgaaaatcccgagttcaaacggcttgtaccctgtaacggccaatactttcattatgatcacctgctaaaaaatggggccgtattccgccccatttttttaaaaatattctgttagtcacgttcaatccggcgctcgttcatcctgacaaaacttccgaaaaacctttttagtaaggccccatgcccattccaggtcccggcatccctccaggcccaggcatcattcctgctccagggctcacgaagtgctgatgtgacgccttgttgacagctgattgagtttgcgggtagtaatgaacatgctgaaaatgctgatggttgacattcgttgtgtgctgcgggtgaatgtgcggtacgacggttttgctgtgcgtatggttgtagcagcattgagtaggatgaacaatcggcgccattacatgcggtttacagtgcatgaaaattcccctttctttaagcttctatatacactattaaactatgaagcagggggtaaacatgtactaatataaaaacctattttaaaagtaagccataaagctttccttgaaattcgtcatgatcaatacgataaacaatacgacgacaaaaaacagataaaacagccccttatacatatcgacgctcccttcaaacgattctaacgctattttacaagaagcgatcggtttctacaattcataacgtgcttgaaatgtttggctttcgaagatcgtcgttttctgcgcttgcccggggaatatttcgtccgtatttcctttccagccgctcgcgccttctcaagaggccggccatttctttttcggtcagctcaaacttttgtgaaccgtgctgctccagcaggttttccgctacctcaagagcggcccgaatatcccgctttcgatgttcaaagtatttggcaagttcgatgcctgcgcgccaggcggtttttccgtcttctccattttggagcttcagccaaagggctgcggcttcttttagcatgccttgttttttatactgcatggataaatcgaatgatgcgcgttcagactgttcaaaaggttttttttcaagctcttgcaattgcgctgtcgcaagctctgtctcccggttggcgaggagccattttgccatcgcgtacttttcgtttgcttccgctgtctgctccggagtgaggattttcttcgataaatggatgtaaagagtgattaaagaaagcacgtcaagctcattatggcgcaaaacgccttcaatgatttccggccgttcctcctttaaaaaatgaaaatacatcatcggcgccagatagcccggcgtatcttcagttcttacaacgcccagctcttccttttccaccgtccctaaggaaacgcggtcaaatttatgcttccaaaggcggcgggatccgtgcagcaggtcaaagtggccgaaatccggaagctttgggaccctgtcgcggatcagcgtgtgcctcgttttcacctggggccagtcgaacgctttgccgttataggtgacaagagactgaatatcgacttcactcagaaagctgtgatagagggcggcttcgtaccccggctttggcagcagatgctgtttgacgactacgcggtcgtcatacacccttgcatggccgagcaaaaagatcgcattgccggccccgcctccgagaccggtcgtttccgtatcaaagaagaagagctggctcggtgtgtaccctttgcttgaaagcgaatgggaaacggcgctgttgttccatcgcctaaccgtctcatgcagctcagaaaacgcgtaatgaccatgaacatgagtcaacgggtaaacgacttccctgatcaggcaatagcattcctcaaacacatatggtttaacaccgagttcggcccattctttttcaaaactgacggacaaggaagtcagcttatctgcgggaggttccgttttttcttctttcgcttgatttcccaggtgatgcttatagcgattaagttttcgttttaaagacattccgctcaacctttccagccttttaaaaggcgcagagcattgttttttgtctgatcgccgccgctcactcctatgcaggaagggcatcctgactcacacggacatcttgaaatcagccgatgcgcttcactgatgatctcgggcatttgttcatacactttttgtgaaagacccactccgccgggatagcgatcatacaaaaagatcgtcggcttttcgttatgaacggctttgatttgcggaaaaacatgcagatcagatggatcgcacatcacttttaaggcggctacatgcccaagaacgtttgcagtcccaagcaaagcctcttccaatttgatgtcattccaattttgccgctcactatcgttcacctgcacccaagccgcattggtatgcagctcctcttcaggcagatgaatcggtcctgaaccgatattttcatgcgtctcaaattttattttcttaaaaatcgtcgcttttgcctgaacggtcacatccccaaaaccgaacgctgcggtttccgtctttttctccttgtcaacctcgagaactctcagcaagacggcaagattggcatcggtatagtaatcaacttgaacctcgcggacaaacgcctttttctcctcccagtcaagcttttccacctggtattggatgccttgatgcaaataaatggcttcatcgtgaagaagcgtcatggcgctgaacctgtccatttccccgattactttcgccttctcgcgtcttgactgatcaataatcacaacattttcctgagaagccgatcttaagctgatgccgtgcgcgggaaaagcgtcattcatccagtggtacgtattcccggttaagtggaggaccctttcttctgccaagtagtcaagaatatcctcaatttcgataccgccgaatgtgtccgttcttttgaatggcagttcaaaggccgcgcatttgatatgatcgacgagaatgaccaggttgtccgggttaatgacggcagtctcgggattttgtttaaagaaatagtccggattctgtacgatgtactgatcgagcggggcggaacttgccaccatgacaatcagcgcttcgttgtgccttcttccggcgcggccggcctgctgccaggcgcttgagatcgttccaggataaccggtcatgatgcatgtctgcagctgtccgatgtcaacgcccagttcgagtgcattcgtgctgacaacgcctttgatgtccccgctgcgaaggcctttttcaatgacgcgccgctcgttcggcagatagccgcccctgtacccctgaatcgaatgcgggccgacaatcggcttcatcacttcctgcaagtatgtcaatataatttccacccgaactctgcttcttgcaaacacaatcgtctgaatgccgttttttagaaattcggatgcgagctttctcacttcaagggtcgcgctttttctgatgttaagggaacggttgaccatcggcgggttgtaaaataagaagtgctttcttcccgacggggcgccgttgtttgaaatcaggtgcatcggctgccccgtgagcgtctcagcgagctccaatggattggcgatcgtcgcggatgtacagataaactgcggcttgcttccataaaattcagcaatccgcatcagccgtctgatgacattggctacatggctgccaaagactcccctgtatacgtgaagctcatcgatgacgatgtatttcagattttcaaacaatgacacccattttgtatggtgaggcaagatcgccgaatgcagcatatctggatttgtaatcacgatatggcccgcttttctgactttctgcctgatcgaaggcgacgtatctccgtcatatgtataacagttgatcgacgcaccgatttcatcgattaattcattcagttcgcttttttggtcctgcgacaatgctttagtaggaaaaaggtataagctgcgcgcatcttggtcttctgtgatcctctgaataacgggcagattgtagcaaagcgtcttcccagatgccgtcggcgtcacaagcgtcacgtttttgccggcggcgctgtgcagaaatgcgtcggcctgatgggaatacagcttttctatccctctttgctgtaaagcatgcacgattctcttatctaaaccttcaggaaaatcgcagtaatccgcttctttttcctcgattgtatgccaatgaacaatttgcctgctgaaagcttggtcttctttcagaagctgaatcatatctgtcaaatttcgtttttgaaacaacgctgtcacctctcccttctattttagcgaatgtccgttcgttctgaaagaggtgatttcctgacaaaatgaaaaagcagagaagcgctctctgcttttttcttttactttactttaagctccatgagctttgtctcgctttttttcgctgctgcctcttcatgttttgtaacgcgttccaacacatcgccgttcataatgacgatcggcgtaattgtgctgctcgctttttccttgatcagttccaaatcgcatgttattaaaggatcgccgacttttactttgtctccttctttgacatgggctgtgaaaccttcgccttccattgctacggtttccagaccgatgtgaatcaagagctccacgccggacaatgaacgaatgccgatggcgtgttttgtgtggaacagctggatcacttccccgtcgacaggcgatacgatctcgcccgcggaaggctcgacagccattccgtcacccatcatcttttgagagaaaacggggtcaggaacttttgaaagttccaaaacttgtccgtcaaccggtgaaaaaacggtttcttctttcacttcatcttgtttttgaccaataccgaataattttttcagcaatacagtgggctcctttcaaaacgcctctttatgatggctattaaaagaggaacaggttaaataccaaatcgttggattccccactatttaaccacactttcaaattcccatcaatgaataaccatatgaagagcccctgcataagctgaaaataaaaaatcgagggtgatgaagaatggattttaaggaaaacgacaatcactcgctcagcaaaaaggacgaaattcaagaagctgttgaacagttgttttacaactcgcctttccacgatattttaaattcattccaaaaactcatatcagaccagcttcagaattccacgatttccatgaatatcagagaggatgatggggcgctttacgtcgatatcgccgttcctgaatcgtttcaaaatggagatattatgattgaagcgaaatcacggtatcttcatatcgccttgaaggagaaacaagaaagcggcggttcttcatcatttacaagcctgtccagaaccgttctgctcccataccctgtccgtgaagaaacaatgaagacgtcgtggaaccgaaatgtcctcacggtctcattttcggagcaaaaaaagcatgaatgaccttcatccatgcttttttttatttgaagaatcccataaaccctttggcaagcgctccgacctgattgaccgtgctcaccatctggcctgcggtgtccatcattttgctgaaatcaatctgcccgttcttttttttgaattgcgacagaaagctttgaaactgtgacggctgatggagattaggccgcggcgaagggtatggatgctgataaggaaatccctgaaacggcggaagcggctgcatttgctgctgaacaggctgatgatagactgaaaacgggtccaaattctgctcaatcggctgctgatatggctgcggccgctgagcaggatgggcgtacggaacggtttcctggctgaagtacggctgaacgggatgataggcctgatggttttgctgataggcttgaatatgcgcaccagggccggaataaggatatacggcggatctcctctcttccatctttcctctcctcctatagcccttttttataagtgtatgatatagaggcatttctcgttccaaaggttctgtcacaagtttgtcaaaaagtgtcgaaaattttaatatttgaaaaacagaaaaaagtcgaattgttatggtactatattattaatataaaaggagaggggatgcaccatatgaacgtatcatacttaagaaattgttttgccgagatgaaacagtatgagacagactgcatgaacaaactgatggatttcgctaagtttttgtatatccagggacatctgacattaaacgaatttcgcacaagtatgaaagttcttgaagcgaatggcgcacagcaccctgcttatgatatgaatacggacgccagctaaataaacagccctcataaaaagagaagaccgggattaggcccggtcttcttttaatatatcgtcttctacgtttttgagcgtgtagaggacggattccgtcagatctttaaagcgttttttatgaattttgcagaaataggactgcatgaaaatttcattcgcattttcctcaaccgagttgagctgttcttcgtaaatgtattttggccgattggccttgatataagacaggctttccgccagccagcttttcactgtttgttcgaacctctcgacagaaggtttgacaacctcgaaaaaatcgtattccgtcccttcctcttttccctttctatatcgttcttccgcttcttttacaaggcggattaaatcctgtgtctgtataagaagagattgtgtatccaattttttcacctcgggtttatcgtaccaaaggaagacggccgttacaacgaatccggcttaagccgtctctaccccgggctccactcccattaacgtgctgtttaaacatgagctgagttctgccagctctttttcaatcagatcgagccgttcgttccaggcagactgcttttcctgctccgtccggcgtacggcttctgtcaaagccttctccgcagacgacatgtctgattccgtttccaaaagcatttgaaggaccgagtctttgcttgcaaatccgttcatttgcttccctcctttttgatggccttctatgcattctcccttatgcgcactctctcctccacagctgacaaaactagaagcaaaccgccaaagaaactcattttccagccaaacgcgccgctttcgacaagtgatcttgcgaaaaatggtatgatcagcgcttttttgcaaaatctaaaaaggtaaggaggtgcccgctgtggaaaacaataaaaagaaatcacctgcgaaaacaaaaccagatgctaaacaaacagacacactggataagaaattaggcggacctaaccgcccgtctacttaaaaagcaaggagaacccttgcttttttctgttttcacctcttattcagccaatgctccagcgaaaacaatgcctgcagctgccttcttttttgaaaataccaatcggtgatttcgatcgttttcggcagtttttcatctttgaacatcgcctccctctttcctccgcgaaaccaatcgcattttaatccgtctaatgaatgggcaacaacgggataacacgttctcaaaaacggcgaggttctgattttaacccctgcccagcgctccatatcaaagcgcgacccggtatgcggaacacatgatgtaaaatgaaaaaaaccggggaaaagctcaggcgaaaacagcagctcgcttaattgcttgccgagcttgatcctttcctttaaactggtgaagcgtttgacagacacaccgtaaaaaacgccttcaaccgtcgggaaaatgaccgtgttgaagtgaaaccattcacacagctgaaaaggaatcgtctgaaaaacattctttttaaacaaaggattttgtataataggagtttggatagtgttttgttcatttataatgagagcgtacatgagccgcttttgatcgcgctcatgccagaaccgctcccactccgttttcataaatgaagacacgccaaatgaggagagcaaatgaaacagcggctggccaagctgcttggaccaatggtatagcaggagctgcggataggcgtctgaaaagatcagccagttcgctctctcatacgctaaaaacagccatttctgctgaaaagccgtaagtccgagctcgaataagcgcccttttaaatcggtcatcgaccagccggcattccgggaaacaaatgaagccaaaagcgaccacttgatttcaggatggcggtcaaagtagcgtttgtaggcatttgtccgtgagatattgtccttgttcagttttgcggtcagctcttgaatgcggctcgtcagctccgccgcggaaaaagtgttgtgcaagatcagccacttccgttagtatccagattttttgtaaaaggaggatgaagaaagtgattcgttacccgaacggcaaatcctatcagccgaaaacagctgcctcatccttgcaaaagaagccgtcgtattccaatcgcggcatgaccctcgaagatgacctgaatgaaacgaatatgtattatcaatctcattcgattgcggtcatccataaaaaaccgacacctgtacagattgtccaggtcgattatccgaagcgaagcgctgcggttatcaaagaagcatatttcaagcagtcgtcaactactgattataatggggtttataaaggccgctacatcgattttgaagcgaaagaaacaaagagccgaacctcgttcccgcttcagaatttccacgatcatcagatcgagcatatgaagcaggttgtggcgcaagacggcatttgttttgttatcatatccgcttttgaagaaatttattttttggaagcagaaaaattattttatttctgggagcggaaaaagcaaaacggcagaaaatcgatccgaaaagacgagcttcaggaagccgctcaccccatttcacttggatactcgccaagaattgattatattaagattattgatcagttgtatttttcgccatcataaattatgattttaaagtcatgtgagcggaaaggtttaactacgaaaggttgagatgttatgtcagatcaatttaacagccgccaggaacggcgaaaagcccagcagggcaaaagcaggtctaatactcattctaaacccaagaaaaagaaaaaagcaggattgtttaagaaaattcttttatccattttaatcatcggtgttatcggcttgattgccgggggcgtcacttttgcggtgatggtagcggactcgccgtcccttgatgaagcaaaactgaagacaccgtactcttctaccatctatgacaaaaacggaaaagaaatcgccgaaatcggttcggaaaaacggacgtacgtgtcgattaaagacatcccggattccgtcaaaaacgcatttcttgcaacggaagacgcccgtttctatgaccaccacggcgtcgacccgatccggatcggaggagcgcttctggcaaacttcgaaggcggatttggttctgaaggcggaagtacgatcacacagcaggtcgtcaaaaactcccttctgtcacatgaaaaaacgctgaaacggaaagtccaggaagtctggctgtctttccagctggaaagaaaatactcaaaagacgaaattcttgaaatgtatttaaatcggatttacttctcgccgcaggcctacggtgtcggaaaagcggctgagcagttctacggggttacagatctaaacgacttaacggtcgagcaggccgcaacgcttgccggcatgccgcaaagcccgaataactacaacccgatcaaacatccggaaaaagccgagaaacggcgcaatgtcgtgctgagcctgatgaataaacacggctttatctctgacgcagagtacaacaaagcgaaaaaagtagccgtcacaaaaggccttgtatctccgaaagagtacgcaaaaacaacgtccaacaaatacagcgcgtttatcgagcaggccgtcgccgaagtgaaagaaaaagcgaacgtcactccgggaacggacggactgaagatttacacgacgattgatacagacgcacagaattatgtggatgagctgatggacggcgattctattcagtataccgaaaaaatgcaggccggcctcaccctgctcgatacgaaaaccggagagatccgcgcgctcggcggcggacgcgaccggaaagcaggcgactttaactatgcagtagatactaaacgtcaacccggttcaacgattaagccaatccttgactacggccctgtcattgagaacaagaaatggtcgacgtatgaacagattaaagatgaagcatacacgtattcaactggagatccgattaacaactatgacagaagctacagaggctggatatcgatgagagaggcgctggtcgattctcgaaacatcccggctttaaaagcgttccaggcagccggcaaagacaatattgtaaaatttgcaggcaaccttggccttaacataaattcagatgacttagtggaagcttatgcaatcggcggcttcggaaatggtgtgtcgcctctgcaaatggccggagcgtacagcgccttcggcaacaacggctactacaatgagccgcatactgttaccgcggtggaattcaatgacggcactaagcttgatttgacgcctgaatcaaaggctgccatgagcgattataccgcatttatgataacggatatgctgaaaagcgctgttcagcgaggaacaggaacagcggctcaagtccccggcgtcactgtagcaggtaaaacgggtacgacgaactttaccgaggacgacattagaaaacacggcataaatcgaaacggagcgagagattcatggttcgtcggctatacgccgcaatataccgcagcggtctggaccggtaaagaaggctttaattcgctgagccagagcgaacagcaagtcgccaagctcctattcaaaaaactgattgccaaggtggacaacggcagcggctcatttgaaaagcctgacagcgtcgttgaagcgaccgttctaaaaggctcgaacccgccggtgctcgccagcagcaacacgcctagcgataaaaaagtcactgagtactttgtaaaaggcacacagccgacgaccgtttcgaaaaaatatgaagaaaaagaaaatgccgacaagccgtcaggtttgagcgcagagtatgatgaagcatcaaagagcattaagctttcatggtcatattccggagacggtgatgtatcctttaaagtcaaacagtctgttgacggaggcggatacagcgaaattcaaaacagcagtgcgaaagaagccgtcataccgaatgcaaaagaaggatccgtttacagattccaagtcactgccgttaccgaagatggtgaaagcgaccctgcttctgtaacgcttaaagtcaacgcggctgatgaggatgagtcaaaaacggacgatgaaaagaaagacgatgacgagaagaagcaggatgctgatgatgatcaggacaaaaacaaacaaaataacggcaattcaaatcagccgaatgatcaaaatccaggaaattccgatcaaaacaatcaaaatccgggaaattcagaccaaaacaacggcagaaaagatgatgacgccgatgatcaagacaacgatcaaaataaagataaagataaagacaaaaacaaaaacccggatcaaggcgccaacacaggtgatcaacaaacaaattccaacggtcaatcaaccggcaccaattgatcaaaaaagccactcacaatttagtgagtggcttttttatgattcatggcaacatatttataaaattgctttttcatttccgtaaacaattcgtcaagctggataaaacaatggtactgcgtcggtttcagcaggatgaactcgagccgttccgtccagttcatcggctttgctccaaaatccttccgggtgatgatctcccagttgagacttttgacaggctcccccatcgtccagtgaaggcttgcgatcaagcagcacaccccgttgagcatgtcatcctggctgcaccttgattttctcgttttaaagacgggcagaagcttttcttttgtgcgttcccattctgcaaacagaagcgggacccattcttccgcatgctcccaaggcttgtcctctcctgcgtcttgaaaaaaatcatagcagagcggattttcagaaagtaccgcaagcctttcgccggattccggccttttcttccgcagcgttttttcgtattcgtccaacagtgaaacgcttgtcacagcagcttcaccagcccttttttatatcgtttttgcccttccctgcacagagaaaacaacgggcattcttcgcatttcggtctttgcgccttacagtgatagcggccgaaaaaaatcaagcggtgatgagtgacggaccactctgattcaggcacttttttcatcagcgtcttttcaacttccatgaccgaatccttccatctgcaaatgccgagcctttttgaaactctttccacatgggtgtcgacggcaatggcaggaacgccgaatgccacggaaacgacgacattagcggtctttcttccgacacccggaagtttcaccagctcatcgcggtctctcggcacttcacctccgtagtcttccagcagcattttgcacagcttttgaatatttttagctttgttgcggtataagccgatcgatttgatgtcctgctgcagctcttcaagcggaactgcaagataatcttcaggttttttgtatttttggaaaagcgttttcgtcactttattgacaagcgcgtctgtgcactgggccgataaagcgacagcgatgacaagttcaaacggattgtcatggactaattcgcactctgcatccggaaacatttcaccgattgtgtctaaacaaaactcgatctgtttttttgttagcatgtcttcacctttcactttattgttcaagccaattgtaaaaaggaacctgtcttgtatactccttttgctcattttgccgcggagcagtcttccgcctgaatctttggctgtagtttacggcttgttcgactgttgaaacgccgtttttcttccactcaaacagaatccggtcaatgtagcggaaatttaattttcctgatatgacggcttctttgagagcttgtttgatcagctgtgcatcgtgatgatcctggtcaagccagatgctgagcgtctcgcattccagcggagaaagcggtcgtgcaaactcttcttcaaagattgtataaaggctcttctgttcgccttcattctgttcggcgagttttttctgctcggccatttctaaaagctcaaacagcttgccccagagaggttcgagcgaatatttttcaaatttaatgccgttctggtcttcgcattcttctatatagatgaagcctttttgaatgaacattctcagcatattcatgcattcttcggtttcaatcgacatcgtcttgcttaattcctccggcgtcggaaaaaaagaacctctttcaacatgcattttaatgtttaagagcagcatgaattctgtctcgtttaagccaagctcccgatagttcataaagagcagattcggaatggtgacagctcccatatcctgcatcttaataaagtgctgttttttcattcgatacacctcttaccttccagtatatcatggatgactgtgaaaaagtctcctgcaatcaggagacttttttcttaaggatataagcgatttaacagtcttgggaacggaatcgtttcgcggacgtgcggagagccgcagatccaggcaaccgtccgttcaagtccgagtccgaaccctgaatgcggaactgagccgtattttctcagctctgcataccattgataagcgtccgattctaaaccgtgctctttcaggcgcgcttcgagaagctcgagatcatgaatccgttcagatccgccgataatctcgccgtagccttcaggcgcaatcaagtcagcgcacaatacgacatcttccctgtcaggtgcaggctgcatataaaacggctttaatgatgtcggatagtgtgtaataaataccggcttgtcatagctttcagcaatcgccgtttcgtgaggagcgccgaagtcatcgccccattcaatatcgtcaaagcctttctcttttaagaactgaattgcttcatcatacgtgattcttgggaaaggcgctttgataagctccagcttggaagtgtctctgccgagcgtattcagttctattttgcagttttcaagcacgctttggacgataaaagagacatagttctcttgaacttcaaggttttcgttgaattcgacaaaagccatttccggctcgatcatccagaattcgatcagatggcgcttcgtttttgatttctcagctctgaaagtcggtccgaatgaaaagacttttcctaaagccattgcagcagcttccatgtaaagctggccgctttgcgaaaggtaggcatcttcgtcaaaatactttgtcgcaaaaagctctgtcgttccttcgggtgcgcttcccgtcaaaatcggaggatcgactttaacaaagccttccttattgaaaaattcgtatgtagcgcgaataatctcgttgcggattttcatcgttgcatgctgccgttttgaacggagccacaaatgtctgtgatccatcaaaaattctgttccgtgttctttaggtgtaatcggataatctgtcgcttcatggatgacttcaagcgacgtcacagcaagctcgtagccgagaggcgaacgctcgtcttctttgacgacgccttttacatataatgatgtttcctgtgttacagacttagcggtttgaaatgtttcttcgtccacttccgctttgacgacgactccttggataaagcctgtcccgtctctaagctgcaaaaacgcaattttgccgcttgaacgtttgttggcgatccaagcgccgattgttacttcttcaccaacatgcttgtacacttggtttattgttgttttcactatcgtttccctccaaaacacgaaagaattcggtcaagccatcattctttctgacgtccataacgtatattataccttttttaaatcgatcaggtcaatgcaggttgtgtgcatgaaaaaagcgtccgcctgcggacgctttttaatttctagcggctgcgattcacgacaaagcggcggatgcgttcaaccgcttcttccaaaagtgacagggatgtcgcatacgacagacggatgttgtccggtgcgccgaaccctgaaccaggaacgatcgcaaccttttcttcatccaaaagcgcttcggcgaattcatcaacgcttgaaaagccgcacgattctgccgctttttttgcattcgggaacaagtagaaggctccttcaggcttcaggcatgttaatcccggaatgtcaacaagcagttcatacaccttgttcagccgttcttcaaaagcttttctcatctcctcaacaggctcgtttggcccattgtaagcggcaatggctccatattgagcgacagatgtcggatttgacgtgctgtggctggctaggttcgtcatcgctttaatgatcggttcgctgcctgctgcataaccgattctccagccggtcatgctgtgtgacttggaaaccccgttgatgatcacggtttggtttttaagttctggagaaagctgtgcaatggatacatgtttttttccgccgtaaatcagcttttcatatatttcatcagatacgattaaaacgttgcgtcgaaggcatacttcaccgagagctttgagctcttcttccgtatacatcatccctgtcggattgcttggggaattgatgatcacagccttcgttttttctgtgacggctttttcgagctgctccggagaaatcttgaagctgttttcctcaaggccttccacaaacacaggtttgccgcctgcaagcttgacttgttcaggatagctgacccagtacggagtcggaataatcacttcgtccccttcgtcgaggagcacttgaaatagggtgtaaagagcatgctttgcacctgtgcacacaataacttccgattggctgtattcaattccctgatcgcgcttgaatttatcgcggatgctgtctttcagcgccgcaagaccgccggaaggcgtgtatttggtatgtccttcgttcatcgaacggacagccgcttcaatgatgtgctcaggcgtattaaaatccggctcacctgccccaagaccgatgacgtcgtgccctgccgcttttaattcttttgcttttgcagtgattgccaatgttgcagatggtgttaacgctgatactcttttagctagattcaactcgatttccccctgtttcgtctaaggcgtaatatttttgtgaatttttccgtttataaagtccacatagcttaaactgtactgcccatctttatttaagtatgtaacttcccacaatagaacattgccttcccttgcaaggtgcacctctttaagctcagacatcaggccctcatcctgaacagcttttgcagcctggcggccggtaatgccggctgatgcttttttgtaaagcgttttctgctttttgtcagcaggcacccaaacatacattttgtcgccttttttgtctgcccctgtaacaatgtactgcttttctttaccgacaaacgtctccacgctgtcaacttgttttaagccggcttcctgcctggctgtttcggcagcctgctcgtggccgttttctttctgatccattgccgtacggtagacattcgctcccgcaagaagtgctgttaaaaagataataccaaatatcagtatgaaaattaatgtttttttgcccattttctgctcctaagtacgataaatcgtaaaaatggcctgtttttggtcttcttcatcgagagcgaggccgaacatgagatcatcgcgtttgagcgtacggttcaaaagatcaacgattttatacaggtcttctgagtgctcgacgcttacagtagatagaatttcgattttgttttccatttttcaaatacctccgaacgaaacaataattgtaattcatactctttgtagcaaaagccatactagttgttacaacgggatatccgtttaaataaacagcctaaaaaataaaaccttaatccacaccatttaagagccgctttatgcggcttttagccgtttttcccggctatgtaggcttcaagctcaaggaaagtaggctccatgacttttgcagggggcagagccttcataaacaccgtgccgtaggaagaggttcggatgcggcggtcaagaataacgaccgttccgctgtctttctctgagcggagcagcctgccgattccctgcctgaaggccaggacagcttccggcagagataccgcttgaaacggactttctccccttctctttgcccggtcgcactttgctgattcaaccggatggtcaggcggtctgaacggaagccttgcgatgatcagcgtcgtcagctcatcacccggaaagtcaacgccctcccaaaaatggttcgttccgagaagaaccgcatgaggatacgatttaaacaacttcatgaccttaacgggacttccgccggaaatcccctgtgcaaggagctgacaaggaaagtcttcctcatttttcaatgtatggtagacgtctcgcagcatatcatgagacgtaaacaggacgagcactttggcatctttctgttttgcaagcgccttgacgtaacgcgagacatcctgaatatagtctcccggatcgttttgaatcgggctgacatccgtcggaatcatgatattcatatgtttatcataagaaaaaggcgactcgatttgcaaggtcctcggatagaaatcgcttaaaccaagctttttgatcatatagtcaaaagagttctcgacgacaagcgtccccgatgtgaggacaacgctttttttctcggtgaaaaaccggtcggccagaatttcgcttgtatcaagcggctgagcgtaaatagcagcggcgttttttgcgcccttcgcgtcaatttcaatccagacgacctcatcttcaacagggtcaaacatcaagcggcagagcgtctttcgatattcttcaaggtcgttcatgcacgaatcgtattcctctaacaaaaacgcctgacggcttgtgaaagaagcctgtttttcagcgaggcttttcttttgatccataaacagccgatgcatgtcatacagcatggaacacagtcttcgtgcgccttcttcaagcctgctccatgctctgctttcaccgatttcgccgatcttatataagagacggtttagatcgtttcttggtttcctcctcttgacaaaagaatgaacagccgtaaagaatagatcgctttcttcaagaagctgagcgagccattcgtccatttggaaaaaggattctgatgaaatgcctgccgaccggtagagccgttcggcttttttcaaaatacccctctgcttgagggtgccgagcctcatcaatcttttgtggagaaagacatagtctgctctagctccatactgctcgcccgccgcgcgctcaaaatgatgggcttcatcaataatgaacatatcggcatctccggtatggattcgctgattggtttcgtcagtcaacagaagcgcatgattggtaatgatcatatcagccttctgggccctcgctttggctctttcataaaaacacaatttcctcatgttgctgctttctgcatatgaatgcgaatcatatgccagtctgtcccataaaagctttccgcctgacgggagattaatttcggataaatcgcccgtttccgtgtctgtcagccagacgagaatctgcgcttttgctaggacgctatcataattgtcatcatcttcctgtaaaatatgcttgaacttgcgaatggataagtaatgggagcggccctttaaaaccgcggcttttaccggaaatggaaaaatcttttccaaaagcgggatatcgcggtttatcatttgctgctgaagcaatgtcgtatatgtgctgatcacgaccggtttgcctgtttgcttggcgtgaattgcagccggcacgagatatccgagcgattttccgattccagtagcggcttctattaacgcatgctcatgattttgaaaagcggtccagacctcccgcatcatttttgtctgaccttctctcttgtcaaaccggtcgtccaatgaagaaagcccgccgtctctttcccaaatgagcggctctgtctgcggaatccggctcttatggccggcctcttcatcctcgacttcaggagtcctgatcacaaaagaaccgaccttcgtaaagccggcctcaagttcagcatcggcgcctttttcagcaatcaagccgtcaaaaagctcctgcgcgtcgctgatcaaatgccaggatagacgtctgatagatttcaaaacgggaatcggcagccttttcagtctgtccatcatatgtaaaaagatcaaagcggtcacttccgcatcgctgtcagccctgtgcgggttttcatggcgaatctgaagctcttcgctcagctctgtcaatttatagccgtcaaaacccggaaagacgattctcgaaagctccaccgtatcgagaacgctgcattcaatctcaccaaagccggccagctgcagctcatgcttgacaaaagcaagatcaaaatgaatgttatgagcgataaaaaagctgtcatgaagcagctcaaaaatatcttcggcaatcgccgaaaatggttcttcattttcaaccatttcattcgaaattcccgtcagctgctcaataaaagcgggaatcggctgattgggattcacatatttggagaaacgttcggttatctgtccattttcaatcacaaccgctgcaatttgaatgattctgtcgccttttttcggcgaattccctgtcgtttccacatcaatgaccacatatcgttgattgttcattcaatggacacctcaatttcgataccttcgacaaaagtgtaacacgttttaaaaaggcgcgggggaaaagcttcaaaaccggcttcttctctttcgctctttccaaacgatatgaaagccccctaaaggcaagggggctacagaatggtacgggctggctcctgacccagcatttcctcgatttcgtttctctcgttcaaaacggcaaccttcggcttatgggtctttgcttcctcttcagacatcatcgcataagacacgatgatgacgacatctccaacctggacaaggcgggcggcagctccgtttaaacaaacgacgccgctgcccctttcaccgggaataatgtacgtttccagccgggccccgttattattattcacaatttgcactttttcatttgccatcattccgacagcatccagcaaatcttcatcaattgtcacgctgccgacgtagttcaaattggcttccgtcactctcgctctgtgaagttttgcgctcattaacgtacggtacatcacaaatcctccttttgatctgccgggatatcgacgatgatattgtcaattaagcgggctttggaaaactgaacggcaaccgctatgatgacttttccagtcaatggatccctgatctccagatcgggatatgaataaatatcggcataatcaataacaccgctcgttttttccagaatgctccgaatctcccgcttaacggcctccgggtctctctctccattgcggatcagctcggcgccgcgctgaagagctcggtaaagagcggttgcttcctgccgttcttcagctcgcagattgacatttcttgagcttttggcaagcccgtcttcttcccgttttgtttcgacagggatcagctcgatatccatgaaaaagtcgttgatcagcccgtcgacgacggcaacctgctgggcatccttcatgccgaaataaacccttgtcggagacgtgagattgaacagctttgtgagcactgttgcgacaccgtcaaaatgcccttctcttgaacggccgcaaaggacatccgtccgctttttcacgcttgcggtaaccgtcggctcctggccgtacatttcttcaggctcaggagtgaacaagacgtccactcctgagccggccgcaagctgacggtctctttcaatatctctcggatacgcttcatagtcttctcccggaccgaactgcataggattgacaaaaatgctcatcacgacaatatcgttgtcttttcgcgctttttctactagcgacatatgaccttcatgaaggaagcccattgtcggcacaaaaccgatggttttgccttccttgcggtaatttttcgttaagttttgtatatcttttgctgtatagatctgaatcatgcctatttccctccgtataatccttcaagaacttgctgatctatacggaacgaatgagcatcttcaggaaacacgcggcttctgacatcctcaacatatccccgaagcgcttgttcaagcggctggtcgatttgtgcatactgcttgacaaatttaggcgtccggcttactccgtgtccgacaacatcgtggtaaacgagaacctgtccgtccgtgccagcacctgctccaatgccgatgacaggaattgtgagctcctttgaaatccgttcagcgagcgctgccgggacgcattccagaacgagcgccatcgcgcctgcttcttcacagcgcctgctgtcttcaatcagcttgccggcgctttcttcatctttcccttgaactttatagcctcccaaaacaccgacggattgaggagtcaagcctaaatggctgacaacaggtattccgccgcgtgttaaagccgtgatcgtctcaaacacaccgtcgccgccttcaagcttcaaagcatctgccccgctttcttgaacgatcgccgcggcatttttcagagcgctttccaaagagcagtgatatgacataaaaggcatatccgtcacaacaaacgtatcttttgccccgcgtttgacagcttttgtatggtggatcatatcagcaaccgtaacagatacggtcgagtcaaggccgagtacaaccatgccgagtgaatcgccgacaaggatcatatcgacgccggcctgttcggcaagctttgccgccggataatcgtaggcagtcagcatgacgatcggctctccctcttgtttcatttttagaaagtcagtttttgtcttcatgttttctcctcctctttttcagaggagatgagctgccgtgcttgcatctgcatcttttcggacagcaaaaaaaccttccggcaaggagaaggatttcgtatcgtccgtgttcggcaagaatcatccctctgtcccagtcctttttggatcaaggcagactgtttttttataagttgcatgctttccaggtgcagttcccagaggatactgcccatccgaagtataccaaaaacgcatggatcgttccaactatgacggattaatatcgatatcagcggagtatatttttttgatgccgtcactcgtttccaggatcaatacgccttcttcgttgattccgagcgctttgccgtgaaacgttccgttcagcgtccgggccgtcaattcgcggttcagggtcaaagcatagctttcccacaaaagcttgatcggttcaaaaccgtaggcgagatagtcttcataccttttttcaaacgtcgacattattgtttggaccaaagccgctctgtcgattttttcaccgcttgcgagacgaaggcttgtcgctgtttcttgtaattcctccggaaagtcggctgcaagctgattgacgttgatccccgttccgacaataacggaatggacctgatcagcttccgcctgcagttccgttaagatcccgaccacttttttgccgttgatcaaaatatcgttcggccatttaatttcggctgcgatgccggtttgctcttcgattgcctgaacgatcgctacagcggctaaaagcgtcagctgcggcgttttttgcacgggaatttcaggccttaaaatgatgctcatccaaatgccgtttccttccggggaatgccatgctctcgccattcttcctcttccttcagtctgcttgtcggcaacgatgatcgttccttcgggcgcaccgttgtttgcaagttcgtgggcgattttttgagttgatgaaacgacatcctgaaaatggatcgtctgtcccatttttttcgtttttaacccgagcctgatttcatcttcagtgatcttgtcgggtttttttatcattttatagccgagctttcggaccgcttcaagttcatatcccgattttctcagatcttcgatatgcttccaaacggcggttcttgagcatccgagctcttcgctgattttctggccagaaatgaattcgccgtctgcctcggtaaacaattgaatgagtttctttcttaaatttgactgcatgaatccagccactcctctatggcttttttttgattggcaagctccccgtttaacacggcccgctcaatccgtttcaaatcatcggacacccattttccggccggcttctttctgaaattcagcagatcgcttccagataccgccaggtctttcaggcttttaatcggaagcgcctggtacgactgtctgatttcagccagctgctcttcatcgattgcctgcttgtccctcaagctgcgaatggcagatgcggccagcagcgtctcttcccccgcctcatacatcgagacggcatcccatttttgatcgatccgttcagccgtatggagcgcctgtctgatgactttccccggaagcttccacccttttaaaaaccggtgcgcttcagcgggattgatcgatatcatgtgaatgaaagccgcccatatatcggcacttttttgaagttgataaaaaggaaaagctcgggcagccagaacgcgctcctttttgccgtccagccccggaagctccttgtaaagccctgtttcagccgctgcttccagagcccggcctgctgcttttccttttaaaagtttttcgaattcaaccgttttccgctctgtagaaatatgggccaggagcggacggttttcgcaaatcgctttttttgtatttggagaaagctcaaactcgagctgactcataaaacggagcgcccgcagcatgcgaagcgcatcttcgtgaaaacgctccgccgggtcgccgaccgtttgaatcaatctttcccgtatgtcgcggagcccgccgaaatagtcgatcagtctgccttcttcatccatcgccatcgcattaatcgtcagatcccgcctcttcaggtcttccttcagcgatttgataaactgaacgccgctcggccttctgtaatcctcatattcaagctctgcgcgaaaggtcgtcacctcgtaggattctccctcaaagaggacgatgatggttccgtgttcctttccgacatcaacggttttcggaaaaatggcttcgatttcttccggggatgcatctgtagcgatatcaatatcgccgacatctctgttcatttgggcatccctgacggctccgcctacaaagtaggcctgccagccgtgttttttcagctcacgaaggagaggaagagccttcaaaaagagatcctccattgtcacactcccagtctgttaattgttgataaatttcttcatattgcgcgatgattttgttggaagaaaagcgttccttgatgctttgcagcgccgcttccgcaaactggcgctgcaggctttcatcagtcagtaaatgaagcgccttactagctgcaccttcaatatctccgacatcgaccaagtaaccggatactccgtttttgatcacctcgggaatccccccgatatttgtgccgatgcacggaacgccgcaggccatcgcttcaagcagcactaaaccgaagctttccttctcggacaaaagcagctttaaatcgctgatggcgtaaagctcttctacgctgtcttgtttgccaaggaaaagaacgtcgtcttttaatccgagctgtctgacaagctggcagatcacggtcatttccggcccgtcgccgacgagaatcagcttcgatttcatttgtttgacaatgcggctgaatacatggatgacatcctgtacgcgcttcacctgtctgaaattggatacgtggatgatcactttttcatcaggtgcaatgccgtactgctctttcagcgaatgatgctcctgtttttttaaatacacgcgctcatccacaaaattatagatcgtttcaatttttttgttcggtttgatcaaatcatacgtttgcgcggcaagagccgaagaaaccgcggtaacgcggtcagacgattcgatcgcaaacttgatcaggtcttttaaagacggatcatagccgagcacggttatatctgtgccgtgcagcgttgtgaccgttttaatgtttccgttcagcatttgcttcgctaaaaaagcggaaatcgcgtgaggcaccgcgtagtgggcatgcagaacatcaagctgttcccgctttgccacctccgccattttgctggccaaagccaaatcatacggcgggtacttaaaaacggcatattgattgacttcgacttcgtgaaaatagatgttggaatacactttattgagcctgtacggaacacttgatgtaataaaatgaatttcatgtcctttttccgcaagcagcttgccgagctcggtggcgataattcctgatccgccgacactcggataacatgtgattccgatttttaactgtttcatcatccgcccccaaataaatcgttgtttaacagaagagtccgctttgaaaaaaacccttccgcgtatgcgacgccgacctcttttcccaaaagcttttccctggcttcgaccgtttcaatatatccgtttgtcagcggtgtttcaaccgactgccgggaacgggtgaactggctctgataagcagcaaggccatcctttttttgattgatcgtttcagaaatgtcgatgacaaactcaggtttgtgaaaaccgttgatcatatagtagtacacgttttggactttatgggccggctgtttttctgcatcttcgtatttatgtataccagcggaaaagaccgcttcttcgacgatttccgctgcgtgcccgtgatcgggatgccggtcctttggataagggacaaagacaagcttcggtttatgtttccgaatgacggcaacaacgtccctgatcgccgcctggctgggaaacagccccctgtccggcagcgtgagggaaatccgcggactggcgccgagaatttcggccgccagcgccgcttcgctttttctcgtttcgactgttccgtttgaagacagttcagcctgggttaaatcgcagattccaatttgaaagccttttttagtatatttggcaatggttcctcccatgccgatttctacatcatcgctgtgtgcaccgaaagcaagtatatcaagcatcgcgatccctgccgtggacaatgtttctgaactcaaacgcgccttcctcgacagaacggatcaagatttccgcagttcccatgttggtggcgagcggaatggcataaacgtcagacaagcggataagcgctgacacgtcaggttcgtgcggctgggccgtcagcgggtctctcagaaaaatcacaagatcgatgtcatttttcgcgatcaaagcgccgatctgctggtcaccgccaagcggccccgattgaaagcgcacgacgggcagccctgtcgcttcagtgatttttaaaccggtcgttcctgtcgcaaacagctcatgcttttttaaaatgtctttataagcggtcgtcagctgaatcatatcctgtttttttcggtcatgggcaattaaggcgattttcaaagcgatttcccccttcttgttactctatgatattttcaaggccgtagacaagctgatcgattttcatcacttgttcaacagccagtttcacaccagacataaaagatgcgcgattgtatgaatcgtgacggattttcagggtttggccgtctccgccgaacatcacttcctgatgggcaatcaatcccggcagacgaacgctgtggagacggattccgttttgatcggcgcctcttgctcccggcagaatttccttttcatccgggtgcccctgcgttttcgcttcgcgaacagccgaaatcatttccgccgttttcaaggccgttccgcttggcgcgtcaagtttttgatcatggtgctgttcaatgatttcaacatcggtaaaatagttggcagccatttgcgaaaacttcatcatcagcacggctccgagcgcgaagtttggcgcgatgatagctccgattcccttctcatcggtcagttccataagctcgttcaagtcgctctcagaaaatcctgtcgttcccacaacaggacggacgccgtgctccaacgcgatttttgtatgtagcttgccgatttccggcgttgtcaaatcaatcagaacatccggagacgtttctgaaaagcattccgtgatatcggtgtaaatgacagcatctgaacttgacgtcatcacatctgacagcttttcacggttatatgtacggtcgattgcaccgacaagttcaaaatgtgcggtatcttcaacaagtttgaccgcttcgcttcccattcttccgcgcggtcctgctattgcgattttaatggtatccttttgcatcttgattctcctctactttccttcttcttttcttgtccagcgatctttatcacgggtgttgaacttctccatgaccatatcatgcgcttcatccaatgatatatgaagcgaattcgcaagacaaactaaaacgaacaatacgtcgccgatttcttcttcgatctttttttccgattcggtttttttctttggtttttctccgtaatgatggttgatttccctcgccagttcgccaagctcttccgtcagtctggccatcatggcaagcggactgaaatagccttctttaaactggccgatatattcgtcgacttcacgctgtatatctttcatcgttttttctttcgtcatgctggcaaaacctcctgtcatctcttacatgttagcgaattcaaacaagtttgacaaatgtttaagacgagtttgctgttttaaaacggatacactataatattaacgccagcttatggaaggaaaggagtttttttatgttcggagacatcagaatgaagaacgtcctgtttattttagcaggcgccgctgttttttcctttggactcgttcattttaatatgcagaacaacttgtcggaaggcggttttaccggcattaccctgctgctttatttcctgtttaatatcgatccttccatatccaatctggtgctgaacatcccggtcttcttcatcggctggaaactcctcggcagaacggtcttctcatacaccattctcggcacagtcagcctgtcggtgtttttatggatttttcagcgcttccagattcatatgccgcttcaaaacgatcttgcgctcgcggcactttttgcaggcgtgtttatcggcaccggattgggcattattttcagatacggcggaacaacgggcggcgttgatattatcgtgcggctgatcaacaaatattttcaagtgccgatgggcaaagccatgtttgtgtttgacgcctgcgtcattacattatcccttattttttacctttcctataaggaagcaatgtacacgcttgttgccgtatttgtcgcctcaaaggtcatcgactttatgcaggaaggcggttatgccgcaaaaggcgccaccatcatctctgaaaagaacgaccagattcagcgcaaaatcattgaagaaatggaaagaggcgtcacagttttaaaaggtcaagggtcttatacgaagacggagcgggacattttatactgcgtcgttccgaaaaatgaggttttccagctgaaaaatgtgattacttcggtcgacccgcacgcttttgtagccgtaagcgacgtacacgacgtgctgggagagggttttacgcttgatgagaacaaaaatcccatcacccgctgattgaaggtcagcaaaaaagaagctcgcgatcagcggagcttcttatttcggccaatctttttctctttttctgcgcctgtcctcttcggctttatactttctgaaaccgacgtatgtcagcgtcgagaggataatgcttcccgtcgtcaggatgacccatagcagggaagggtctgcatcatcttcttctacttgatcaaacacatcttccaaatctttttccaaaagcgtcagcctttccagcttgctgctttccgtcatttgctggaagcctccgttttccacgactgcaatatggttggagacgctttttaactgctttggcgaaacatcgatcgttaagcttggataaatcgtatcatacaaggataaaaaatgattccacttttccctgaatgtcaagttgtcttctttctgaatcccggctttcaaagcgctgaaagaatccatgatcggctttttcaaactgctccacagcggatcatgatctgattcaatggcgtccatcagcattctaaactgggcggcggctttaaatttctcctggtgtgcgacctcttcgctttccagacttttcagcgtatcatgataggccagactgacctggcggatttccgagcctgtcatcatatcctctgtcccgtctttctccgcagctttcagccttttttcaaagtattgaagaatttgtaccgcttcctcatattgagactgccttgttagctggaataccgtatccgacagttccgtcaattcctgcaaagccgatgattctttcgctttcaaaccggccgcaggaaaaacaagcgcaagcatcatgcaaaggatcacctttcgtatcattacggtccctcccactccttctattaaagcgtatgaagagagggacaaggttagaccaagattgtgaagcaggtgttacagcttaaaagcttttcgggacaagacaaggtagtaggccaaaccgatcgaagcgatgctgagccaaaatgtaaaatagccgatctgcggcatatattgatcgagcatagaataattcggcatcattccaaacaagtaatcaatggcatcgttatgcagcgtccaaacagccgcaagcgccaaatgccaccctttgaaccggaaatgcggggcgtacagcacgccttgcacagccattgcgaagtgcgacgcgatcagcatataccccgtccaatgaaggcttccggtcaccacaagcacgagaacattcattacaaccgcccacagcccgtatttgacaagcgtaacaagcgcaagcgcctcaaaaagcggagcattccttcccaataaaagtccgatgagaacgaataaaaagaacaaggtcgccgtcgggctgtcgggaacgaagatcagaaacttcgctggcgtattcgtcagctgcggaaggtaccaataatacccgtaaaccgtaccgaagaaattaatgatcaaaagcagcagaagcatcggcttttgagcgagcatgtaggaaatcagtttcaaagcaatcaactcacagtctctagccgccgccgggtcagcttcacagattgaccgcagaacacctgtcgagaagcggcggcctttccagcttccgtgccggttcactgtcagcagcggtcaaaattgaaaaggccatcgacattgtcgacagcccgagaggctgacttgccgtcagcttcagctctatcaagagtatagcctgccttcatcaacttgacaaccgttttatttcgccgttgtttcggagatgaatttagacagttctttaagctctttgtcagatcctttaaaaacgccggcaggcatttcgccttttccttccttggcgattttcgcaatctcttcaggagacaagccgttgtcaacgagagacgggcctgccgctcctccttgcatgttgtctccgtggcacgagatacagccctgctcctgataaatcttatagccttccgcactcgtatcaatatcggcctcttccttgattttaccctgctcttcagcagcggcccagtcgtgagtgacaacggactgccacgttaagaaaaccgtcgctgaaatcgccaaaagcatcaaccctacggcaaccgggcgtttaaacggccttctttcagggcctctgtcaagaaacggcgccaataaaagcgctccgaacgcaattgtcgggataataatcgcgccgacaaccgtatacggtccggcagcatattcgtatttcagcaattggtaaagaaatagaaaataccagtctggcaaaggtatgtagccggtatcggtcggatctgccatccgctcgagcggaggctcatgcacgatggtcagcacgagaaaaccgacaaggaaaaccgctccgaccatccattctttcagcaggaaattcggccagaacgcttccgttttccctggaaattcggaataatcttttggaatattcggttttctttccgccgggatccgtgaatcaccgacaaacttcatcccttttccccttttcatgccatcccctccttctcaattgagtcgctcgtttacagcggcccagaaattccttgtttgcgaatcatgataaagtgtgcagccatcagtccgaacagagcggctggcaggaaaaagacgtgtatggcaaaaaagcgcgtcaacgtctgagcgccgacaatatccggatgaccggcaagcaatgttttaatttccgagccgatcagcggcgtcgcctcagcaatctgcaaacctacttttgtcgcaaacagagctttcatatcccaaggcaaaaggtagcctgtaaaacctaaaccaagcatgacaaagaagattaaaacgccgacaatccagttcagctctctcggcttcttataagccccctggaagaaaaccctgagcgtatgaagaaacatcatcacgatgaccaagcttgcaccccagtggtgcattccccttacaatctgtccgaacgccacttcattttgcaaataataaacagattcccaggcatttttaatatccggaacgtagtacatcgtcaaaaacatgccggacagcacctgaatcaccgtcacgaaaaacgtcaatcccccgaagcagtacacgaaagctgaaaaatggtgagccgggtttacgtgttcaggaacttcatggtcggcgatgtcccgccagagcggcgtaatatcaagtctttcatccacccagtcataaattttgtttagcatgatcacccatccttcctcggcttggctttccctaagtaaaggtagccgtctttaacctcttgctcatagcggtccaaaggagcaagcggcggagttccgggcacgttggtaccatccttttcataaagtccgtaatggcacggacaaaagaacttattcggatttttaggatcgctgttccagttgaccgtacaccccaaatgtttacaaaccggtgataaagctacaatttcgtccccacttttgaaaacccacgccgatctcgattcttccgattcgtaccaggcatccacttgtttgattttaaaatcgaagcgctgcggttcatttgtcaattcatcaacgctgacaacctgaaccatgtcctgatcttcagtcggccttaaaaccggatcgagcgcgaagcgaaccataggcatgagcatccccgccgccataaagccgccgactccggtcagcgtatagtttaaaaactgacgtctggatacccgatgtcttttttcgctcatcttcatatcccccctcaagtccccagctacaatataactgaaatagaaaaaaattcatgaaactaggacaccctcataatatatcaatattttaggaaggtcaacattcccaaaatcattatacaaaggaaatgtaagtgtttttattaagagttccaatattgtaacaaaatgttcaatatttgctcaatttgatcttccagcagcttctgctttaacgaatccttcatatgttcgagaggaatcgccggaacccacagcagcttttgctcgctgtcgagcatctgcttccagcgttcatccgtcgttaaaaaaacgatgtggcgaaaatgtttttcggccatttcttttaaatcggcgatatgctgcgccgatttttcatccgcttctaaatatgtacagggcggaaacaggtagattctgcccttcagctgcctttcgagttcttctgcaagtatagacgtaaattccccttttgatacggccgatttaaactgatctccaagatcaaccgatattaaagggatgacagctgtatcgatgtattctttcgcgttcaagtaaacatccgcatcgtgcgtattccatttcacggctttcgtcctccccgttttgacagcgctttctcagagctgaacaagccttgctttcggcaaggcttgattggtagcggattatcgcagctggctcagttgtttagctagtttttcgaagctttctttatcctggcggtcaagcgcttcgtcgatttcccgcagtagcttttgtctctgaaaagtggcaatggaatgctccaaaatctgttcagcgacaattttatctttttcattttcatataggtctttcggaatatgcggattggcttcgagtacagccgcatattccggagaattataggctgagcggaagttcagctggataaagagatcctgctgcttattcagcctgatatcatgaaatgatttttctgcatcggtcgtcatgacattttctttataaaaacgaaaaggcacttcctcaacgcagtgggtagacatgataatgcccctcggacaaaattcggcctgctcgacaaaatgcactttttccatcagcgagtcatggctcattaaataattcagaatccatacacactctcttcgtttcagctgataatggttgagaaaccagcggataaaatcttttttttcattgacagaaacaggggtctgcatgttattccctcctctatcgcatcttgtgtattactttataaattccacacaaaccgatcatatcctgcttattcaaaggaattttcatcttcgattctgaaaatcgtctcctggacttcctcgtttgccgggtcgagctctgccagttttttcagcagaggcagcgcttctttccgccgtccttcttcaagcagaaacatggaatattcgtaaaggaaatcggcgtcatcccgatagtgcaaaaatgcgttctcatattcctcgcgggctttgtcgtacgcttcggtccgggcgaacgccgatgccagatgccagctgaacttcggatcatcctctccgtatttgcgcacttcccgaacgagttcaatgatgctctcatcgtcttcttcttcaagaaacagggcaagcagtgtatgaacggcttccagatatccgggatccagcgccagcgcttcacgaagcagctccttcgcttccgaatgccttttcgtttttaaggctgcttttgcagcagaaagataaagctctttgttgaattcatcgacacggattccttcttttgccgtttcgaatgcttcctcataaagcccttctgtttcaaagctgttggccagaggcttgtaaagcgaagaataagcgggatccatttccttcagctctgtcagctgtttaatcgcagttttaggataccccgctttcagtgccgtaaaaccaaagccgaacagtgtgttgggctcggggttctccttgacggctttttcataccattcaagcgcttcttcaaacgctccggatgaacttaatgattccgccagcctttggtacacattgacgccgccgatgacggcttcttcttcggccgcttttttgaattgacggaccgctttgccgtaagctccctgagtaaaatacagctctcccaaagcaaaatcgataaccggctcatccggcaaaatggcttgcgcctttaacagcttttgctcgctgacttcaaacagaccctgcatctgatagagatcagccattaaaagcaggcactgcgggtacgcctcgtctgtttccggaatcgtttcgagcacgctgagcgctttttcttcctgatcggtttcgatgaggagttcggcataaaagcatgtcagttctgtttcatccggatacagttcatggaggtcagtcacgatggcgatagccttatcgacaattccccattcgtaatacagctgggctactatggctttgtcttcatcatgaaggtcagactcgatatcagcaagttttttcaatccgctttccgggtggcctgcttcaactaattttatggcttcttgaatagaagtattcaaatctaaacgtccctttctttcgtcaattcatcaccggccgtatcagccggcatatcgcggtgagttacttactatcataattcacgcggcggtttccggcaaatatgttgcccgcacagctgtatggaagcagattgattctgttaagacaagctatgccgaaaacattcgttttatgagcaaatgcccggctttcatgattttccgggcagaaaaagcctgagcacaatgcttcaggctttttctgcaagcttttcgatatgttcaaaaaatgaaggatatgagacgctcacagcttcgggctgtaatatgtcgatcggctgctcgcagatgcaggcggcgatccccagcatcattccgatccggtggtccccatggcttgagaccttcgcgccgcctgtaagaggcgtcttgccgtgaatcttcatcccgtcttccgtcggttcgatgttcgcaccgatttttttcagctctgaggcgacggtatcgatccggttcgtttcttttactttgagttcagccgcatctttaatgaccgtcgtcccttcagcctgtgttgctagaagcgcgatgatcggtatttcatcgatgaggcgcgggatcaaatcgcccgaaatttcggctgccttcaaagaggacgttttgattctcagatcgccgtacggctcggtatttcctgtgtccttttcttcgatttcaagatcggctcccatttctttcaagacatcgatgattcccgtcctggtcggattgagtccgacattgcgaagcacgacttcactgccaggaacaagcgatgctgctgccaggaaaaacgcagctgatgaaatatcacccggcacaaagacttctgctgctttcagctgctgcccgccctcaatggacacgctcgtttcatcttcccgaaggctgacgccgaacatagacagcatccgttccgtatggtctcttgatttatgaggctccgtcaccgttgtggtgccttcggcctgcagacccgcaagcagaacggccgatttgatctgcgcacttgcaacaggcgactgaaaatcgatcgccttcagatgtccgccgcggacagaaagcggtgtgtattcccctccggcgcggccgtcgattttcgcccccatttttcgaagcggttctgtaacacgcttcatcggccttttggcgatgctctcatcgccggcaaccgtactgtgaaacggacgccccgccaaaatgccgagcatcagcctgatcgtcgttccggaattccccacatcgaggagctcggcaggctcagcgagctgatcgagccctttgccgcggacggtgacatcactgccattctgttcgatttcgacacccattttccgaaagcaggcgatcgtgctcaagcagtcggctcctggcaaaaagtttttgatgaccgttttcccttctgccatggctccgaacataacagaacgatgggagatggatttatctcccggaatatgaagctctccctttagtgaactgatttttcctcttttcatgtgttccacctcaatcagcataaaatgtttcgtattttgcgcgggtttggatgcatttttcggcgcgttttcgatcttcatcggattgaaagctgattctgagaacaccgtttatgtcttcccttgtttcgataatccggatgttcgtaatgctgatttgcgcgtcggcgaggatcgccgtaatttccgaaataacccccggatggtccgggacatcgacataaagatcgtaaaaggaaggaatcgcgcctttttgccgcaaaggcagaccgtcgcggtattccttggcttgccgaaaaaattcaaacagcccgtctgcatcttcattttcgacaaaagactggattctgtccagctcttgtttccattcgtcaaaccgctccaatattttatctttattgtgcaagagaatatcgcgccacatcgccgggctgcttgaggcaatcctcgtgatatcgcggaagcctcctgcggcaaaacgcttgacgagcgggtactgatcttcgaatttgacggtctggtggacgagactcgccgccacgatatgcggaaaatggctgatcacgcttgtaacagcgtcatgttcagcaggagacatttccacaaactttgcatttgttcctttgagcagatcttttaaagaagcaaccgcttctttgccggcggagccggatggcgtcaaaatataaaacgcgttctcgaaaaggaagtctttggcggcagcgacgcccgatttatgcgagcctgccatcggatggcctccgataaacctgtagtcatccggcagcactttttcggcatggctgacgaccttttgtttcgtgctgccgacatctgtaatgagcagctttttcttgatgcctgaagcggcaagctcatcaagcatgtgaagcgtctgttcgaccggcgccgctaagaaaacagtcgacgcttctttcaccccttctaaaaaagaagcggccggagcatcaattacgccaagcttttgtgcagcccttgcctgctcttctgacacgtcaaacccgataatccgtttgcccgggtgttcctttttgatggccagggcgatcgaaccgccgattaagcccaaaccggccaacaaaatcgtttcattcggttgagtcattttttatcacctagttcatcaatagactaaagaggtgactgaatcatcacctcttacaacatgccggctaacgttttcaaaaagccttcgttctgttccttcgtaccgaccgatattctaaggaacgtcggaaagccgagcgcattcccggatctgacgatatagccttttttcagcagctctgagaaaagttcgtctgcatcccgtttaaaatcaatcagcacaaagttcgtttgtgaaggatagtaatttagcccgtgctcatcacagaaatcgtagtactgtttgagcccttcattgttttttctcacacagtcgtggataaatgcctgatcgccgagggcggcaagcgcggccgcctggccgagccggtttgtattaaacggctgtctcgccggctcaatcgcctgaatcagctgttcagaagcaatcccgtagcccacccttaaagacgccaaaccgtaggcttttgagaacgtcctgagaatcatcaggttcggaaagcgctccagaagcgggatggtctcggggtagtcttcagccgttacgtattcgtaataagcttcatcaacgacagcaaggacatgttccggcactttttcaaggaaacggatcaagttgcggccggattcatacgttccggtcggattgttcgggctgcaaacccagacaaccttcgtctgttcatcgatcgccttcagcattgcatcaaggtcgtggcagccgttttcgagcaggccgacttctctgacttccgctccttcgatgacagcgttgtgcttgtattgtgaaaatgtcggattcgccattacagtgtttgaggcagggtccaacaaagaacgggaaataatttgaatgacttcgtccgttccgtttcccaggatgatgttcgtttcatttacgccgagatgggaggcaagctttgttctcaatgccgcactatagccgtcaggatagagagccatttgctgcacctcaatctggagggcttcctttgccgcttctgaacagccgtaaggattctcatttgaagcgagcttgacgacccggtcgaggttgaactcttttttgacctcttcaatcggtttgcccggctggtaaggcgttaattgttttaactgttctttaatttgcaacattctgtcacctcattttaccatgtacgatccgctaaatgtcttagcgtatgcctcaaacgcctttaaggcttgttcccttgtctcaggggcgacgagttcgtctttcagctcctcgatctttctgacaagggcgcttcccacgacaacgccgtccgccagttcattcatcatctccacttgtttggagctggaaatcccaaacccgacggcaaccgggacggagctcattcctttaacagacctgataaatgaagaaacagaatcttcgaattcattgcgcacacctgtgacaccgagcgaagaaacgcaatacacaaaaccttccgcctgctgcgttattttttgaatgcgcgattcgcttgtcggcgcgaccagcgaaatataggtaatcccgtgttttttacactgttgctgcaaatatacgctttcctcaaaaggaaggtccggtacaaggagtccgtctagctgattttgtcgcagtaaagcgaaaaagtgatctgtatctaattgtaacacaggattataatacgtaaagagaataatcggaatatggacgccgttttttttcatttcaccgccaagcctgatcgcttttacgatgttcatatcgttgtcaagcgccctttttgatgcgcgctgaatcaccgggccgtcagcgagcggatcagaatacggaaccccgagttcaagggcggacgctcccgcctcttgaagagattttgccagctcgatcgagatttctggcagcgggtctcccgctgtaataaacggaacaaatagcttatcggacggctgttttttcagattgaacatcttgattcacctcttcttccaacaccttcatcaaggtatggacgtctttgtctcccctgcctgaaaggcagacgagaacgcttttctctctcggcagttctttagcgatttcaaatgcttttgccaatgcatgggcggattcaatagccggcaaaatgccctcagtctctgtcatcagccttaatgccgagaccgcttcatcatctgtgacagattcatacgtgacgcgccctgtttgatgaagatgggcgtgctcggggccgactcccggataatcaagtccggctgagatggaataaggctcgatgatctgtccgtactcgtcttgaatcaagtaggtcaaagaaccgtggatgacgccttttgtaccctttgtgatcgtggccgcatgaagaggtgtgtcaacaccttttcccgcagcttcgactccgatcagttcaacagtttcttcaatgaacgcgctgaacatcccgatcgcattgcttccgcctccgacacaggcgacaactttatcggggaggctttgctccaattgataaaactgcgctttcgcctcttcgccgatcatccgttgaaattcgcggacgatataaggatacggatgcggcccgacgacggaaccgatcatgtaaaaatggtcctggcaatgctgaacccagtagcggatcgcttcgtttgtagcatcttttaatgtcccgtttccgcttgacaccgggacgacctccgctcccaagagcttcatccggaacacgttcagcgattgtctggcaacatcttcctcccccatgaagacgatgcatgataagccgaacttcgcggcgacagtcgccgccgccacaccgtgctggcctgcaccggtttcagcaatgagctttgtttttcccattttcttggccaggagcgcctggccgagggcattgttgattttgtgggcgcctgtatggtttaaatcttctctttttaagtaaatcttcgctccgcccagctgcttagtgagctggtctgcgaacgtcaaagccgtcggcctgcctgagtagtcatttaaaagcttttgataatccttttgaaatgaagggtcgtctttcagttcaagaaacgctttttcgatttcttccaaaggctgcatgagtgtttccgggacgaatttcccgccaaaatcaccaaacctgccttgttcattcggatatgaatacatgttcgaacatcctttcttctaaaaggctgatcagcttttcgctttttctgcctctttcttcgattccgcttgccaagtcgattcccggcggacgccgctttaaaagatctgcgattgtgtccgggttcacgcctccggcgataaacaggcgcttgccttctctttgggctgcatctatatacagcgggacgctgtcccacgaaaacgaaacacccgttccccctctcatccctttgacagacgagtcgatgacatacccgtcgatgtaaggtgcgaaagaagccatgctctgtacggtatcattcccgtgagggagcgccttccatatctcgcagtctgtcatgcttttaagccgcttgatgtctgccgccgtttcatctccgtgaagctggatcacgtccaagcctgcatcttttacgatttcagccattcggctcatgttttcattaacaaaaacgccgacaagctttttacctggcgtatccgtttcgccgcaccaccgtttcacatccgccgggtctaccgaccgtttgctttcggcgaaaataaatccgagataatcggctttcgagcgggctgtcacctttaaatcttccaatgaatgaatcccgcaatattttagactcggtttcttcatcagccgtcctctccgaataacgcatagacagccttcagctgtgacgtctctctcatcagcgattcgccgacaagcacggcttgggctccgcacgtttttacaaaagtcaggtcttccgattttccgatgccgctttcgctgatgagaacggtccccggcggaacgagtttcgccattcgctccgtttgtccgacggtcgtttcaaagttttttagatttcgattgtttacgccgatgatttcgggtgtaaagacatttaaaatgccctcaagcgtctcttcgccatgtacttcgacgagcacatccatgcctttttcaacggcttgctgatagagttcaaacagcttttgcggttcaagcacttcaccgatcagcaggatcgcatccgctccgatgcggtccgcttcttcaacctgaatggaatcaatgataaaatccttgcgcagcacaggcagggaaaccgagcgtttcacatctgacaaataactgttcttcccttgaaaaaaaggtgtatctgtcagaacagacaaacaatcggctttagcctgttcgtattgttttgcgatcttgacgggctcaaaatcctcctgaatcacgccttttgacggagaagcttttttcacctccgcaattaaagcgacaaaccggttcggagaaaggagcgcttttttaaatgaccgctttggcagttttaaatcttccggcagcttgatctttaggatgtcttctcgttttctatcaataatttgattaagcatacaactcttcctctttctgttttaatcgctccagctgattgagcgcttcaccgccagcaacagcttctaaagcgagcgcaacgccctcttttaaatccgctgcctgttctgcgacgtataaagcggctccggcattaaacgctgcgatatgaacagccgagtccggaccgcggtttttcaaaatatcgacgatcagacggccgctttcttcaggcgtcgccacctgaatgtctctcagccttccgagaggcagtccaacatcgcccggctcgacggtgtattcgtatgttttgccgcctttcagttcaattacatctgtcggcgatgtgatcgacagttcatcaagaccgtcccggctcgaaacaaacaatacgtgctccggttcaaacgcttcaagagcgcgggccataagctttgctttttcgatcgagtagacgccgatcacctggcgtttggccttcatcgggttgctgagcgggccgagcagattgaatacggttctaaaagccagatccttcctcgcgcctgccacgtgcttcatggaagagtgatagcttggcgcatacaggaatcccatatttcggcgttcaatgctcttaatcgtttcttcaggcgacgtctgaatagaaacgccgagatattcgagaacgtcagcgctcccgctttttgaagaaacggatcgattaccgtgttttgcgatttttgccccggctgatgaagcgatgatcgcagccgctgtggaaatgttgaaggtggagcttccgtctcctccggttccgcacgtatcaacaacatgctccggtccgtctattgtatgcgcctgctcccgcatggctctgacaaatcccgtaatctcttcagccgtttctcccctgtaggcgagaacggacaggaggcctccgatttccgcagcgctcagcgagccggtcatcatgtcgcgcatgatgctgtgtgcctcggtttcattcagtgtccgtccgttaacgcatgatttcagcagttcgttcattgccgtcctcccccttttcgagaaacgtttcttctgcgatttgaatcgtttttaacagagcccctgctttattgcaggtctcttcccattctttttcaggcacggagtcggctacgatgcccgccccggcctgaatggacgccactccgtttttcacgctcatcgtccggatcgtgatgcacgaatcgatatttccgtcaaatccgatataagcaatgcatcctccgtatgtttccctcggttcgggctcaagctcatttaaaagctgaatcgcgcggattttcggagcgccggtcaaagttccggccggaaatgcgctcattaaagcgtcaaccgggtggacacccgcttttaaagtgccggttacgatcgaaatgatgtgcatgacgtgcgaaaaggaaacaattttcgtaaactcgggcacttggacagacccgtactcagctactctgccgatatcatttctcgccaaatcgacaagcatgtaatgctccgctttttctttctcatcagccaatagttctctttcaagccgcttatcctcagcctgatcaccgccccttttccttgtgccggcgatcggatggatttcaagatggccgttttgaacatggatcagacgttcgggcgagcttccgacgagatcgcggtcaggaagcctcatgtagtacatgtacggggacgggttgatcattctcagcactctgtataactcaaaagaaccgaccttcaccggaatgtcgaacctttgcgaaaggacgccttgaaaaatgtctcccgctttaatgtattctttcaagcgatcgacatcggccaaaaaccgggatttctcatatgttgattgaatcccttcaaagctgggggccgtgtgccgtccttgcgggagaaacagctctttcggcgttttccggtctgacagcctttgtgtaagctgcttgagctcttctttcccctttttgaaaatgcggcgcttttcctccctattttcactgccttcaagccttgtatagtggatgaaatgcagctttttcagttcgtgatcataagcgatcatcgtccggcagacaaacaggaggcattttgccatttccgtttctttgctgtgccctttgatggacggttcaatgagcggcattaaatcatagcttaaatagccgaccgctccccctgtaaacgggatgtcgagctcaggcgctttgatcgaatacgtctccgacatccattcgagaacgtcttttaactgtgaagccgaataaagcttcttctgcttttgatcgcaggcgtgaaaccggccgcgttcttctttgatcgtcaaaaaggggtcaaggccgatgaaagaatatcttgaccatgcagaggtttcatcctggctttccagcaaatagacgatgtcttcctgcagcttctcgaccaattgaacgggcgtcagcgtatcgacggaaaaactctcaataatcggtatcgttttaaagtgtgaagtatcctctgaaaaagaggcaaaatcggtttgcagactcaactatctctcactccctttcaggcggagagaatgagaagaaggcctttagaggacaaatgattgaattgacgaggggaaaacgaaacaaacccaaaagaacagcgtcttttgggtagaatgaataaacgttttgtctcaactcagctcatctcaactcattctcaatctaccctagtctcatactcagcttttctaaactaaaacccatacacactcctgtgtatttcaaggtttctacaatcgtattacaattcagtattttttgtcaatgataaatcaggtctgagcgttactgcattttccaaataaacatggcggacttcatcctgccgcatatccgtctgaaccgtcatcatcactctgatgcattttttaaggccgtgttcaacatccatttcctgcatgcacatgacgggcacatgctgccagccgtcaaacgttctgacgaccttcgcgggaaaagcagcgtgtatatcggaagtagcagaaattaagatctgtacgacttgttcaggtttgagtcgattttcatcgatcatttttccgatcagctgcttcgtccgctccgtaatgtctttttctgtatcccggtcaatggtcgtcgctccccgaatcccgcgcatcatcatttgtctccctccaatctccacatattcagccatcgttcgatttcttcggctttaaaggagtgcagccgcacactgccgatcttatccagaaggacaaactgaatgatgcctccgcgtgtttttttatcgttcatcattcgattgataagggcttctgttgaaacttcgcgtttcacgctttccggatagccgagatttttcagccaggcggcgattttcgtacggtcaacaggacaattcagcaccttctcgctgacaaacaaagcaaattgcatgcctaaagcgacggcatcgccatgggtgatctctccgtagccgtattcggcttcaacggcgtggccaagcgtatgcccgaagttcaaataggccctgattccctgttcgcgttcgtcttgtgagacaacttccgctttaatcgaaatgcctttgtaaaccatttcactgagctggccggtcgtaatcgcttctattgaatcaagtttaagcaattcgttcaagaaagattcatcacggataaatgcgtgcttaatgacttccgcaagacctgaacgcatttctttttccggaagcgtgctcaggcattcggtgtcatataccaccgccttcggctgatgaaaagcgccgattaagttttttccgagcgggtgattaatggccactttccctccgactgcgctgtcatgagacagcagagtcgttgggaattgcacataatcgatgcccctcataaaagttgaagcgacgaatcctgcaagatcgccgacaacacctccgcccagcgccacaatgcatgacgagcggtcaaggtgaaattgaatggcttccgtctggagcttcataaacatatcgatggatttggcctgctcgccgcttggcaccgcaacctttttgacgggccatttgctgcggagaagactgaacagctcttctccatagcgtttatcaacttcttcgtcagtgatcaaaagcagtttcgtcatcggaaggttcaaggatgacaaaagctctgccgcgttttttctaatgcctcccccgatgaataccgggtaggacaaagaagcggtttcgatttgaagtgatttcattaaaactccctcgcaagctttctcattttctcaacattttcagcgatccggtccatttggtcaacgccaaactgctcgacgatcgcatttgcgatttcccatgcaacaaccgcttcagccaccacgcttgcggcagggacagcgcaggagtcggaacgctcgatgctcgctgtaaacggctcttttgtctcgatatcaacgcttttaagcggtttgtataacgttggaatcggcttcatcacacctctgacgacaatcggcattcccgttgtcattccgccttctagaccgccgagacggtttgttgcccgcgtatagcctttttcttcgtcccagatgatttcgtcatggacttcactgccgtttttgcgtgcggcttcaaagccgatgccgaattcaacccctttaaaagcattgatgctcagtacggcggctgcaagcttgctgtcgagttttcggtcgtaatggacatagctgccgactcctaccggcaccccttcaactatcacctcgacgattccgccgatcgaatccccatttgcttttgcttcatcgatcgcgtccatcattttcctgcccgcttcttcgtcatagcatctgacaggggactcttcggttacttttttcaagttttcgatagattcgtaatttgttttttcagcttttactccgccgatctccagcacgtggccggccacttgaatgccgagctgggaaaggatctttttggcgacggctcctgccgctacacggacggtcgtttctctggcagatgaacgttcaagcacgttgcgcatgtctctgtgcccgtatttgatcgcgccgttcaaatcggcgtgccccggtctcggccttgaaatctgtcgtttcatttcgctttcttcttcagccgtgatcggctctgaacccatgattttcgtccagtgtttccagtcattgttttcgacgacgagagcgatcggcgatccaagagaacgcccgtgtcttacaccgcttgtgatccgcgcctggtctttttcgatttgcatccggcgtccgcggccgtggcctttttgacgtctttgaagctcgtaatcgatgtcttcttttgtgatataaagccccgctgggactccttcgataattgtcgtaagctgcggaccgtgagattcaccggctgttaaatacctcatgctttcgttctcccttcatcacattaacgcttttaagtaaaactataacataaccctttataaaaagtcagctaacttttttgatagaaaaacgtatctgtcgattgaaaaccgtatttttccggattgaagatctgttccgtgcttccgacaaacaaaacccccttattcttcaggctgccgctgaacttatgatagatcttctcttttgcttcctccgtaaaataaatgagcacattgcggcatacgatgatatcaaaatctttctcatacggatcagccagtaaattgtgcttttgaaagcggatgtttttcctgatctcgtctttgactttaaagcggtttccgtcttgcgtaaaataaagttctttcatctctttcggcacttcctgcagggacctttcctgatatacgccttctttcgctttctgaaggactttgtcatcgatatctgttgcgataatctgatagtctgtgaggcctttctgtctgcttaaaatcattgataatgtataaggctcttccccggttgaacaagccgcgctccaaactttcagcgttttcgcaggctttaaaagcggcaggatcgttttttcgagaacctcccacctcttatagtttctgtaaaattctgaaacattgattgtcattctgtccaatgtttcctgcagaagagcttcattcttttctaaagcgagcgcaaactcgcggaaatcgccgtatccttttttctcatatagagacgtcagtcttcttttcatttgcgcctctttgtacaatgccaaatccacaccagtcatttttttccatttatcaacgaagaaactgtaattgtccatgttttctctcctaatcgtcgtgctgatatgagtacaattatagcttgttttctttttaaatttgtatctttaaaagaaaaaagcccgcccgccggcagccattctattccatataaaaaaatcagcttttcagctgatttttagtaaatccattgattcattaatttctcgtcttcaacaagttcgtcctctttaaaaaacaagttgatttcgcgtgctgcactttcaggagaatctgaaccgtgaatgatattttttccgacaaacatgccgaagtctccgcggattgtacctggaagcgcttccttagggttcgtcttcccgatcagctgtctggcgaccgcgattgcgtcctcgccttcccataccatggcgaataccgggcctgaagtaataaagtcgacaagttcgccgaaaaacggtttcccgttatgttctttataatgctcgcctgccgtctcttctgagaccttcatcagcttggctccgattaattgtaagcccttacgttcgaatcttaacaaaatttcgccgatcagctgacgctgaacgccgtcaggttttaccatcacaaaggttttttccatagtcgattctccaccccgctaatatgtataggctttcaacactacaacagaaatatagcatttttcaaacaattaatcaataaagggtggagaatattcatactttcgactcatttgacgttttttagaactttcgcttaccgatgtatttcgcaatttggcccagtgccgtccgcgcccggtttttcgggagcgtttcaagcagttcgaaagccttgtttaaatacatttcactgaccctgaacgattgttcaatggcatccgttttcttcagctcttcgatcactggcttgatctgttctggagtggtttcactgttgaccagcatcaggcgcgcttttagctcaggcgatttccgtgcatataatacgggaagcgtgacattcccctgaagcagatcgctgcccacaggcttgccaagctctttttcgcttgaggtgaaatcgaggatgtcatcaataatttgataggacatgccgacataatagccaaaccagtacaacgttttatgaatgttttcacccgcaccagcagcaatggccccaagctggcagctcgacgcgattagaagtgctgtcttgcgcctgattcttctcaaataggttctgagattttgctccatattatatttatctttaatttgttcaatttctccaagacagacttcgacaatcgccttggacaagatttcatgggctttcggttcgtttatttttgtcatcgcttcaagtgagcgagcgaacaaataatcacctgtatacatcgcaatccggttatcccacttcgctttgattgtcggctgtcctcttctcagctccgcatcatcgatgacatcgtcgtgtacgagcgaagccatatgtatcaattccaacgaaacggcaacatttttaattttgctgatgtcgtattcgccgaacatgccggaaagcaggacaaacacgggacgaatcctcttgcctccggcctgcagcaaatgcaggctcgcttcactgagcaatggatagtcggagtgcacggtcttttcaagctctttttctattaattcaatatcgtcattcaaaaaagaataaaacgttgtcaatttcatatcgattcacccgagtatttctgtagtcatcatcgcttccagccgacatgtgttgccgctacgccgcctgtgaacggatgatattgaacattttttaatccagcctcttcaaacaacgcggcaagctctttcataccaggaaattccctggccgattcctgaagccatgaatactccttaaagcttttggcaaagagctttccaaacataggcataatgaagcggaagtacaggaagtatagctgtttgaacccgaacatttcaggctgggacgtctcaaggcatacaacctggccgccgggttttaccacgcgcgccatctcttttaatacggttaaatagtcgggaacattgcgaagcccgaagccgatggtgacatagtcgaatgtattatccgggaagggcagttccatcgcattgccgtggatcaattcgatctggctgtagctttccgttttttgttcggcgatgctcagcatgtttttgctgaaatcaaggcccttgatttcccctgtctctcctgccgcatcagcgagcgcgatcgtccagtctcccgtcccgcagcagacgtcaagcgctgtggctccttttggaacgttcatgagctgcatcgttttgtcgcgccattttttatgctgtttaaagctgatgacggagttcatctggtcataatttttataaatcttttcaaacacgccatgtacgcgctgttcttttgactgcaccatgattacccttcttccactttctgatgataagttcgtttttcaggccgaatttcctgcaggcgtttcagaagccatttttggacggcgggctttttggcaagcgactggttgatcgcaagcttggcttctttataagccgcagcagccagctgtccgcatgaagcctgtccttccggaaactctttctgtatgatcgtctccagcagccgggaatctgaagctttttcttcggccgcaaaccttttaaagacaagaaagtcattggcggctgttttccagtgaggcaggtaaaagtggtcggcgagatggtgaaaaagtgcagcttccactatgctgacgctttttttcaggctgtctgcatcttttgcggaatggtcgtaaagcctgattttgtgttcgtttatttctttgatggccgcagcgagcgtccgaatcatataaatatccttcatacccgataacagcgagtagtacatgccgctgaagtaatcaccggccaatacggtcagctggcggtttttataatcgtcctgtttaattgaagctgcggtcgtgacttcatcatgggtatcaagggctgtttgaacaagcatcgccgttaagatgtaactttccttgtcagcttcttttaaatccgtttcctcaaacagagcgtagaaaagaaacagcttatcctcatcaactttcggcgcagtcagatgcttcgccaaatatggatgtgaaagcttttgattcagcttgattttcaaataagataattgtccgtagatgtcttgcaaagatatcacccttgtcccaaaattcgcagtttttcttttgattgattatgtatcttttttgagcggagaaagtttaattataccataatatgttgaaagatattgtcttatgccacgcggacgggcataaaaagccagcctgctattttttcgattcgctcttcatctcgccgtttgccgtctgaataagggcctcgccccggaccttgatcgcggaggtatgctcggtaaactggcagatcatcacttctcctttatcaagcttttctgaatgatgaaatctcgtgtccgtcccccttgtcagtccgatcacattgacgccgtcttcaacggctttgataacgacaaaatcattcgattgattattggtcatgttcatcgcacaccttctcatttttaatcatgatgttttgataagctccaacacctcagagcgagcagccacatcctgtctaaacgttccccttacagctgaagtgacagtttttgaacccggctttttcacgccgcgcatcgtcatgcacatatgctcggcttcaacaaccaccattacaccgtgcggagtcagcgtttcaacaatgctgtcggcaattgttgacgtaatccgctcctgaagctgcggacgttttgccaccgcttcaacggctctcgccaacttgctgagtcctgtcacttttccgcctttagggatataggctacatgggctttcccgtagaaaggaactaaatggtgctcacacattgaataaaaaggaatatctttaacaagaacaagctcttcgtgatcctcgccgaaaatcgttttgaaatgctctttcggatcttcgtttaaacccgcaaatacttcagcgtacatctttgcgactcttttcggtgtatcaagaaggccttcgcggttcggatcttctccgatcgcctccaatatttgccggacggcttgttcaatttggtctttgttgatttctctcattgttttatatcctccagaaacgcatacatttaattcagattctagcacacttcagcttataaaagcaaaatgaaaggtttttgccggcaaaatgttatccgtctaaaaaaggcctttaaattatgaaaagcccctttgaaaaggggctttcctgtgaagaaacaacatggtatgtattacgcgcgaaaacggcatatacatacaattattttcctgctacagcgtctttaagcgctttacctggtttgaaagcaggtactttgcttgcagggatttcgatttcttcacctgtttgaggattgcgtcctttacgagctgagcgctcacgaacctcaaagttaccaaaaccgatcaattgaattttttcaccgtttttaagtgcatctaaaattgtatcaaaaacagaatcaactgctttagtagcgtcttttttagatagttcgcttgcttctgcaaccgcattgattagttctgtcttgttcatgcctttcacctcctcccaaaaggtatcaatcaatagattatcatcatttcttcacagttcaacctgtttctatacctgtttgaacagaaatttcaaataaatatagaaaaggcatttcacggcttccagcgaaaatttcactttgagaggaacgtttgtccagtaaagtgaagattttctgtttgtagattaacacatctgaatagccatatcaagcattttaaagcgatgatcccttattcgtcaaggtttaagcagaataaaacgaacaaatattcctgttttttcttttttaatcataatctttcctatatttccagccgcaagcccttgccgtccaaccccctttcaccgcgcccgttcagcctgttttcaggcataaaaaaagacctcccgtatgataagaggccttcccttttataagatgatcgcaatcaagccgcctgagccttcattgataatgcgctccagcgtctccttcagcttatatctcgcattttcaggcatgagtgacagcttcgcctgaatcccttctctgacgatcgagctcaagcttcttccgaatatgtcggaattccagattgacagcggatcgtcctcaaagtcctgcattaaatagcggacaagctcttcgctctgcttctctgttccgatgatcggcgcaaactcgctttccacatcgactttgatcatatgaatcgacggcgccaccgccttcagccggactccgaatcttgaaccctgcctgatgatttccggttcatccaggctcatatcggttaatgcgggagctgcgattccatagccggtttgtttcaccattttcaatgcatctgagacttgatcatattcggtcttggcatgggcaaaatcctgcatgagctgaaggaggtgatcttttcctctgatttcaacgccgacgacttccctcaaaatttcatcgtacaggtaatccggcgcgtataaatcgatttccgcgatcccctggcccatttcaattccggcgaggcttgcgcgctcgatgaaatcaaattcgctgaagtgtccgacgacgcggtcgacatctctcagtcttttaatatctttgacggtttctttaacggaatcttgatagttttccctgagccaatgattctcttttaataccatcacccagcttggaagattgacgttgacttcgagcacagggaattcgtaaagcgcttctctgagaacgctcagaacgtccgcttccctcatgctttcaacgctcatcgccagcaccggaatgtcgtacttttccatcaattcttgcctgagcgcttctgtttccggatgatacggccttacggaattgatgaccatgataaacggttttccaacctctttcaactcgtcgatcacccgttcttcagcctcgacataatcctgtctggcgatttctccaatcgtgccgtcagtcgtaatcacaacaccgattgttgagtgctcttggatgacttttctcgtgccgatttcggcagcttcgtgaaacggaatcggctcttcataccaaggagtattgatcattctcggcccgttttcatcctcgtatccctttgccccgggtacagtatagccgacgcagtcgacaagccttatattcacatcgagtccgtcactgacatgaactgacattgcctgattcggaacaaacttcggttcagttgtcataatggttttgccagcggcactttgggggagctcatcttgtgcgcgcgcccggtctgcttcattgttgatattcgggagcaccactagctccataaattttttgataaacgtagattttcctgtacgtacagctcctacgacacctaagtatatatcgcctcctgttcgttcagcgatatccttgaaaatatcgaccttttccaagtgatcccctcccggacttccaatccttttcaattttttacttcttcatcaatcaaaaacaggacactatagtgtatgacgttgtcctatttcaatatgacagcttagggaaattttttcggcatacatgaaaaaacctttctcctcattgtatgccgaggagaaaggttcatgactgatacttgcattttgaccgatattctattcgagaaaaacaggttcctgtttgtcattcactgtgtactttaccgaaaacgccggaacgaaaggcgtctcttcccacatcaaatcttggacttcctcgcccggctttaccgtttttttcgacttcttcatcagcttggccaaatccatccggtaatccactttaatgtcgcctttttcatcgacgagaagcggcagcgaggtgcccgaaagcggactcgtgacagaaggcgcctctttcagtccgagcttttcatggtcaagcatgaataagttcttggatacgacttttttatacggcggatacttgtgctgatctttatacatttcgacccgaagctttaactccctgatcatttccgacatttttacatcaatgagcttgaccgtcggctttttttccacatcgacaagaacgtacaagtactctccgccgttttcataggatgtgcccggcggctcagccatataccggggggacagcctgttaaaatcgatagggtatttttgatagattggcacgcccatatcccttgtcttaatcggcagaagccctcccgtcgcctccctgaattcatcaacggccgcctgcacttctttgagctggtgctgatgcggtgcgctgtttttcgcctttctttcttcagggtacaaacaaccgcttaacatgattgcggtcaataaaatagcgagcagaacgtttacgattttcatatgaatcttccttttttatgcattattcgttgacggggccgctgaagacgacaaaaaagacgatcacgccggagatgagcatacatgtgtaggcgacaaacgacgtgataatttttaaaaaacggtttttaaatttatatctgcttatgtatatggcaatcaccgctaagaacatcaggcccattgatcccaaggcaaaccacatttttaacagaccgacattcacattgaagccctccttctaccttttcttgtgatgtaagcgttatatttcattttatataagaaaaaccagaagttcaacagcttttccaatatttcgaaacggaaaaagccgcaaaaaaaagcctgaagcaaagaggggggctttgcttcaggcataatgattgtgactatataacccaatttgtaagatacagctcttccagacttcgattctattttatgcaagtcttcggacaaatgtatcctctcttgcctaagtctccaaaatgttttggtttttttaaaacgaacttagaggagagtataaaagcagttgatgatggggcggtcatttcatttgattttcgaatgtgttcacaagatcttccatctcgtgtgttttgactcttgccatcaatgattcgactgccgtctcaactttttcgccgtcaaacaatactttgtgcagtgcttcggtgatcggcatttttacatcaaatttctttgaaagctgataagcggcttttgtcgtgcggaccccctcgacgaccatccccatttcttccagaacttcatccagcttgaagcctttacccagcatattaccggctcgccaatttcgtgaatggacgcttgtgcaggtgacgatcaagtccccgattccagtaagacccgagaatgtcagcggatttccgcccatttttgtgccgagccgggcgatttctgccaagccccttgtaatcagcgcggctttcgcattatctccgtatcccaaaccgtctgtaatgcccgcggcaagcgcaatgacgtttttcagcgcgccgccgatctctacgccgatcatatccggattcgtatacacgcggaaattctggttcataaacatatcctggatcgcctgggccgattcaatgctgctgtcggcagataccgttactgtcgtcggatgccttaaaccgacttcttccgcatggctcggtccggacagaacgacgatgtcctcccttaattcagccggaatttcttctttcatcatttcagaaattcgaagcagtgtgtcaggctcaattccttttgaaacatgtacaaaaatcgccttttggttgatgaaggaaacagcctgtgccaaaacttcgcggatcgcttttgtcggaacggcgacaatgatcgtcttgacatcagccactgcagcttcaagatctgttgtggcacgcacgttttcagaaagtttgacacccggcagataatctttgttttcatgatgttcattgatttgctgaatcagttcttcacgatggccccatatgcacacatcgtactggttgtccgccaaaacgagcgccaaggctgttccccagcttccggctcccaaaatcgatacttttgtcatttttactacacctctttattttcttgctcttgcgaaaatcctgattggtgttccttcaaatccgaaggcgtcgcgtatccggttttccaaaaagcgttcgtaagaaaaatgcatcagctcagggtcattgacaaatacgacaaatgtcggcggcttcacagccacttgtgtcgcataataaatttttaaccggtttccattatgcgtcggcgtcgggttcatagccaccgcatccataatgatatcattaagaatattggtctgcaccctcatcgaatggttttcgctcgccgtcatgaccgcaggcatcagcgtatggatgcgctttttcgtcaaagcggacataaacaaaacaggcgcgtagtccaaaaattgaaagtggtctctaaccttttcttcaaattctttcatcgtccgctcgtctttttcgactgcatcccatttgtttacgacgatgacaacagcttttcctgcttcatgcgcatagccggcaatccgcttgtcctgctcaataatgccttcttcgccgtccaagacgacgcagacgacttctgaacggtcgatcgcctttaaagctcggaggacgctgtatttttcagttgcctcatacactttccccttttttctcatcccggctgtatccacgatgacaaagtctctttgattgtatgtaaacctcgtgtcaatggcgtcgcgcgtcgttcccgcaatattgctgacgataacgcgctcttctccaagcatggcgtttacaagggaggattttccgacgttcggccggccgatgaggcaaaattgaacgacttcatcctcatacttcgtctcgggtatgtttttaaaatgttcgctgaccgcgtcaagcagatcgccgagaccaaggccgtgcgtccctgaaatcgggaacggctcgccaaagccgagggcataaaaatcgtaaatgtttgctctcatttcaggattatccactttattaaccgccagaacgacgggtttttttgtacggtataaaatttttgccacttcttcatcagcggctgtgacgccttcgcggccgttcgtcatgaaaataatcacatctgcttcttccatggcgatctcggcctgatggcgaatctgcgccaaaaacggctcatcgccgacttcgattccgcctgtatcaatcaggttgaagtcgtgattcagccactcggcagagctgtatatccgatcccgcgtcacgccaggtgtatcttccacaatcgaaattctttcgcccgcgatcctgttaaagatcgtggacttccccacattgggtcttccaactatggctacgacaggttttcccatagtacccttcctttcaattcagtaaagcttttccatctttaaatgaatgatcatttgtttctcttttcaaaaaatcagtttgaagaaagaaacccttcttattccatacagaagggcttaactcatatattatatcaatttctaaagagatcacaactgtaattaaaaatgtttcacaatcaaataaaggtcatctcctattccgtgggcgattccgtcgagaatggcttcaaggttttggcgtacgtgttcatttcctcgggggtgtcgcagaaaaatgcagccgtcccgccgatcactctgtctcgccttgtggtgacgacggcgagaatgaatttttcgattgattcgctcattttatcaccttgctgtgcttttctttaatgaattccatcggtacgcggatggcgttttccagcgtcggaacatcgccgatgaccctgatcgccgtctctttgtccttgatgaccggaaggacaaaaaccgcgacccgcccgtcattcaaatcccttttcgcaagcggcgaaagagagggttctccagaatctcgatacacgccgagcacatttgaaacgtcaaataaaatcgcttgtctttgcccgagattggcaatcgttactgcggaattaaaatttttcggcttcaaaataaaccccatgccgtgttccaaaatcagcttccgcttttcgggaagcccgatattcataatgtaaatattgtcgacataaagtccggccccttcaaaatgaggctttttatactctatatcggcgatatccttaataaagcttccggacattaagattctgcccgcgataaaacagatcaaagcagcagcaaggcctgcccataccgatgaaaacagaatgtatgcgagggtcgtcaggagcgatgtaaaaatgacaatgtaattcctgctttcaaaggcgatcgcgattccttcgatatacgtgctgcctcttgaaacgagttcatagccgtcaagctgcgtcaatgtttcccgttccatgttccggacatccctgaattgggttgcagccagcgttaaaaacgtaatcgctgtataatccgatttcaagattgacggaataatgatcgcgccaatgctggcagcgatcaaagccagcgcaatatgtatcgttttcccatgaagataagtggggtactggcggtagtcggttcggagcatatatactctgacaacaatacctgcgacaattcccaagatgatcggataagtatattggctcatgacatttttgctgctcctttattcaatcgcttcaatttataatagacttgatgcatcagctgttcatactgggatattccgtaaacgagaacgatccccgcagcgcacattgacagccatgaataaccgcccgctgcaatgtctccatagagctttctgatgacgaatgtatacaagagctccccctggcacatcccgagcacaaacaccccgagacggacggcgaagcttctttcaaaagctgctgtcatgatgacaaacaagatgatgatcagccattcaggctttaggataaaccaaacagggtcatataatgcaaacagaaacaaaaaaccgtaggcggacaccatcgagagatgaagcagcagccgcttgacacttttatgaagcctcaaaaaaccgcacagcatgaaggctccgatataaaacgacaaataggcggcattaaaatacataaagagcctgacctgatacatacttaaaatgatattgagcaaaataaatgctgacgcataaaagcgaaacctgtttttctcgaggataaaagtcgtcagcacccataaaaaccacattgaccaataataatagaattcttccatatgttttcgtcctccattttcagtatggagcgacttaagattttttaaacgtgcgataaggagggaacagcgttgggaaaagacagacaggaaaagaagctgaaacagcagaagcgaaccgaatcggaccgtgaccagtcgatcagctacaatggcgccgcctctctcgaaagtgcggaggacgcgcgcaagcgaaacccgtaaaaaaaccggctcaagagaagccggtttttttaacgcatgctgtaaacaaaggggtcaacacccctcgctttcagccaatgatatgtatcgcccttgatgacgagcggcgcttttttcaactgttcaatcgtcctgcaacccaagacggtcataattcttttgaaatcttctatcaggctctcgatttcggcggctaacgcctcttctcccgaagctgtcagcaccttgagaaaatagcctgccatcccagccgcagacgcgcccagcgctatcgatttggccaaatcaagggcatcttgtatgccgccggatgcgataatcggccgatcgccggatatcgagctgacttcggccaggctggctgctgtcgatatgccccattgatcgaaaaactcaactgctttatccctgcgcaaattttcgattttcgaaaaattcgttcccccgaatccgccgacatcgatcgcctgaacgccgacgttaaaaagccgggccgcggtatccctgctcatcccaaagccaacctcttttacggcgactggtacgctgacactccggcagatgtcttcaatccggcgcaggcgtcctgtaaaattgcggtcgccttcaggcatgacgatttcctgaatcacattgaggtgaatttgaagcatatcggcttcaatcatgtcgaccgcccgcttggcctgttccactgtcgcttcgctccccaaattggcgaatacaagccccttcatattttcttttctgacgatctcgtatgaaggtcgctcatcgggatctttcaaagcggacatttgcgagccgacagcgaccggtatgcctgtttgtgcagccgccctcgccaaagccctgttgatctcaaacgtcgccttcccgcctccgcctgtcatcgcattgataaaaataggcgaacttaaaaacagttcgcctattttggttgaagtatcaacttgtgacaattccgtttccggaaggctgacgtgaacaaatgtgatatcatcaagcccggtctgacgtttctgtccggtggacagggcatgatcaatgtgttctttttttctttttgctcgcgtcaccatcatcaccaaattttactttaatttattcagtttgtctccgatcatttcaccgagctggaaccctgaagactcttccttcgcctggtactgacggtaatcttcctgctctgctttatcggtgttttcttcaagctctttcatgcttaaagaaatgcgctcttcctcttcattgacatcaagcactttcacttttacgtcctggccttcctcaagcacttcatgaggcgttccgatgtgtttgttggagatttgcgaaatgtggacgaggccttcaactccaggaagcacttcgacaaatgcaccgaagctcaccaagcgctgaacttttccgtccaatacctctccaggcttcaccttttcaccgatgttggaccaaggtccaggaagcgtttctttgatcgatagcgaaattcgttcattgtcgcggtcgacggacagcactttgactttgacatcctggccttcttcgacgacgtccgacggtttttcaacgtgtgaatgcgagagctgggagatgtgaacaagaccgtcaatgccgccgatgtcaacgaaagcaccgaagtctgtcaggcgctgtacttttccttcaagcacctgtcctgcttccagcgtttgaagaaattcttgttttctttctgactgctctttttctacaaccgcacggtgtgataaaatcacgcggtttttatctctgtcaagttcaacgacgattaaagtaagcgtctttcctttataatctgtaaaatcttcgacaaaatgcgcctctacaagcgatgcgggaatgaatccgcgcacgccgatatcgacgaccagaccgcctttaacgacgtcttttacttcggcttcaaacacttcttttgactcaaactttttctctaggtcttcccaagcgcggtctgcatcaacagcacgttttgataaaatcaatgcatcgtcttccacttttgtcacttttaattcaagctcatcgtcaacattgacgacatctgatgctttttcaacatgaagacttgataattcactgattgggataattccggtttgcttgcagttggggatgtcaacatcgacatgcttgtcctcaactttcgttacaatacctttcaccacatctccaacctctggtacttgaacatcaatttgattcatttcctctgtcatttcaataacctccttggtccaaacctacacagcttttgtaaaaacggttattccggacgaaatgatatccggtccggacagccgatatgtattaaagaaccattcaaaaatggatatttgaatgttctaaaacatgatttattattactaacttctaataaaagcctgtgtttgtcaagtcaaaacatgcagacaataagtaatttgcccggattttttatttttgagcctttttgtctacaatctgcagaattttttcggccacttcatcgatcgtcaatgaagtcgtgtcgatttcaagcgcatcgtccgcttttttcaacggcgaaatctcgcgctctgaatcgagtttgtcacggcgcctgatttcttctgcaagcgtttcataatttacattgtacccttttttgacgttttcttcaaagcggcgttttgcccgctcctcgacggacgccaagagaaatattttcacttccgcattcgggagaacgtgggttccgatgtcgcggccgtccatgacgactccgcctttttcagccagctgctgctgccttttcgtcatttcttcgcggatcccggcgtatttggcgacgatggagacttggttgctcacgctatccgtgcggatcgcctctgttacatcttcacctgcgatataaaccttctgctctccttcaggcgaaaccgtgagatcgatggcagattcttttaacaaggccgtcagcgccgcttcgtcgtttaaatcaacgcccttttccagcgctagatacgtaatcgccctgtacatggcacccgtatcaatataaatatacgacttttttctggccacgattttcgccacggtgctttttccggctgccgcagggccgtctattgcaatgcataatttcttttccataattcctctccttgctatctggtactccttataggattgtatcatgtattaggcgaaaaaggggagattttagcgtgaattacggcttaaatgtctcgatccattcgccgattttcatgttgttcacgccttcatactgcacgacctttgacagataaggctcagccttggagaaatgaaaaagaagctgcacgctgattaaaatgaccgtctgtacgacgagtatcttaaataataaccgttcgattgttttcatattattcctccgctgcccggaaaatttacggcgccgggcattttcaatttaccggcggacgttccgcccatatgttcagtatggaaatgtttagggcgaattattccgaatgctaaaaaggaaaaggcatgttatcgccttttccctttgatctatcgtttttacaagtcgttgtatatcggttctgcgcttttcattttctgaaccttctcttccgtgccgtcattggcattgatgaacatgcggaatgtatcgttttcaatcgtgccgagaatttcgtagcagagcacttcttgcgaaagctcgttcgtgactaaagcaatgcgcgtctcctgaacttttacgttgggattcaggcttgctttcgctttttcaggcgttagtttaggcttcggcaagtctctttttttatgggagattaagaaatcctttgcattaaacccggtaatctcgccgtcgtcaagtgcgaccttgatgcggatgctgtccggatagagccagacatcgtcctggaccggaacaaatgaaaacaccccgacgccgtcgtattgcgagctttcatccatcttcaggtcttctgttttatagccgttttttttcaaaaattgaagggctttgtttgacgcatcgtttaagctgattttttcatctttaatttttttgttttgaatcagataaaccggatatccgcctttttcggtaatgtccatataaatatccgctttttgatcagggtcctgcatactgatgctgtatacatccctgttcgttttcttgccgcttttcgatactttgatattgtaatttttgtcctgggcgaatttttgggcaatcttgcgcgcttctttttcggttattcttttgccttgtaaatggtcgtacccttgctgctcttttttcgtgttcgtcatctctgtcgcgcctaaatccgtatccgaaaatgcacttgcgcttttttcaacggttttaaatccattaataatcgtattgtcgctttgtttttggccggacgcgagcgccagttctacatccatccatctcaaatttttgtcaataatcaaatgctggacattacgcagttcattttgtatatcctttgaattttcatatagctgatttaaagaagcgtactcttttttattgagcggctctttgtcaagatcgcgcacggctgctttgtagctgaaatctccgacctttgccaaaaactcttcggtcttgttaaacggcattaaggtcagcggcagctggctgacattgttatgcgcttcagaagtcgttttccagacttccgccaaagcgggagacagcgtttttttgctgttcatcgcaagcgtgctcccgattttatcatgcagctgatccacctgataagttaagtcgtgaaatgccctttgatagttgttttcggcatgaagcaaaacggcgtctttctcctgatgttctttatagccccaatagcttgttcctacgatggcgacacctaaaagggcgattaaaattcctctgatcatttatagcacctcgcttttattcacagaaaatgtgtttaccgatccttttaatttgaggtctgccccaaatccatgagctagtggccgtgtcagggttaaaatagtaagtggcattttctgatggatcccagccgttgatggcgtcaagaacggcttttttcgccgtttcatccggcgtcatataaatctgtccgtccgcgacagctgtaaatgcaagcggttcaaagataacgcccgccaccgtattcgggaacgtagggctatcgagcctgtttaatataacagctgcaacggcaacctggccgtcatacggttctccgcgcgcttcaccgtaaaccgcttgggccaacagattaatgtcgttgttcgaaaatccgcccggcatattggctgcaacggcatcctgttttttaggcgcggcttgtttaggtgcagcctttggctgtgcttgttttttcggctgtgcaggagcggcctgctgcttttgctgcggctgtttttgggcggtaccctgctgttgtgcgccctgccgctgtcttgcttccgccttttttctcgcctgctgctgcacttcttttgaaggcttcgtctgatacttcagcggcagcccgccgtaatgtgtaaattggtttccttttcgaagctgtctgtgcacgtagtcgctgtaatatttagtatgattgattaataatcgttttgttttcggcccgaccaggccgtctgtatcccttaagccgaactgattttggaaattgcggacggcccagtatgtcgcccacccgtatactccgtcaattctgccattgtaatagccattgtattgaagtcttgcctgcagttcaatcacatcatcccctgtcgccccccgctgtattacctgttcagaaaaggcagcgcttttttgactgaatggaagtgaaagactggttgccataatggtacataaaatgacattcaaacaaaaagaacctttcgacttcatgttttaagcctcctccagcatttttgtaaccatatcttttgtagcgaggcagattttatacacgctttcctttctgtttcatctttaggcaaatatgcctgacaagaaaaataaaaaaaccgcccttttacaaggcggctattgctgaagaggctgcccgccggttttgacggaacgggctttttttgctttgcgcaagccgaaccaccaaagaaacgccataaagggcagcataaaatagatccagttttttaaggcgagcagaatataatcgtatagaccgtgaagcaaagccggaataaaaagcgagcatagcagccatttcatctttgttttgctatccgaaaaacgggctttgccgatgtaaaagcccatgatcactccgaataaagcatggctggaaaccggaagcaaagcgcgcataaaggcgtactccaccccgtttccgatgaggtacaatatattttcaagcgtcgcaaaccccaatgaaaggcttgtcccgtatacgattccgtcatagtgttcatcaaagtcgatatgctgaaaggtgctgaccatcagcaaaaaccattttaaaaattcttccaaaaagccggaagttaaaaacgaaacgacaaaactgccctcagaaatgtgttctttttccaatacatactggatgaacatcgtcggaaaaacgagcaaaacccccagtataaagaggcggatgaccatatgaatgggctcggattcatatttttcctttaagtaaaaatacattaacagtgcgattccgggagctaggcctgctgagataattccgaacatgaggaaacctctttccttttcatctcattctatcctaccatgattcggattgttttgaaattgaaaaagaacaggccgcctaatagcagaatttgtcttttatgccttctttatagcttgcaagaaggacggcgagtttcattctcgcttttttgctgtcataatccttgcctaaaatgaccccttttttcgcgaggtcatagctgctgcctgcatagtcataggtcgtataaacttcgccttcctctgcgctcgtcgtgatgacgatataaacgccctgatttaaagcttgttcgatatcagccatcatattcggcggcacctgcccccttccgactccctcaaggacgatcccttcgacaccctcgcggacggcggctctgataaacttgccgtctccatcaagatagcatttgacgatgtccactgcaggaagcggcctttgcagctggtgaacatcccgctttaacggcttttgataaacgtatactttgtcgttatcaatgatccctaagtagccgaaaccgaatacgtcaaaaccctgcagattcgaagcgtgcacttttttaacgtagcgcgcgttaaagatcctttcgttaaaaacaacaaccgtgccggctccttttatatccggactgcaagctgtatatacggcatgcctgatatttgtatatgcatctgtgccttgctgttccggtgctcgctgtgaacctgtgacaacgaccggcctctcatcctctattgttaaatccaaaaaataggcggtttcttcaagcgtgtccgtaccatgcgttacaaccgcgccgtcatagccgccgttctgaaacacgcgttcgatggtttgcttgagctctaataaatgctcaaatgtaatatgcatacttggaagctgaaacgccgggtagacatcgatctgtacatcttccggcaggctgcacatttcggctaattcagggccgctgatcgcccctgccgcaagccggccgctttcggttttccggctggcgatcgttcctcccgttgtaatgagagctacttttttattcatgtcaagatgccccttttcgcgttgatctgtgtgccgataaaaaagagagcacatctatatatagaatatgctctcttttgcctgatacaaatcataaaacatccggtttttatatccgtttagcaatttcagctgcgattaagccgccgtgaaaacggccgttttcaataaagatttcatttgcgttgttcccggccgcaataacgccggcgataaagatgccttcttcgttcgtctccatcgtttcttcattaaagaaaggacggcccgactctgcgtcgattttgactcccattttttgaagaaagctatgatctggatgatagccggtcatggcaaatacaaaatcatttttgatcctggtttcttttccgtcgacagaaaaaatcagctcgtcttccgtaatttctttgacgaccgcccggaattccattctgatttttccgtgcttgacaagcgaaaggaattccggaaggatccacggtttgatgctggaggaatattcgttccctctgtacaatacggtcactcttgcgcccgccttaacgagctccattgccgcgtcgacgcttgagtttttgcccccgataactgcaacatctttatcaaagtacggatgagcctctttaaaataatgaaatacttttggaaggtcttctcccggtacattcatatagttcggattgtcataatatcccgttgcgacaatgcaaaaagaagacaaatacgtgtcctttgatgtttccacgataaattggttattctctgtttttgttacggattgaactttctcaaacgcgttgatccgcagattttttcgtttggcgacttccctgtaataagaaagcgcctgatttctgaccggcttgtgattttcagtaataaaagccacatccccaatctccagtttttcgcttgagctgaaaaaggtttggtgagtaggatattgataaatgctgttgacgatgtttcctttctcaatgacgagtgcatctattccgatctcttgcatgtgaatagctgctgaaagcccgcaggggccgccgccgataatgatcactttttcttctttcattttccgttcatctcctgtcatatccggcaaatcaaaaaatctcctattttatgataggagattttttgggttgttgcaaatgtttgagcctatatccagcctctgaagcgggatgcttccgccatcttgcggacgcccaccatataggctgcaagcctcatgtcaattctgcggttgtgcgccatttcgtaaatgttgttgaacgatttgaccatcattttttccaaacgttcttcaacttcttcttcagtccagtagaatccctggttgttttgcacccactcaaaataggataccgttacaccgccggcgcttgccagcacgtccggtacaagaagaatgtcgcggtcggaaagaattttcgtcgcttcgagcgtcgtcgggccgttggcagcttcgacaacgattttcgccttgatgttatgggcgttttccgcggtaatttgattttctatggcagccggcacaagaatgtcgcactccagctccagcagttctttgtttgtaatggtgtcattaaacagctttgtgaccgttccgaagctgtctcggcggtcaagcaggtaatcgatgtcaagcccttcaggatcgtacaggccgccgtatgcatcagaaatgccgacaacctttgcacctgcgtcatacatgaatttcgcaaggtagcttcccgcatttccgaacccctgcacgacgacagaagctccctcaatgtcgatgtttttctttttcgccgcctctttaatgcagattgtaaccccttttgctgtcgcagattctctgccgtgagaaccacctaaaacgagcggtttgccggtaatgaagcccggcgagttgaattcgtcgattcttgaatattcgtccatcatccatgccatgatttgagaattggtaaatacatcgggagccggtacgtcttttgtcggtccgacaatttggctgatcgcccgaacgtaccctctgcttaaacgttccagttcaggaaaggacatatcccgcggatcacagatgatcccgccctttccgcctccatatggaaggtcgatgatgccgcatttcagactcatccaaatagaaagcgctttaacttctttttctgtaactcccggatgaaaacggatgccgccttttgtcggccctactgcatcattgtgctgggctcggtagcccgtgaaaatcttaacagatccatcgtccatgcgaaccggaattttcaccgttaaaaaacgaatcggttcttttagtaattcatacacctcttcaggatatcccaatttttcaagcgccttatgtatcaccgtttgcgttgatttcaaaacgtcatgtgtgttttcttcagtatgaccggtgttttgatcggctaccattataagttaacctcctaaagtctttctggcatgttgtcctttcagagaatagtatacacccttgcactaatcatgcaaagaacaatcaaccatttttcgtgaaaatattcaagaaaaatcatttttgttatattcttattttcggcagaaaaaaactagctgtttaacacagcagaatatctttttttgaatgcgcgctatttaaagtatgtctgaatggtctgaacggcattgttctccatgattttctttccgtattcctgaagcctgtaaatcgttaaagtcgtcggattcccatattcggctaaaatcgaaatcacgccgtcaacctcaagggagtcaaaatcgtcgagacttaagaaatacctgccctcatagtggtagactgtcccgccttgaataccgatgcggtccagatttttggaaagttcaatcagatgctcaaacgtttgaaattcatatataatgtcaacactttcgccaagtttgacttgcatttcaatatagtcctcatcatactcattatcgtcttcatctgtttcctgattttttgtgacaatgatgaccattccttgtgcttgaagagaatacacttcaacagcgattgggccattcgcttcgaacccgagctctgtattcgcttcgttcatcatgtccttaaacagctgctgaactttaaatgagtctttccaaaggtcttctttcgtcagcccccggtctgtcagatcgtcaagtgtcagaaagattttgatcttattataatttagacgctcaagccgcataacgttccctcctgcctcttcttgcacacatcatatatcttattatatggagatgatgagtcataggttcttaattttgataccagtttacactgtgtttgagaggaagacaagcacaatgccgccttttcgttttttttcagtgaaaaatcatcagtttccttccatacgggggcccggaaccagcttgatcagatgggtttccggcctcgctccgagccgcagaggaagcttcgacgttccatagccgttgctgatcaagtacggagccttgaaaacagtgccggttcctccgatttcacagagcccgaatctgccgaagcgaatctgtcctccgtgggtatgaccgctcaatatcaggtcaataccgtccgcctcctgtatttgatgatgaatctccggattatgtgacacaaggacagtcggaaaacccggctgcacgccgccgagagctgccgggtaatcatccaattcgagtctgatgtcatccactccgcaaatattgacagtttgtccttgatggtcatgcaataccgaagcattgcgcaaaggcgttacaccgtatgtcttgaatatttccagcagcctttcctgatcaacttcataatcgttatttccccatacaaaatacgtttttcccaaacttgaaagccttttgatattttcttcaattctcgtataagggacgccgccctctgctaagtcgccgccgatgatgacgagctgaaccccgcgttctttcacttcacaaataatgtcttcgctgactgtccgcctatgaatatctgaaataaaaaagacattcaattcctttttcaggcgcccgagtgaaaattcagccttcaacacccggttttcgcgcgcgatggctgacattttccacactaaagcagcaaggccgatgaaagcggccgaagccagactgagccaatagatcatgtgcattctccaatctgttttgtttatgataagacggcttgatgcaaaaagacgtttcttttaacaagaaaacgtcttttatttgctttcgaaataaagattaatgtcatactgctgtttcatgatcttaaaaaccgtttcccttgatttccactcttcaggctggggccatagatccgtgcttttctgaataatctcgcatctcagcttatgatattccccttctgctttttcttccttctttttaaaatagtaagcggtgctgtatgcaaaagcggccgacaagatccacagcagatagacggagtcattcagcaagccggaaaggaagccgttttgcccaatcccctttgacgctgcaaacacacaaaacgaaaccgcgcatatcgccgccaccgcctgccacctgaatgtctgtctggcatagttttcgtactttttcttccttttaattaaggcgcggagcatttgtttcgtcggttcgtccgtaaaacggtccagctcttcaagctcgcttcccacagtcctcacaccttgtcctatttgttagtacaatgtatatgtattcgcgggcaaaatcatgccactgttaataaatcgggatattcaggacctggccggcgtagacattgttgcctgataattgattgtagttgcggattttttcctctcctgaccggttcttataatatttcatcgaaatccggaaaagcgtctctttttcgccaaccgtgtgcttcagcacctttttgggctgcggtgcttgctgaactggcggcgtttgaggcgcgtttgccgttttcttctcttgttccgcaggctgcttcgatgcggcgggcttctttgcagcgacaggctgctcatctgctttttttgcctctttaggccgctctttttgcttttgctcgtctttttttgacggttcatcctctttattttccggctgtttgctctctttcagcttttcttcttgaagggcggcggctgtatgctgcgaagccgccttttgatccgcttcttgttcaccgttttgattttcattcgtcattcccgtttcacctttgttttcataaaacacattatcatattgatcagggtcggtatcgcctccttgattcagcatgtacatgaacaccacgaagacgatgatcggaatgaaaacaaacatgactgcaagagacgtgaatagtggatttctgtctttattcttttttttgctggacttcttttttttatgataagtccgtctggaaggaatctcctcatcaagtgtctccagttcaacagccgcggccgcctcccggttcatttcagcgctggccttctcctgttccctcttcttcctctctattcttgacatctccgtcatgtgaactcctccttacgtgttgaaaacgaatctggcacgcaaatacaacatcgatcaaaaaatgtgccgtgacaggaacaaataaattccctgtccgttcaaagctcaatccgagcaaaaagctgatggacaccaccattacaaacagcagccatttttttaaataacgaaaatgcaatatcgcgaaaataatgctcgccgcccagagaccgaaatgcgtctggataacgcccctgaacaatatttcctctgcaaatgcaatgaaaagggtaagaatcacgatatgcggatacgagcgttcacgaaagagcttttcatttatcccttcatcgtcatacatatgcttgggagcccatttcatcaccatcaggtcggcgatgatcacgagagccgcgagcggcgccccgtacttcaggatgctcaagtccgatggattccaaagcgatagaaaagcgtctgcatcatcaaataaaaagatgcccatcaataatgcggtaaaaagcatcagcgtctgggaaaaatagagctgtttcagcatttccccgtctgacaggcgacgtatgatttccgactgttttttcagcatacacgatcacagctggcggcaaatatggtatccaattcttcttcccacgctgtcaatttgttcatagacggacggtctcctttgacttcgtatgcttcaagacttaaaccgcaggatgtgcagcacgctgtttcatccgttttcggcggctttttttgttcattaaaataagcgagcaagctttccctgaaacacccttctgtttcggtgacggcggcgaatcccgccgcttttttcaatttgagctgcctgcggctgtccatctccctctgaatgaccgcccggccatcgccgcccagatgatgcaccttctcataaagatggagaaaatggcgggcttgcgtttccgataaaccggccagctgcagagcttcccgccggcagcgttcatctttcactcctgcaagcttttcgtataaaaagccgatatcgctttgggagagggcttccatttgaatcagctgctcctggatttcctcgtctcccggagccttcagcaaaatgctgacgctccgctttccatccctgccggcacgtccgatttcctgcagatacgcctcaatcgtctgcgggaggctaaagtggatcacatatctgatatccggcttgtccactcccataccgaaggcgtttgtacagcagaccacatcaagctgattgcggataaactgctgctggatcagcatcctgtcgcttgcctccatcccgccatgataaaatcccgttctcaagtttgcttctttacggagcttgtcagccagttcttcagcccattttctcgtcgggcaataaacaaggccaggaccttgcagcttttgaaccagccctgtcagccgctccgtcttctcagcagtatccctcagcttttcaatatgaagcgcaatgttcggacggtcgaccgaatgaatcaaataattggcggctttaagccccaggatttccgaaatgtcctttaatgtcgcttcggttgccgttgctgtaagcgccagagtgacgggatgaccgaggagcgccttgatgtctccaagcttcgaataatcaggcctgaaatcatgcccccattgtgagatgcagtgggcttcatcaacgacaaaaaggctgacattgagcaattgaagctttttcagcatttggccggactgaagcgcttctggtgaaatgtacagatatttgaggcggtgaagccggtttaatacgtcatttttttcttggtgtgtcaaagcgctgttcaaggcggcagctctcttctctccgcgcatcttcaattgctgcacctggtcttccattaaagacaaaagcggcgagacgatcaggacggtgccgtctaacaaaagccctgggagctgatagcacagcgatttcccgcctcctgtcggaagcatcgccaccgtgtcccgtccctccagcacgcttttgatgatcgtttcctggccttttttaaaagcatgataaccaaaatacctgcggagcgcctgatgaagtttatccattcctgatcaccgttttcgacagggccaggcggattttaaaataactgtatcggccgccgagtccctctttaatttgtctgattttattggtttggttcgctatcgcataatcggcaataattttctgttcctctttcgacacgtactgatcgatggaaaaagacggatcatgaatggcgatttccacaatgtgatcctcgatcgtcgccaatttcagctttctaatttttgcgatccggtctattgtatacccttcttttataagaaagagcgtttttctcgtcgattgtgtcagaccatcattcaaaggaatgtcatgaatgagcgtttgaaaaagcggactttcaccattttgggcggattgaataaaatggtgcagaacatcccaaaacagtgcatatatgtaccactcatcaaggttcattttttcggaaagctgtctgaatgtatagcccgcttttgttctggatgtcagggagtgaacaaaaatagcggcctgttcatcatgatttaaaacagacagcttctctttcagctcttggtgaaactgggccgctgtttcagcagcattccggtttcttaaatactgtttaacccagttctgaatctgataatcttttacgatcggcaaatacacgcgttcgcggtaaagcttgttggagagcacttggatcaaaagcgacatccttgcccacatcactttggctgccgcctgataatagccgccgtgaaaatggcggggccacggataaagggcaaaaaagccggcaagttccgcttctcctttttcggtgacggtgtaagcgccgctttccgctttttctctgaccaaagactcctgcttcaatcgttgaacgctggctgccacctgctctctcgacagagccgaacaaaagccgaagtattttgaaacggcaaataaaccggcgtcctgtatcgtctgtgacgacctttttccttttaataaatgatagaccgcgcttggagaacgctcacccttcatggatgacagaatgtcaagcacaatcgcgtcaaaaaaatgaaccggcatatcttcacctgcaatcttccggcaacattcgatcatttcttccttttattttaacagattttgcggagaaatcgacgtttaaactcatataaaaggggtatgttagcagtagaacccttgtgtgataagcattctcaatatttttgagttgaaatgtaagattaacaccattacaataaggaatgggaataggtttcatatcggatagatagagggttaaaccgtttgttccaacgaagaacaatctgggaggttttttattcatgccaaaatatacaattgtagacaaagatacgtgcatcgcatgcggagcttgtggtgctgcggctcctgatatttatgattacgacgatgagggaatcgcatttgtcacccttgacgacaatcagggtgtcgtcgaagtccctgacgtcttagaagaagacatgatggacgcgtttgaaggctgtcctacagattcgatcaaagttgcggatgagccgttcgaaggcgacccgcttaaacacgaataaagccaaaaaacatccggtgcacaaagtgccggatgtttttttatgagataagcacggctttaccaacaagcaaaaagaagccggctaaagacatccggcttcttctgcagctgacaatatccgggaacatgcacccgatattgtcatgtttatttatttggccatgcggacgttttccttcagccgcggtttcagcgaaaggaaaatcggcgtggacacgagggccacagcgatgcctttaatgaaattaaaaggcaggattccggccagaactgttgttttgagcgcctctccattcagcgctggagcatttaaaaaccaagtgtaggcaggcagaaacagcagataatttaaaatgctcatcgaaacggccatcacaagcgtccctgcgaaaagagctgtgacaaaccctttggcagaacttgattttttcagcagtacagctgccggcaggataaacaatgttccggcaatgaagttagccgcctgatcaatcggaacgcccgaggcgcttcctgcaataaagtaattcagcacgtttttgatcgcttcaacggcaatcccggctcccggaccgtacaaaataacagcgagcaatgccgggatatcactgaaatcgatttttaaatacgggaatgcccccaggatcggaaagctcagcatcattaaaataaatgcgatgctgctcagcatgctgatagagacgagacgtctcaccttgttgtgtttcattttgtcactctctccttttcgatcacatctcacgaaaagaggaatggttctttcccctgtcctaaacaaaaaacccgctttattgaaaaagcggggctgttttacagacaggtcaaataaacgtttgaaaatgttcatttcaaaacgcgcggaacctccatcttctcccatccagactatactgtcggcttcggaatcgcaccgaatcctgcccataaaaaggctcgcgggcttagagcgcttgctcatcaccgccggtagggaatttcaccctgccccgaagattgatcttatttatttttaatactgatattattataaattaattgtgaaaaaatgtacaggtgcaaagcttattgcgctgttttgggacatcctgcacgatatttcggtaaactcactttttccgcatactaaaaaccgcacattcacagttatttcatttttaattttcgtctttccgcgtgaaactcattgacactctttatggaatatggtaaattatcagatatttatgacgcttatttaggaggaaatcttacatgtttcgagtattggtctcagataaaatgtccagcgacggcctcaaaccattaatggaagcagattttattgaaattgtagaaaagaatgttgcggaagcggaagacgagcttcatacgtttgacgcgctcttggtgcggagcgccacgaaggtaaccgaagagctgtttaaaaagatgacttcgctgaaaatcgtcgccagagcaggtgtcggcgtcgacaatatcgatattgacgaggcgacaaaacacggtgttatcgtcgtaaacgcgccaaacgggaatacaatttcaaccgctgaacatacctttgcaatgttttcagcgttaatgagacatattccgcaggcaaacatctccgtgaaatcaagggagtggaatcgttcggcttacgtcggttcagagctttacggaaaaacgctcggcatcatcggaatgggccgcatcggaagcgaaatcgcgagccgcgcaaaagcattcggtatgaccgttcatgtatttgacccgttcctgacccaagaaagggcaagcaagctcggcgttaacgcgaacagctttgaagaagttctggcatgcgccgacatcattacggttcataccccgctcacgaaagaaacgaagggacttttgaacaaagaaaccatcgcaaaaacgaaaaaaggcgttcgtctcgttaactgtgcaagaggcggcatcatcgatgaagcagcgcttttggaagctctggaaagcggacatgtcgctggcgctgccttggatgtattcgaagtcgagcctccggtcgattcaaaactgatcgatcatccgcttgtagtcgcgactcctcacttgggcgcctcaacaaaagaagcccagctgaatgtcgctgcacaagtgtccgaagaagtccttcagtatgcgcaaggaaaccctgtgatgtccgcgatcaaccttccggccatgacaaaggattcattcgaaaaaatccagccttatcatcagtttgccaatacgatcggaaaccttgtgtctcagtgcatgaatgagcctgttcaagatgtagccatccaatatgaaggctccatcgccaaacttgaaacgtcatttattacgaaaagccttttggccggatttctgaagccgagggtcgcggctaccgttaacgaagtgaatgccggcaccgttgcgaaagagcgcggcatcagcttcagcgaaaaaatttcttccaatgagtcaggctatgaaaactgcatctctgtgactgtcacgggagatgtaacaacattctctttaagagcgacgtacattccgcacttcggcggacgcatcgttgccttaaacggctttgatattgatttttatccggctggacaccttgtctacattcaccaccaggataaaccaggggctatcggccatgtcggacgaattttaggagaccatgacatcaatatcgccactatgcaggtaggccgaaaagaaaaaggcggagaagcgatcatgatgctttcctttgaccgccaccttgaggacgatattttagctgagctgaaaaacatcccggatatcgtgtctgttaaagccatcgaccttccttaaacagaagctgcggaacctgaaaagaattcctttcaggttccgttttttttaggaattctccctgatctcaagcatctggcggggataaatccgctctcctttcaaatcgttccattctttgaggcgctgtacagttacgcccattttttcggcgatatgatgaagcgtatcccctttccgcactacatatgtaccggtcttcgattcatcgtcatgaaggcggagtgtttggccggccttgagatttgaatgtttcaacccgtttattctcatgatctcctcgatggatataccgctatccttgctgattctccagagcgtgtcccctttttgaacggtcaccgcaccgctcattgtcccggcgttttgatgaacgtggatagaattttgccggaacgcctcctcacgaagcaccgtcagcggattgattgcatatcttttatcttcagtccatgaaccgtgatgcatttcaaaatgcaggtgggttccggtcgatattcccgtattgccgatgattccgatttgctcgccttttttcacccgctccttttcctttttcaggcgtttgcttaagtgggcataaacggtttcatatccgttgtcatgtttaataaatatcacttggccgtaggagtcggattgatacgatttgcttatcgttccgtctgcggctgccgctactgcttccccttcgggagcagcgatgtcaagccccttatgctttccgcctctcgtaccgaattgatctgtgatctctcctttaatcggttcaatccactctgaggcttccgcccccgggccattgacgaaaagcgccaatcccgaaagccatgcgatcgcgaacaggaagttttgatgtctgagtttcttcaaggttttccatatcctcctattacatgcatcttcggtaaaattgccctctattcggagacagcttagtatacttccaaatcaatacaatttatacattaaaaaaagactccgcacagggagtcttttagttttctatcgtcatcggattcggtgcgtacggaacctgtacagatttcgacaggtcataggcgccgaccttggttatggatgcgtttttaaatttcacttttgtgaagccgaaatctttcgcggtcaatagaaggccttccaccatcaagacatcttcgggtttattttcaatattcgcggaggaagaaaattgaatgatcagttcttttccattcttttgaatatcttcaatcggcgtatcatcggataaaatgggttttaaatgagtgccgctttcttcgtttttcatcatcttaatcgcttcctgcaccgattcgtaagattcgcttgaaggtgcaaggaaccggcgcccgtctgagctttcatataaatagtagcatttttgcgtctggtgcataatcgccatatcggcgagcattccgaatgtttcaaattcaacacccgatttatcattggaaataaacagaacagaatcatacgatccccatttaaaggtttcgttgatcacatttttcagccgttcgaaatcttcgactgatagctccggtattttctcatcaacttgaatcttcagttttttattgtttttctgctctttgaacttcaccttatcaaggtaagctgtgtcaaatgatgtaaactggtccactccaagccggctgtatgcgtgaagcgcatcttcaagatttgtcatgccagtgcttttctcgaggcttaccgggacaacgacagacttggactcgtcaaggaaagcgaaggtgatatagtcgtctttttgattctgtgagacgacaaacgtatttgcaggttcagacttggcagcatcagcctccgtctgcaccaattttccgtcagaagaaatgttggcgtcggcgctgttttgagatctgatctgttcgattaactggggagtgatcagcatcagaagaaagagaaccaaaactgtagcagcaaatgcgccgacccgttttttcggtgatttacgctttggtgcgagaatcagcttttgatagatctgatttgccgaacgattatccttaaccgttggaagttggcttagtaacgccttcagccgttcttcgttccattctgacttcttcattctttggatcctccttcaaaagctccatctgtttacgaagcactttcagaccgcggtgctgagtggtttttaccttgctttcggaaaaattcaaggcttttgctgtttcactgatcgaatatccttgaataaaacgcaagacgataactgatctttggtcaagcgtacacttgtctagggcctcgaaaatttcctttaggttttcattttgcatcacgatgtcctcaggcagaggcttgcggtcttttacatcttgtttctcccagtcaaacgtccccaaaatccgctggcggatcgtctgctgctttctgaaccagtcgatcgcaacgtgccgcgcaatcgaaagaagccaggttttttcgctgctcctgccttcaaatgtttcgtaagaatgcaggacgcggatgtatacttcctgaactaagtcttccgcctgatttttgtcttttaccatataaaataaaaactgaaataaatcctgatgatactgatcatatattttctgaaaggtttcttccacctgaaacccctccgttcaatttattgtcgtttgtcaatcttaaaaggttacattacaactattacaactatattacgaacatatgaaaatggaaagggggttttgagaaagttaagcttaattttaacttaacaagcacaaaagcacccgttctaaatgaacaggtgccaaggttataggagcccacattttcactaagctgtgcccttacaaggctttcgttctcctgaccggagcgttgcggatccgctgaaatgaactgatttcaatccgtttatgactttaagtccaattgttggcgaagctttttggaaatctccattctcttttcgtcagtcactaggtgataccataagctgtcaacttttttgtcttcaccttcaatttctacctgcttaatatctttagcagcttctttataagaactttgaatatcgatcatcttgtccagtgttaagtttgttttgatgtttttttctaatgctgccaaaatctcctgatagtttgttaatgattttaattgtgcaccttcatgaataatttcgttgataatctcacgctgacgctcttgacgcccaaaatcaccgcggggatcgtcttttctcatccgggcatatgtcaatgctgttttgccgtcaagatgctgcttcccttttgacagatgcacgccttcaagggtgaaatcaatccgattatccaccgttacgccgccaatcgcatctactatatctttaaacccatccatattgattttgatataataattgattggaatgttcaaaaattgttctacagtttcaacggttccttcaattccgccatacgtataagccgaattcattttcgaaaatttattttttgatttgataaacacccttgtatcacgcggaatactggtcattgtcgttttctttgtcttcgggttaacagtcattacaatcatagaatccgggcgtcctttatcaccggggcgctcatctatccccaataaaagaatggatataggatcgtgcggagcagtatccttctgctcggcatcccgatgaagaggttcgtacattccatttattgatttggcgactgtacggtaaatccagtatgacaccacactgccgatcgttatcactagcgcgaggacaaacaatatcacatttttcatctttagttttccttttctcatttttaccatagtatcccttccttgttgatgcatctcatattttttaattccatctgaaatgaaccggttttatcgaatcatgaatgggcttcatttcatatccgttttcttggaagtatttcaatagtttctctaaatgggccgcagttgtcggtttttcatgcatcaatacaactagcggctcaacaccggaaaggttattgacttgctgaatcacattattcacgaattgaccgtttgtatttgcagatttccagtcctctgaatcaacagtccagtcccaaaggttaaaatggtcgcgcttaatgacttcttgaaatggaccggtgatatagggctttgatccgtaaggcgatctgatcaaatgtgtgtcaacgttggtcgtttctttgatggctttaagcgtatcattcatttctgccgcgaagctttcaggagatttatagattttcgatacttgatgcgtcactccgtgagagccgacagaatggccgttttcaaccattttcttcacaatatcgggattttgttcaatattcggttttaacatgaaaaatgtagctttcgcatgatacttatcgagcaaacttaagattttatctgaagccgcaggattcggaccgtcatcaaatgacaaatagacgacctttccgatttccggcgctgtttgcttactttcttttttctctgctttatgtttgcctcccggcaccgatgctgaagccgcggaattttcttttatcggttcctgctttgggccggcaagcgcattccaagaaatgcataacaaagtcacaccgaatacaatcaacatacctagcactaattttcctagtgcgctcaatttatgatcttcttttggtgaatttgacactttttccaactccttagactttaattaacaatcactaggtttcttttaaactcgtcactcacaagtgacaattttttaagctgctatttttgaagacaaagttctataagaaggatgctctttaaatataagaggaagatatcgcagaagttcgaccaacttgtaaacaaaatgtcacaaaaagaagaaaaacatcattttttgaggaatgataatcaggctaattaccctgcaaaaaaagtgaaagaagtctttacaaaagaaaaaccttatttcggttaaatgccgaaataaggtttttttgcctgatattaaagtggagaacgaacaattatttaaatgtgatgatataagcttgctcttctaaaaatcgcacggatgcactctccatggcagggtactggtattgagcgttaacaagcaggctgttgccgtccggactccaaaatatttccgaagggatggtgccgtggtatatcggttcttcatagaggatatttttcccctgaagcttacctgcatagatattgtcttcatcctttaaagagtaagcgattttcttaaagtcgtttgagaatttaaaaacagttactttatcgagcagagcagaaagctctccgtttctgcgatcatattcgcacagggtttccccggtgtccaggaatacaaattgatcattgtttaaccaaacaggcccgccgcggctgtccagacgcttgtcctcgattttaatgcggctgccgtcaatggttcccattctgatcccgtactcgtcggaacgctgcaacacggtaaacagcaaatctcgtccattatcggagatgttaactccggtaagcgaatccttctccgcaaaatcattcaatgaatacgttttaagcgttccggaagccgtatcataaacacgaaggccggtctcatccccctgcccgacatctaaaacaagatagcaaacgtatctgctattatttgaccatgaaacatcttggacatagacctcattgctggcggaggtgctggcgatttctgtttttttcccgctcgccggcgaaaacagctgcattgatgccttacttaatgacaaagtgactccggcgatacgctttccgtctggagacatttttaggttggacgtgttgctttcaatgccttttacgatttcagctttttcatagggggaggaaaggcgctgaagactgtgcgctgtacgttcggatgtcccttctcccttgaaaaaaccgacaacggaatccggtgaagaccacccgagcagctgcccgacttttggaagacgatagatcgtattgacttgaaaagggcgggtcttctggtcatagatatgattttcttccccgcttgggataataatcgtttccgatctttttccgacattataactggacacgataatgatcagaaacagcagcactcctgcccatataataaacggtttgtttttcatcatttctcaacctttgcgtaagctaattcaacttgaatcactgtgtggttttctttgtagaacatctcgattgttcctccgtgttcgtcaacaattgttttcacaatgcttaatcccaaacctacacttccttcttccttaatcttctgattgactgaataaaaaggttggaacattttggtgtgttggtcattttccaatggatcgcttggattcttgaatgtaaaaagaatgttttctccaacgatttcggccttaatgatgatttccgaatgagataagctgtatttgatggcgttgtccagcagattgataaaaagctggcgcagcctgctcacctcaccaagaacgtacaggccatcttcaatgtcacaggtgatccttttcttataccgttctgcccgaaatttcatcgactcgcaaacatcttttaaaatttcgcctgcgtcgatcctgtcaaattgagcactcttggacgtttcccgggatacttcaagaagcttgatcaccaaattatgcaggcgccggctttcttcgacaatgtggttcattcctttatcaaaaaatttccggtccgcttcccctttatcttttatgatctcagcatatccttggatggaagtcagaggtgttttcagctcatgcgtcatattatcaaaaaaccgtttttcttgttcgttaagttcttttagacggtcgcgatccctttcgatggttaaaatttgttcccgaatcctgctgatcatatcgttaaagttgacggcaagctggccaatctcatcttttctattaaagtggatatccatatccagcttacccttcttgacttgtgaggtggcatctgtcagcttgacgagcggaatcgtgatatgtctggacaggatataggagaaaaggaacgccgccacaaatattgcaagcgcgatataaaaaacaatatccagaatctctccgctctgcttatacagcaggtcgaaatttttcgaaaagcgtaatatgcctacttttgtgccttcaatgacaaccggatatgagaaaaacacttttgctttattccggttataggtgatatgataggcagtctttcctttgatcgcctgttgaagatcttcatcactccctctggaaaacaccttctgatcagaagaagacaacaatgcgccatctactgtataaacaccgacattgcttcctgtggagtgatttaaattatctaccatttcatcggccatatcaccgaaataaagttcattgtttttatagtgattgattaaaaatgcttggtttacatagacggtactgttttttttcagttcgactaaatccgatgttacaattttttcgttactcgaccaaatgacgttcttaaccgtgtgattgagcacaaggaaagagagagaaaaaatcagaaaaaagccaacaataaacttgcccttgatggtccgtaacactctctactcctcctgcttctcgaatttatatccgatgccgaacactgttttaatcaagtcgcttgcatcaagctttttgcggagtctttgaatatgggtatcgactgtacgggtgtcaccgaaaaaatcgtatccccagatgaattccaaaagctctgaacgggtaaaaacttttccccgatggtcaaccaaagtcattagcagatcatattctttaggagttaattcgacggctgccccgtcttttttcaccagtctttcgcccggaacgatcacaatatttttaaaccggatctcatccactttttccgtttcccgttcgttcacatgatgggcttgttccagacgccgaaggatcgtgcgtattctcgcgacaacttcgcgcagatcaaacggctttgtaatatagtcatcggccccgaattccaaccccagtattttatccgtgatatctgattttgcggtaatcatcagtattggaatattacagctttcggtcacttttttgcaaatatccaatccgctgcagtccggcagcatccaatcgaggagcagaaggtcaggtttgaactgatctagtttcctcattcctgaagaaccgttattgaccgtgcacgtttcaaagccttcggacgtcagcccgtatgaaagcaaatcagcaattgcctcatcatcttcaataatcagtatttttgttttttccatcagtcatcactcattccctgtttcatgcttattttatctaaaaaatctcttttgtttctcgcatccttctatagagattatacataaatccaaaccaaagtcttcatttgacagcccttcagtcatcccactcttattgggaatggctggcggactttagtgtgtgcagtaaaaagcgaaccgccttgtatagattaccagaacgggagcggccatttccatatgcggttttcactatgataaagtttgcggttgtcctaaattcttctttcatctcctcttagacgctcatctgtcttcctgaaattctcactcttttatcggctacaaaggcataaacgtttcaggatatacagaaattttacaaattggatacattttgccctcaaataactgagcacctgttctgtatgaacaggtgctctttgtttcgtatggaacaagattcttcgtcaaatttggccatcatcctgcttatttcttggaatgtagaacgtgaaggaagtaccttcgttcagcatgctgtggacggtgatcgatccgttgtgtgcatcgacgatgtttttgacgatcgcaagcccgaggccagtcccgccttttcctctcgtccttgctttatcggccttataaaagcgttcaaaaataaacggcagatcctcttcgggaatcccgctgccggagtctttcacggcaatcttcagcccgctttcagcagactgcacatcgacatgaacggtgcccccggcatttgtatggcggatcgcgttgtcaatcaggttggttaaaacctgctccattttgtccggatcaaacacaaattttgcttcatgcagatcaagattgtgagaaagcgtaatatttttgtccccggccactccgtaaaactttctgaacactctctcaaaaaactcgcggagctccaccggttcaacgtttaaggaaatatgccccgcctccattctggcaaggtccagcaaatcattcacaagccttcccattcttaaagactcgtcatagatgacctgggcgatttcctttttttcttcctcagagcttgcgatgtcgtcaacgatcgcttcactgtacccttgaagcatcgaaatcggtgttctcagctcatggctgacattggcgataaaatcttttctcagcttatcaagccgtctttcctccgtcatatccctcaacacggcaaccgctccgcgtacatgggactgattgtacagcggactcatgagcagcacccatgttctgccttgcagggtcatttcaatcatctgctctttctccgtgctgacggtgttttgaaaaagctctcgcgcttcgggaggcagttcatggccttcttttacattcatgttctgctcataataccaagcctgtaaaaagcgttcagccggagggtttgtcacaaggattgtcccgtcgatattaatggtgatcacgccgtcggccatactgcttaagatattcgacaaatgctccttttcctgattgagtgccgtaatgtgaaacttcagctggcgccccatttggttaaaggcaatcgccagctcgccgatttcatcctgggtcagaatcggaatcttcgtatcaaacttccctttcgccaagtcctgggcaccctgccgcatttttctgagcgggtaggtaatccggcttgagaggaagaaagcgaaaatcgtcgttaacacaatcgcaatcgcagcggcaaagaggatatacctcgtcgtatgctgtgtcgtatccttgacggcaagaagcgattgagaaagaaacaccatgccttcatcttcgcctttcccgtagggtacgccgacaatcagctgatcgttcttttgattggagataaccgtcctcttctgcactttttgatgcttgcgaagcgcttcgttcagatctggatcgtttttaatatcttttaatgtgatggaagccactttttgatgttcccgcggtgaataccaatattcattctcatttttgatgacggcgatgctcgtcagttcatcggcaagctcccatgtaatcgatctggctgtctcctggtctttttggttttccatgatgacggccaccttgctggcgagctttgtcaaatcagcttccgcttcatctacatggtagttttcaataaactcgagcagaaagaacgtaaggataaataagacaaatgaaaccaaaagcagtatggtaaaccacagtttaccgactacgctcttccaaaacttcattcgtttccgacctcaaatttatacccgacgccccatactgttacgatttttttcgcagctttcggcgagactttgttcaatttttcacgtaaacgtttaacatgggtatcgaccgttctcaagtcgccgaaaaactcgtattgccatacttccttcagcagcttttcacgatcgtatactttatcaggggttttggccagaaagtaaagcagttcgtattctttcggcgtcaggctgacttccgttccgtccgccatgactctgtgagcatcgtgatcaatggataagtgagaaaaaacaagcacattttttgccgttgtatccgtattcaggtaagaggtttgcgatgatcttcttaggagcgccttgactctcagcaccacttccctcggactgaaaggtttcacaatgtagtcatcggttccgacttcaaagccctgcacccggttcgcttcttcgcctttcgccgtcagcatgatgatcggagtggcttttttatcgcgtacttggcggcatacttcaatgccgtcggttcccggcatcatcaaatcgagcaggattaaatcgtaatcgttgccgagggctttgtcgatggcttcatcgccattctcggcttcttcgatcttgtagttttccctttcaaggtacatttttaaaagtcgtctgattcttgcctcatcatctactactaatatttttgtctctttcgtctgttccatcgtaaacctcctgatttgaatcttcttacattcattttattagaaaagcgattgtaagccaagccaagaatgcctttcctcaatttaaaacaaaaagctgcggaaggcccggtgaaaagcccggaccttcctgcaccgcacggatcatgcataagagtgaagcccggcgatgacaaggtttacaaaaataagattaaacataataatggcaaaaccgatgacggcgagccacgccgatttttcgccgtgccagcctctcgaaagcctgagatgcagataagctgcataaaacaaaaatgtaatcagcgcccagacttctttcggatcccagccccagaatctgctccacgccagctgtgcccatatcatcgcgaaaataagcgcgccaagcgtaaaaaccggaaagccgatcgaaacggagcgatagccgatttcatcgacaaggtcaaggttcacatttttcacgagcggctgaagaagctgactgatgcgttttctgatgatcagcctgatgacaccgtaaagcaaggcgccggttccaaacgaccagagaacggtattcagcttccggcctgaaaaaatgggcggcacattgacaagcggctccattctctcctccgttaaaagttctcctttattcgggccgataagagcgggaagctcgtaaatcatgacgtcttcctggttgtctttatcaatccacttaaactgcgcctcatagcccccaatgcggaatgaggtcgtcacaaggataaacgcgagcgttgtcacaagcataaacatgacacattcgagccagaacgtttttttgcccggctttgaatgatccacatgcttgagcagaaagatcacgccggcgacaaagctgatggcgagaatcgcctgcccgagggctgcagtcgtgacatgaatatacagccagttgctttgaagcgacggaatcagcggtgtgatatcggtcggaaacatgctggcatatgcgatcaaaagcaggacaacgggaagcgtaaacagtcccaatgcggacagcttgtaaataaagtagatgatgatgaacgccaggacgagcatcatgctgaaagcagttgtaaattcaaagagattgctgaccggcgcgtgtccggaaacgatccatctcgcaataaaatatccaaactggcatacaaatccgatgatcgtgatcaacactgcgatcgatgcccagcggttcttcttcttccggtctgaagccttgctcctgatggagccgccaaaaaagaagaccgctgagagatacaagagaaatgccgcgtacaataaattgccgcttaactctgccatgaaaacccctccctatgctggccgtttattttttttcctttgacagttctttttgatcggccggttcggatatccccgtatccgcgagcgcggccttcaagtcctgcttcagcccgtaccagtttttgttcgtatgtccggcgacgagcacatgcccgtccagcgttctgagccagatccttctatggtgccagtacatcccctgaatgacgccgatcataaagatggcaccgccgaccatgagcacccacaaagtcaaatcttttctaattgtgaggcctgagagattcttcgtttcgacatggtcaaacttcattttgtatttattgtcgtcagaaccttcgattgtttcctgaatcgccacgaaacttttttctcctttaggcttatccggtgcggtgatctggaatacaaatgccggattgttcggattcctcgttttcgtgctcggttccccgtctttgttaaaataaaagtccggcaggtagcttgctatatgaactttgtaaccgttaccaagatcatattccggtttcggctccaagaggtcgattgccactttgccgaaggatttcccgctgtctttttcaatcagctgaaacaccattttgtcgagctcgccttccttgtatgtcagctgatagagtgcatatgaaccgaatttcaacgggtcattgaccttgatcttgccgtttttcactttcttcaattcaggcgcttcgcccggcaggctgtcattttttctttcatacagttcaacatcggtttgatatgtttttgcgacagtcccgtcaccagctttggtgatcgcctctgaaaatacttctttttctttttcactgtcgtacatttcttttataaaccggttgtttttcaaatagtaatggccgtcagttcccggaattggcaccgtttccccttccctgatccaaagggtttcgtcgacatacatgcccgggacaaatctgagcatgaccccgatgaggaatataatcagtccgatatggttaacatatgggccccaccttgaaaaacggcctttttcggcaaataggttgccgttttcttccttgacgcggtatcgttttttcttcagcttaccgatgatttgcgattttgtgtcctcagacatgtccgcttccgtccggctgaataggcgctgcctctccataaagttcggatttcgcgtgacgccctggtttttcagagccctgtacaaaggaacgacccggtcaaggctgcagatgacaagcgaaatgccgattgaggcaaccagaataataaaccaccatgaaccgtagagattgtgaaaaccgagagcataatagatttgtccgagaagcccgtattgttcgctgtagtatgtatcagcctgcgcacccggcggcaggaacatttcctgcggaaatatcgttccaaaagcggatgctgtcagcgtaatgacgatcagccagacgccgacctttacagacgaaaagaaattccatattttatctacgatcgttttattataggtttgagagcgtctcgcacttccgtcataccgcatgtcaaggagtttggcatcctgtttgaccagcggctttccgcacgattcacacaaaacggtacccgccggattcacatggccgcattcgcatttgatttctttcatcatgacgatccctctggtttgatcatattcatataatcgtggatcatccgttctgtcatctcgcccgtcacgaccttgacaatctctccgtcagggttgatcaaaaacgtggtcggcagcggtgtgacatcatatgcgttaaggacctgcctgtctttatcaagcacaaccggaaaattgacgccgtggtctttcataaagtttcggacggcgaggttcgattcgccgacattgacggcgacgatttccacccctttatccttaaacaccttgtattgattcgccatataaggaaattctcttttgcatggttcgcaccatgttccccaaaagtttaaaaatacccctttgccttttagttcgtccagtttgagacggttgccgtcaacatcctccagcgaaaaattgggagctttttcccccaccgccacactctccgtgttttgaaacacggcgctgtacagcgtgtagccaagcgctgcaagcagcacaaggaggatgcctgtccgaatgtaaaaacgcttttttttctataatccgccccctcatgtagacattcagtatcattatatcatctcaagactgactgccatttgccttttttgaaggttgtgtgaaaatttagaaagccgctttaccgtgttctgccaatgccctgagccttttgacttcatgaggcgtaagctctcttttttcccctgttttcaagcccgccaggttcaaaaaagcatactcttcccttttcagcttgagcacctcgtgtccgatggcttcaaacattctcctgacctggcggtttcgcccctcatggatcgtgatttggacgatgcttgtctgctttttcttatcaagcgacaaaagcttcacttttgcaggagctgtctttccatcctcaaggcgcacgccccgctcaagtttttttaaattctcctttaaaggaatgcctttcagctttgctacatacgttttattaatttcgtatttcgggtgcatcaatttattggcgaagtccccgtcattcgttagcaataagaggccgctcgtatcataatcaagccttccgatcggataaatccgctcctccacctcggtgaaaaagtcggtcacaactttccggcctttgtcgtctttaactgctgatataacccctctcggtttatacaggagaaaataaacgggttcttcgctttcaagctggatgccgtttacctcaatccgatcggagcttgatactttaacgccaagctctctgacggttttgccgttgaccgtgactctcccttcttttataagctcctccgccttccgcctcgatgcgataccggcgtgggcgattactttttgaagtcgttccatatctttcacctcatgtattatcttacttttttccagaccaacaaacaagtttgcgaggcgccttcttccttaggaaagtagcactccgcccttaaatgtatcctttctcacctcaaaagtaaaacagttttggctaaaaagcaaaaagcgcctgttgatcaggcgcttccaaacagcaatgttacaataattacagacgcgataacccccgctaaatcagcaagcagtcccacctttaaagcatcccccattttcttgattccgaccgctccgaaatagacggtcaaaacgtacagagtcgtgtctgtcgatccctgcatgacagaggccagccggccgatgaacgaatcgggcccgtaaacggcgatcaaatcggtcgtcatgccgagcgctgccgttcccgaaatcggccggatcagagccagcggaaccacttccgtcggaattcccacggcggaaaacacgggctttaaaagattcataaaaaaatcgagcgcccctgaagcccggaaaaccgtgatcgctacaagcataccgactaaataagggataatggaaaatgcaatttggattccttccttccccccctcaacaaacgcttcataagtcggaacttttttgaatgtaccgtatagcagaatcgtggcgatgataaacgggataagggccagagaaagccagttgatgaattccaaatgctcaccccttcttttttcttctataataaaagtatcggtcgatgaagatcgcaaagatccccgatattaaagtcgccaaaatggtcggaccgacgatgtctgtcggcgcctttgcatcatatgtcatcctgaccgcgatgacggtcgtcggaatcaaggtaatgcttgacgtattgaccgccagaaaggtgatcattgagcggctcgcttccctgcggttccggttgagcgccttcatctgttccatcgctttaataccgagcggtgtcgctgcattgcccaatccgaaaaagttggccattaaattggataaaatatatcccatcgccggatgatccggagggatctcgggaaacagctttgaaatgaacggccggcacagcctgctgaatttttcgagaagcccggactgttcagcgattttcatcagccccagccaaaaaacaaggacgctcatcagtccgatcgcaatcgtgacggcttccttcgatcctttaaatacagcttcattaacttcctgaaccgttccgttgaaaagcgcaaacaccagaccgatcaccgttaagccgacccagattatattgaccatgatgaaccgcccgccgctttttggaatacggattgaaaggtctcgaaaaacgattttttcggttttttgtttcgctcgttttcataatagatcggtacgcttgcaatcgtttttccgtcgaacatgacgttcatttctccgatgatgtccgggatttcttttttgtttttacgccatgattttttcggttcaagaagctcgatatcaaccttcacatcttctttttcctcttcgtttaaaagatatgtgacatcccgtttaataaaagctttatttccgtaaaaagagtcttttaatttcggaatctcgccttttttggcgatgatatatgttttgtagtggccgaatacatagttgaacatgttcatatgatcattccagtcgtcaggggcattgattgtgacggcgatcaaatcggttccgtctttcgatgaagtggagacgagcgtacgctttgcaagctttgtatatcccgtcttcccgcctgtactgtatttgtaaagccctgttaaaagcttgtttttatttctccagatgccttgcatcgtttctgctttatagcgtttcgttccggcgatttttttgtacgtttcatttgtcatcgcatattttgttaaaagcgccatatcataggccgaggaatagtgatcagggtggtcatcaagtccgtgcggattgcggaacagggtgttttccatgccgagctcggccgctttttgattcatcatgtagacaaagccttccaggcttccgcccacatgttcggcaatcgcaacggctgcatcatttcccgatctcagcatcaaaccgtaaacaaggtccttcagcttcaccttttgcccgcttgttaaatagatcgatgatccctctgtcctgaccgctctgtcgctgaccgtgaccgtctcatccaatttgcccgattccacggccaaaatggctgtcataatcttcgtaatgcttgcaatgcgccgtttttcatgctcatcctttgcaaacaaaacccgtccggattgcccgtccatgacaatcgcgctttttgcgctgatatgaagggagggctgtgcttgagcggtttcgtatgaagagcataaaagagagcatatcatgatggctgctgccgcttgttttagaaaaaagcgcattttttctcacgtccttgtggttgtttgtacaagtttatgcgcttgtctttttgttatgaacaccaattggatgatttcccgagaaaaatctaaagcaagataaaaaccccccctttcatgaaagggggagttccggctcacggttcatttaagctatgatctcggctgaaccatcttcattcgatagtcagtcgcatagtattccaattcttctctcatcgattgatatcctgtttcaagcgaagccatcaaattttttaatgaggccggcgctggttcgtgaaagcaaatggcgttttttcccgtgtaggccgctctgctgtcttcgtaccaagtatcttttttcggtgtaaaaaattcttctatgcatcgatgatagacctgatagagcgtcctttcggctgcagcctcctgaaaaggatcctgctgcagcctgattcggcaggccgcaagcccttcttcacagtaaaccgccagttttctcaagttgctgaggacatcgcgataataatctcttctcccgggctcttcggcttcaagggatgaaagcgtcgtttcgtttaaataatcgctcagcgtctgaacggtctgtgctaaaaattcgcctgcctgctcggtttgggctcttgccatagattttcccattggtgtcggcaccctctcctcatcgctttgttacaatcgtattctttcatgaatgaaattaaacataaaaaatacgataatatatattatcatacttcgatccttaaggtgaatctattttaaatcttcgaacgtctggttaaagttttcgaagaacagatcggcttcttcctgaaccccgtcttcttctacattttcgggcagcggcggaagctcttcaagcgtttttaagccgaattgttccagaaatgtttctgttgtaccgtacaagatcgccctgcccggtccatccgcccgtccgacttcgcataacagcgcttttgcgaccaggctctgaagaatccgttcagatttgacccctctgatctcctcaacttccgctctcgtgatcggctgcttataagagacgatggccaaaacctcgagcgcagcctgagaaagcccttttgaaggggcttcgatcagctttttcaaatagacggcgaattcttttttggtcgaaagcatgtacgtatccgcatactcgacaagctcgatgcccctgtcttctttttcataggtttctttgacatcaagcataatatccagcagctcggcttcatcgacctccaaaacggataatagctgtttttttgtcaggccctcgtcgccggcggcatacaaaagcgcttcgacaatggctttccaattcacgatatcaagcgtcatgaatcgcttcactccctgttatgtaaatatctgaaaagttgtgttcctgttcaatgatgatcagctggtttttcatcagctccaaaatcgccaaaaacgtcacaacgagatgctctttctgttcatacgggaacagttccataaaatgcatccttttgcgggacgatttcaaacagtcgacgatttgcgtcattcgctcttctatcggtatttcctgtcttgaaattcttgtttcagacggccggttgatttttttgcggttcagcactttttgaaacgccccgagcatgtcgtaaacggtgacggacagcttttgctcgctgagtttgatttccttggcgtagtcgcttaaatcgctcggcggctttgcgaatgctttttgccgctcttcctcgcgctcctttaaattttgcgcggcacttttgtattttctgtactctattaatttttcaatcaattcttctctcggatcctcttcctcctcgagaaactcttcgtcaaacagctcttcttcctgctttggaagaagcattcggcttttgatgctgagaagggtcgcagccatcaccaaatactcgctggccacgtcgagctcaagttcgcgcatcgtgtgcacatataataaatactgctcggttatcttcgcaacaggtatgtcataaatgtctatttcaaggcggttgattaagtgcagcagcagatccaggggcccttcaaacgcctcgattttcacctgatattccatgttcatttctcaccattttcaaaatcgcttctaagccggctaaaactggctaccctttagtataaattacgcgtctgcatgaagtccaatataatttaagaagctttggcatccgcctatacggtttgagtgtattctgcatagaataccgtgtaaaatcttaaatctgaggagggaacaacatgggaggtaaaggcttcggctacggcggaggatttgctttgattgtcgttctgtttattttgttgattattgttggagcggcatggatctattaacataaaagatgagaagcgtccgttaccgggcgcttttttcacagcctggatatatcagccgtttttcctccgttccgttcttatgatacactttaacggaaacttaaaggaggatgtcagatgtatccccaagcttatatcgattacctcgccgaattccacggggcaagggattattttgagtgccacgaaattctagaagaccattggaaaaaggaccctcccggcgagcggaaattacactgggtcgggttgattcagctggctgtcgcgctctatcatcagcggagaaacaattttgccggcgcggagagattaatggcgaacagcattcgcatcctggcgtccgaaaaagacgcagttgaatcgctcggattggattacagccgcttcatcgaactgttaaggcggactcaccaaaaaatcgaagcccattccccttatgaaagcatcatgctcccgatcgcagatgaagcattgatcaaagcatgccggaaacaatgtgagaaaaagtcatatgagtggggagcaaacgctgcaccagacgcctttatcattgataaacaccggctgagggaccggactgaagtaattgccgagagggataaacaaatcaagcggcgaaaaaagagcagaggctagaagcctctgctcattggttatatgtgatgtcttcattttcatgatcctgacagcgctcaaagaatcctttagttaattcattcggaaccagcggtttaggtgcaaatattggcgaaatagccgacaccatttttttgccgattccctgatgacggtgagacggatttacactgatatgcttgatctcgacttcttcttctcttttctctactcctacacagccgacaatatcctcgccttctttccataggaacagttgcctttcagtgtccgattcatagtctttaattgtctgctgaagctgcttgacgtccttctcattcggcataaacgaaaggagccccatcgcaatcttttcgaatgactttttataacgaattaacataaatacccctcaatatatcaaaatgtggatctaacgaaggctagtcgcttcacatcacattataaacatttttataacctttttaaactctttttcggcaattattgaagcgaccgggtcaggttcgccatttcaatcgctgccgcggcagcttctgcacctttatttccggcttttgttccggcgcgttcgaccgcctgctcgatcgtgtctgtcgtcaatacgccgaagatcaccggaacgcctgttgacatgctgctcgctgcaatccccttagccgcttcattgcagacatagtcatagtggcttgtcgctcctctgataaccgtgcccagcgtaatcactgcgtcgtattttttcgtttcagccatttttttggcgatgagcggaatttcgaaagcgccgggaacccaggcgacatcaatatcatcagctttgaccccatgtctcaacagcgtgtcttctgcgccgcttagaagtttgcttgtaataaaatcgttgaaccttgacacaacgatcccaattttcaaatctgttccaattacatgaccttctattttattcatatgaatcccgtccttttttgtgattgattttagtttaaaaatgaagcatatgccccaattttgattttttcgtttttagatacttttcattatctttttttgtctccatctgcagcggcaccctgtctgcgatcgtcaggccgtagccttcgagacctgcaatttttcgcgggttgttcgttaacagcttcatttgcttcacgccgaggtcccttaagatttgggcgccgatcccatagttgcgaaggtctggaagaaaaccgagcttttcattagcctgtacggtgtcgtatccttcttcctgcagcttataagctttcagtttattgattaagccgattccccttccttcctgtctcaaatacaggagtacgccccggcccgcttgttcgatttgcgcgagcgcagcggcaagctgcgggccgcagtcgcagcggtaagagccgaaaacatcgcccgtcaggcattctgagtgtacccggacaagcacaggctcgtcaccgaaaggtatgtcgcctttgacgagtgctatatgttctttgtcatcgatttcgtttgtatagccgtaaaccttgaaggtaccgaattcggaaggcagcgtaattttcacttcccggttgatcagcgttcccttgctgtagcggtattcgatcaaatctttaatcgtgatcattttcaagccgtgctgatcggctatttttttgagttcaggcacccttgccatcgtgccgtcttcattcatgatttcgcagatgacgccggccggcgcggacccgcacgcttctgcaaggtcaacggccgcctccgtatgtccggctctttttaaaacgccgccttttttcgcgatcagggggaaaatgtgccccggccttttaaaatcacccggatgcgcgtgatcagcgatcagcgacatgacggtcagcgaccgctcctgagcgctaatccccgtctttgtatcgcggtgatcgacactgaccgtaaatgctgtgtggtgagaatcggtattttcgtccaccatcggttggagctcaagccgggaagcgatctcttcattgagcggcgcgcagatcaacccccttccgtgcgaagccataaagttgattacatcgggtgttgcgtattccgccagcgcaacgaaatcgccttcgttttccctgttctcgtcatcgactacgatgatgacttttccctgcttcaaatcgcgaatcgcttcttcaattgtgtgaaacatagacgcacagcctcctttcatttaaaacccgttttctttaaaaaatgcttcagtcaatgcctgtgcctgtttttcttgttttgtttggtggagaaagcggtaaatgtatttgccgatcatatcgcactcgatgttgacgatgcttccgaccttttttgcaggaaaaatcgtttcatccaatgtgtgcgggataagcgagactgttacctgatcctccgtcagtccgaatatggtgaggctgacgccgtctacggcgatcgaaccttttaacacaagcattttggccagtgaagggtcaagttttaaatcatagtatacggtgtttgccgctttttctatgcgaacgatcgatgcagtgccgtcgacatgccccgacaccatatgcccgccgaagcggccgtttgccgccatcgcccgttcaagattgacgcggcttccttttttcaatgtgccgagtgatgttgctttcagcgtttcaagcatgacatccgccgtgaaactgctggaaccgaactcatttacggtcaggcagactccgttgacagcaatgctgtcgccgagcttcacatcttcgatcactttgttggattgaatgactaaagacatggcgcttcccgcctttttcatgtccaaaatcgttccgacttcttcaatgatgcctgtaaacatatgccaccgccttattcttttatcggtcttgctgccagctttatatcctggccgatcttggtaatggttgtgaattgcagtaaggggacatctttcatcgattgaaagccttcaccggagaggatgctgggagattgcagccctccgattaatttaggggcaagatagaagattatttgctgatagagtccttctttgacgaagcttgcgtgaaccgttgcgcctccttcgacaaagactgaagcgatgccgcggtctgcaaggtgcagaagcacgtcgcgcacctgaagttcatccgcatcgagcacggttacctgcacaccttctttttccacgttccgaaccttttcgggatctgccttggacgtcgtgtaaatccaagtaggcgcttctttatcctgaatcacttttgactggagcgggattgacagcgtcgtatcgagaacgacgcgcaccggctgattcaccgcaccggggagacggcatgtcaaacttgggtcgtctgcttttattgtgcccgatccgactaaaatacactggtggttttttcggtattggtgagcatccatccgcgcttcttcagaagtaatccatttgctgtcgcctgttgcggtggcggttttgccgtcaaggcttgcagcggcttttaatgtcacatacggaaggcctgtccgcataaaatgcatgaacttttcattcagctcttccgcctgttctttgagaatgcctgtttccacctcgatcccggcgcttctcagcatctcgattcctcttccggaaacgagcggattcggatcttccgcagccacgaccacccgcttcaaaccggaacgaataatcagttccgcgcaaggaggcgttttgccgtaatggctgcacggttcaagcgtcacatagatgacggctccttccgcatggcggcctgccatttgaatggcgtgcacttctgcatgtgcttcgccgtattttaaatgggctcccattccgaccacttcgccgtctttgacgacaaccgctccgacaagcggattggccccggtctggccttcgccctgcctcgccagctccaatgcaagattcatataatgcgcatccgtcatgaatttccctcccttctttcaaaaaaataaccccggatgttgatccgggggttgtttttgtgcatgagaaataaaactatgcttattcattattttttacatagtctcttcatccttctcccatccagactttcactgtcggcttcagcttttcactgaatccaccgctttgcacgaagcacagcgggtcacgggctctaaagctgtctctcgctttattaccgccggtcgggattttcacccagccccgaaggatacaatcgatatttacttgtccttatgcgtaattatagcggccgcatattaaaattgcaatgaaaactgcttgcacagaaaaaccctctgaaaaacagagggtttttattctgccaccttgacgacttttattaatccgtcgattctgttggcattagagaagtaggcctttactttgtctccttctttaatgtcggacagatcctggttaagatttttcgcattgaaaatgatcttcgttccgttatctgataccccgtggtattcagtgccgtcaattttggtgatcttatattgataaatggtatagttcttttcctcagatgagacggtttggctgagcgccgttgagacatcctgaacgcttccgttttttaaataataaaagcctccggccagtacggcagccaaaacgagcagaaccgtgagcttgaattttattttccccatgatcaaaacctccagaacacgttctgaactatcctatgtttatttcctatgaatgatgaaataaaacatgttcgattcagacggaaaatatgtggtttttaagtataacgcaaaatgaagggaaatcgtttcatattcagacgaaatactacttataacctacgaatgtacattctgatttaggggtgtttgcgaaaacaagcttaaaaattgagtctaaatcactacatttcaaaaaaccgtttgttctgtcttcttcgcttcaggtttcgttgtaaaagtcgtttcggatggcgataacagactgatttttaaaatactcgctgtcttttgtttttgcccaggcgagaaacttcacatgctcggaatggaacagtgcctcgtgttggggcgagcgagcagcagccgcgccgagtctgtgtttgattccgcggatgaacttccaatattgatagaaaggcagttttaattttgtcataaatcctgccgagtcttcaatcacatatccttcctcttcaatcgacgggtcatttgacacagacaggtaccatttataaaaatcggtccactgatgaaaagtaatgactttttgcttacattctacgcggaatgtctccgcaaaacgaaggacgtcttcatacagcagcttttcatatttcatctgcctcttgacaatgtcgagaaggacaagcttgtccgattcgtactcgataatgtgcggatctttttctggcagcacgacttcaaacactaacgaaacattgcgttttttcacatattctttcatagcctctgtttgagatgcgtcaaacgttttgtaaaacagctcttccacccatttcgcatggccgtctttttgtccgcttgatgtataggattttgaggtgaagacaagctcatcggtttcagaattgtagccgaccgttcccaaaaatccattcgccttatcatagacggtgaccggaaagcgcagcgtgttaacgagaacatgcattttcgtcgtcagacgctcctcgatgttgaaaaatttgttgtagcttctgctgacgatttcattcgtgtttctattaataaacagccctcttgccttcatgctgacgctgtcccattttctctcctgaaaagcctttctcgtaaagttaaaagaggaaatgccgccggctagtttttgctcagacacataatcatgttcgtccaaatgctttagaaaatgttcgaccgtcagctcctcgtgcgcgtgatgagaagtaagcggaggagcggaagttttaaacacatcattttttatttcgtgtgtttgaattcccgaccgatcaatggtgacaactcttaaatgcccgccgtgctccacctgcccttccaggttatatgattttgcagctgcatgcactggaagtcggaacatgtttctgtgcccgtggatttgaatgatgttccgcccttccatatttttcgtaaagacatggtcgatatctgtctcatatccgccgacaccgttgatcagctggctggtagccgtaaacagaaggttgtcagggagcgcggaaatgccgccgtgcgtgatgatgtaagtgtcttctccatacgtgaagtaggcaatttggtggaagcgcctggccagttccctgatatctctcttgtcaaaacctgcttcgtctaattctggttttgtcttcttgttgaatacgctgcttcttgttacttcgtcatgcccgtattgctttaaatatttatcatgatttccttcgagcaaaatcacatttttgcggtctttgatacggagaaggaattggacgacttttgcgttttctattcctctatcaaccatatcgcctgtaaaaatatataactcgtcatcttcgagtctgcctttcaaataggaatcaagcaccgtaaaacagccgtgcacatccccgatgacatgtatttttttgtagctgtcaagccgcctcggcttatactgcatagcatcggcaaattcttccggcttgatcactgttgtccaggaaggcgccggttcggataaaatccgctcgtgcatggcgtgaaccacgctgtctggcacccgcttatgctcagccctctcacggtttctcaacagggcggtctcaagcggaacattggaaaaatcaaccacatacgctctgtagcgatactttaaaacgagagctttatagccggaaatcatgctttgttttgcatgtgtggcatcaacgatcgtgaattctcccctctccatcctttcttcaagcaggctgaacaaaagcttccataccttgccgtcatttttttgggaaatgtcgtatttcccttccaaatttaacactggtgactgatggatcagcctcagctgatcggcagacagcgtatattgattcaattgatgatccctgatccaggttgattttccggtgccagggcagcctctaagcagtactaaagtcctcattgttgatctccttattcagttctgatgagttaattttagcattccttccaagaatatacgtaattttttgctatttgtttcaaaaacaaataaaaaagatccccataaaggggaccttttgtgtccttaatgaaattccacatctatcctctttttttcgtcgggcttgtctttcggcattctcacttcaagcacgccgttcctataagaagctcttattccttcacggctgacgggagcaggaagcgcgactgccctgtgaaaacggcctgtaaatcgttctttccggtgcatgttttcctcttttacttcgcttgacctgttgatggttccgctgatatgaagcatattgttttcaacctcaatatgaacatcttctttgctttcaaggcccgggatatcgcaggaggcgacgatttcattcccggcttcatgcacatcaaccctgatatcgccaaagccgtgctctcctccaaagtttgccggaaaatcggcaaacacccgatcaaactctcttctgatcgtattcaaatgtttaaatggttcgtatggtactaacggcattttctttcctccttcatgttttcataaccttatgatttcttgtacgctttgatttatgcatgccaatatgaggttaagctcagggaagaagaggctttttagcggacataaaaagagcagtgctgatatagaccaagcactgctcttttactgaaatattatgttacgtttcgttctccgatatgaatcggtgacgttttgacagatgttacgtttctctcagcaacttgtaccggtgcggatgttacgtttctctctgcgatttgcactggcgcggacgttacatttctctcagcgacttgcaccggtgctgatgttacatttctctctgcgatttgcattggcgcggatgtgacgtttctctcggcgaccttcacaccatctgtttgcgtcatcagcgcagcacttgccaaagaaagtcctgctactgaagcagcggcggttaacaacagtttagatttcatacgaccagtccccttttttcatttgttttcgagcactgaataccgtttgatagaaataaacagagtcgctcaagcgcccaatttcattatagtattcagctgcttccaatgccaagtcctcaatatcgggatacatcttttttgacccgagcagctgaaatgtctccagcattggagccctgccgtcatcatcaacatacaaagcttttaaaaaatgaaattttgaaaggtagatcgcatcgtctgatcggcgggcgatgtcaattcctttgtttaacgcgtcatccgccttttccagctgcttcaacttgaaatatgcaagtgcaagactgaaaaacgcttttggaagaatatctgatgactcttcttgataaatcgcagcagccctgttgaagtactcggctgcctgatcgaaatcccccatcttataatagcagtttcccaaattgtaataggtgtgtccttccaatatgagctggccttcttgctgtgaaagcttcagcgccttttcaagatgtgacagcgctttttcattcgactctaaatcgtcatagttccctgcgatgacgaactcgcattggattctccgaaccgtgtaggtttcatgcgcctgataggtttcaatcgcttgaagcgcatagttcatcgacacatggctctgtttcatatgataaaacacttcagccattttaaaatgaaactcggctctctctatttcgtcctcgacgtgcagcagctttttttcggcgcgcctgtaaaaagagatcgctttaatataatcatggtttttatattcatacatccctctaaaaaagttaaaataatattcgagcaggcctgtcagctttccttgttcatcttcgatatcttttaatatttcagaaaagtcaggcggggtttcgacttcttccaaaggttttacgtaatcaagcatgattctgtgtctgaattccattaaggcgtaatacaataataagtcttgatcctcttccatttgagaaatttcgcgctcaatttctgccttcagcatttcggcgtccgtgacgttgaatttacgtatcgcgttataccagtcattaatttttacgccgactgccgtcgatgggatttttacgctcaccccttacgccccttccttttttacagattgcgttctctatctagctcttcacttgaatatattttacataaagggtcattttttcacaattattttatttattagcatcgttatttcctatcaggatgtggacgaagaatcggcctcaagtcctgttgcacctggaaaataaacaccgttacagacaaaaaaaacagcccggctaagcgggctgttttttgcgctctctgattatgcatcaaatacttcgactttttccatgccttgtccctgctccattgaagtgacggcatcaaggcctgatgtgacctttccgaaaacggtgtgaacgccgttcaagtgcggctgaggctcatggacgataaagaattggctgcctccggtatcttttcctgcgtgagccattgagagagaaccggcttcgtgtttgtgcggattcccttctgtctcgcatttaatcgtatatccaggtccgcctgttccggtgccgtgcgggcagcctccctggctgacgaagcccgggatgacgcggtggaacttcagcccgtcatagaacccttcgtttgcaagtttttcaaagttggcgacagttcccggcgccgcatccggatatagttcaaactcgatttttttgccgtttgtcagttgtatgtatccttttttagccatcttgattctctcctttcatttcacaagggtcattatatcatattgaagaagcagagagccaatcgaccgaaataaacgccgctcttgtatcgtttttgtaaaaaattttaaaaaaaggttgaatcgcctgtgaaaatcatgaatgataaaagagcggcgagatacgatgccgggagggcatttgacttgaagagaaaattctctctttttttctttgaaacctcactcatctttcatccgtctatatttcggaacgcattatttccgttccggcaggcttctttaaaagtacagcaattctgcctgaagcctgcatttttaaggagggcattgagcttgaaaaaatcgatactaggaatctttacagcattgtgtctgctcattttcccgcaggtcagcttcgctgacgccgcagtgggtgatgtcatcgtcacgctggggaaagacttgtcaagccaggacagacaaaaagtattaaaagaaatgaatgcgcctgaaaatgcgaccatcatcgaggtgacaaatgatgaggagcataaatatttaggggattatataccgaaagcacaaatcggaacaagagcgatttcttcttcttcaattaccgtagcgaaaaaaggcaccggtttggaagttcagacacacaatatcagcagaattacagatgagatgtatttgaacgcgctgatgacggccggtgtaaaagacgccaaagtctatgtcaccgctccgtttgaagtgtcaggcacagccgctttaaccggattgatgaaagcgtatgaaacgacttcgggcgaaaaaatttccgaagatgtgaaaaaggtcgcgaatgaagagcttgtcaccacttcagagcttggcgagaaaatcggcagtgaaaacgcgtcagcgctgatggccaaagtcaaggaagaaatctcgaaaaacggagttcccgagtcaaaagaggaattggagaaaacgattgattcggctgcttccgaacttggcgtgacactcacagaagatcagaaaaactctcttatatctttatttaataacatgaaaaatattaatatcgactggaaccaggttggagaccagcttgacaaagcaaaggataaaatcacgaaattcttggattctgaagaaggacaaaactttcttcaaaaactgatcgacttctttgtgtctctgtggaacgccatcgtttccgtattcaccggcggcggcacctcagagtccaacggttaacacaaccgccgaaacacctccttttttcacttgaagggggtgttttatttttgcagaggggaaatcccctccgtcttcttcatagttttcatgaataaaatctgtcagcagctttgtaaatcggtaaaacgtttcgttttgcgtcgccgccctgtcttttagtgtaaaccggtcgaataaagatttgcggaaacccgtgctcatttcaagctgaatgctcagcccggaaagcgacttgttggcgatgttattcggatgggttccggcatacttgtcatctgtccccagcatttcagcggcaaaccccgagcggttcagctcatcaaccaatattctgattttagcgcggtctgtgccgcctactttaatatcgcggtcttcactgtaatagccgtggagcgacatgacatactggtggcttgcagtaattgcgagcgccgctggctcgtcaaaacgcgtgcttgtaatgtgaaggtccgtattgcctgatgatttcagcccttcaaacaagtacagggaatagtttttggacacttcattggcgatttcgctcgttccgggttcgatgccgcctccatggatggccatgatgagcatcggcactcttgcgttcttctccgtaattcggtaagaagctggatcttcattccgctccaattcttcaaagcttgaatattgatcgccggactgtgttgcgccatgggccgcagcagaatatgggaatgagatcacagccaaaatcaataaaatattcacaaaaatgtttattgctgtaaaacgatttactgtgttacaatcaacacattgcttcaggcactggagcaatcggtggagtagggatactttggccggtttcatctactccgcctctaaatccaacaaatcagcaaatctcatccttttcaccctggtcattgcctttatcatctcctttgtaaattttttgttaaattcacaatattatatacaactagcccggtcgctgttctatgcatgtcatgatctttttaacaaaaaacacctcccgatcaccgggaagtgtttttcgtgcttgaattaaaaatggagacccccctcttagggaatctccatttttttattgtttgactttcgatttcagcggcagatccagcttgacgatatcctcatacgtctctctctgaatgacgagctgcgcttccccgtcctcgacaaagacgacggccgggcgcggaatgcggttgtagttgttggccatgctgtagccgtacgcaccggtgcagaaaacggcgagcacatctccgtcgcgaacttcggggatttccaaatcccaaatcagcatatctccgctttcgcagcattttcctgcgattgatgcggtatcatgacaagcatcgttcatcctgttggcgacggctgcttcatattttgcctcataaagcgccggcctgatattatcgctcatgccgccgtcgatggctacatatttgcgaatgcccggcacctctttttgagaaccgatcgtgtacagcgtagtccccgcatcaccgacgagagaccggcctggttcgatccaaatctcagggatgtcaaagccgaaatgctcggcatttgctttgaccgcctcgatgattttttcaacataaacatcagctgcaagcggctcgtcgtcttttgtatagcggatgccgaagcccccgccaagattgagcacttccggaatgaaagagtaagtctcccgccattccgcaagcttctcgaaaatcttgtctgctgcaaggacaaatcctgccgtatcaaaaatttgcgaaccgatgtggcagtgcacgccgaggagcttaaacgcagacgagcggcggacttgttcgatggcttgttcgacctgtccattatgcagatcaaaaccgaatttggaatcttcctgccccgtcgtaatataatcgtgcgtgtgcgcttcaactcccggagtgattctgagcaaaacgtctacagtttgtcctgatcgcttgcaaagatcttctgtaatggcgatctcgtgaaagttatcgagcacgatgcagccgatttgatgctccagcgccatggctagttcttcagggctcttattgtttccgtgaaaatgaatccgctcagctgggaaccctgctttgatcgcagtgaaaagctctcctcccgataccacatccagagacagcccctcttgttcggcaagctgaatcatggcaaccgatgaaaacgccttgcttgcatacgctacctgcgcttttaaaccggcttccttgaatgccttctggaattttcgggcgcgctctctaatcagcgcgacatcgtatacataaagaggtgttccgtatctttctgccaatgatagaacatcgacaccgccgatttcgaggtgccctctttcattttgtctgctagtaccgtgtaaaaacaattgtcattccctctttctctatcgacaaaggtgcaaggggcgctccggttgctgcccgatgcatcttccggcttcatgatagtgcgattcttatgttgtattataacatttcgttttaaaaactaaaccaccatttgtccaaattttcttgatttataaaggaaatgattccctaaacaactaatccattctattgattatagaataacagaaaacagcgcttgatagaaataggcatacacaacgtccattcaataaaaaaagagccgaaaagctgagattttcgcccatacaaataggcatttacctgaatataatctctaaagatgaaaaccaaaaaacgaagtgggaaagaggttatcatatgtatccaaatcgttatccctacacccccgctcccggctatgcacctgaagatgtatacgccccttatcagccggctgcgcattatgaacagagaatttatgagccttatgaagggcagattattacagctccggcgaatacgagattttggcggagaggaactgaggttttccttcattcgtcaacgattgacccgtacggccgcgaaatgctgtatgtcgtctatccgatcagaagacagaacaacatctgcagcctccgggcagtcgcgatctctgccaatgaatacaaaggcatcggtactcaaagaccggaattcgattattgaaaaagaggcttttccccggggaaaagcctcttcgaatgccggcttcacggctgtctggagcggtttctcggatgaacgatgctcggcctgacttttccccctggaacggacgtgcgcacgagaacatgccaaaacgcttttccattgaacgggaggagaggccataagtaaggcgttcgcaatgacctgatcgaagtcatcactatagttaagatcgttaatccgatgacaaatccctccactttaaaaagcgccaccaatatcagcataaacagcttcaccattttattcgccaggctcagctcgtagcttggtgtcgtgtaggctccgattgccgagagggaaacgtataaaatgacttcgggagaaaacaagccgacattgatcgcgatatcgccgatcaatacagcggcgatcaggcccattgcagtcgaaagcgccgtcggcgtatgaatggcggccattcttaaaaattcgacgccgagatccgccaggaaaatctgcatgataatcggaatatgggtgtctttattcaacccgataaacgataaattatcaggcaagagcgacggatgaatgacaaacagcagccaaagcggcagcaaaaaggtggaggccaaaataccgaaaaaccgcacccaccttaaaaacgtcccaacagccggcgtctgtctgtattcctcagcatgctgaacatggtgaaacaaagtggtcggtgtgatgatgacgcttggcgacgtatcgacgatcacgatgacatgcccctctaaaatatggcttgcggctacgtctgccctttccgtaaacctgacaagcggaaacggattgtagccttggccgaccaggaattcctctaccgatttatccgacatcggcagcccgtcgatcttcacatcttcaatttctttttttaatacttcaacaagatcgggatctgcaacgtcttccaaatagcagaggcagatgtctgttttagagcgttcaccgatatgaagcattttgtagcgcaagcgctcatctctgatccggcgtctaatcagggctgtgttgacgatgatgttctcgacgagtccgtcccttgcaccgcgtacgactttttctgtatcaggttcttccggcgttctgcccgggtagcttctgacatcgatgataaaagcaaagcccgcatcttcgacgatgatggcaaccagtcctgacaacacttggtcgacagcttcatcaagcgtttccgcttttgaaacctgctggttcaaaagcctgttttcgacgatgtcttcgacctcgcccgattctttttctttatcattcagatgcaccagttctcttaacaggtgaatgatgtattgtgtgtcgcacaatccgttgacataataaagctgaacttcatgtccgagaataaagaccttccgtacgccaaggtcaaagctttctcccatgccgacccgcttcttgaaatacgcttcattcttagaaggatcaaggaatacgttcgtcttctcttgcttttgagcactcatgatacccgctcctttctaaaatgagctcgaccgctttcattgtaatcggcgaacctttttccacatcgtcttttctgttcatcttaccgatatcaccgattccgacaatgatcggaacatccagctggtcaaggcaatagactgtatcaccattcattcgtttgacatcgaactctttgaccccgtgtttatcgacgccgtactctgtcagttcgccttctgcatcgattgatacatcgactctcgtccactctgcataatgagtttttgaagcgacggcgatgactccgagcacctcgatatcgggatgcatcgctacatatttcatagctgtctctcccgggccttcaccttgaagtccggaatcatcaaacatgacgaatacaggatcatgaggggtttgcaggatcatggttacaagctccggtcctgttttaacgctcggattccccgccgattgggaaatgcagcggccacccgtttttcttgttgcatattcgattgcttttgcagcgtatatatcgccgtctgtgaccaaaatgaccttgcgttttgctggcattttcctttatcctttcggtttaaaaatcacggcaacaagaaaagcgaacaagatagcggcagatataccggcagatgtcagttcaaatatccccatgccgattccgataaagccatgtttctcagcctggtgcatcgcgccgtgcaaaagagagtggccgaagctgacaatcgggactgtagccccggcaccggcaaattcgataaaacggtcgtaaatgccgaatccgtcaaggatcgctccagatacgacaaaagttgacatgacatgagccggcgtcattttgaagatatcaagcaagagctgtccgatgacgcaaatcagcccgcctgcaataaaagcaatgacatactccatcttaagcgttccccctttcggcccgttcaaatacgacgccatgggcaatgcatggtatcgattctttttgctggatgatcgtcgggcttaaaagggcgcctgtcgcgacaacaagcactctgttcagccttcccgcttcaatttctttgaaaatatgggcaaaggtgacgaccgcggaacaagcgcatccgcttccacctgcaaaaacttgctggtcaggcgtatagatcatcagcccgcagtcattatgttttgtcccgacattgattccttcctcttttaacagatccttcaaaatcgggctgccgacgcctgaaaggtcgccggttaagatcagatcgtaatcatcaggggtgcgtccgagatcctccaaatgctgcttgaccgtatccgcagcagcgggtgccatcgccgaccccatatcttgcgaatcggtaatccccaagtcgataacccttccgacagttgcgcttgtaattttaattccgccgggctgctggctgaggacgaccgctccgcttccggtcactgtcgaagtcgcggttcccggtttttgccccccgtattccgtcgggtagcggaactgcctttctgccgtagcattatggctgctggttgccgctagggcgcgctttgcgaaacccccgtcaatcaacgccgaactgatcgcgatcgattccattgatgtcgagcatgctccaaataagcagagaaaaggaattttcaaatgccgcgccacatagttggctgtcacgttttggttgagcagatcgccagccaaaaagatatcgatgtcttcctttttaagattttgttttgataacgcggactgaaccgcatcctccatcagcttgcgctctgccatttcccagtttttctggttgcagtgcatttcatcatagcttttgtcaaataagtgtccaagaggaccttctttttctttgggaccgaccgctgttccgcttgagttaacaaacagcgggttctcgaattcccatgtttgttttcctgttaatttcatgatgttttcctcctaaaacagcttgtcaaaggcaaagcggatcatccccacaatataagcggccacaacaccgaacacgatgacgtttcccgcaagcttgaatatgtttgtccctacgccgaggacgtagccttcgcttttatgctccagcgctgcgctcgtcatactgttggcaaaccctgtaaccggaacggcagaaccagcgccggcaaactgtccgattctgtcgtagacgccaaggcctgttaacagagcggagatcaggatcagcgtggcaaccgtcgggttcccggccgttttttcatcaaaatggaacacagccatataaaaattctggaaagcctggccgatcgtacaaatcagaccaccgacgagaaatgccttgatacagttcaggacataaggcggtgaaggctgatacgctttaactttcgattgataattatctttcaaacttgacatcataatcctccttttatgacaaatgaacaaaaatgagccattggaacatcgatccgagaatcttgccgaaaacaatggccattaaaagtatcaaaatccggtctcccatcccgatgcgtttcgccagtatcggcagcacgttcaagacttctgttagcgccgctgcaagcattccaatgaaaacgcccgcaaaaaggccgatcggaacaagcagccatttggataaaaaaaagcgggacatgttcagcgattcccatcctccgaaaaccgcgcctaaaatgacagcccattcatacgcctggataaatccttttgttttcgtcagctgagtcagcctcgggataatgccaagcacggtaagaaaagcgacaaagccggatccaacagcaacccctcctgcgagtccgagaaagatgataaatatcacgctaatgatcatgaatatcctttgtcgtttctttgttttcgtgcatggccacataatggtccaaatcaagctgatatttaaacatctcgacctccagggggctgggctcctcgttaaaccgttttttaaataaatgattaaaaaacaagatcatgccgaggccgagaccgatgctgtacggaacctgcaaaaggtatggatagcggttcaccttgcccgtcaccatttcgtaaagcaggatgtgcacttccctcatgctgacatcttcatgaaagttcatgacggcaaggccggcaccgacgaacaagagcagccagacggcgatgaaaagcacgggcgacagaccccttttcggatattggatctccacgatggtttcagaaccgccgacggtttggacatcaaggtcaggaaacgatttatgtacagcttcaatcaccttcatcacgtccagcaccaccatgctttgatccgctttgctgacctgataaataggcagccgttcaagcttttctttgtatccgcggtcacccgctacctgtgcgatatggccgagcaaaatcaattcatccggatctgcctcaagccggtggcggagtctgataaaaacttgacgttccatctgggtcacttcctatatgatggttatagttgtagtatgaagtacatcccatttatcattcagaaaggcgcaaaagaccataaattaccacacaaaaaaaaccggaacgctcccaagagcgtccggtttttcatcggacatccgaggctgcctgcaacatgagcagcctcagctttcaaaatggtccatctggtttttgatttgctttaaaatctttttctcaagcctcgagacttgcacctgggatatgccgaggcggtcggcaacttcagattgcgtcttgtctttgtaataccttaaataaacaatcagcttttcccgttcatccaaatccttgatggcttccttcaaagcgattttatcgaaccacttctcttccgactgatcggcgatttggtccagaagtgtaatcgggtccccgtcgttttcgtaaaccgtttcatgaatggacgagggagagcggaccgcttcctgggccatcacgacctcttctgaactgatttcgagataatcggcgatttcctgaacggtcggaatccggccgtttgacttggaaagctcgtctttcgcccgccggattttgttgccgagttctttcagcgagcggctcactttgacggttccgtcatctctgataaaccgctgaatctcgccgataatcatcggaacggcgtaggtggaaaaccgaacgtcataggaaagatcgaatttgtccaccgacttcaagaggccgatgcagccgatttgaaagaggtcgtcaggctcatagcctctgttcaaaaaacgctgaacgacagaccaaacaagacgcatgtttttttctatgaggaggtcccttgctttttgatcgccgttctggctgtttttaatcagttctttcacttcatggtctttaagctgagtgttctggttttcttttttaacctccacatccataacaaatctcccttaattgcaaagcgctttgctttttgataagtgctttgttaagtgtattgtggttcccatctcaggtgaggagtcgatcgaaatatcatccatgaaattttccatgatcgtaaagcccattcccgaccgctcgagttcaggctttgtcgtgaacaggggctggcgcgcttcttcaagatcagggatgccgactccttcgtcgcggatcgttaaatagacaatatggtcctcgagagtgacggaaatatatacgtttccctgccctgagttttcataaccgtgaatgatcgcgtttgtgaccgcttcggatacgaccgttttaatttcggtcagttcatccatcgtcgggtcaagctgagcgataaaagcagcgactgtcacccgtgcaaacgattcattttggctgagcgctgtaaactgaatgttcatttcatttttcatgacgccacccccaacgtttcaagtgcacgctgctctgattgctcaaggcgaatgattttaaacagcccggacatatcaaataaacgtttgacagcaggggaaatggcgcagacgatcatttctccgccgagctgcttaatctccttatatctgccgagcacgacgccaagccctgaactgtccataaacgaaaggtctgcaagattcatgacaatatggcgaatgtcggtttgttccagatggtcactgacttgttttctcaaggtttctgctgtatggtgatcgagttcacctgtcaaccgaatgcataatacggattctttgacgtgaatatcgattccgaggctcatcctcattcctccttggtttaaatcggataatgagtgtttcgcttcagactttataaattccttcaccgtgacaaaactagtgaccgttcggcattattcactccacttcgtccagtgggtcatcgtccgcttgaacatcgtccacatccccgctttgtccatatctttttcagcgacaataggactttcagcgagcacctttccatccttttccaaaacgagcgtcccaagctctgtgccttttttgacaggggcctggatatcttctttctgtttgatttcttttttaacagattcgatattttcgccttttttcgtcaaaagggaaatcggttctgatgtgacaaggtttattttttgctcacggcctttattgaccttcaaatcggaaatgatttcgttacgtttatacatcggatgcgtttcatattggctgaacgcaaaatcaagcatttttgtgatttgggcatttcgttctttcggcgtgctggctccaaaaacgacagcgatgacgcgcatgtttccttttttcgctgaagctgtcagacagtactttgcttcatttgtaaagccggtcttgactccatcaacacctggataaaatttgatgaggcggtttgtgttgacgagccagaattttttatcagtgttttctctcagatagtcttcatacgttcccgtaaatttcgtgatgttttcatattttaaaagctctttcgccatgagcgccatgtcataggctgtgctgtaatggccttcttcaggcagacctgtcgtattttgaaaagacgtatccttgaggccgagctcagcagctttttcattcattcttttgacgaattcctcttcagaccccgcaatatgctctgccattgcaacagaggcatcattacccgatccgatggcgatccctttcagcatatcttcaaccgtcatttcttcaccgggctctagaaaaatttgcgacccccccattgaagcggcatactcgcttgttctgactttgtctttcattttgattttgccttcatcaagggcctccatgatcagcagcatggtcatcacctttgtcatgctggccggaggaagcttttcacggctgttcttgtcatacatcaccttaccggtatcccgctcgattaaaacggcagattttgcgtcatcagcaagctccgacggtttctttgcgctctcttttgcaagcgccgacggcgcagtcatcaggattatcgtaaaaatcagcaatttggataaatgacgtttcatcacccagacctccatttcgtaatcctctctattttttccaatccggttggatttatacggatcggttggaaaaaatttctcaacgaccaaaaagaaagagccaatgcaggctctcatttgaacttgcactggctcatatttcaacttcgctgtagttttagccgattttggcgactgccgctttaacaaaccgcaagaagtcggcttttactttttcggtgacttcgatcacttcatcatgggagagcggctgatcgaggattccggctgccgcgtttgatatacacgaaatgccgagcacgcgaaggcccgcatgttttgccacgatgacttccggaaccgtcgacatgccgacggcatccgatccgatcgttctgaggaaccgcacttcggcaggcgtttcgtatgtaggtcctgtaacggctgtgtaaaccccttcttgtacgctgatgttcaattcttcggctgtttttttcgccaagaggcgcagttccttatcatatgcggacgacatatccgggaatctgacgccgagcgaggaatcgtttggaccgatcagcgggttcgttcccatataattgatatgatcggatatgatcatcaaatcgccgggacggaacgattcattgacgccgcctgcggcattggtcacgattaaagtctcgatccccagctctttcatgacacggacagggaaggttaccttgtccatggaatacccttcgtaaaaatgaaaacgcccttgcatcgcgacgacttgcacattttcaagtctgccgatgacaagctgtccggcatgcccttcaacagtggaaacaggaaagtccgggatgtcttcatatttaatgcggacggcgtcttctatctcatcggcaagcacgccaaggccggatcccaatatcaggccgaccgcaggtttgatttccgttttgcttttaatatagtctgcggcatttgcaatcatctgtttcacgtcgtttcctcctatttcagcagggataaaaagctttttccgtactttggcatattcgttttaaagttgtcggcgatcgttgcgccgatgtccgcgaatgtatctgcgagcggaagcgccccaggcttttcgtgttttttgctgtatacaagaagcggaacgtactcccttgtatgatcagtgccatggtgaaccggatcattgccgtggtcggcggtaatgatgagcagatcatcttcgcgcatcttttcaaatacttcaggaaggcgcgcgtcgaactcttcgagcgcttttccgtatccttccggatcgcggcggtgtccgaacagcgcatcaaagtccacgaggtttacaaagctgatcccagtaaaacctttgtcaagcgtttgcaccagcttgtccatcccgtccatattcgatttcgttctgagcgattccgtaatgccctcgccgtcgtagatatcggagattttgccgatcgcaatcacatcaaagctgtcatctttcaattcattcatcacggttctgtcaaacggcttcagcgcataatcatggcggttcggcgtccgtttaaattcgcccggcttgccgacaaacggcctcgcaataacgcgtccgaccatatatttctcgtcaagcgtcagctcgcgcgcgatctcgcagatcttgtacaattcctcgagaggcacgacttcttcgtgtgcggcaatctgcagaacggagtctgctgaggtgtagacgatcagcgcgccggtttccatatgctccgcaccgagttcatccaaaatcgcagtgcctgatgcaggcttgtttccaatcacttttcttccggatttctgttcaagttcgtggatcaattcgtccggaaaaccttcgggaaacacccggaaaggtttgtctatgtaaagtcccataatctcccaatggccagtcatcgtatcttttccgtttgaggcttctttcattttgccgtaataggcaagcggcttttccgccttttcgacgcctttgatttcacggatgttgctgagcccgagctttgccatgttcggcaggctgatgcctcccatgtgttcggcaatgtggcccaatgtatctgcgcctttgtcattaaatttttcggcatcaggcgcctcgccgattccaacggaatccattacaattaaaaatacgcggttataatcaaatgcaggcatttgtcggcctcctttttttctttctgtcagctataggctgtcacgcttggcataaaaaaaccaaaataccgctattagccaagtataaaccgtttacacaacagttgacaatacgaacggaaatagtgagaaacttcccgcaatttgctactccctcaacatgaaaaaccgtgctaccgcctgtcctttcaggctatgcacggggatggtattgcctatacacatctttcagccttgttttcgtcacgtgcgtataaatttgcgtcgtcgaaatgtcggcgtgtccgagcatttcctgaacggcccggagatcggctccgttttcgagcaagtgtgtggcgaatgagtgcctcagcgtgtgcggcgtcagctctttattaattcccgcttccaaagcgattttctttaaatttttccaaaacccctggcggctcatttgtctgccgtggtgattcagaaacagggcgtcttcggtattttttttcaaaagcttgcccctcgcttttgacagatattcgccgaccgcatgtgacgccgcttcgccgagcggaacgatccgctcctttcttcctttcccgaagcagcggataaagcccatcgataaatggacatcggacagctttaatgcgatcatctcgctgacgcggattcctgtcgcatacaataactccagcattgctttatcgcggtagccgaacggccccgtcagcttcggcgtatccaaaagcgtttcgacttcctgtaatgacagcaccttcggaagggtccgttccgttttttgcgattcaatatggacggacgggtcctgggccgtcactttttccctcagcagaaactggtgaaagctgcggatggaagcgagatgcctcgcgaccgtctttccggattttccggcgtcttttaaatgcttcaaaaactggatgatgtgcagccttgtcacctggtcaaaagagttcagctgctcctgctcctctaaataggcggcgtagctgttcaaatcccgttcatagctcacaaccgtgttgtgggaaagcccccgttcaacaacggcgtagtggataaagtctttaatatgaactttcacgctatcctactccccgttcaaataaaaaaagattaaccggttaaaccagctgccctgctcgtcctcttccatcgaggcgaccttgagggctgctccttcaggtttatcataccgatgatagttttcatactctgaatttatccatatcatagcataataaaacaagacggtaaaaccggtaaacagcacaaacaccttgatcatatcggcggccgttttcagcattttcatacggtttcaggtcccttcttttgattcgattactaaaacttatgccaaatgagacaagttttatacgtctgaatcaaaaaagaacccgctcatggctgaaagggttctctccggtttaggctattccgattccttttgctgacagtcatgacagatgccgtggaacgtcagcctgtggtcttttattttaaatttccaatccttttcaatgatttcttccacgtcttcaagcaaatcttcttcaatttcaacaaccgaaccgcattccatacaaaccaggtggtgatggaaatgggcggcaccttctttgcggaggtcatatcttgacacaccgtcgccaaaattgattttatccactacttttaattcagttaacagttcaagagtccgatatactgtcgcaagaccaatctcaggagatttctcttttacgaggaggtatacatcttctgcgcttaaatggtcttcctcattctcaagcagcacccttacagtagcctcgcgctgaggggtgagtttatagctggaagaatgcagttgctttttaatccgatcaatacgtgtttccattgactttccctcctacgccgcattacctagcttattataacaaaacaagcgcagagagccaactataatcattataaattgagaaacaaaatgaatattttttaataatcattataaattaatgctgtttcggcaagacgtactctgtcagcttttccatcaacactggcgaaaggtatgcttcaaagaaagaggatataagagacattgcgagaatcaggacgagtacaaaagcgtagcggccaaaccaatggacaggtgcttctgcaaggctgcgtttaacaaaaagctggcggatgagcctcatcgaaaaggcgatggcgcaggtgcccatgatcaagtacgccgggatcagcagaatattttgcgggagcacggagacaaaagacaggaaaaagccgttgattcccatttgattgaccaaaaagccgactgtaaatccgacgacgatcccttttaagaagaccatgataaaaatgacgggcagaccgatgatggatatcccgagaatccacattaagcctaaatatttcatattatgaagaaagctctgcaaaaacatttcctttgagctggctgcttttccttcggaaagctgtccaaaaaattgattcaaatagtagaacaaatcttctttttgaccgatcgtcatgctgttgacgatgaccgcgccgaaaatcacacccattaagaacagcacagaaacaaataaatagatcgacagatggtccttcatatgttgaaagatgagctctttgattgtgggcttccgcatgtatcttcctcccagacgtgcttttgattttaatagattgtatgagagaaaagagagccgcatgactttttttaaaaaaagacgggcgcccgtaaaaggcgccccgtctaaagttatgattccttcctgttttccgcggaatgctccctgtccgtattcacagtcttgttggcagccatcacaaacggcagataaatcatcgttgaaatggcgaggcagagaaagccgacgccgagcgcaagccagtttcctccggtcccgagaaacggaatcaacggccctggcgttgtccacggaacagcgtatgcgatcggcggaatcagctgaaacttgatgaacaaatagccgatgacagtattgactgccggaacgataataaagggaatcatgaagattggattgagcacgaccggaagtccgaaaatgacaggttcattgatattaaatattcccggcccgatcgaaagcttgccgatatctttataatcccgccgctttgaagcgatgaatatcgcgatcaaaagccccagcgtcatgcctgatcccccgtagttcgcaaaggcgtcattcagcgcccatgtttcaggaaacggagcgttccatgcagagcctgttttagcggcaaaaccgaggttttcaaggtttgcttctgcaaaaatcgtttctctgatcgccgcaatcgtattcggaccgtgaatgccgaacagccataaaaagttggcgacgattccaagaaaaacaacggtgaaaatattcgttcccatctctctcaacggcgcctgcagcacagtatacaccaattcatgcagaccgtttttcgacagggacatcagcgcaaagcttaatatcgcaaaaccaatcgtaatgaagatgatcggaaacagcactttaaatgtccgggcgaccgcaggcggcacctgcggaggcatatgaatttgcagtcgcttggcatttgatagcctgctgaacacttcaccgacgatgattccgatgattaaggcgacgaacagtccttgggcgccgagccatttcgtcgttaaaaagctctcgttttcgatcaggcggtacggtgaataaatgataaaataacaggatacagccgttaatccggcaagcagttcatccgctttcattgagatggctaaattgcgggcgacgagaaacacgacaaatatggacataatatcgagcgacccccgcagtacgggcgtaaagaccgactggtaatcagccaagttcggaaatatcttttcaagaaataaaattttggcgataaacccgtccggagataaaatggcaaaattcaataaaatgataatcgatcctgccataataatcggaaatgatagaataaaagcatctctgatcgcacatatatggcgctgtgaattcaattttgcagcaacgggaaccaaaaaccgctccacgttccgctcaaacttctccataaacccgctcatccctatctcccctccttttttatttcatcagctgcagcgctttttgcagcacagcttcgccgttcatggtgccgtagtctcgcatgtcgatcacctggaccggcgtgtctcctgcgctcgcctcaacctgtgacttttggtacctgacttgcggccccaacaatacgacgtccgcgcttgacgcggcagtccccgcttcggatacaggcagagcaatgatgtcgacctcttcgttcagcgcctctgcatgctttttcattctgctgacaagcaggctcgttgacatgccggccgcacaaaccaataaaattttcttcattatcaattgaccccctttggattcatcttttcctccgccgcatagaaaacgctttcattatgatgcggagaaacatttcaacctggtcttttatcctatgatcgagatagacaactgtttcataaaaatcaatatttttatagctgtttcaaacggctcgtttagtcaacctcaacaaacgccttgaaacatttgtttagtttatctaatgaatttttcaggataatgagttatatttttccttaaaaaatccggagggattacatgaaacctgtccatcaagaaaaaattcaaacagacctcacgctctcaaacagcgacttgcagcctctgaagccggaggaacgcacatggaaagcggttaatttcgcatcgatctggatgggctgcatccataacatcccgacttatgcaacggttggcggactgattgcgatcggactttctccgtggcaagtgcttgggattatcgccgtcgcttcgattgttctctactcggccctcgcgttgaatggacatgccggcgcaaaatacggcgtgccttttccagtattaatcaggtcttctttcgggatctacggggctaatataccggcgctcctcagaggtttcgtagcgattatgtggttcggcattcaagcgtttgcgggaagcacggcgatcaacatcctgatcttaaacgtatggagcggctggaaagacatcggcggcgactggaacttatttggtttgcatttaccgggtcttttgtcatttgttttcttttggggaattcatcttctcgtcctccatcacggaatggagtcgattagaaggtttgaagtctgggccggcccgctcgtttatctcgtctttggcgggatggtgtggtgggcggtcgatattgcaggggggctcggtccgatttattcgcagccgggaaaatttcagacattcagcgaattaatttggccatttcttgccggtgtgacggggattatcggcatttgggcgacgctcattttgaacattcagtttgcagcctcccaaaaagaacaaatcagaggacagttttacggtttgccgggcacattcgttctatttgcatttgcaagcatcaccgtcacctccggctcacaggctgccttcggggagccgatttgggacgtggtcgatattctcgcccattttgacaatccgtacgtgatcgctctttcggtcattacgctttgcatcgccgccatttcggtaaacgttgcggcgaatattgtctcgcctgcctatgatctggccaattttttgccgaaatacatcgatttcaagcgaggcagctatttgacagcagttttggccctgttcacttttccatggaagctgatggagaatgaagcgagtgtgttttcgtttctcggcacgatcggcggaatattgggcccggtcgcaggcgttatgctcgccgattatttcatcatccggaagcgcaccctctgcctcgaagatctctattccgcaaaaggacagtatatgtattataaaggctataattacagggcttttgctgcggtagctctcggagcgcttatatctctcatcggctcttacatccccgccatgaagccgctttatgacatctcctggttttcgggcgtgctgatcgctgccttcgcctatatctttttaatgcgcatccatccgccggctgccatttcaaatgaaacggctcaatacgaaggcggcggaagaaaaataagcgggtaatatcgaaaaaagatttttcgctagtgaaaaatgccttttcttcttacctctttttttcaaaggcagcttatgatagactcatattatcaaaaattttccactggtcgatggagagcaatgatgcaaacgggcgccgagttcgacggacaggccttttggatcacgtcgcctgcggtggcaacatttcatgaaaaacacctgcgggaggaatactttatgaatccgatactgctcgattttccggacagcttcgaaacagagcgcctgctgatcagagcaccgcgcgccggtgacggcaaggcagtatatgatgctattgcagcttcgttttcagaactaaagccgtggatgccgtttgcaagggagatccccgaggaagagcgtgtagaaatcaacgtcaggcgggcacaggccgattttattttgcgcaacgatttgcggatgcatattttccataaagaaacgggaaaattcgtcggcagcaccggtcttcaccgcatggactggaaagcgaaacggtttgaaatcggctattggcgcagttccgaattttccggacaagggtacatgacagaagcgcttaacggtctcattgatttcgcgagaagacacgtcagagccaagcggcttgagatatgttgtgacagcatgaacacgaaaagcagaaaaatggcggagcgcctcggtttcgagcttgaagccgttttacaaagcgatgacctttcgaacgatttgagcgaatatcgggacacatgcatttattcccgcatcttctaaaaaaagaacccttatgatcttcatgaagcaaatcataagggttctttcgtttatgtttcatatgcagctttgcaagctcttcccgcctgcttttcgtttttctgacgtgcgtgccgaagtccggcgccttgcctcttgatgcggcggcatctctgcctgtgtttctcaacatgtgctcgcgctttttccttgccttgcttttggccatgttccccactctcctgtcaaatttttacctcactattatagaaaggcggggttctaaacgcaagtcatacggcttcttccgttctgaccatatccacatgcggaatgccgtcctccatatagacgtctgagattgctttaaatccgaaggagccgtaaaaggaacgcaaatgattctgggcgctgatcttgacctttgtctcttcccactcgccttccaaaaagcggatcgctttatcaagaagcgcctgcgcatatccctttcccctgtcttctttgcggacgatcacccggccgattgatgcctcggggtatgctgtgccgctcgggaacagcctgcaatacgcagcgatctctccttcttggctcagaaataaatggtgcgcccgctcatccaagtgatcaagctcgtgatacggacagttttgttcaacgataaagacgtctattctgagcttgatgatgcgatacagctcttccttcgacaattcctcatacgattttagtttccactccatccctgttctctaaagccccctttagctctgcacttttccataggttccgccgcctccggctttcagctctaaatccccgttccttgctttgatcacgagctctgccgtctgcggacgaatggtttcttttagatcgccttcttttacacggtgaagtatattcatttcagtgccgaaagcctctttcagcttctgaatcgttttcgggccgatgccggggatcagctgcagcggaacctggtgaacgtatggcgggcgcttgaccgggctttcatcctgatcataaagctccattagacgcgtgctgacgccttttgtaaactttcggctgccgcacgctttgcacaacgtttcatctgcctcctgcagacggccgcatgtttcacaagcggtttgaaaatatttgcccagctgcggattcatcccgtaattcgcggcaatgctacgcccctcttgtccttttaaagcaagcgaaaactcttgaaagctggcatgtttgatgtgcagcttattatactccctgccgatttttccaagagaatgggcgtccgaattggtcaaaaatgcataaggattcagttcggatacgtgtgaagccatatcggtgtcgctgctcagcccgagttcaaccgcatcaatcatcctcgggtcaaacacttctttcagcgaaaattcgactccttttccgtacaggctcttgtgcggcgtaaaaatgtgcgcgggaatgaacaggccgccgagctctttcaccttccgctgaagaccgatgcccgtttcatagatgcgctgggagctcaggtggatattcgtcaccctttctgagagccagccggaaaactgcttcattgcggagatcgacggcataaaggcaagcacatgaatcgggccgcggcatctgtcatcattgatttccaattcagacccgcataaaagcacggtatctttatacttgattccgccgtcttcaagctctgtataacgccctgaagacacccctttttcaatttcggccagcacctcggatgaatgacaatctataatgccgatcagttccatccctttatgttcgcttgcttcaatcaaaatttcgtcgagcgttagcgttctggcagccgttatcttaacgggccggcctgattccgtccgcccgatatggatatgcatgtctgcgaatatttctttcatttttttgcttgcagggcctttctcagctccagatactgcacggcataagccgttttcgcatcatagatgtcctgagtttccatcagtttcagcgcgcctgaaagcggcacctccagtacttcaacaaattcgtcttcatcaagttcgcgcttttcttcaagcggcgtcagctcttcagccaggtacagatgcaccagttcgtccgcaaagcccggcgatgtgtaaaaagcggtgattttctcaagcttcgccgccgtgtatcccgtctcttcctcaagctcccgcagcgcggtatattcgggtttctcccctttttcaagcttgcccgccggtatttcaacgatcgtccgttcaagcgcttttctgtactgcttaactaagatgatgttttcttcatcagttaaagcaagcaccgctacagcgcccggatgcttcacgatttcgcgctttcccgttttaccgttcggcagttcgacatcttcaagataaagatcgatcaccttgcctgaaaaaagcttttcctttgatatggttttctcctctaaatgcttcagtttgatcatctcctaagttctgctctggctttagatcccatacattttatcatacaccatgaaagggggacgcgccatgaaggtctaccgcctgaatgaccgcatcgtcatgtctgggaaagcatgggaaatccgcgccaagctgaaggaatacggacgaacgcatcactatgtgaaagattggctttctgaaaaagaaaatcgcctgcaaaagcttaattttattgacatcaagaaggactgcatgaaataatacttgtgagtaatgttactcacaagtattattatttggaggcggatggatgtgggaattgaaaagggccgcaaaggcaaacaaagccggaagcggctgctcgaggtcgctgcaaacgaatttgcaaaccggggattccatgagacaaaagtgagtacgattgtgaaaagagctggactgactcagccttctttctacctatatttcccaagcaaggacgccatctatgacgagctgatcaatggctttcacgcgaacttaaaaaatctgatcgaatcgttccatttagagaaaggaatcgagaaaaaacacgtatcaaaacgggtaacggccgctgtagaggctgtatttcgatttttggcagaggacccggatttgactcgcatcggtttttttctcagccctgaagcaggcgaaatgaaaaaagatttaacgctcgccttgaaagaaaacttgaaagcagagcaggagctcggctacttccgatccgacctggaaatggagaccgttgctgaatgtctgacaggcatgattgagcaccttgccgatatctatttgcttgacggatcaaaggacccctcaagtctcgcaaaacaaatcacggatcttttgatccacggaatgctcgtaaatccgcagcatccagaaacggagtgaacacagtggcatttattttcttaaaagcagggctggcggcatttatgctgaccggaggcgtaatcaaggtgctgcacgttccttttcaagtcgaacattggcgccattatgaatatccgctgtggtttctttctgttacaggatgtctcgaaatcgccggagcgcttggcatgatcggcggaatttggaatgtgcatctggctgtcggttcggggctgttattctccctgcttatgacaggagccatccatgcccacctggtccgggcgcggcagccttttttcacggccatccctgccgcggtttgtttgatttgcgccctaagcatgatcatcgtcgagctgtacttctgatcccgatgccgatgggttgaaaacttcgctcctttgtattacggtcaaagtaagaaaaaaaggagtgaggcttatgaaaaaaaggacgctcggacattccgatttacaggtgagtgaagtcggcctaggctgcatgtctctcggaacggacaaaaagcacgcactgtcaattctggatgaagctttggaactcggcatcaattacttggatactgccgacctgtacgattttggacgcaacgaagaaattgtcggtgaagcgatcaaatcaaggcgccaagatgtcatcctcgccacaaaagcgggaaaccgctgggaggaaggaaaaccgggctggttctgggatccccggaaagcatacataaaagaagccgtcaaacgcagcttaaagcggctgcaaaccgactatatcgatctttatcagctgcatggcggaacgatcgaagataacatcgacgaaacgattgaggcctttgaagagttaaaacaggaaggcgtcatccgccattacggcatttcctcgatccggccgaacgtcataaaggaatacgtcaaaaaatcaaacatcgtcacagtcatgatgcaatacagcttgttggacagacggcctgaggaatggctttctctccttgaagaacatggaatcagcgtgattgcaagaggacctctggcaaaagggattctgacagaaaaacccctgtcagatgcaaacgcatcgattaagaaaagcggctatttatcatattcctacgatgaactcatcaaaacaaaggcggacattgaaaaaacagcgcctgatttatccgcaaccgaaaccgcgctgaagtatattctcgcccagccggctgtcggcgcggtcatccccggggcgagcaaactctcccagcttcgggaaaacgttgaatctgtcggcggacgcagcctgacagaacaggaaatcaaagcgctccgcttttatacaaaacgcgacgtgtacactgcgcatcgcgaatgaattcaataagaaagcaccgtctctttggcagacggtgcttctttacttatacttcctccagtcgtcaagtccgctttcgttgaggagttcttcaaagcttttatttttttccctttcctgtctttccttgataagccgttctttctcacgctcttttcttttctcgtcctcctctttcaattcgcttttcatttgctgaagcttatgtttcaaatcgtcggcgagtgcatctttcagcagctgccgggtatttgggtcttgttttttctttcccatttcctgtcctccgttctccctgtttgtgatgatagtttatcaggaatctaaaagttcaggcaagccgtcactctgggagccgcccccctcggcaaatctcaatggttgtgtggtatgataaagagagaagcatttaagaaaggaagaatacaacaaatgttgatttggctggctgctatcggagcggttttgctgttcattgctgcgctcggaatctattttacgaatcaaatcatgtacattaaaaaacggaccgaccaatacattattgagcgggaaactgccgacggccattatgacgaaaaagctttcgccgctctcccgaaggaagaaatcaccctcgcttcttcttacggctacaatattaaagggtactacgtgcacccgcacaaaacgaaaaacaccgtgattatctgccacggagtgacgatgaatctgctgaattcaatcaaatatatgaatctgtttctggatctcggctggaacgccgtcatatatgaccacagaaggcacggcgcaagcggcggaaaaacgacgagctacggatattatgaaaaaaacgatttgaaaacggttgtcaattggctgagggaaaaacacggcgaacaagcgctgatcgggattcacggcgaatcgatgggcgctgtcacaacccttctttacgcgggaatggatgacgccgaggctgatttttatgtggccgactgtccgtttgccacatttgaggatcagctcatttaccggctgaaagaagattttcatcttccaggagctttcattttgccgctcgccagcctctttttgagatggcgggacggctaccgcatccgtgatgtctcccctttatccgtcgtcggaaagatcaaaaaaccggtgctgttcattcacagcaagcacgacgactatatcccggctgaatcaagcgaaatgctttacgagaaaaaaccggggaagaaacggctttatattgctgaaagaggagcgcacgcaatgagctacacccaaaacagaaacagctacaaaaacacggtgcgggactttcttcaagaaatcacaaaccggcacaaagaaggcgaacgagcataagtctcgtccgccttcttttggtgctacaggatatctgtaatgtcgctcatatgatcgccgatccaggagatggccgtctcaattgtatcaaattcctttgtttcaaaggtcatttcatcctgaagaagccagacatcctttttgacggactctgtccctccgattgaccaatgaaggagtgtatacggatgattttgatgtaaaaaggacgcccatgttttattttgagcggtttgctttaaagattttgccttttgattcaaatcgaacgccaccctatttcactaaaatactcattctgggagaaagcacctgtgccggactcttcagcatcaacgcacccgctttctcataatagtcgatggtcatcgcttcatcaaaaaagactttttgcgatgactgaatataaatcggaagcccgtttgtctcaaggggctcgcaacttcccgataattcgtccgtcagccacaagaccggcacaccgctgaccgcgcatccgcatccctcggaatcatagcggagctggatctttttatcaggataaggctctgttgcccgttgaatggcttgtcttgcctgagcagtgatttcaagctgcatgatatcatccttctttgttatgtttacggacattgtaccacgggtcgggaaaaagcgcatcgtttccggctgtcaggcataaatatgaagggattcggaggtggaatgatgtccaaaaaagtgcagattaaagtgatggacaacggcggtttccgggtcacgggagacgtcgaactgatcgacatggaaggaaattctttccctgaaaaaccggctttttcgctgtgcagatgcggaaaatcgctgaaaatgccttactgtgacggaagccataaaggaatgttcgactcttgtgtcagagcttgaagcaggaggggggctttatctgtcctcctccgccttttcccattgttcagccaagcgctcagtctcttttatccagccgcttttgccgtcaatatagcctgctatgtcaagcggaaacatctccgccagcttcatcttcagtgcagcatattcttcggcccgctccggatgggagattaaataatcccgaaacgcgagatgccgtctgatatcgggatgcccgctttcatacagatggacatggtgtgtacgcttccgtctccctttttgatagaatcttcttcccggaattccgttttcccccttcggttcatagccgagcattttcatccccttttcgaagccggcggcggagccgagatctttcacttcgatcagtatgtcaatgataggcttggcgctcattcccggaattgacgtgcttccgatgtggtgaatatgcaagacttcattccggaaaagcgcttcaagctgctttttttccttgaaaaattcgcccttccattcttctttataggagacgactttaacctttctcggtgcttgcagcgtaagccttgaaagaacaacccctttttcaggttcatactgttcaatttcagaaaaccccaatttccgatacagcgcttttgccggctcattccccgcacccgtcgtcacttcaaacgattcggcttccttcaccatcaatatataacgaagcagcgccattgcaatcccctttcgaaaatggaccggatgaacggccagcctgcagatcgtcagcttttcagctgtatgtatgaaggaagcgattccggctaattcttccccctcaaacgagccgatgaaagtttctcgtgaatccattacatcaaaaaccgtttcattcagctgcggaatgccctgaaattgaatgatctccgcttctctttcataagccggcctttgaacatttacaatgctgcgggctgtatgcggatctttttggtttaacaattgaatcattgcatttcctccccgctggtgccatctgacgggggccggccggaacgctccgaaattcttgcgtcttcaacttttgcaatccgtacggcaaagtcagagtaccattctgttcggcctttttccttcgcctgccggtgttcgccgtgaaacttccatttttcaatcgcttcaaggctttcccaataggagaccgttattccctttccgttcatgtcccttgcgctttctgctcctaaaaagccgggctgttctgcggcaagctttagcatgttctcagccgtctctttgtagccgttatccccattcgttctgaccgatgtgaaaatcaccgcgtaatacggcggctccggcgtttttgaaatcatattcatccccctttgattcacagctctttgataaccagaacttactcctgatccgttctgccatcattcgaaaaccttggacacttttttccatcgaaaatccctggtgataaccaatcggcacattgttgacatgcagcggaccgctttgcagccggcacacgctgcacatgagagagaagcttcaaagcccatgttttcatcaagatccacccgctcttttcaacattgtacctgaccatccgccaaagtgttctgcagtattggatatgcttccttattataccgtttcccaatcctaatttaccattttaatacgtcagtagattaataggaaaaattccttagttccaattcaacagcacaaaccgatttgctttctcccagaaaagcttcactctccttaccctataagagaaccggcgcgcagcggaaaaaaacgtttcatatactgctcttttttcgggtatgaaaaatagataaaattacacttcgttttcatattttcgttttatagaattgtcgttgttgtgaacttattacttttttaggaggaaaaactatgcgtcgtcattcatttttatctattctattgatttgcatgctgtctgttgtgtccgtattttcattccggccttcagcagcttccgccgcttcccacaatccggtcgtcatggtccacggcatcggcggagccgattataacttcatcggcattaaatcgtatttacaatctcaaggctggacaagcagtgagctttacgccatcaactttatcgataaaacgggaaataatataaacaatgctccgagattatccgaatacatcaagcgtgtgctgaatcaaacaggagcatcaaaagtcgatattgtcgcccacagcatgggcggggccaatacgctctattatattaaaaatctggatggtgcggataaagtcggacatgtcgtcacccttgggggcgctaatcgtctcgttacaaacacggcgcctcagaatgacaaaatctcatacacttcgatttacagcacaagcgactatatcgtcttaaacagcctctccaaacttgatggtgcaaacaatgtgcaaatctcaggcgtaagccatgtcggtcttttgttcagcagcaaagtaaatgccttgattaaagacgggctgaccgccagcgggaaataagattgaaggagccttgaagagcttaacttcttcaaggctcctcattgatcggaattgtcacccctcttgccaaaataaaaaggactctaaataaacgcctattccgaccgttcattcagtgtccgtcaaccccctcgatatgtgattactccactatgatttcaaagactctttgttcgagattgtatttagcgtcttggaatgtaaatttataatcatctgtgtcggcatcaggtgaaagccaagctccgtattttctgatcgtctggacgatgctttcgagttcagcaggagtgaagtcacctatgtctgtgccttcggtttcagcagtatggcgtatttttactgtaatcatcatcactttttggctcctttcacttgctgtttgaacatcttattaacagcatatttttttcctctgtaaatcgttccattaactcccttgattcaaattattcgggctttcttttttacagacctattttatatggaaaagccggacgggatccgaaaaatgtgtcttcgtactttcgtcatataaaggcaaatattcctgtttacaacaatgagaatatcccctatgattatgaggtaaatcgaaatcattactacttggaggtataacttatggcttacatagcaaaacgcatgatcataccgattatttttctcttcattctcgcttcctgctccgccggaggcgctggctcagcgaaaggggaagagaagaaactcacctttcttttcaatattccgagtcaaacccttgacccgaatcttgatgtcaattatacggctatccgcgccggcatcagtgaaacactcgtcaaaatcagtgcggacctttccatcgaaccgtggcttgccaaagattggaaaagcaaagacggacaaacttgggtcttcacccttaaagacaatctgacgtttcaaaatggtaaaaaagcggatgccaaagcggtaaaagcgtctttagaacggacgatgcgcgagagtaaagccatgaagaacgccctaaaaatcaaggaaataaaggctgaaggacaaacattgacgattacaacgaaggagccgtttcccgaattcccttcagaattggttcatccaaacacatcgatcattgacgtcagcgcagcaaacatttctcaacagcccgtcggaacgggacctttccaagtttcctcttttgaggccggccataaaatagagttagaacggtatgacgattattgggacggcaaaccgaagctgaagcacgtcacattctcgtttaatgaagacgcaaacgcccgcgtcatggctctccaatcaaaagatgccgatatcatttacagaccgagcgttgaggatattgaccaaattcaaaaagattcgtcgattaccgttgattcggtaccgagcttgcgcgttcaccagattctttacaatacaaagaaggatcatcttgctgaccgccacctgcgccgcgccttcgacgcactactgaaccgcaaagaaatcgctgaaagcattttgaacggacatgctcagccggcagacggccccttcctagccgatttcccattttcctccgatacggttcaaaagccgagcggacttcaggctgcaaaagctgagctgaaaaaagccggctacgagcttgaaaacggtaaagccgtaaaggacggaaaagccttgtcttttacactgctaacctatcagtctcgtccggaattgcctttaatcgcgcaaattcttgaatcaaatgcgaaggaattgggcatttcgattaagattcagcaagtcgaaaatattgatgaatatttggcgaaaaacgatgactgggatttagcgacatacagctcaatgaccgcgccaagaggcgatgccagctatttgctgaacaccgcctatatgccgaacggcgctttaaactacagcggcatcgaaaatcaaaccttgatcaaatggattaaggaattcaaccgcacgatcgacaaagagaagcggaaccgacttgccaaaaaagcagctgaattgatcgagaaggagacattgaactcttttatcgtgactcccgaaaacatcacagcctaccgagacggtgtattaaattgggaaacgagcaaaagtgagtattatatgctgacgaaagatttggatgtgaaaacgaaatgaagcagatcgccaagcggctgtttgaactggtcctgttcttattcctgctttcatttatcagctttgtgtttatgaaagcggctcccggtgatccggtgaaacagatgcttcgcgtagatgatgttgcggtaacggacgagcagatcgaggcattcagagaggagctcggtttggacaaaccggtttatattcaatattggaactggttcaagcgctttttccaatttgatttgggaaaatcctatacaacacacgaacccgtcatcgacgagctcagccggaaattcccggcgacattgcttctaaccggcgcatcgcttctcgttatgctgctgattgccgtgccggtcggaacgctttccgctttataccgggatcggtggatcgatcatctcagccgcttgctcgctttagtgggagccgcgctcccgagcttttggctcggattgatactgatcgatctcttttccgtcaggctgaattggctgccgtcgatgggagccggaacgtttaaacatttgattctcccctctctcacgcttgggatcgcgatgtcgggcgtttatgtccgccttgtacggtcaagcctgatcgaaagccttggtcaggatttcatcagatctgccagggcacgcggcatcagcgaggcgagaattttcttctttcacgcgtttcgccattgtcttgtccctgtcatcacgatattcggggtcagcctcggcagcctgctcggcggcacggtgattattgaagtcctgtttgcatatcccggcgtcggcaagcttgtcgttgatgccatcgttcagcgtgattatccgatcattcaggggtacattcttttcatggggatcgcggttgtcctgatcaatcttttagtcgacctctcttatcggtacctcaatccggaaattcgcttaaaggaggctggtcgccgatgagaaaaaacgtatttcgatctaaaacaggactatggtttgtgctgctgttttccgcggcgctgttcaccgtccccttctttttgccgttcgatccgctccgcacagatatggccaaccgtcttcagccgatcagtatgcagcattggctcggaaccgaccatttgggcagagatatattttcccggatggtcgccggtgcgaaagcgacggtcggcaccgccttgggcgcgattctgatttccgttttcataggtgttcctgtcgggcttgtctccgggtttttcggcggacggctggaccggatgatgatgagaattgttgacgcggttatggcttttccggactatattgtcgcgattgttttaagcggtttgcttggtccggggctgatgaacttaatattggccgtcgtcgctgtcaaatgggtcggctatgcaaggctggtccgcagcacggttttttcggaaaaacaaaaagattacatcgccttggccgagcttaccggtttaagctccggggcgattttaaaaaagcacctgctgccccatgttctcggcaacctttccgtacttgcgacacttgatatcggaaaaacggtgttaatgattgctgccctgtcctatatcggcctgggtgctcagcctccatacccggaatggggcgccatgctgaacgacggaaaacattacttcttgcatgcgcctcagcttatggtgattcccggtcttgcgatcatgttcatcgttctgttgtccaacctgtacggtgatcgtttaagggacaggtttgacgtcaaacacaagaaaggagtttcttagcatgccgatgttatccattgaggacttatcaatcagctcccggcagcacaccattgtcaaaaatgcctccttctcgattcatggaggggaatggttcgcgctgctcggggaaagcggcagcggaaagagcctgaccgcttcggccatagccgggctgcttccggacggactaacggtgaccggcggagacgtgatatttgaaggccaacagatgcttcaagccggacgcaaagcactccgacgcgtgcgcggaaaggatatcgcctgtatttttcaggactgtcacggagcattcaccccttttatacggatcggcaaacaaattgacgaaatggtcaaaacgcatacaggttggtctaagaataagcgaagagaagcgattctccatgcttttcgggaggtttctctgccggaaaacagagtatatgaaagctacccgtttcaattgagcggagggcagctgcaaagggccgcgattgctcaagcgatggtgctccgccccaagcttctcatcgcagacgaaccgacgacggctttagacagcatcacggccgcggacgtcttgcaacagctcgccgcgatgcgcgccaaaacaaactgcgccatcctttttatcactcatgacctgcggcttgtcaaaagatacgccgatcaaaccgccgtcatgcaaaacggagaaatcgtcgaaagcggcttaaccgctgatttaattagacagccggcacatgaatatacgaggtgtttattcgcggccatcccgccgctgaaaaatcctccgccaaggctgacggcagccccgcctgaaacaaaggaagcggtgctggcgggaacaggaggtgcgtgatgacccattctgcagagaccgttctttttgtcagcaatctgacaaaacattacgcttgcggccacaaagcggttgacaacgtatcattctccattcgaaaaggcgaatgcctcgggctcgccggcgagagcggcagcgggaaaagcaccctcgcacgctgccttttgctgctcgaaaaaatcgatcacggagagattaggcttcatcaacatccgcttaccggcataaacaaaaaagagacccggagactgcgtcgaaaactgcaggctgttttccaaaatccagctgcatcattcaatccaaagctcaatattatcgattcagttatggagccgcttgatgtttccaaacaagacatgccgtcatttttaagggacttccgaggcagccgccgtctgacggctgagcgtctgttctcaatggtcggccttccctcgcgcctccttgaccgctatccgcacgaattaagcggcgggcagcgccagcgggccttgatcgccagagccatcagcactcatccgtctttaatcatctttgatgagcctacagcaagcctggatgtcaccagtcaggcgaagatcctggatcttctcaaagatttgcaggatgctatgggcctttcttatttatttatttcccacgatctggccgctgtccacttcatgagccatcgcatcatggtcatgaaagacgggcagattgccgatcaatttgaaaaagaagagcttttttctgccgaaaggcacccatatgccaaaaagctgcttcaggtgtttgaatcctaaggggggtcttaacagatgaatcacaagcaatatctagcactcgccgttccgctgatcatttcaacgatcaccactcctttattgggtgcggtcgatacggcggtcgccggccagctttcctcccctgcttacatcggcggtgttgcagtcggaacgatgatttttaatacgatgtattggctcctcggttttttgcgggtaagcacatccggattcgccgctcagtcactcggctcccaaaacagatcagagagcgttttggcccttgcccggcccgtttgcatcgcgctgtttgccggactgatgttcatcatcttgcaaaaaccgcttgaatacgcagcgctgacgctcatacagcccgaccgccataccgctgaattcgcctcgcagtatttttcgctgaggatttggggagctccatttgctttaatcagctattgcattctcggctggctgatgggaatgtctctaatcaaagtgacattgcttttgcagatttcgatgaacgtcttgaatatcgtgcttgacatcgtttttgtctacgtctttcacatggaagtatacggcatcgctctagccactttgatttcggatgtgacgggctgcctgatcggctgctggcttgtgaaaacgaatgccgccatgccgtttaagctgccgtccgtcaagcttttattcgacccgaaaccgtttaaaaaaatgatggttgtcaaccgagatctattgattcggacattgtgccttttgacggttttcaatttatttacggctaaaggagccggcttcggcgctgaaattttagccgcaaatgcgatcttgattcaaattcattatttgatggcttatgtttttgacgggtttgccaatgcatcgagcatctttgccgggaaagccgttggaagaatggatcgggatctctattcccgtacgctttccctttcgatccagtggtcgctgatctcggccgcgctgctttcagtcggctactttctcttgagaaatgcgatccttccattgtttacaccgcttgaaagcgttctggaagcagcgaaaacttacgatgtttggatcgctctttttcctttggccacaagtttcggactcgttttttacgggattttcacaggcgccaccgaaataggcccggtcagaaattcaatgtttttggctgttctcgtcttcctggccgccttttttaccgctgtccccgctttcggaaaccatgggctgtggctcgcttttcttttattcagccttgggcgttccgtattcttatgcatggctgttcccgggctgaccacccggcttttcggagagcgcagtgctgcgagagaggcaggccaaagaccgaaatcattaaaacaccccggctaagctttagccggggtgtttacgtttattctttcgttaattgtgcgacgaaatggttcagatgatccagcgtcatcaaattttgattgcatttttcactgtcacagcaaatgtaattgcctctgtccgtataggtttctttcccgcttttcacgcgggccatgaacagtccgatctcttcggtcctgttgcatatcgagcagattccttttttattgctggatttgatggtgccgtggattccggtcagctttccgccggcgtccacaatcatgtatttcctgcctgatcctgcatcgttccatcccaggtaggaatatccgctgaaatccatctgctcaaattcgggcgtctttaattttttcactttagagaacagctttttagcagtctttaccgttacattctgaaatggaatcacatgaagttttaattcagctaaaaagcgcaccgcttcaccgctgtcttccacttctgccagcttctccagcaaagacttttgatcgctgctgagatcaggaaacaggttgaacacttgatccagcgcattgcacttcaaagcgtcaaggacgttttcgtcattgatgttcgcatgtccctggacgaggctgtccgtttgaaacttaataaaattatattggtcatttctgataaaaggtgtcttcatttctgccagctccttatttatagatctatattttaaaataaggtgcaaagccggatgatcagaaatgataccttgctctgtcaggcgatttgtttataaccccgcctcatgcaaagtatcgcctttcaagataacaggctttgcatgagacgctgcagtcggcaaatgaatgtcatttaccattttatccacctccgaatactgattccattataaacgacaatcgtattcaatctcaatgatatcctctatctttaaaatgcaaatttcatccgcccggcttacgatccgcagctcccttttcagagcgtcagcatagtgaatccggccggcgagcgttttcacttccccctgccggtaataagcaaattgcaaaaacctgttttctgccatcgcttcacaaatgatttcattgaattcttcatatttttgttcatccaggatcggttttttgattttttgaaagctttcatgatattccctgagcaattccacgtgctcaggcagcatcatggaaacccatttgatactgcctctgtcgcgaagcataaatgattctcctttctatgcctgatggcctccgaccaattttgaccgcagacgggccgtcccggcgtttgtgtaggaaacggcccgcaaaagcgctgttgagccgtaccgttctctgatgccgtccatcacatacccgagctgccgcttcttttcctgatcggggcgaaaaagatcaagctgcatattggtgtcatcttgaatattggacaaagagacggaaattttccgaaccgttttgccggcataaaaccgctcgaacagtgccagacatgtatggtaaagatcaagcgtgacatttgaagggctttccattgtttttgaacggtaaaatccgccgccaagctcatcgcggctgtattcgatgccgagactgacggtccggcccgcctggcggtgggcgcgcgcccttttggccacttcctcacacatttcaagaatgacatgcttgacttcctccggattcggataatcgcgaagcagaatctggctttttccatagctgacctgcccctccatgagcggcgctccaatcgctgaaagatcgatgccccaagcgtgataatagagctggtttcccatcaccccgaatgttttctcaagccgactgagatcatagtgcgccagctggccgactgtaaaaatccccatccggtttaacgtcttttccagcctggagccgattccccacatgcggcgcagcggagacagcggccacagcttcgttttcacgtcttcgtagccccaaacggccaccccgcctgctgattttttcgcttcaaggtcaaggcacagctttgccatcagcagattcggtccgattccgacagcacagggaaggccaaactccctttccatatcatcttgaattttcatcgcaatcgttcgggcgtctccccacatgctttcaacaccgtccacctgaataaagctttcatccacgctgtacgtatgaatggcatcaggcggcacatagcggcagaacagccgggtgagctctgtagaaacacggacaaacagccccatcttcggattgaccagcttgatgcgcggatcatccggcagctgataaagccttgttcccgtttgaacgccgaactctcttttcagagccggagaagcagcgagaacgatgcttccctgccgctccgtgtttccgacaaccgccaagaagcaagtcatcgggtcaagtccgagcaggactgcggcgcagcttgcataaaagctccgcatatcaacgcacaaaaccgaacgcgacggatattgactgtaatccatactctccctccagaagaactgatgttcgcacaattagtgtatgaatactatacttcgaatatacgttcgatttccaggcgtaattttatccaaagaaaatcctggcggaaagcaataaaaaacaccttctttggaaagaaggtgacatggttgaccattccagttcggaatttcgccttattcagtttgatgattcaaattgaatgctctcttgagaacatcagtttttcttagtaagataaaagaaaaagcgctcctaaaggagaagacaaatggatgagaaactgattgaaaaaatgctcggacaggcgctgaagcagtacggacgcaatgttgcaaccgatccgctcagccccggcgaaaaaaaaatcctgaagctggctttgcaggaaaggcggatcgaggagccgaatgaagggctgcatgcccatatcgaggatgtcatctatgattatgtcacaaatcaaggcttgttctcatcataaaacgatttttctttgcggcttcctttgtacaggaagccttttatcacccagcatttagaaattcctctattcaccgccatctgtttcatgtatgataaacaaataaaaacgtaacggagagtttatcatgaaacaaaaatggcagaacatccacccgctcagctggaccattattgtcggaaccattttcggacgcatgggaacagccatgagcatcccttttttagcaatttatttgacacaagtgaaaggcgcctcttccggctttgcgggagctgtcattgcagcgagctctctgatcggaattgcggcaagcttttatggcgggtacttatcagacaggttcggccggaaaaccatcatgctcgtctcgattttcggctggacgttcgtgttcgccggttttgcactcgccgatcatgtctggacattctttatcatgaatgccttaaacggattatgccgcgctttgtttgaaccgacttcaagagcgctgctttcagacgtttccaaacccgaaacgcgccttttcgtctttaatctccgctataccgcgatcaacctcggcgtcgtcttcggcccgcttttaggcctgtatctcggatcttccaaaacgacgctgccgtttttcattgcggctttcatttattttatttatgcggcggtgctggtcattcaatttaaacaccacaccgtaccggcagctgagcgtaataagcgtataaaagtgcgggacgcgctggaggtgacaaaaacagaccgggtatttacgattacgctaatcggttcgattctttgtttgttcggatattcccacttcacatcgacgcttgcacaatacatggcggccagcccgttcattgaagacgggacgaaagtgttcggcatgatgctgacgctgaatgccttggccgttcttgccgtacagtacccgatcgtacatatcgccaaacggttttcaccgattttatcgctgattgcaggaaatgtgctgattagtggaagcctgttcagcctctcttttttcaatgatctatggtccattgtcttgatcattatcgtgtttacgatcggggaggtgcttctcttttcgatgatggatttactggtcgaccggattgcccggcctgagctgaaaggcacttactttggggctatgggcttcacccagcttggaagcgtggtcggcccttgggcggggggaatgctgctggacacctttggagcggaaaaaccgtttttcacttttgcaatcctgtctgctgccaccatttgcggcgttcctttcctggtagcagcctaccggaaactcaaaatggatgaagcaaaagtcaatttaagttcgaaaaaaacgatgcagcattaattgaaaacaggccggctcgaacaaaggccggccttcggctgccgcccgcctcaaggggcagcaagttcaactttgatgcggtccggatcttcggtatacaaggcataatgcccgtttccgccggcaaacggatgtctgtcttcatataaaatgcggcatccccgctctctcagtttcattgtcatttcgtcgacctgctctttggatgccgcgtaaaaagcaagatggtttaagccgacgcggcacctgtgataacccgctttgataaactgctctttcgcctgcacaagcacgagataggcgccgtttgctttccagctgatgccgccttcccattgttgaaaaacctcatagccgagctccccgagaaaccagccccaaaagcgcttcgacgcttccaaatctgaaacgtacagttcaatatgatggatcatgcaagcctcctcttctatacccgtctgaccaaaatctcttccaccttgtggccttcgccttttctcaagattaaatcagaccggaattttgtaggcagaatgttctcatacaaattcggacggttgacggtctcccatattgactttgccatatggtccgcttcttcgtccgcgaggtctttgaatttatggaaataagaactcggatcttgaaaagccgtctccctgagcatgcgaaagcgttcaagataccatttgataatgaggtcttcttcggcatccacataaatcgagaagtcaaaaaaatcggaaacgaaaacccgcggttttgtacggtcgtcttcgatcgtcggtgtctgcagcacattaacgccttcgatgatcacgatatccgcttgttctaccgtttcataaaccccttccaatctgtcatacgttagatgggaataaacgggtgcgtggacaatttcctttcctgattttaaatcgttcaaaaactcaagcagcgctttgacatcatagctttcgggaaaccctttcctcgacatcatctgcttttctgtcagaaccgaattaggataaagaaaaccgtcggttgtgatcagactgactttcagccgttcctgcaaacgggagagcacagtctgaatgatgcgggccgtcgtgctttttccaaccgcgacgcttccggcaatcccgatgataaacggaatcttggccgcgtgaggatgattcaaaaaaccgtttacccgggtgttccgttcaaattgagttgcccggtgtaaataaagcagcctcgccagcggaacataaacggtttcgacttcttccaaagacagatagtcatttaaaccttcaagcttctttacttcctcttcggtcatctttaccgacatatgcccgccgagatttgcccaggcatcacgggtatgactcgtatataacgtgtgcaaattcaaatcctgattcgccactattctcacctgccctctgttcaaacgctgtttacttaaaaaagtgcatgaattctgagaccgctttattattatatagaatttttcgaatatttactaggaacaaggtttcaatcaaaaaaaccgtcttcctccagagacgggtgggtccggtttccttgcatggcggatgcgaatggctctccttcctgtcaaccctgagccaacgggtgtccttcgtttgcaaaagaaaaaagagcgcaggcgcccgcactcttttttcaaacgacatatttgctttgcctgtgcgccatgtaataagtgaccgcagacagcaagccgacggatgcggctaaaatgatgatgaccggaatcatgtccaccttcaccggtgtaaacagtttaaagccgccgctgaaactgaaaaccgcatgcccgagattagacagcaggttttttaaatcgaacctgcccaaagcagggatcagcaggctgtaaacgacataaagcaaagcaggcgtaataaagcttctgaagaggacgcccaaataaaatccgatcgtcgaaaagatgaagctgaccgccagaacgacagcgagctgaagcaggatattgctttttgaaacagcgggtattgtgaactcgccgaccggtatatcccttgaagcaagggaataaaagacgaggcttgacacatatgccgtacatacaacggcgatcacggcggcagccatcaccatgtaaaccgaacactgtttggcaaacagaacggatttccaatcatggctgaccgctttcactttcatcgtcttgaatctgatgtcgtatgaggagatatagatggcatacagcgtgaaacccaagggaaaaatgatgaagcccatcagctcaagcgtcatagtgactgactgtttcggctccaggtgatggagggacaagacgaaattctcatagtcgaaccttaaaatattttcgacgatctctccgtcgccatcctcgcttttcagctcaccttccttcaccttgacgggcgactccagcgcctgcttaatatcgatgccgagttctttatattcattttcagtctttttgaactgctggtagctgtccattgtatttttatagtgaacatatatgtatccggatgaaatgaataatagaggaagcaataaaatgatgagcaatttagaatacgattgaaatgcaagctctttcttgaaaatattataaatattctttatagacatcgcccaattctgctccattcgttttaaaattgtctatgtggatagctgaaccgtctttcaacacgtataattgatcgacgattgaagaataaaactcaaactgatggccggcggcaacaatcgtcatcctgcttgaccagtcattgatgagctcctgaagctccatcatggaccggtagtcaagcccgtttgatatctcatccaaaaacaagaatgacggtttgtttaatgcagcgatcattaaggccagctttttcttttgtccgtatgaataggtcttgaccttttttttcagcagctccctgccgagaaacttttgcgacaattgttcaagctcttctttgccggcaggtttattgatcagtagtttgatattttgatagccgctcagatgatcgtaaaacggggaatcgtcatagatgacgtggactttgctcctgactgcttcaagcggctcgccgtcgtacagtatgccgccttcgaaaggttcaagcttgagcaggcatttcaagagcgtcgtttttccggcgccgttttctcccatcagaaaggtgactttgtttttttcaatattcatgttgagacggttgaataccgatttgcttccataagatttcgtcaggtcatcgattttgatcaatttgaaaaatcctttctcgcatcaggatggtgttgcaacattctccattatacaacgctgccattaatttctaaatagtcttttagcagcgttgtatgaaatggcttatagtaaattaatcgtttccgtattttccttttttattgacccaccttctgtctgtaaaggttgagctggccaattcaacatctccccacggtgtaacggttccgaagctcagcgtttttttcgctctccatttgtgaagccctgatgacttataataccttttaatcccctttgccctcaccacattcggaaagacgtagccgacatcctgcgatccgctgcttttcgatacttttttgccgttgtagtaccagtcgatataatcttttgaccaggcgaggaagcttcctcttttaattgtcagcctttttcctgcataagccgtcacaccgctttgaacggatgcctgttcaggaagtgattgaacgtattctgtcttggcttcaagcagttccttttgctcgcttgtcagctgcccgtccccagcagccgcagcgaatgaggatggaaccaggagcgccgcagacaaagaaaaccctaaaatcgcttttttcatttcgtttccctccgtgtttttgaaatatttgtatgtacgtcttcagctgccatccataagctactgccacatccaaaacaatttaaggtccgagttctcttattttaatggatgaaaaaatagattcctagcaaaatggaccatttcatcgttacctattggaaactatcccctcctccctctcgtaaaattataacatattttcccttatcttcaatcaaattctcttattttaccattttaccgagggtattcttaggcgaacacctattacctctgattaaaatgtaaatttgtgtattatttttgaattttattgaatttctacacaattagacatttttttctccagccgagtgataggatgtacatgcctatgatgtcataggcaaaaaaacaatctttaggaggtcgttagggatgtttcaaaacaaaatcaaaaaagcagtcggagcggttgcatctgcaggtgctttgttagtgtctggattgcccgtaagtgcggatacactgcctgaattaatatgggtgagggacaagtatcccggtgcgcaatacgaatataaggtaataaatggcgagagatatgtcgatgtttacagagtaataaatggtaaaacagatgtcacacgcgaaaaatgtgaaacgatgtaccaagaccgctgctatgtcaaaaaataaacaacgtgcagctggcgtctgaaatatgaacatgcttcgatccgcttttggagaacagagcgtgaacgagcggctgattcttttacagacgcgggctttagagcgcaagcaagcgggaggcgttttgatgcgcctcccgctttccgttctgtgaatgtcgatcttttttaaaagtcaacaaccgctgcaatgaaactgtgttcccctctattcattggaaaaaggcattcctattaaacaaggcatcccaccgatcagaacgccttgttttttcaaataaattccttatattcatccttccggccactatcctttaaagccgttatcgagtacctcgatcatcgaagaagtcgtttttgcatggttttttgtttgctgcacaagcttgatgatgtcttggtatgcctgctgcgctccaagcaccagcaaaggaaccccgatcggatcgattttcagcctcctcgaaaataaaccgccgaatgtcatcgctattggcacagtcggagacgtgtttgaaaaaatgactttctcctgaagtttcccgtttttttcaaacagctcgagaacgcctcgcatggctggaatgacagcttttgacgatcctctgccgatcgtgtacacctggttgccttcttcatcaagtccgtgaaagattaattttcccatttccttcggacttaattgattaaaacagtcggtgcttaaaatttcgtttcttgttggttttctgctgaatgggagctttttcagatgataagcagcggcaagtgcagatgaatgagtgccgccgtaacaattgtatatatagatcaacctgctcaccctcttcatgtctttggttttaatgtggcccaaatatacaatgcttatttatacctcgtttccagaacttctttaacagctgagacatacgcttgaaacgtctcatttttagaacttgcccgcgtccacaggccgaactccgaaaaaaaagcctctcgttgaggcgtgctgatttccaattgaatgctttgacctgttttgcattgattattgatattttcaggatttcctcctgcaagccggtggctcgggctgaccagctccgccgaaaaacctttgttcagcagcgctctgacaatcgctttcgcccctcctgtatccgttccccccacaagcgtatgttcaacgatgtcatgatatccatgaaaagccagcacatagctgtgctctttgaccgctttgagggcctgaggttcatcaaaatgattgcttgtgatgtggagatcccagttttgcgagggtttgattccctcaaataaataagtggaataatcggcgctgaaggcgcggacaagttcactgacacctccttcgattcctccgccgtgcggtgaaagaatcaacagttcggtgcccatgtctgtgtattcgatttggtaatcttctccttctgtttcatgttcggcaagctcggcaaaattggcgtatttgtctgcggatgaagcgacgcttttcagcggaaattgaaagatgaccgttaagcaaatccccgtgactaaccagatgatgcaacgatttttcatcaatgggttccattcttcctgcaccgttaagaaactccttttatcgtgtattttgttgcgagtatcacgtgatatcatgtttcggccgggatgagagaatttcaataaatggtaaaatattactccttttcgtcacccagttgccattttatataagaagaacggcaaaacgaaagcgacctttaccttatttttcatcagcggccggcacgtgttcccggaagcacggaatctttcggcgtgacgtatttttatatcaattgcctcaggctggacaggtgccatcagatcaagcagcgcttaaagaaggaagcagaggttcgatgccgggttttgcagagggacaaagtctccctgtttttatatgatattttgagcctctctgcagggggcatcgctaaaaaaatgcaaacaaaaaaggaacggatgattccgttcctttcttcgagaaaccattattttttatagaaagcgcttcgacctgttcgttcaaccagcgaagggaaaagctggtagagtttgctgacgctgttcatccagcctggaagattgatttcgcgcttgttcgtcatcattgccgagacgattttcttagcaacccgatccggatctagcatccatctcccgacgctttttacataatcgccttttttatctgccgtcttgaaaaagtctgtttgaatcggtccaggattgaccgttgtcacgttgacccctgtttctgcaagctccattctcaagctgtttgaatatccgagcaccgcatgctttgttgccgcataaaggcttgacttgggcgtcgctattttgcccgcttgtgaagcgatattgataatatggcctttgtcttgcctgatcatatgcgggagtgccattttcgtgcaggcgatcagaccgaatacgttgacctcaaacatcgctttcatatcttcaagggaagcgtcaagcgcgctttcaaaaatgccgaaccccgcattattgacaagaatatcaaccggaccggcctcttgaaacgccgcttcaacttcatccgtccggctgacgtccaatacgattatacggcactttgcgccgattttatccgcgatgttttgcttcaaagcatcgaggcggtctcttctgcgcgcagccagaatgatctccgctccttcccctgcagcatgatatgcgatccgttcgccaagccctcctgaagctcctgtaatcatcactttgtgcgctttcaacttctgctccatgttcgtcacctactttgcataatagtaatcgattccatcggccgcatcaactccgatcctcccctgggattccagatcgtcaagctgcccaatcgtttctgacagtgttaagaacagctctttttcatagactgcagggaacagttttcgacatatctgataaggtgaatgcggtttttcagagaggatgcggtacacctcttcggctctgtttcgctgcttttccagccttttggcgacaagctcattcacttttgtgatttcctccccatggccgggataaatcatgtgaagcggaagctcctgcagcctgccgagagattccaggtaatccagcagcggagtcgggcgtttccctcctttttgcggtacttccagaagcggatttgaagaagacggctttagcagcaagtctcccccgagcatgcttccaagttcttcattataaaggacaatatgcgaagcggcatgtccgggcgtctcaagaacccgccacccgtcaagcccttcaatttgcccaccttctgaaacggtctctgtcaatgtccgattacatgaataccggtacgacgcttttatggtatggcctggcggcttcatatcgccgggaacgccgaatcgttgaaacaggtatgtaaaaaaggacttttgtttttcaataaaatcgggattttgactgatatacggttcattgaacggatggccaatgatttttacctctgccgggaattcgtccagcagtccggcgtgatcagcgtgatggtgggtcaggacgacctggtcgatatcgcttaatgacagtccctgttcggccagctcgctcttcaaaacggctgccgcctcctttgtgttgggcccggcatccaccagagtgagcgcctcgcctctgagcaaataaatgttgacgtctccgactgcaaacggagtcggcagtgcaataggaatgattcttgcgtctttcatcgttttattctcctcatcctgcgaattgatgttgatcatattttacctttttctcccgcgcatgtcatttttgcctcaaatgcctgttgacatttcagcattcctcatagcataatgaacaacaaatatatgaaggtgaatgaatgaagacgcgatgaagaggaatagtaaacgagcaatggctaaagagagtgaaatccacggctgaaagatttcacagcccgcttgcctgttgaacctgccctcagagcgcttaggcaaacctaaacgtatcccgcgttacggggcaagagctgagcatgtatatgctaatgaaggtggtaccgcgaaaccttttcgtcctttgcgaagacggaaaggtttttttgtttttagaaggaggaatcaaaatgaaacgaataggatttatcggagccggttcgatggctgaagcgatgattaaggggcttgtcaaaagcggtgcaatggaacctgaggcgatattcgttacgaatcagtcgaatacggccaggcttcgtgaattaagcgagacttacggggtatgcggagaagcagatacggcaaaagtcgccgcccggtcggatacactcgttttggcgatgaagccgaaagacgcggcaggaggaatagccgcactccgcccctatttgcgaaaagaacagctgctgatctctgttcttgcaggcattccgattcatacgatccagcattatgccgggcttgagctgcctgtagtgagggccatgccgaatacatcggccgccattcaaaaatcagccacagcctttgcggcaagcccgcttgtcacgcaagagcagatgcaggaagcggctgacctctttgcgacggtcggcagcgttacaatcgttgaggaatctgcccttgatgctgtgacagccgtagccggaagcgggcccgcttttgtttatcggtttgtcgaagccctgcaggcgtcggctgccgagctggggcttcctgaaaaaacggcgaaacagctgattatcgatatgatggcaggagcggctcaaatgcttgaaaccgccagagatccttctgtcatgaggaaagagatcacaagcgcgcgagggacaacggaagcaggccttaggatgcttgacgaccatcaatttgaacagaccgtcatatcctgcgtcaaagaagcggcgaatcgttctgcggaactcagggatatgtttgccgccaaaatttaaaaaagtcgggaacagcgttttcgctcgttcccgatttttcttcaagcggtcccgtatcttagagaagcttgtgtatcgcgagccggaggatatctggcagctttccaaatgaaaacggcacatggagacgttccgtccatttgtgaggatctttgccggccggcccgatattgatgaccggcacaaacagtgcgttttcgcgtccttttggaagtgaatagccgtgatgaaaaagcggcatattggatgtgaacgcatcgactgactgtttttgcagctgcaggtagcttaaatcggacaggccggggaaatattggacttctgtaaattcaattccgtgcctgtcggccgcatactgcttcacttctctcatcacctttcggatcagaggatcgtcctttgaagaaacagccggataaaacggcggactgtaaaacagaacgatcatcggagcatcttctttgcagagtgaagccaattcagagacgattttcgttgaaaagtcgcggtctccaagctcccccctgttcgcaaatgcaaagttgaggatgcgttccgcctcgggcttcccggctttttcctgtgctttgttccacagcttctcaaacgtcagcacggaaacagccgggttaattggcatgaaggcttcaaaccgctgatattcggccgttttacgttcgatatttgtttgaatattggcggccgcttccctggctgtgtcgagcagcatgcgatggagctcggcggcggaacgctgcatcatcagcacattaaagagcgacaccgctgtgtgaggagtctgaaccgagtaggcctccttcagatctttttgcatcagattggccgggggaggcgtcacctctccgtccgcttcttcgcaatagtcgacgtttaattcgagcagcctgttgatctcagacaccattagattcgcattcacccctgcaaacggctcgccgacatgcgtctcaacccctttgcagaaaaatccggcaagcgctttgccgatgctgcctgaatagacgtactgcttcggatcacccggatgtttttcaaacatcggctcacagtttaagcacgctgtataatgaaggccaaattctttttctaaagctttcagtacaggtactgcttcaagcatcccctgcgagttgacttcttcgtccggaaccgtaattaatagaaggtttccgtcaaattctccgttcatcgcccgttccagcatagaaaattgaacagcaagacccgctttcatatccatgcttcccctaccgaacagccattcgccgctttccaggtcttttttgacccgttcaggcaaaagttcttttttatcatttaataggtccatgagttccgggactttgcatgccatatgtttgaattctccgtagtctgccgtatcgaccacgtcaaaatggctcaagaggagcaccgtatttgatttcttttcctttttgacgagggcggttaaaaaatagcgcccatcctccatcgggtgaagctttaagtattcaggattcttttgaaagtacgaacggtcctttaagacatcatgcatatatttcgcaagcgccacttctccggccgtgcctgagatgctttcgtattgaacaagagaaatgagcagccgtttcagttcttccactgtctgccacttcacaaagcaagccccctctttcactgttttccgcaaatgtatgtgatatcatatttagtaaaaaatagaatgtgtacaactttattgtactgaacattcttacatatggaaatgacttgagcagtttatatgacgagaatgggcagaattggtataatcgaggcgaaaacttacgggaggcgaaaaaatttgagtaatcgaaaactattcacaccatggagtttaaaaggagttacactaaaaaaccggattgtcatgtcgccgatgtgcatgtattcctcccatgaaaaggatggaaaagtgcagcctttccacatgacccactacatctcccgcgccgtcggacaagtcggactaatcatggtagaagctaccgccgtcactccgcagggaagaatctctgaccaggatctgggcatatgggatgacgcgcatattgacggacttgctgcattgacgtcacaaatcaagacgtacggcagcaaaacggcgattcagttggcgcacgccggaagaaaagccgaggtcgaaggtacaatctacggaccttcagcgattcctttcgacgaaaattcgcgaacgcctgttgaaatgacaaaagaggacataaaagaaaccgttcaggctttcaaaaaaggagctgaacgcgcgaaagccgccggctttgacatcatcgagattcatggagcccacggatacttgatcaacgaatttttatcaccgctttccaacaaacgcgaggatgaatacggaggttcaccggaaaaccgctacaggctgcttcgcgaagtcatcgacgctgtaaaagaagtctgggccggaccattattcgtacgcgtttcagcttcagactacaaaacaaaaggccttgatgtcgccgattatgtcggtttcgccaaatggatgaaggaacagggcgttgatttgatcgatgtcagctccggtgctgttgtgcctgctgatatcaacgtcttcccaggctaccaagtcggcttcgccgatacaattcgcgctcaagccgagattcagacaggagctgtcggattgatcactagtggccttcaagctgaggaaatcctccaaaatggacgcgctgatctcattttcgttgcacgggagctgctgagagatccatactggccgaaaaccgctgccaaacagttgaacacaaaaattgaagggcctgttcagtacgacagagcctggtaaacttaatatcccgccttatggcgggatatttctttttttcaactcgtgagaaacgaacatccttgtttgtgcgtctttcctaatagaacaccatatacaaagagaggatgacctctatgaccataacggaaagaatatatactgttgaagggtgcatgttttatacaaagcagagaaaaggaaaaaagaacgcaacgattatttttgaagcgggctacggtttttcttcaacgacttggcagcccattttatccgatatagacgaagatctcggcttgtttgcatacgaccgtgcaggccttggcaaaagcgggccgagcaccagcaaacgaacagcggatcagatggtgaaagaactaaaagcgctgcttgcagcagcagacgtcaaaccgccctacctgtttgtcgcccattcgttcggcgccgtcattgcaaggctgtttgcaagccggtacagcgatgaagtcatcggcatggtgctgcttgatcccgcttgtgaagatcaggaggaaaaagtgctgccgctacttccggacacattaaaagaagattatgtcaaacagttttcgatcgaagggtcccatgaggactttaaacaaagcctggacatgctgaagcaggaaaagaaacacctcggttcggttcctttgctcgtcctctcggcgggaaaaaggacggaggcggcgaagcaagctcatcaagaatggctgaagcttcacagcagactgctgtctctatcgcatcaaagcggctggattcaggcgaaaaacagctcgcatttgatccatcatgatgagccgcacatcgtccagcttgcgatctatgatgtgtggtatgcggcacagcagcaaacatacgcctatcaagccgccaattaaacaaaaaaccagcagacagtctgctggttttagttattttgtttcacggtgaatcgtgtgccttttcagacgcggagaatattttttcaattccaggcgatccggatttgtgcgtttgttttttgtcgtaatataattgcggtcccctgtttcggtgcacgccaatgtaatttttactctcatgttgtcctccttaataaaacgtaatcattacgctttattatacatcattttagaaccgtgtcaataaaaaaagcttcccgtcccggattgtcggaacaaagaagctttataactgcccattaagttcttttgatctcatgctcataaaagtcaaaagctgccacggtatcaggaaagatcgcttttgcttcatcgaccagttcaagcacgttttccccctggtatcttgcactgatatgggttaaaatcagtttttttgcacaggcttcccgcgctgtttcagcagcttgttctgaagtgctgtgataatagtctccggcgagctccctgtcgcctttcgcaaatgttgcttcatggatgagaacatcggctttttcggcaagcctcttcacattctcgcatggcctcgtatccccggaaaaggcgacaatccgccctttttttggcggtccgataaagtctgccccatgaatcgtccggccgtcttccaatgtgaccgtctccccgtttttcagtttttgataaacagggcccggcgagactccgatctctttcagtgcttcagcgtcaagggcgcccggaacatctttttcctgcacgcggtacccaaaagcgggaatgccgtgagatacgcttctggccgtcacgataaactggtcatcctcaaagactgtcccttctccaatctccttaatcacaagcggatatgtgacatgcgtccccgatacgtcaagcgccgtttcaagaaacgttttgattccttgcggtccgtatacggtcagcgggccttcccctccctggaaagatcggctgctgacaagacccggaagcccgtatacatgatcgccgtgaagatgggtaataaaaatcttttcaatttttctaggtttgatcgatgtatgtagaatttgatgctgtgtggcttccccgcagtcaaacagccaaacagaccgcctttcttctaaaagcttcaatgcaacggatgtgacattcctcgtttttgcggggatgcccgctcccgttcctaaaaataataactccaatatccttcctcctgctaaaaacttcatctatcacaagcatacaggaagtcttggaaaaaagaaacgccggcctcgcgtcgggctatgcaactaaataccctgaccgttttcagtaaagttttcatacgattcgatctcaaatgtttgctttaagggattattagctttaaaatgaagaaaataaacttatgcttcgaataaagtgaggtacgtttaattgaaaaaagatcaaatggaaccaaaagcagttatcgtaatatttggcgcaacaggggatttggcaaaacgaaaactatatccttctatccacaggctctacgaaaacggacaaatcgggaatgaattcgcggttgtcggagtcggcagacgcccttggacaaatgaagactttcgcagtaccgtacagcaatcggtttcgaagtttccgttaaacgaaaaggatgtggacgagtttacatctcacttctactatcatccttttgatgttacaaattccggctcataccgggaattaaacgaacttatagagaagctggaaagtacatatgatattccgaataaccggatgttttacttagcgatggctcctgaatttttcggaacgattgcaaagttcctaaaatcagagggtgtcacttcaacaacaggctggtcaaggctcgttatcgaaaagcctttcgggcatgatctgccgagcgcaaaagccttgaaccaggaaatccgtgaagcttttacagaagatcaaatttatcggattgaccattatctaggaaagcaaatggtgcagaacatcgaagtcatccgctttgccaacgcgatttttgagccgctttggacaaacagatacatctcgaacattcaaattacgtcaagtgaagatttgggtgtggaagacagagcgagatattatgaaaaatcgggtgcgcttagagacatggtgcaaaaccacattcttcaaatggtggcgctgcttgcgatggaaccgccgatcaagctgaacacggaagagatccgcagcgaaaaagtgaaggttctcagagcccttcgtccgattcaaaaagacgatgtcgaccaattttttgtgcgcggccagtatgacgcaggagtcgtcgacgaaaaacatgttccggcttatcgcgatgagcaaaacgtagcaaaagattcgaatacggaaacgttcgttgccggcaaactgctgatcgacaacttcagatgggccggtgtgccgttctacatccggacaggcaaacggatgcagaaaaaatcaacgcagattgtcgtccaatttaaagacattccgatgaatctttattacggaaacggcaacacgatgcaccctaatctgctggtgattcatattcagccggatgaaggcatcacccttcatttaaacgcaaggaagcttggaggcggcacttttgcccagccgatcaagctcgactactgccataactgcggggacggcatcaacacgcctgaagcttatgaaaagctgattttggactgcttgcacggagacgcgacaaactttgcccactgggatgaagttgcgctttcctggagttttgttgatgcgatatctcaaaactgggaggaaaacaaaaccctttcccctaactataaggcgggctccatggggccgaaagcttctgacgacctgctcgcaaaagacggctttcattggtggccgctttaataaaaaaacagccttcacaattgaaggctgtttttttatgctttcaaggcctgcatctcttccggatggcttttgtcccgcttccacatcagctgaaggacgaacagcagaaggaatatgccgaggccgatcatatcggaatagccttctggataaatcagcagaagaccgctggcagccgccagtattctttcaaaccagaacacttttctcatccagaatccgatcatgccagcgccgatggcgatcattccggacaatgcggtaaagaccacccagagaatttcataccaatgcgcatcaatcatgagaagctccggagacaggacgaatatatacgggatgataaaagcggcaatcgcaagctttgctgaattgatccccgttctgatcggctctcctcccgcaacccccgcagctgcaaatgctgccaaagcaacgggcggcgtaatgtcagctacgatgccgaaataaaacacgaacaagtgggccgacagatcaggaacattcagcaaaatcaaggctggcgcggcaatcgtcgacgtaatgacatagtttgccgtcgtcggcgaccccattccgagaacaagagcggcgatcattgtcaaaaagagcgaaggcaataatgcgcctcctgccaaatcgagcaggccgtttgcaagtttgaggccgagacccgtctttgtgacgactccgacgatgatgccggcagctgccgttgccgccgcaacggaaagcgccattctcgctccttccgcaagagccagcacaatccctttaacgcccattcgcgtttctttattgaacaaaccgaccagtatcgccagaacgatcgaatacaaagcggcatgcatgaccgtgatgcccgacattaacaaaacgacgaccgaaatgatcggaagcagcaaataaatctttttgaatacttccttgcggttcggcatttcttctttcgttagtccgcgcaggccgaggcgcttcgcttcaaagtgcgtcatgatccagatgcccgtaaagtataaaacagccgggatcgccgcggctttcgcgatatcccagtacgtaatgcctccgccgatgaactcaaccattaaaaaggcggcggctcccatgatcggaggcatcagctgtccgccggtagatgcggaagcttcgactgcaccggcgaattcttttttatagcccagttttttcatcatcggaatcgtaaacgatccggaagtgacgacattggcgacagagctgccgctgatcgttccctgaagggcgcttgaaaaaatcgcgacttttgccggtccgcccgtgcttcgtccggcgatcgctacggcaaggtcattaaaatactgccccactcctgtcctgacaagaaaagaaccgaacaggatgaacaggaagatgaaagtcgaggacacagcgagcggcgtgcccaggattccttccgtcgtaaaatacatcgtctgaacgagccgttccatcgtcaggccgttgtgagacaaaaagcccggaagatacgagccgtaaaggccatacaaaagaaacaggccggcgatgatcgtaatcggcagtccgacagcccgtctcgtcgcttccaatacgagcaggacggccaacagcccgacataaaagtcagtttccgtgatcaatccgatcccgcccacaatcgtttcataattggcgacccaataagcgccgacgcctgctcctaacacggctaaaattgcgtcataccaggcgactttgaatttgccggtcttccgcaaaccttttgtcgccggaaacagcaaaaaaatcagaccgagcgcaaaccctaaatgaacggacctttgaatttgagccggaaaaacgccaaaaatggctgtgtataattgaaacaaagaaaaagcgagcaggccggcaaatgcaatggcccctgtcaatcctttgagctttctcgttcccgcttcaggatcgtatttctccagcagttcctgctgatctttttccgaaagctgctcagtcattgatcttcactcccctcagttgttgcaagacatttagttttcggacactcatccttgtccatgtgccgggacggatgtaccgctttaactcatgttcagcgcctgaatacttgatcctgtgattcgccctcaccctgccgatccgcatatcgatgaacggaaaggtcctcttcatgttcgaaatggtgtagacgccgtttttgatgtcgagcctttcaccttgttctgcgtttgcgggcattccgacggccggatcatgataggtcagagcggtctgccgaatcatccctttttcccacacatacgattcgatcacttctgtccgatggatggaatgcgtatagaccacatcaaagcttttcttcttttggaggggaagaaaagcgatgatctcgccgctgtcctctttctcgaacacgacggcggtctgataaggaatcaggcatgccgctgcaaaaacggcaatgatcagcgccggcacaagccgttttatgatttttaatttccccattttttccatatcccctgccgaatagaaaaacgatagaccgatgtttcattgcaacggtctatcgattgcccgggcttattcatcgcttatcttccttggttttacgatttttcgatccctttttctttgaagtatttagccgctcccggatgaatgtcgatatcgcccaatccttcaagcgcggtttcaggcttgataaactcgcctttcgcatgattgattttatcggcttcaaacagcgctttcgtcattttatagacggtgtcctcatccatcttgtcggatgcgacgagcatcgctttgacagcgaccgtgttcacatcgctcccgatgccataggttccttttttgatcgtatcctccgcatagaacggatacttttcaatcagctttttctgcttgtctttttcaatgtttataattttgattttattttgtgcggaaagcccttcgacagcgcctgtaggcgttccagccgtgatgaatgcggcatcgatagcgcctgactgaatgccgtcggttgattcttcaaaagacaggttttgcggtttgatgtcgtcaaaagacatcccgtgaacctccaaaatctgcttggcattaatgttgacccctgctcccgcagcacccacggaaaccgttttgccttttaaatcctcaaccgaattgattccgcttttttctgttgtcacaatctgtacagtttcaggatacagggcggcaatcgccttgattccctcaattttttctttaaacatctctttgccttctatggcataagtggcaatgtcagtctgggaaaaagcgacttcagcttcccctttttgcagagttgccatgttttcagcagaagcccctgtagtctgcgtcgtaaatttgtcttctgtggcatcctcccaaaggtttgcaaactgaccgccaagcggataatatgtaccgccggttccccctgtcagcagactgtagtttcctgatccttttgacgcagatccgccgtccttatttcctgatgcattgttgcttccgcacgcagccaatcccatgacgagcgtcagcagcaataccatccatgataggcttttccactttttcattcattctccccctttgcttgatggacaaataacaatcctatcgtaccatgaaaaatgtattagttgtcaatatattgttttatttctaattatttagttaattttatgagccgctcgttctgaatatgcgcacggcctctgaaattctcgtccgctacagcgatgttagtccataatcccttcggaggacaagcgtgctggaagattctatgacaaaacaaaaaaacccgcggttatgcaggtttttcatttccgaatatggacgctcgaaaacacaaacttatcatagcgatgccttgcaaaagaatattcaaacggttcccccgtatttaaaaaagcgacctgttcgacttcaagaaccggatcgtcaggggcgcattccaagtactctcggtcgagtgcactcgacttatccgccctgatcttccggtgcgatccggcgattgtcagtttcagcgtctcggtgatgtgccggtaaacggagccgtgaaggacgtcttcatttaattcagagatgacgttcgaaggcatatacgtttcttcaatgacatacggttcgccttcaacctttctgagcctgatgatatgatacaccggaacggtcttttcgattgacaattgctttgccacttcatctgaagggaattcgacgtcaaattgaatgatgcggctttcgatttgtttgttggcaagaagcttggtcagcccaaggttttcgcggtctgttacactgacgggaagctgctgaatcgatgattttacaatgaaggtgccgtgtccgcgcttgcggtacagcatgccttctgacacaagaatatcgagggctcttttcatcgtcattctgctgcaggaaaattccttggcgagagaaagctcatcaggtatgggctgatcaatcggatagtattcctcctgaatccgcctcctcatttcgtttgaaatatattcgtattttctcatgttttaaccaccattactaaggattctgtagcctgtaacaccttctttatcattatatcggttttaatgcggaaataaaaagatggcccaactgaccatcttttagcccgagtccctttttaaaaaccgttgttctcggcaactttcttaaaccagtatccgctttttttaatcgttcgttcgccgtttttgtcaaggttgacagatacaaatccgtagcggtttttataggcgttcgtccatgaccagttgtccatgaaggtccaaagatgatagcctttgacattcgctccttcctgaatggctctgtgcacccattttaagtgttcttttataaacgaaattctgtagtcatcgcggatcatgccgtcttcgccgcggaaacgttcttctccttcaacgcccatcccattttcagaaataaagcattcaatatttccgtagttttctttgacattgattaaaatatcatagattcctttttcatatatctcccagccgcggtggcggttcatttttcgtccgggcatttcataatggtcaaaaaaccgttccggcataaaaggcgcgtccggatgaggcaggtgctccttcgctttcacccgtctcggctgataataattgatgccgagcagatcgacagtgtgatttttgatcagctccaagtctccttcttccatgacaggcaaatagccttcttcttttaatatatctgttaaaagctgcggaaactcacccttaacggcgggatcaagaaacgatcggttaaagaaagcgtcggctatttcagatgctcttacatctgccggatgctggcttcgcgggtaggacggcgttaaatttaaaatgatgccgattttgccgtcgcccccgagtctgcgataagcttcgacagctttagcgtttgaaagaatttcatggtatgcgacctggacggctttttgaaagtcgacgatgttcggatagtgaaaatcgtatagatagccgccttctgcaggaacgatcggctcattgtgggtaaaccattttttcactcggtccccgtacagcctgaagcacgtttccgcgtatgaagcaaagtgatcgacgacttgcctgttttcccatccgccgatttgctggagcgcaagcggcatgtcaaaatgataaaggttgacaaaaggctcgatgccagccgcaagcagttcatcgatgactcggttataaaaggcagctccttctttgttcagccgcccttttccatcaggaaacagacgagcccacgaaatggagaaacgaaaagagtggtggccaagctctttcatcagctgaatatcttctctgtaagtctcgtaaaaacgcgaagtcttctcagggcctactccgtcaaaaaatcggtttggctctttttcgtaccagtgatcccaaatgttctttcctttgcctccttcggccgccgctccttcagtctgagtggcggaagccgccgacccccaccagaagccatttggaaaacggtattgaatttgttctagctgcggttctgtttttgacatgtcatcaatctccttttaaagtcctagtgttgtcttttcttgttccgcttcattgatctcctgctcttttttcatattcatccggtcgatgaatttcaaaaatgggaaccagatcataaagacaacggctaaattcacaatctgaagaatgccgccggcaagcgaattggtcgccatcattccgctgataaagatcggcacagtccaaggaatcgtgaccccggtcggcggcggtacaagcccggacgccatcgcgaaatacgtaatcaaagtgacgatcatcggcgagatgacccacggaataaaaatgagcgggttcatgacgatcggcagaccgaaaatgatcggttcatttacgttgaaaattcccggggctgctccgagttttgcgacctgcttcatctgcttgctcctcataaacagcaggatcgcaataatcacggccaaggtcatgccggttccgcccattccgacggtgtagacttccataaactgcttattgataatatgcggcacttctcctgttgcggtatagctattcaaattttcgatcgaaagcgtattccagatcggatccataacggagttgatgataatttgtccgtggagtccgaaaaaccagagcagctgagtgaaaaatatggcaatcaaggtcggaatgataccgcttccaagaccgacaagcggagcctgcaccaggttgtaaattaaatcgtgcatattcgtattgaacacttgggttacaaggatattgatcaccaagtagacggacaaggtcatcaccgccggaatcagcgcggcaaaagattttgctacagcaggcggaacgccggcaggcattttgatcgtatagtttttctggacaaaaaatctgaaaatctcagcggatgtaaaggcggtaatcattccgaggaacatccctttcgcaccgagcctgtcaatcgggatgacgttcggaatcacttcccctccttcgccgtttaatacaaacggagtcagcagaaggaacgatgccaaagcgacgactcctccaaaaaccgcttcgacttcataagttttggacaaataatacccgatcccgaatacgacgaaaacggacatgatgctgatcgttgcgctcggcgctatgcttaaagccgactggaacgtttcaagcgcggatttgctcatcattttattgagaaacggcaaattggttaaaacgacaatgatcgatccgaaaatggtgagcggaaaagccagcataaatgcatccctcagcacgcctaaataccggttattattcagcttcccggcaatcggcaccaagaggttgctcaatttttcaaacatggtctcttatcccccttcgattttgccatgcagtgcgaatcatagacttttctctttgaacaattccaataattcagaaacgagttccttcatcgtgagcgtcgacatcaaatggtcctcggcatgcaagagcagcaaagagaactcattttttcccccgcccgcttctttttggatcatttgaaaatgaatatcgtgggactgctgcaaatcgtcttctgcctgttgtagcagctcctctgctttctgaacgctgccgtcgcggtattccctgatggactgaataaccttgctgcgggcgtttccgctgtgaagaatgagctgaaagcaaatttgttcgcctgttaattcatcgagctttaatttttccattatcgtcaatccccgatcaggcttagcgcctgttcataagctttctttccatcagccattccgtaagccagcatatcaatcacatcaaccttaataccgtactgttcagcttccttctgcagctcgccttttaaaaagctcatttgcgggccgatgagaacgacgtttgcctctgccatctcttttttcgcctggtcctgtccgaccgcccaaatttttgcctcatcaccgattgaatgcgcgtattcctgcatcttggtgacaaggaggcttgtcgacattccagagctgcatgcgagtaaaattttcttcatggtgatctcctccctttattaaaagcgctttcacacaactattattatatctttttatttttaaatgtctagacatttaaaaataaatgtatgtatttatttcgaacaataaaaaacccctcttctttccagaggggttttcaaataaattatctggcgtattttttgaatagctgaactgcttctttaggcacgtagaaggatccattgctttcaacaatcacgctgtctagttcgtattccttcccgttgattctgataatgtttttgttcacaggcatttcggcttttgcttttttgcgcgctgcgacaagaactgggttagccggatctttttgatcgatcgttacgctggctccggcttttttaaatgcctgttttgcttcgataaataattcgtttgttaatttgtctaagttgaagcccattgcctttgccatcgttttggcgatatcggtgttttcgacgagaccctgcggcttttctggaccatacgaatacaggaagacgtcttcacccgtatgaccgcctgttgtgaatccgatgttggcccggttgctgagcagcttggtaaataatgaagccgcttcttttttgtttttcacgcttttcagctgtttcttctctgccggcgttaaatcatcaagtccgtaaagcttcgccgcttcttcgatattcgataagtcgtcttttaatttgccagttgcgccttccaccgtcattttagcttttttcagcggatcgacataggctgataccggtgttgtgtcatagcctttcgtcgtgttgctgttgccgatggagatgccgctgttgccatggtccgagacggcaataaccattgtatgtttatcttttttagcgaaatcaagcgcttctttcaccgcgttatcaaacgccaatacatcgctgatcatgccgatcggatcgttttgatgcgctgcccagtcaggcttgcttccttccacgaataaaaagaaaccgtccttgtctttagaaagcgtctgaatcgattttttcgtcatctctgcaatagtcggctgctctggatgcgttgcgcggcggtccatgtcatacgcgagatcgcgctgtgagaaggcgccccagatttttttcgattttgacttgaggagttgatctttcgtttcaacgaaatcgtactttttatctttgagcacttttacaaggtcttcaccgtctttgcggcttttatcctttgtacccggctgaagcgattcttttcctccgccaaggacaacatccatgttttgataaacctgctgttcaccgagcacttcaaaattattgcggtctttatgatggccggaatagccggcaggcgtggcatgctgaatttcagatgttgcaatgatgccggttgctttccccttctgttttgcgccttccagcacgtttgctacaggccggtaatgatctttttcacggaccttctcgactcctggtgtgttcacttttgaaggcagcacaccgatataggaagaatttgattttcgtcccgttgccatcgcagttgctgcaggtgcagaatcagtgatcgccgattctgccgaatacgtccggacaccgccgctgacgatctggtccattgcgagcggttcgcctttataccagcgtgccaaagttgatgcagaagagcttgttccatccatgaccatcatgatcacgtttttgaccttcggctcttccttttttttcgctgtttccattgccgcactgcctgttcccgccgatcctaaagcgactgctcctgccagtgtaatgccgacgattctgttgcgtaagaaacccattcttatgtactccctccataaccgctttttgttgacacacctacactatcattgctatgtaaacagcactattgctttctattaatcttatgtaaattttcatgggcttatgatgaaaagaaggcatcccgccttcttttcacccttttcccgcttggaatcccgggtattttgtcatcccgccgtctacatacagcgtcaggcctgtcacatagcttgcttcttcagatgctagccaggccgcgcaggctgcgacttcctccggctttccgatataccctatcggaatcaattcaataacgccttttttcaattcgggatcagcgaatttttcggcgttaatcggcgtatcgattgcaccggggccgatcgcgtttacccggattcctttcggagcatattccaaagcaagggtttccgtcagcagttttgccccgcccttgcttgccgcataatggacaaaatgcggccacgggatttgctgatggacgctggacatattgatgaccgagcctttaatattatggtcgagcatatagccgatcgcttcccggcatcctagaaacatccccgtcaaattggttgatatgacgcggttccagtcctccagagacaaatcctcagaaggtacttcattttccaccccggcgttgttcaccatcacatcaacggaaccgaatgaatcaacagcctgtctgatcagcgctttcacatcatcttcttttgagacatctccttgaacggcaatcgcgcgcgctccgctgctttctattttctccaccgtctcttcgggattttcttcttccttgaaataattgatcactacattggccttttcagcaccgaagcgcagtgccatcgcttttccaagacctgtacccgcccctgtgataacgaccgtttttccctctaaacttggatacatgggttgattcctccttattgaaactctctctttgagtaggtttccacacaaccgcttaaacatgcatccttccgaaaatcaaaaaaccgcaagcttttcagcttgcggctttacatcttatttcatccactcagtgtggaaaatgccttctttatctgtacgctcatacgtatgggcgccaaagtagtcgcgctgcgcctgaatcaggttggccggcagggtggcagtgcggtagctgtcaaagtaagcgagagcgcttgagaagcaaggtacaggaattccttgttcaaccgcaagagaaatcgttttgcggagggctccctgatagctttcaacgatatttttgaagtacgggtcaagaagcaggttgtcaagctctggatcgcggtcatacgcttctttgattttttgcaggaacgccgcgcggatgatgcatcctccgcggaaaatcatcgcgatatcgccgtatttcaaatcccagccgtattcttctgatgcggctttcatttgagcaaagccttgggcgtaagaacagattttgctcatgaagagcgcttttctgaccgcttcgatcagctcttctttgttctcagcggcaggtttcgcttcaggtcctgccagaagcttgctcgctttgacgcgctcctctttcatggaagagatgaagcgggcgaaaacagattccgtaatgattggaagcggaacgcccaggtcaagagcgctttggcttgtccattttcctgtgcctttttgacctgctttatcgaggatgacgtcaacaagcggcttgccggtttcctcgtcttttttcgtgaaaatatcagccgtgatttcgatcagatagctgtcaagctctcccttattccactcggaaaagacttcgtgaagctcatctgatgacagaccgacaatgtgtttcaaaataaagtaggattctgagatcagctgcatatcgccgtattcgatgccgttatgaaccatttttacataatggccggcgccgtcaggaccgatgtatgtcgtacacggttcgccgtccaccttggcagaaatagcttcaagaatcggcttgacaagctcatgggcttccttttgtccgcctggcatgatagacggccctttcagagcgccttcttcaccgccggaaacgccggtgccgatgaagtgaatgccgctttcggccagctccctgtttcttctctgcgtatctttataatatgtatttccgccgtcaatcaaaatgtcgcctttttcaagatgaggcagaagcgattgaatcgttgcgtctgtcggtgttccagctttgaccattaaaagaattttgcgcggtttttcaagagattcaacaaactcttcaatgctgtatgtaccgacaacgtttttgccttcggcttctttcagaaactcttcggttttctcgcttgatctgttgtagacagaaactgaaaacccgcggctttcaatgtttaaagccaagttttttcccattactgctaaaccaactacacctatttgttgttttgccatgtctaacgtcccttctaaagcgtttagcattatagtttaatttttatttaaattgaaattaccacactttgacctacattttcaagctattgatcttgtctctcgtcttggaaaaaatctttgttaaagcttgttccgctcgttttgctttcttttttcacaatcctgaccccttttttgatgaggtctgttccatatttttcattcagttcggccatcactttttggatcggctcatctttggcatcctcatgaaaggaaaacaaatcaagctgtttgacggcttcctttcgattgacgaggtctgttcccgtcacgcccaaaagcctgacagggcttccgtgccaatgctgcctgaaaagggctttcgattccttcgcaatttcgtcttttgaatcggtcggattcagaagggtcttgcttcttgttatgttcgtccagtccgcaaagcggatcatgatgaaaacttttgctgccatgacctcttttcgcttcagcctgtcgcttactgagattgaaagcttgtcaatcagtccgaacagctctttctcatctgtgctgtcatgcgggagggtcgaggaattgccgacgcttttgaattcgtatattctgtcgggattcacttctcctgtgtcgatgccgtttgcccttctttttaaacgggggccgttgatgccgaggaggcgctttaaagcatactcatctgcggcagccaaatcgccgatcttttcgatctcgagcgtcttaagcttttcggcggttttccggccgactccgtacatctcgctgatgtccatgggccaaagaatccggggcacttcacgctttctcaaaatcgtaatgccgagcggctttttcatatccgaagccattttggccaggaatttattcggagcgatcccgatgcttgacggaagcagcagttccttttgaaggcgctcctgaatttcctttgccgtttcgcatgcccgatttctgtatggcgtatccgttaagtccatgtacccttcgtcgatcgaaacaggctcgacaaggtccgtgtactccctgagcacttgaaacatttctcttgaagagcttctgtagcggtcgaaattcggcggcttgacgatcagctcgggacagagccgcttcgcttcccagagcggcatgggcggtttgacgccgcgtgctctcgcctcatagctgcacgtgacgacgattcctttccgctccttcgcatttcccgcgatggctagcggcctgcctttcagcgaagggtcatacgccatttcaacagacgcgtaaaagctgttcatatcgatatgaaagatgactctccccttttgtttatcagcagacaaaacggctccctcctggcactctgattagacatcccggctttcatatagtaagatgttaaatgaaacggaagtgataaaagatgattcttgaatctttcaacgatgctttttttctgattgagtttttcacaatcgtcctccccgcactgacggcgatcggtatcgccctgatcctgaaggattgcagtacgggagacagctggaaaacgaaacggtttgaagaatatcatgcaatacagtttgtttctgcagtcgattttctcatcatcctatatcatcgcattacggtatggataagtaaagtcattcgcatgaaagcttcatcgaacgacgatgaagaccaccgtttccttcttctttcaatttaaacgtgaagggcgtccggcatacgggcccttatttagaaggaggagaacgtgttgaacacgaaactaaagcaattgtttgcgactgcaatgtttttgatcatgactatgtttataggtgaacaagcttcggcagccaccggcagcaccggaggaagcgacaacttcttccaccattatgtcgtggtgcctttttcagagctgattaagggaatcgccggaatcttccacggaaactacggattgtcgattatttttgtgaccatcatcgtccgggttctcgtttttccgctgtttgccaaccagtataaaaagcagcgggcgatgcaggaaaaaatggcgcttgtcaaacctgagctggatgcgattcaaagcaggttaaaaaagacgaaagaccccgtgaagcagagggaaatccagcaggagatgatgcagctttaccaaaagcacaacatcaatccgctggcgatgggctgtctgccgatgctgattcagtttccgattctgatcggtttctattatgcgatccgctcgacgcctgaaattgcttcgcactcttttctctggtttaacctcgggcattctgatattatcgtatctttaagcgccgggttcatgtattttatccagttctatgtgtctcaaaagctgaacgcacagaacgcccaatcaaatccggcggctcagcagtccgccaaaatcatgggcttctttttccctgtaatgatgacgatcttttcgatcaatgtccctgcagccctgccgctgtactggctgacaagcggactgcttctgacgattcaatcggtcgttcttcatcaagtttaccaaaaaaacaaaaaagccattcagcctgctgaatcggctacaaaataaaaaagcttgcgcctttaaaggcgcaagcttttttgcgtttccctttaatcttctcgatcgcgactaaagggctgatgagaataatgagacggctcttttgttcgagaacgccgctctaagagctgaaacgaacggcaacttcccctgtaaaaccccgcctttatgaacgattcgctacttcctcaataatggcaacgaccatttctgcagttttgacaagttcctcaatcggcattttttcgtttttcgtatggatctgttcatatccgactgcaaggttgacagtcggaatgccgtggcctgcgatgacgttcgcatcgcttcctccgccgctcgtcaacagctcgtacggacggccgattttcccggcggcttttttggcaatttcaacgacaagatcaccgtctttgtatttaaagcccgggtacatgacttcgatttccacctcggctctgccccccatttcggcggctgccgattcaaacgcctgcttcattttttccgtctgcttttccattttttccggaacaagcgaacgggcttcagcaagaatgtcgacttgatcgcagacgatattggtttgcgttccgccctcaaagcggccgatgttagccgtcgtttcctcgtcgatgcggccaagcggcattttggcaatcgcttttgaagcgatcgtgatcgctgagactcctttttccggctctacaccggcatgagccgtttttccatagacagttgctctaattttcgcctgtgtcggcgctgccacgataatattgccgaccttcccgtcggaatcaagcgcatatccgtaatcggctttgatcagcgaacggtctagagccttcgctccgacaagccccgattcttcaccgaccgtaatgataaattggatcgttccgtgcggaatgtttttttctttcagcacttttacggcttctagcatcgctgcaaggcctgttttgtcgtcggctcccaaaattgttgtgccgtctgttttgacatatccgtcttcaatgaccggctttacgccttttccgggtacgaccgtatccatgtgggatgtaaagtaaatcgtgtccgcttctttcgttcccggaagcgtgcacacgaggttgcctgctccgtgcccggtttttggctttgtgtcatcttccacgacatccattccaagcgccgcaaatttttctttcagcaccttgcagatttcagcttcatgttttgtctcggaatcaatttgcacaagttctaaaaactcttctaacaagcgttttttattcatactagtttcccctccattttttaaagcggtatatttccatgctttttgtccggccggatttcttttttgctcttcagcatgtcaaacgtttggatcagcttcttccgcgtctctttcggatcgatgatatcgtcaaccatgccgtatcttgcagcggtaaaagggcttgaagcctgcatgcacttccggattttttcctcccgggcggcccgcgggtcgtctgaccgttcgatttccttcgcaaacagcacgtctgcagcttccgaggcgcccatcactgcaatttctgcattcggccacgcaaacacggcatccgctccaagcgccttgctgtttaaagcgacatatgctccgccgtatgcttttcttaaaatgaccgtcaccttgctgacagtggcttccgcatacgcgtaaaggattttggcgccgtgcctgatcaccccgccgtgctcttcgcgtattcccggaagaaaaccgggacaatcaaccaaagtcaaaatcgggatctgaaaggaatcgcaaaaacggataaaccgggcgattttgtcagccgcatccatgctgaggcttccggctaaatacttcggctggttggccacgaccgccgccgtttcccccgctatccttgcaaaaccgatcaccgcgtttttggcaaaatggcactgcacttcaaaaaatgttccgccgtctgcgatttccgcgatgatctgtttgacgtcatacggacgctgaccgtcttcaggcaggatcgtcattaaagcaggccttatctcatgatctttcgcctttctcgccttggcgggaggcttttcttcgtgattctgggggatgtaggacaagagcttgcgcacctcatggaggacggcctcatcggaatccccggaaaaatgggcattcccgctgattgaattatgtatataggcgccccccaattcaccggagctgacagcctcgcctgtcgccgttttgatgactttcggaccggtaataaacatctgtccggttttttcgctcatgaaaacgaagtcggtcaaagcgggggaataaaccgcgccgcccgcacaagggccgagaatgacagagatttgcggaatgatgcctgagcaaaggacatttcggtaaaaaatatgaccgtatccatctaatgatagcacaccctcttgaattctcgcaccacctgagtcgttcagaccgatgaacggcgccttatttttgagggcaagatccatgacggccgctatttttttggcgtgcatttctccgagcgctccgccggtgacggtaaaatcctgggaaaatagataaacgggccgcccgtcgatctttccgaatcccgtgacaaccccgtcgcctaacgggccgccggactgccggcttctggcaaaggcattcagttcagtgaacgtcccctcatcaagcagaagatcaattcgttctctggcggtgagcttgcctttttgcttctgcctgtcgatccgttcctggccgcctccgagcgaagctttttggcggctgttgtttaaatcgtcgactctttcaaacatattcatcacgttctgccccttctctatttgattccaagaacgaaacttgtccgatgaaaaaaagcagtataaaataatgggagattaaaaaacagaggtgaaaagcttgtctcgaaaattcatcaagttcatggttattttaatgatcggcgtcatggtgctgaccactctgcttaccggaatcagcatgattttttaatacagatcatgaaagcaggcgattcttttttcggagaaacgcctgcttttttcgggctcaggcttccgggaagaatagaaaaaaccgcacaagcttctccctgtttcattagattgaccaatgaaggagaaactcatgcggttatgcaggagatttaatacctttaaagtaactcttaatcacaagatactgttccatttcgccgagaaaaatgaaaagagcagcgcgcgcttcaaattcttctcgtgtcgtcggcagctccatctcttcgatttcctctctcattttcacgagccgcttcaaaaatttatgagccgtatttccgggatggatggctcctcttaaatcatggagaaacgccgcgatcatctgcccctgttcaaccgtcatcgaaatcgacgtgattttcggcagaaccctttcgataatttcaaattgcttttctctcattttaaagtagtgataatagaggttttcgtgcctgagaaaatgattttccacatcgcggtatgccagggtcttcgcttcattgatcaaacggtgcgtctcaggaatctcttttcccgtccaatcctgctccccagtcagcaaataccgttcgatttcttcgaaaatcttggcaaagttatcttctattttctgctgatactgtttgagctcattatcgaggctcggcatgtacagattcatcagcagggctacgccgattcccgtaatgatgataaggaattcgttccaaacgagagaaagggtgatcccttccgacatataaaggtgaagaatgatgaccgaacttgtgacgattccttcttttattttcagaagaacggttgtcggaataaagaacagcagcatcagaccgatgacagcaggatgatagccgatcagctcaaaaaatgcgcatgaaaagacgatcgcaagtatgcatgccgcaaaccgtgcccatgatgcctgaagagaccgttttttcgtcacttgaatacagaggatcgtgatgatccctgtcgacacaaaattatggaggccgagcagctgtgcgatatagatggccaatgctgttccaagcgctgtttttaatgtgcgataacctattttaaacatcgttaaccccaatcttttctgctagtcttagtgaataaaaaagaagaagatcagcatcttcttcagcttattttatagtattttctctaaaaagtcttgagctcttttcgattttggagaagaaaaaaacgctttaggatcgtcgtcttctacaatggttccttcatccatgaaaagcactctgtcggcgacttctttggcaaatcccatttcatgcgtcacgatcaccatcgtcatcccggttttcgccaaatcctgcatcacttggagcacttctttgaccatctcgggatcaagagctgatgtcggttcgtcaaacagcatgatatccggattcatcgccagcgccctcgcaatcgcgacgcgctgcttttgtccccctgataaacggttcggataatcatcttttttatcgagaagccccactttctcaagcagttcttccgcttttttcacagccgcctgtttgctttcttttttgacatggacaggtgcatacgtaatattttcaagaaccgttttatgcggaaacaagtgaaaatgctgaaagaccatgccgatgttctctctgattttcagcacatttgttttcgggcttgtaatctcttgatcctgaatgaaaatgctgccctccgtcggcttttcgagcaggtttaagcaacgcagaaacgtggacttgcctgatcccgacgggccgatgactgcggctacttcgcctttttcaaaggaaacggaaatatgtttaagcacctcgtgctttccgaaagattttgagagattgcgaacattaatcattgacattcagcttcctttcaatcgctttgccgacaaacgtcaggatcaaaacgagcacatagtagatgaggcctgcaaacagcatcggctcaagcgggctgtagatcgcagctcccgcctgatagcttcgcctcattatatcgccgagtccgatgacggtgacaacagccgattcctttgtcagtgtaatcgattcgttgatcagcgcgggcatgatatttttaaaggcctgcggcagcaagagatccttcatcatctttgcatacgggacgcccagagccatcgccgcctctttttgccctttgtcgatcgcattgattcctgctctgatgatttctgatacataagcagcggaatttaagccgaatgcgatgacggccgcccaataagcatcaatatcaaagcccagcacctgaggcagtccgtaatagacgatcatcagctgcagaacgagcggtgtcccccggaatatggaagtgtaaaagtctgcaatccatgcgaggggcttgatcgaactgatttttaaaagcgtaatcaaaacccccagcaaaaatccaagcacggccgcagccgcgaccacttttaaggtaacgcccaagccttccaggatgaaaggcatttcgggtactgtactagaaaaatcaagaaaattcatgatgactctccctctcccgcctcatgatcaaagaggcgtacatcgctttagaaaaaaaagttcaacaaaaagttgaactttttacgcttacttttttgtttctccgccgaaccatttttctttcagtttatcaagttctccgcttttctccatttcttcaagcgctttgttgaacttctcggtcaaatcgcttccctttttaaaggcgatcgcggagccggctttttcatccggttctttcggcagattgtagccaaccagttcttcatttttattaatatatttttcggcaacgatatcttcaatgattgcagcgtcaaagcggcccgctttgatttcttcagttaaatccgaaatgcggttgcggttttcaacttttaaatcgtaatccggcgtgagctcctttgctttttcttcctggatggagccaagctgtacgccgaccgtttttcctttcagatcgtcaagcgatttgatgccgcttgatttttttgtaacgatcatgttgtgagccgtatagtagacatttgaaaaatcgacctgttttttgcgtttaggcgtcggcgtcattcctgaaagcacaatgtcgactttgtttgttttaagagcggtcaccaagccgttgaagtccatgtctttcacttcgatttcatggcccgtcttttcagccagtgcttcggccagatcaacatcaaaaccgacaatctgatccccgtctttcgattcaaaaggcgggtaatcggcagaagttcccatcaccaatgtttttttatcatcagagctgctgctcgtcccgcaagcagtcaatgcaaatgtgacacatgctgccactaccagtaacatccattttttcatgttgcgtatccccctgaacctgtttgaatatttattcgttgttatgtattttaaacattttccgaggcggatgcaataccattttgaaaaataactaaaaaacctttaaataagcctttaaataccaattgaacgcctgtgcctttatctttctgattgcatacaaaaagcatttttatacacaaaaaaagcctgccatctgttttggcaggcagtttttccattatacttcttcacagtattcttcaaacagtccttgaagcttggtgatgacagccatcggctcatagccttcaatttcatggcgctccaccatttttaaaatcttgccgtctttcaaaagggcgaatgacggagaagaaggcggatatccttcaaaatattctcttgctcttgccgtcgcttctttgtcttgtccggcaaaaacggtgacgagatgatcagggcgcttatcgtaatgaaccgcatggtgcgcggcaggtcttgcaatcccccctgcacagccgcagacggagttgaccatgacaagcgtagtgccttttttcgtgagcgcttcatcgacctcttcaggcgttttcaattcggtgtagccggcagccgttatttcttgtctggcctggcgtacgacatcgttcataaacagattaaaatccatgttcactttaagatctctcctttttagcgcttatagcatgatgctaaagccgctgtttgctcatctgttctaatgatactttgaaaccgcccggaccgcaaatcaggcgattcgtgttccttcaggtttacggaacgggcagcccggggaaaaataagtaaagaccctataaacaaaggagtactttatgaaccgaaagaaagcaatgctgatttacaacgggaatgcagggcaaaaaaatgttgaaaaaacactcggtgctgccgtaccggttctttcacaagctatagacgaactcatcgtgaaaccgacgagaaaaaagcgcgatgcgttcgaattttgcctggagatcggggaggatatcgggcagttgtttatcttaggcggtgacgggacggtgcatgaatgcattaacgggattagccagcttcaaaccaagccagatatcggcatcctccctggcggtacatgcaacgacttttcgagggcgctccgcattccccagaacattgaaaaagcggcggaagcgctcgccaatggaaatcccgtcccggtcgatgttttaaaagcgaatgatcattattgtctcaacttttggggcatcggattgatcacggaagcttccagccatatcaatcaaacggaaaaagcgctgctcgggagaatcagttattttacgagcgcactgcggacaatctccaatcttgagcccttctctttccgactgtcgatcgacggagaagagtttgctgacgaagcggttatggtcgtcgtgctgaacggcccctttatcggaacgaacaaaatcccccttccgcagctgagcatcaacgacggaaaagcggacattctcgtctgccggaatacgaatctggctgcattgaaagagctttttgcaatggatgatcccgaatgggattcctttaaaggcgagctatcctattatcaggggcaaaccgttcgaattgaaaccgcccttcccatggaagccgatacagacggcgaaatctgcacaaaaacgccggcttcaatcgaggtgctgaacgggcacctccggatgctcacccccttagaaaaagaaaaaagctgaccctaaacgggccggcttttttaatagatggacgtatgatcatcgatctgttccaaaatctctttcacacgggcaaggaatctgccgcaaatgaggccgtcaagcactctgtgatcgagggataagcataggttcaccatatccctgaccgcgatcatgccatgctccatgacgacgggacgcttgacgatcgattcaacctgcaggatggcagcctgcggatggttgatgatccccatcgactgaaccgatccaaacgaaccggtattattgaccgtaaacgtacctccgctcatatccccgctggtcagcttgccgcttctgaccttatgagccagttcggagatttcccttgcgatgcctttaatcgttttttcatcggcatgcttgatgacaggaacatataacgcatcttcagtcgctactgcaattgagatgttgatgtcttttttctgaatgattttatctccggcccacatgctgttcatttgcgggaattccttcagcgcctgtgcgactgctttgacaaaaaacgcgaaaaaggtcaggctgaagccctcttttttcttgaattcgttttttattttgttgcggtagctcacaagacctgtgacatccacttccatcatcgtccaggcatgagggatttcatgcttgcttctgaccatgttggtcgcaatcgcattgcggattccagttacaggaatctcaacgtctccggccgcactttgaggcggtgcagcttgaggtgcggcttgcgccggtttttgatcaggttcaatcgctcccgcggcatttgcacccggctgtttttccggcgctgcatcagtttgaggaacagctccggaagcaatgatgcgctggatgtcttttcttgtgatccgtccgccggcgcctgtaccttccacctgctccaaatcgatgttgtgctctccggcaagtctcagcaccgccggggaataacgttttttctgagttgtatctttcgcctccggtttggccggctccgcttcctcttgatctggcttggaaacagcctcagcctccggtttcgcttcttcatttgtttcgactttgcagatgacgtctccgacttgcagagtttcgccttccttcccgactagctcggcaatcgttcccgtgaacgatgaagggacttcagcattgaccttatccgtcatcacttcagcaatcggatcatatttgttgacgtgatctccgacgctgacgagccatttgctgatggttccctcagtcacgctctccccgagctgcggcattgtcatttgttccactgccatacgatgtgtcctccttcgctatattaaaactcagccaattctctcatcgctgcttctgctttatccggattgaccataaagaatttttccattgtaggagcatacggcattgccgggacatcagggcccgccaaccgcttaatcggcgcatccaaatcgaacaggcaatgctctgaaatgatcgcggccacttcactcataatgctgccttccttcgtatcttcggtcatcaaaagcactttgcccgttttggaagccgcttcaataatcgcttcctgatcgagcggatataccgttcttaaatcaaggatatgtgcggaaatcccgtctttggcaagccgttcggcagcctgaagggcgaaatggacgcacaatccgtatgtgatgacggtaatgtcttcgccttcccgcttcacgtccgcctttccgatcggcagcacatagtcgtcactcggcacttcgcccttgatcagccggtatgcccgtttatgttcgaagaacagcacagggtcgtcatcgcggatggccgctttcaaaagccctttgacatcataaggcgtcgaaggcatgacgattttcaggccgggctgattggcaaacacggcttcaaccgactgtgaatggtacagcgcgccgtgcacgcctccgccgtaaggtgcgcggatgacgatcggacagttccagtcattgttggagcggtagcggatttttgccgcttccgaaataatctggttgacagccggcataataaaatcagcaaactgcatttcagcgactggtctcatcccgtacatggcggccccgattccgacgccggcaattgcggattccgccaaaggcgtgtccatcacccgctcttcgccgaactggtcgtaaagaccggctgtcgccttgaatacaccgccttttttgccgacatcctcccctaaaacaaagacgcggggatccttttccatttcttctttcaaagccaaagtgacagcatctatatatgacataactggcattgttcttcccccttactccgcataaacatgccgcagcgcatcttccggatctgcataaggtgcatgttcagcataatctgttgcttcattgacgatgtttgtgatctcatccgatatttgcttctcagactggtcgtccagaagacctgcttcttttaagtattgtgcgaatttgttaagcggatcatttttcttcgcctccgccacctcttcgcgctctctgtagcttcggtcgtcatcatcgctggagtgcggggtcagccggtatgatatcgtttcgattaatgtcggcccttcgcctcttccggcccgttcccttgcttctttaacagctttgtagacttcaagcggatcatttccgtcaacggtcacgccaggcatgccgtaaccgacggcgcggtcggaaatgttttcgcaagctacctgcttttcataaggaaccgagatcgcgtatttattgttttcacacataaaaatgacgggaagcttatgcacggcggcaaagtttgccccttcatggaagtccccttggtttgaagagccttcgccgaacgtcacaaaagttgcaatgtctttcttgtcaagccttccggcaagcgctacgcccaccgcatgcggaacttgcgtggtcaccggcgaagagcccgtgacgatccggtttttcttttggccgaagtggcttggcatctgctttcctcctgaattcggatcctcggcttttgcaaacgccgacagcattaaatcttttgccgtcattccaaaagcaagcacaacgcccatatctctgtaatacggaagcacataatcgttctcccggtctaaagcgaaagccgctccgacctgggctgcttcctgtccttgacaagagatgacaaaaggaattttgcctgaacggtttaagagccacatccgctcatcgagttttctggctaaaagcatggttttgtacatgtcgattgcttgttcatctgttaatcccactgcttcatgacggttattgcccatttttttcactccttcatgctttctaaaaatgaatcgcttttccatccacggcaagggcggcttctccgatcgcctccgacagcgtcggatgcgggtggatcgtttgaccgacttcccacggggtggcgtcaagcacctttgccagaccggcttcagatatcatgtctgtcacatgcgggccgatcatgtgaacgcccaaaatgtcatctgtttcgcgatcggcgacgattttgacaaagccgtccgtctcaccgtacacgagcgctttgccaatcgcctgaaacggaaatttgcctactttaacgcttttcccctgcgccttcgcctcaccctctgtcaagccgaccgatgcggcttcagggcttgaatagatgcattttgaaacaagcgaataatcgatggcgtgcgggttttcaccagcaatatgctcaacggccgtaatcccttcgtgagaagctacatgtgcaagctgaaggccgccgatcacatctcctatcgcatagatgtgggattcttttgtctggtacatgctgtttgtcacgataaagccgttttccacctggatatccgtgttttccagaccgataccctcaatatttgcctgccttccgaccgatacgagcattttctcagcggaataggattgtttttctccgtctttttccgcttgaatgctgaccgcatcgcctttctccaatgtgtcgggcagcacttttgctcccgtgatcattgtgatgccttttttcgcgagctgcgcctgcatttccctagaaatatcggcatcttcagtcggcaaaatccggtctgcatactcaatgacggtgacatcaacaccgaaatcgttcagcatggaagcccactcgatcccgatgacacctcctccgacgatcagcatggaagccggaagctgctcaagttcaagcgcttcgtctgatgacagaacgttttctccgtcaagctcaagccctggcagcgacctgggccttgagcctgtagcgatgatgacgtttttcggtatgagcatctcattttcatccccgttcgccatctcaacggaaaccgtcccaggcatcggggaaaaaatcgacggcccgagaatccgtccgattccttcgtaaacatcgatctttccttttttcatcaagtgtttgacaccgttgtgcagctggtcaattattttttgttttctgctttgaacttgagaaaaccgcagtccgacttcaggaatgaccactccgaattcgtccgccttttttgctgtcctgtatacttccgcgcttctaaggagcgccttcgacgggatgcagcctttatgaaggcacgtgccgccgagcttctgcttttcaacgacggctgttttcagccccagctgcgaggctctgatggcggccacatagccacctgtgccccctccaagaatcacgagatcgtattcagttgccatgactttccctcctctggttcggatactgttttgcctcttcttcgccgttcaatacgcgaaatgcaccttcagccaatgcttgaagttcattttctcctggaaagacgacgacatccgaaatccagtctatgtattgtctgatcgaggaaataaacgattttccatatgccagtcctcctgtcaaaataatgacatcgacttctccttttaagacggcgctggccgccccgatttctttggcgatttgataagccatcgcttcatagatgagcgcagctttttgatcgccttccttgatcattttctcaacttttaccgcatccgtcgtgccgagatagccggcaagccctccgccgccgacaagcattttcatcagctcgtctttcgtatattcgccggaaaagcacatatcgatcagatcacccgcaggaatggttccggcccgctctggactgagcggaccttccccgtggaggccgttgttgacgtcgatcacccggccgcggcaatggacgccgatcgtaatgccgcctcccatgtgggtgatgatcattttcatatcttcataacgcttcccaaactgccaagccgctttccttgcgactgctttttggttgagcgcgtgaaaaatgctgcgcctttcaatagccggggtgccggaaatttttgcgataggagccatttcatccacaacaacggggtcgacgataaaagcgggaatatttaacccgtcggcaatctccctggcgatgatgcccccgagatttgatgcatgctgccccgcatagccgtttttcaaatcgacaatcatcgcatcattgacttcgtaagtgccgccttcaatcggccgaagcagccctcccctggcgcaaacggcatccaatttagaaatattgattccctgttcatgcagggtttcgagtatcgcctgttttctgaacgaatattgatcaataatggtctgatattgctgtagctcagcctcgtcatgacggattgatttttcgaaaatcgaacggtcatcatgaaaaacgccgatctttgtagatgtagatcccggattgatgacgagaatacgtttttcctgtacctgcattgaattaaaacctccaatagagaataggggttatgattttaacgtctgcttaaaatgtgatggccgttttgcaaaaattggcttctcgattggcgcatgcgctcaattcgttcttccgccagacggtctgcggccaagtatgtcggaatgcggtcgcgcttcgaaatttcaaggacgcgttcaatgtttccgtagatgccttcgactttcttcagcgcgcgctccgaattatagccgtaaagctcgtcagcgacattgatgacgccgccggcattgatgacatagtccggggcataaacgatgcccatgtcgtggatttgatcaccgtggcgggtttctttcagctggttgttggctgccccggcaatcactttggctttcagctgcggaatcgtatcatcgttgattgtcgctccgagggcacacggcgcatatatatcgcattcctgcgaataaatatcatccggatcgacggcgcgggcgccgaattcggcgactgcacgttcaactgcttctttgttgatgtcggtcacgatcagtttcgcgccttcttcgtggaggtgccggcacaggttgtaggccacgtttccgacgccttgaaccgcaacggttttgccttcaagcgaatccgttccgaatgccgctttcgccgccgccttcatccctttatataccccgtaagctgttaccggagaaggatttcctgatgaaccgaaagcaggtgaaatgcctgtaacgaaatcggtttcgtcatgaatgatgtccatatcttcaacggttgtaccgacgtcttcggctgtgatgtatctgccgttcaagccttgaatgtagcggccgaaagcgcggaacatttcttcgtttttatctttgcgcggatctccgataataacggttttgcctcctccgaggttcagtccggccgccgcatttttgtaggtcattccccgcgcaaggcgcagcgcatcttcaattgcggcttcttcactttcgtatgtccacattcttgtgccgccgagagccggcccgagcgtcgtatcatgaatcgcgatgatcgcttttaaaccggactgtttatcttggcaaaataccaattgctcgtagtcatactgttccatatatcgaaatagttccattttttattcctcctcatgtcgtgcttcagacgtacacagcgccaaagcaatcgaatacaacttgttttctgcggaatcggccctgcttgtcaaggcgatgggtgcttttgcccctgctaaaatggctcccacttttgcacccgcaaaatgaatcaatgatttataaaggacattgcctgtttcaattgaaggaacaagcaggatatcggcctcgcctgctacgatcccggaaatgtttttatgccgggcggcaagcggcgatatcgcgttatccaatgcaagaggcccgtcaacaacgcagtttttgatttggccccgatgattcatctgcgtcaaggcagctgcattcaatgtcgcttccatcgcgggattcactgtttccactgcggcaagacaagcgactttcggcatttgcacgccgaccgacctcgccacgccgactgcgttttctaaaatctgcttcagctcatcaagcttggggctgatattcatcgccgcatctgttacataaatcagcctctcaaacccgctgacttcaaatgctgctacatgtgacagcacgtgcgaggaacgaagcccgtactctttattcaaaacggcttttaatagcacagctgtcgggacattccccttcataagaacatccgcattgccgcttttgacagcttgaacggcaattctcgcagaatccgccggcgattccgaatgaatgatatccacgtgccgttttgaaatattctgctctgtcatcatatgtctaagtttttctctgtgcccgatcagcaagaaccgggcaaattgtttgtcgaccgcaagtttgaccgcttgcagcacttcgtcatcttccgcatgtgcgacggcgaccgttttattgtcaagctccgccgctttttgcaatagttgtttcagcttcatagtacccacctttctaagcaaacatccgcccactatatcatgcaagtttcgtgccagtatgaaaaaagcggtcggtactgtgaacctgtttacagtttgcatgattttgcactcgtttttgcaatttattgcatgctatcttttgcaaggttgtatttatccattttgtaatagaggttgcgaatgctgattccaagagcttttgccgttttcgttctgttatattgatgcttttcaagcgtttctttaatgatatgagcttcaaaccgttcgaccgcatcagacagcttttcatcttcaatttcagggaaagcttcgccggcttccaccttttttctcggacggtccgcttcaggaagatgttctagatcaatccattccatttgcggttttaaaaaaatcatcgcccgctcgaggacattttcaagctctctgacattccccggccacttccgcgcttttagcgatttgagggcgtttttcgtaagcccctttacattgcgcccgtactcttggttgatcttccctatcaaatgcctgctcaaggcttcaatgtcctctttccgctgtctgagcggcggaatcgatatcggatagcgattgatccggtagtacaagtcttcgcgaaaccggccttcagcgagcgccttttcaatattgacgttagtcgccgcgatgacccggacgttcacagggatcggtttggtcccgccgactctgacgatttctttttcctgaagaacgcggaggagcttcgcctgtgtgtttagcgagagctcgccgatttcatccaagaaaatgcttccgttgttcgcttcttcaaagaatccttttttcccgccgcggcgcgcacctgaaaaagcgccttcctcatagccgaaaagctctgattcaagcagtgattccgatatggccgcacaattgacgcggacaaacttattatactttcggtcactttcgttatgtatggcatgggcaaaaagctctttacccgttcccgattcgcctctcagcaaaatcgtcgcaggcgtcttcgcccccaatttcgcctgttccagcgcgacgagcatctgctcgcttgacccgatgatgtcggcaaatgtatatttcgcctcaagtgtacggataatctgccgtgctctgttcagctcgtttgtgagcgattgaatttcagatacgtcgtgaatgacgccgacgctcccttttaaaatgccgtcgacgataatcggcgcaacattgacgatcacttcttttttattcgggccgactttcattctgacccctctgacagggcgcctcgtttcgagcactttcaaatgcatgctctcgccttcagatatgtcggtattagccggcttcccgatcacctggtcttttgtcagacctgtcatcttcgtatatgccctgttgatcatcattccgtttccgttttcgtcaacgaccgaaatcgcttcatcggaagattgaatgatcgcttcaagcatcgttctgacttccttcaggttggtcacctcttcagccagctcgaccgcatcggtaatgtccttaaatatgctgagcgccccgaggagcgttcctccgtcatcaataatcggaattcgggtcgtgacaatctgcctgttcggatggagaaattgtttttgatgatactcaggctctctcgtgttgagaatacgcggcagcttcgtcgtcgggatcacgctttgaatatgctggcctatcgcttcgctgcgctttgttccggtcataacctccgccattttgttaaacaaaatgatctcttcgttaatgtcgataaaaatcatgccgtcattcatcgagttgaaaatacggtcgtgtttatacgtctgctcttttaacatttggatgagctgctgcttttcattcatcagctgagagatgatataagcgagcgatcccggcaccacgatcgttctgtcgtgcttttttcgcatcagctgctttaacacgccggcgtctccggtcgtctcaatgatgatgtcgatctgttctgtgatgtatggcgtccagtcgagtgccgtttcgatatcgtttttctgcgcgacgaaaagcccgggagcttccggatttttatcgatgaccgcctcgatatgcatcgtctttgttttcagcagcaaatccaagagggcggtccccccttttccagcaccaacgatcagtactttttgcatcatccctttacccctttgtatgaaaaattttgcacactctcacgttctcttgcaacaatttgcacaacatctatgttatcatgttttcctttcttgacaaacttttttttcaaatagacaataaaggtaaatctttggtaaggggattcgtgtatggggagaatgatcgcactgctcgttttgctgatcccgggaggcctggctgctctcggaattaaattgatgcgcgacacggttttcggcattttgatcggcccgtttcagatcctttggcttcaggggctggcggggttcatatgcttcgcaggcggcctttatttgttaggcggatttattctatacagagacagaaaacgcaaccaagtaagcccccgtttcagaaaaaagcagagcggccgcgaggtgtgatatctgtgaacaagaaaaagccgcagacaatatctgcggctttttgcatctcacatctcggcctttaattttaacgctttttcgggaaagtcggtgaagaaaccgtctattcccgcagcaatcagctttttcatctcctcttcacggttgatggtgaacggcctgaccgctttttctttcaaatgggcgtttttgatcgtgtcatccgacattgaacggcgatacggatgaaatcctgaagccggaatcatctcaatgtattcctccggcttgtagatgacatccatgtaaagcgcagccaattcaatacttggattcagtctgtggcataacgcaaggctttcatgattgaatgatgaaagaatgatccggtcttgaaggtcgtacgcttcaatcatcgacatcactttttcttccatcccttcatagcggataatgctgtttttcaattcaacattaagaagaaattcagcatctgccgcccactcaaacacttcttcaagggtcggcacaggaacagaaccggttttttcggcaaaacggtggcttgcgtctccatgttttatttcctcatatgtaagatctttcacataccctttcagtgaagtcgtcctgtcaagcttttcatcatgaatgacaacaagacgtccgtcttttgccatttgaacatccaattcgatgccgtctgcaccaatggccgccgcatgcttaaacgccgccattgtattttcgggaaaagtgcctgaagcccctctgtgtgcaaatattttcgtcatttctggttcacctctacaagaattgcaagtttataacccattatgaaggtcttactgttttctttccacacataaggccttttttaacataaacataacacaagaaccccggtcatataccggggcccttctattattcataataagatacgacagcgtcagcaatcgcgtctgcagctttttcctgatattccggactttcgagtttatctgcatcagttttgtttgtgataaagcccagttcgactaaaacactcggcatttgagaatttttgatgacataaaaccctgattcttttacacctctgtcccgagtgcccagcgcatccggaagccgctcttgaatgtcagatgccagccgttcgctgtcagcggcttgatacgtggaatcgaaatatgtttctgtaccggacgcttcagggacggccgagtttgcatgaatgctgataaacaagtctgaagcatttttgctcgccttggccacccggtcttccagcgtcaaaaacgtatcatccgttcttgaggcgactgtgtcggctccttcttctttcagcttttcatcaatcagcattgccacttcaaggttgacatctttctcaagcagcccgtttccgacagcaccgctgtcttcacccccgtgacctgcgtcaacatataccgtcttcccggaaagcggctcagccgcaaaagcagctggaaaagccgccataaacgaaaacagcagcaaaacaaaactctttattaacagtttcacgatttgttcctcctacaatccctttttgcaaacgatcattctttctttttcatatcttcaagctgtaatgttccgtcctctgctttcgtgtactccacttccacctttgtatcatcctcgatccctttatatttgtcccgtttttcgggagggacctgaaacatcgtttctttgccgtcaatattgacggcgacggtatgctggtccgccaaaccgacaaaggtgccttctttcacgagcgtttcctcgcctgttccttttcggctctcatcaccgctttgcccattatgctgcgttgtgccgcagcctgccataacagcatagcgaacagaacaaggatgactcctttcctcatgtcgaccacctcacccgctgaattttttacaccccgtaccttatctttaatacccggggctgtaaagcaagccgcagcagcaggttttcgcccgctttccccgtccaattccccaaggatttccgaattgttagaagccatccgcgtaaaaacgtctgtgaaaaacgatctacccaaggcgaaaaatggctgtaaactggaagaaatcagatctttttcatcatttttatttttttgtataaaaaaacgtcttttttcttatgaaaaaagacgttttattcggctttcgctttatatgatccagtctatgacagcaatgctccgagcgtgagacaaactttgagaaatagacggaaacacaactggctgccgcgctatgtagtttttttgtcagaacttgcacgaatgcaagatcaaatattctttttaaatcatttttacatttaggccttcatagcggatgatcagcagcgctgctccatttcccatgcttgtatttgccgctgaacagcttgcttccggtctttatttgacggcgcctctttaatctttttggcaggcatgccggctattgtaatattttcctcagtgaaagatttgttgaccacggcgtttgcgccaattgatatgccgtcagcaatgtgaatgtcgccaaagagctttgcccccggcccgatccagacattgtctccgattgtgggaacatcgcggcgagcgtgattttgtccgatattaaccccttgatgaatgtcacagtttgcacctatttttgcattgctgtttacgatgagcaatccgtaatggttaatcctcaaccctggcccgaaaaaattcaccggatagcgaagatctgttttcgtaaagatcatcataccacccgcttatttcatacttttaactcgagatcggctcttcgaagagttttacattctccgccatctatttcctacttgatactaaaaggaaaacaaaaaaagggggagccccccttttttggttcatccttcataaaaaccaacccaagtattaaaaacattactgtaaaatttccctttgaaataccatgttccatcgctatcagaaaatttgttactgaaaactccagaagatgattttacacattttgatgatttactgcttttgaatgagcttggcaagtcacttggacaattgatatattgagcagtcggatgtgcaatcacctcagatgaatgcgatgcagcaaataccggcgctgcagaaataagtaaaccaacagccagagtcgtaccagttaataatttattgaccttcattttaaaacaactccttttccatttatttcatttctatttcatcatataacatgcaggtatgtccaaaaagtgtacaaattacaatatttcggaatcaatagataagcttttaggatgactttacacaatacacactgtgctgaaatgattcacctttttgatcttacatcgcaaacagtacatttgcgggcaaaaaaaacggcctcgtttataaaaacgaggccttcaaatactgtattaaacccttcggatcgtagcacaattttcatcgcaataatgggcgaaaaattcatcggaattacgataaactattcgttagaaacaggtcgaaaattcgacggttaaatcttcgttaaaactgcgtcatatcaacgtttaagaagccttatgctccagtctcagcttgtctgcgaccatcgcgatgaactcactattggtcggctttgcttttgacatgctgactgtgtagccgaaaagtgacgaaatcgagtcgatgttgcctctgctccatgcgacttcgatggcgtggcgaatcgcccgttcgacgcggcttgcagtcgtgttgaattttttggcgatatccggataaagcacttttgtaatgctgccgagcagttcgatgtcgttatataccatggagatggcttctcttaagtacaaatagcctttaatatgagcaggtacgccgatttcgtggatgatggtcgtgatgctggcgtccaggtttttcttcggcgattcaggctgcggccgaagcacactgctttgagaggacggggcacggtgtgtcaattgagatccgtttccgctgacctggcggatatgtccgactaaattctccatgtcaaaaggcttcaaaataaaatacgacgcgcctaaatctacagcttttttggtcacgtcttcctggccgaacgccgtcagcatgatgacattcggctgctttttaagctgcgattccctcagcctttcaagaacggccaatccgtcgagatgaggcatgattatatccagcacaagcacgtcgggctccttgtctttaaacaaagaaaggcattcctgtccgttgtatgcgacaccaagcacttccatgtcgctctgtccctcgatatattcgcttaataggccgacaagctccctgttatcatcagcaacacatactttaattttctccacgtttcttcctccccaatgtgtatgttgataaatttcatcattctttttctaatatgtttaattcgacagcaccactttattccctttttttaaaaaggatttttccaataatagtggtatgtctagctttttctctgtttttttctgattttctcgatttttcgacttaaaatgcgacttgacaaaccggggaacgtgaatttgtcgaaaaatcttttcttctttcattttaacgcacaacgcccaagaaaaaaaggcgaaatcaaaaactgccggaggaatccggcagtcagcttgctttttcttttttataaatatcgattcccgcttcagacagcatccattcaatatgcacaccgtacccgctcgtcggatcattgacgaaaacgtgggttacggcgccaatgatctttccgttttggatgatcgggcttccgctcatcccttgaacgatgcctcctgttttactcaacagcctcgggtcggtgattttcagcaccatgccctttgtggccggaaacttctgaggtgtcgtactgacgacctgaatatcgaatttctcgactttgtcgttttcaataaccgttaaaatttgggcagggccttcttttacttcatctgaaaatgcaatcggaatggctttgtcagcgatgcggtttttaattgactcgtgaagcgttccgaagatcccgaatggactgtttctgttgatatcgccgatcacttttcgttctgatgcgaaacgagccagtttctctccgggatttccgcctgttcctttttcaatcgaggtgacggtcgatttcacgatttgtcctttttcaacaacgatcggttttttcgtatccatatctgaaatcacgtggccaagcgctccgtattttttcgatttcggctcgaaaaaagtcattgtgccgattcctgcggcagagtccctgatatataagccgattctgtatttgtcttcagcctggtcttttttcggaacgagcttcgttttgatttcctgtttatctctttttatcgacagatgtaaggtttctcctgtttttccggccttttgaataaaaggggtaatgtcattcattttctcgattttcgtgccgttgatttcggtgataatgtcgcctaccgcgattccggctgcttcaccgggcgattttttgccttcagaggtattgatttgatgaaaacccacgaccaatacaccaacggaatgaagttttacaccaatggactgcccgccgggaaccactttcaaatcaggcaggacatttactttcgtttttttaaccggaaatccggcaaagtcatagacgagttctgcctttccattcttttcgccttttatttccacttcgttttgattttctttcaatgtgaatgcttctgatgatccatctttcggagtactgacggataagctcgtttcaaccgcacgggtacccgtctcaaaaatgttcaaattttttggtattacaatgtattctttcaccggtttgtaaaatcctacacttattaaagaaacaaggagaattatacccacagcttttctgattttttcaacatccaccttttcactctcctcgcacctaacccacaccatataaatttctttcgctacattcattacttttgccttccggacggcgatttataactgtgaacggaagaaaaacattggataaaatgataagaaagagtttgtataagaaaatgccgacaaaaaaataagctgttcaaaaaatgaacagcttatccgctggttttgactagcttagcttgatttaaaagttctttcgcatggcgcttcgtcaaatccgttacttcaacgccggcaatcatccggccgatttccgctattttttcctgttttgacaaaggtgtgacgcttgttgttgttctcccgtctttcgactgtttcgtgatcaaaaggtgggtgtcagccatcgcggccacctgcggcaagtgggtaatgcataaaacttgagagccgatagagactcggtgtattttttcagcgatcgcctgcgcgactcttccgcttacaccagtgtccacttcatcgaaaatgatcgatgtaacatcctgctgagcggagaaaatgcttttcatcgccagcatgattcttgagagctctcctcctgaagcaacctttgacaaggatttaagcggttctcccgtgtttgtggagatcaggaaacgaacggtgtcaatgccgtgctttgtgagctgaacagacattccgttgacgacgggtgcatcatcatcccgttccgcttttttcacatgaaattccgtatcaaatgtcgatttttccatatacagatctttcaattcctgctgaatctgtttggccagcttttccgcccatttttttctgatttcggacacattggctgcttcaatcgccacatccttgccgattgattcgagtcgtgattttaaagcctgcaagtggctgtcccggttttcgatccggtcgatttcttcctctatcttagccgaataagcttggatgtcttcgacagtagcgccgtatttgcgtttcagctgtttgatttcgtttaaacgcgattcgatataatcgaggcgctcggggtcgtattcgagttcatccagcatatttctgatctgaaaggttgaatcttcgagaatgtagtaagcgttggctaccgattcagatactttattgagcccttcattaatgcctgagacgttttcaagctcgcttgaagccatgccgacccagtcaagcccggcctgctcattgcgaagcgcattataggcattttgcagcgcttcgtatattttttcgaaatttgcaatttgacggcgctcttcctgaagaagctcgtcctctttcggctcaaggtttgctgattcgatttcgtcaagctggaactgtattaaatcgagcctgtgagccatttcctgctcgctttcagaaagctctttcaccttcttcatgacatccatgtagcggctgtaaacttcctgatacgcttttaaagcattctcgatttcttctcctgcgaacctgtccagaagctgaagatggtgctcgtcctccatcagcagctgattgtcgtgctgcccgtgaatgtcaagcagcagtctgccgacttcccgcaatgcggcaatggtgacaagttttccattgacgcggcagatgcttttgccgtttgcgttaatatctcttctcatgacgatcatgtcgtccgaggcttcaatccccagctctgtgcacaaatcaaaaaccggatggccgccgtcaaggaggaaaagcccttccaattcggcccttttttcgccatacctgacatattcggacgatccgcggcctccgacaagcaaagagacggcgtcgatgatgatcgattttccggcacctgtttcaccggttagaaccgtcagccctttttcaaaagaaacggttaattcttcgataatcgcaaagtttttgatcgataattcagctaacaagctttcatgacacctcttttcaggccttcgtttataaaagctccaatattttcttctgtacgactttcgtatcatcatgcgtccggcagatgatcaaaatggtatcatctccgcagatcgttcccatgatttcttcccaatccaaattgtccatcagcgccccgatcgcctgcgcgtttcccggcattgtttttaacacaatcagatggctggctgagtcgattttgacgaatgcgtccattaacgatctttttaatttggaaaggggattaaagcgctgatcagcaggcaggctgtatttgtaggaaccgttgtttgtcggcaccttcaccaaatgaagctctttaatatcccgtgagacggtggcctgcgtcacattatagccgtctttctttaaaatatcgacaagctcatcctgcgtttcaatttcattcgcggtgataatctccctgattttaatatgcctttgacctttgttcatttcacacctcgttttatacacaaattgtgtatgtttatacatttatgttaaatgattttgtcggaaaagtacatgtttgcagtaaaaaaggaataatagcccactattattcctttttgcgtgccggccaaccctcgcattcgccgtacggccctgcaagggtttttaatcacgctgatccggttttttcgcttttaatgtcttgtgagcctcttcgacaatttgattgatcgtttcttccgctatcggcgttccggattgcgcctctccgtcccaatgcaaatggagaaggaattcgatgttgccgtcgccgccggtaatcggagaaaacgaggcgtttcggcagtcgtatccttctcgagccgcaaaccggctgatgtcatcaagcacagctttatggacgaggggatcgcggacgatcccttttttcccgacggattcccgccctgcttcaaactgcggtttgacgagagcgatgcagtcgcttcccggcactaaaatgttcttcagcacagggaggatgattttcagtgagataaaagagacatcgaccgtcgcgaactccggcagcccttccgtaaaatcggcaggtgtgcaataccggaaattggtgcgttccatcacaacaacccgctcatcctgcctcagcttccaggcgagctgattataaccgacatcaacggcatatgagcaaagagcgccgttttgcagcgcacagtctgtaaagccgccggtggacgagccgatgtcaatcatcagcttgccttgaacggagagctgaaactcctttaatgctttttcaagttttaatccgcctcttgagacgtattttaacgggtttcctttaacggtcagcgggatcgtgcggtcgaccttttcgcccggcttgtccagtctgttttcattcgtatagacaatgccggccatgatggctcttttcgctttttcccgcgtttccattaaccctctttctactaataaaacgtcgagccgttctttttttcctgtcatgatccaattcctttatgagtctttacgggcgtcaaaagtcttattcgtctgatgacgtcttcttttgtcattccgatctcttccagaagcttggcgacgctgccgtgttcaataaattgatcaggtatccccattctgtcaatgatcggactgtaagactgatgttcatgggcaaactcaaggatcgagctgccgaatccgccttgaagcacagcctcttcgatcgttaaaatcggaagcccctcgttcaggatttccttcagcatgttttcatcgagcggcttgataaaacgggcgtttaccactctgaccgaacggccttctttttgcagctcctccgcggcagcaagcgccatcggaatggtggtgccgaacgttaaaatgaccgcgtctgtcccaggtcgcagcacttcccacgttccgatcgggatcgtttttaattctttatccattttgacgccgagtccgtttccgcgcggaaagcgcatggcaatcgggccgtcgtcgtatttgacagccgtgttgaccatgtgctggccttcgttttcgtcttttggcatcatgagaaccaaattcggaatatgccgtaaaaaagcaatgtcaaacacgccctggtgtgtttccccgtcggcgccgacgagacctgctctgtcaatgccgataaatacatttagattttgccggcagatatcatggacaacctggtcataggcgcgctgaagaaatgtcgaatagatcgccagaaacggcttcatattctgtgtcgcaagtcccgccgccatcgttgccgcatgctgttccgcaatgccgacatcaaacatgcgctccggaaattcgctcgcaaacccttcaagttttgaaccgacaggcatggccggagtaatggccacaatccgttcatcctcgcgggcaagcttcctgaccgtttcgcttacgagcgagctccatgatggtgcagcagctttcggtttgacaaagtcaccggtatcgattttatatgggccggttccgtgccatgttccggttttatcagtttccgcaggcttgtagccttttccttttttcgtaataacatggaggagtaccgggcctttcgttttcttcgcatactgcaagttctcaaacagttcatcgtaggaatggccgtctacaggccctaaatacgtaaatccaagctcttcaaagaacatcccggatacgagcagatatttaaggctgtctttaatccgttcggctgtagcggcaagctttccgccaacagcaggaatccgcttgaacaaatactcgagctcatctttgacccattggtattttccggctgtacgcagccttccgagcatggaatgaatcgctccgacgtttggagcgatgctcatttcgttgtcattcaaaatgacaatcatatctttttgttcatggccgatatggttaagcgcttcaagagccatgccgccggtcagtgcaccgtctccgatgatcgggatgatatattcgtttgtgccttttaagtctctcgcagccgccatccccatcgcaccggagagagaagtcgagctgtggcccgtttcccagacatcatgttcgctttcattccgctttggaaaaccgcacagccctttatgctggcgcagcgtggcgaagtcctttccgcggccggtcaacagtttatgaacatacgattgatgccccacatcccacaagaacttatctttcgggctgtcaaattctttatgcaatgcaatggtaagctcgacaacgccgagattcggaccaatgtgccctccggattcagaaagcgtttcaattaaaaaacggcgaatttcagcgctcaagctttccagttcttcatttgaaaggttcttcaaaaatgcagggtcctttatcgataacagatccaatcggatcaactcactttcagcatgatttctgcaagtatgcgccttgcttcgttttaggttttcagcttgaattattatatgatgaattcatccccatgcgcaaacttgcatatgcggacgcttcgtttgaaaaaacagccgctaacacaacgtgataacggcgcggcgttttagagttcaactctctacattttatcacaataagcctttgatgctcaaatggaagccctgtatcaatgatccctagcggcaatcatatcgcagaactcgtacataagctctttttcaagcggaagctctgaaatcagctgttttgctttttcaatatgttcatcaagtttttggctggcgccctcaagcgaaaggagcgacggatacgtcgactttccgtttgaagcgtcggatccgatccgtttgccgatcttatcctccgagccttcaaggtccaaaatgtcatctctgatctgaaagccgatgccgatatgatggctgaattcgcgcagcttttcgatctctttttcagatgcatctgcaagaatggctcccgcaatgacgctgaagctgaggagtttagccgtttttccttcgtggattcgctgcagttcatcaagagatacagactttgattccgcttccatatctaaaatctgaccgccgaccatgccttcggcccccgctgccgaaatcagctcgttcaccagtctgatgcgcttttcagcggatacatcagaaggcatattggaagtgatcattttgaagctttcggttaataaggcgtctcccgcgagaatggccgtcgcctccccgtaaattttgtggtttgtcggcttacctcttctgaggtcatcgtcatccatacaagggaggtcgtcatggattaatgaatacgtatggatcatttcaaccgcgcatccgactggaattccggcttcttcgtcttttccgtacgcatgaagaagcgcaagaaccaatatcggtctcagccgtttccccccggcttccaatgagtacagcatggattccttgaggatggacggcgcttgcaagtctttaatatacatcggaaggcgctcttcaattactgtttttctcgattttaaaaatccttcaagtttaccggtcacctttttcctcctcccgaacactgaaaggagctaattccccgttttcccgcaaaatgaagtccatctgtttttcgacattttgcagtttttcgtggcatattttcgaaagagccatcccctcctggaaatagtcgatcgccttttccaaaggcacgtccccttcttcaagctttgatacgatctgttccaaacctttcatcgcctcttcaaatgtcaggtcatcccggtttgttttgttttcttcagccatttgtttcgcctctcttttgcagtacctcacaggtcagcgtcccatcgtttaatgtgacgcggatctcgtctttttcatgaacctgttcaatacttttaatcaattcgttttctttatatgtcaaactgtaccctctttccatcacttggagagggcttaatgcattcagtttaccaagaaccgtttgaaactgcgagtgaatctgcttcagctgcactttcatattccgcttcagccggactgtttgctcttcatgcctttttcgcgcttgtttaagctgctcctcgggatgaagcatctccagcttgtatgtctgttcgttcagtttttgttttttgcggtcgacggtcatcgccagctgtttttggaaacggtcgaatatcaggtcgaattcctgttccttttgggcatatagccgcttcgggtatcggaaggcataggaggactgaaggtttttcacccgctcctgccgcttttttaagtcctgctgcatcgattttgtcattctcgcttcgagcgttttcagacgctccagcaaatcaagcatattaggtacggccagttcggccgctcctgtcggggttgccgcgcgcaaatcggcgacaaaatcgctgattgtaaaatccgtttcatgcccgacggcagaaatgatcggaatgtcagaagaaaaaatggccctggcgacggcctcttcgttaaatgcccacagctcttcgatcgatcctcctcctcgaccgacgattaatacatcgcataagtctctgcggttagcctcttcaatgctgcttacgatggactcgcccgcgtttactccttgaacgagcgtaggaaggacgatcacttttacaaggggatatcttcttttaatggtggtgatcacatcgcgtacagccgctccagttggagacgtgacaacaccgacgacggatgggaacgcggggatgggtttcttgtatttttcatcaaataagccttcttgcgatagctttttcttaagttcctcatacgcgagatgaagcgcacctatgccgtccggctggatttcttttgcataaagctgatagctgccgctcggttcatataccgaaatgccgcctctcaccaatactttcatcccgttttcaggggtaaaggcgagattcctgttttgtctggcgaacatgacggattggatgcgggcgttatcatctttcagtgtgaaataaatatggcctctgctatgtattttaacatttgacagctcgcccttgatccaaatatcttcaagatgagggtccacgtcaaatttgcgcttaatatattttgtcaaagccgtgaccgtgacaaatgatatttcactcatggcacagtctcctttctaagaaggcacaagaacgttcatccgccggcgcgagaccaggcggatgaacggctgtacattaaagttgaattgtacgcttcgctgatttaaccgtgttgtgggccagcattgtaatcgtcatcggaccgacaccgcccggtacaggtgtaatataggaagccttttccttcgcttcttcaaaatcgacatcaccggcgagctttccgttgtcaaggcggttgacgccgacatcgatgacgacggctccctctttaatttgatccgctttgatgaaattcgcctttccgacagcgacaatcagaatgtcggctttttttgtatgagccgtaatgtcggccgttcttgaatggcagtacgtaacggttgcgttttcgttcaagagcagctgccctaccggctttccgacgatattgcttcgtccgacgacaacaacctcttttcccgacaggtcaatctcggttttctttaaaagctccacgatccccgcaggcgtgcaaggcagaaacgtatcttcgccaagcagcatcttccctacgtttaatggatgaaaaccgtcaacatctttctcaggggatattctctcgatcaccgcttgttcggaaatatgatccggaagaggcagctggacaagaattccgtgaaagtcgtcattttgattgtactggtcaatcacttcaagaagctcctgttcagtgaagcttgcatcgaaatgatccagctgaaaacgaatccccattgcttcagctgcttttttctttccccgtacatatgaaagagacgccggatcatcaccaattaaaataacggccagtcccggggtaactccttgttttttcagctcttcaacttccttggccagctgcccgcgcttttcctttgctgtttctttcccgtcgatgatggttgctgtcatttgctctcctcctagattattcaagatcggatttaatgttagaaagaacaccgtttacaaacttcgccgacttgtcatcaccaaattgctttgccagttcaatcgcttcattcatagagacgttgacaggtatgtcatctaaaaagatcatttcgtaggcggacaaacgcaaaatcgcgcggtcgacattcgccagcctgtcaagcttccaattgacgagatgccgcttgatcatctcatcgattttctctttgttctctaagaccccgtaaacgagctgttcgaaaaaagcatcgctttcctgcccgtccaaggcatgctgcatcgcttcattcggttctatatcactgacatcaatctggaatagtgactgcaaagccttttctcttgctgttcttcttttcattctttctttttctccttttaccctctttgctgcttgccgtttaagccacaaagagatcatatcatatttttagtctttccgcatgcaaaaatcgcggttttatcgtcaataaccgaataataaggaacaatcgtttattatcattcgtttttcgaacttctcaacaaactcaccggttcatcttatttttgatcgatatcggcggaaagatgcttttaaacgtcattttttaaaacggaacatgaaaaaaccaaagggccgtcattccccttggttcttccacttcaccgcactacatctcttgatcgatttccacctcgtgcgtttttgaatcgaattgaatgccaacgatgtgaatattgatttcattaatcgaaagagctgtcatattgagaagcgtctggcggatattatcctgaacggcattcgcaactttaggaatcgacacgccaaacatcatcacgcaataaacatcaatgataattccgtcatcggacaaatcaactttgacgcctttgccgtgattcttttttccaaaccgttctacgacacctgtcgcaaaattgccgcgcatttcagctacgccttcaacttcggaagctgcgattccggcaatgacttcaatcacttccggagcgatttccacttttcccaaatgattgtcttcatggctcatttccaataagctgttgtcgtctttcaatatgttcacctccgttaaaattacgaccccattacatcatatatttctaaaaacttcgtattaaattctccgcttacgaatgtttcgtgctcaagcagcttcagatggaacggtatcgtcgtatgaacgccttcgatgacgaattcgctcagcgctcttttcatccttgaaacagcttcttccctcgtctttccgtaagtgatgactttggcaatcatgctgtcgtaataagggggaatcgagtatcccggataagccgcggagtccactctgacgccgagccctcccggaggcagatacatctcgatttttcccggagaaggcatgaagtttttctcagggttttccgcattaatccggcattcgattgcccatccgttaaaggtgacttcatcctgggtgagggttaatttttcgcctgacgccactctgatctgctctttaatcaaatcaacgcccgtcaccatctctgtcaccggatgctcaacctgaatgcgcgtgttcatttccataaagtagaacttctgctcgcggtaatcgtaaataaattctaccgttcccgctcccgtgtacttcacggcttcagccgctttgacagcggcctgccccatctgctccctgattccttcatccagagcaggtgaaggggtttcttcaagcagcttttggagccttctttggattgagcagtcgcgttcccccaaatgaatcgtgtttccgtgtgtgtctgcaagcacttggatttcgacgtgtctgaaatcttcaatgtatttttcaatgtacacacccgggttgccgaaagcggtggcagcttcctgctgagtgattttaatgccgttgatcagctcttcttccgtccgggcgaccctgattccttttccgccgcccccggcagttgcctttataatgacaggataccctatatcgcgggccaatgaaaccgcatcttcaatatcttcaataattcctttggagcccggtacgatcggaacacccggcctgctgcattgtttcccttgcaacatcctttgtcccatcttggaaatcgcgtctgctgtcggcccgacaaaggttacatttacctcttcgcaaagctcggcaaaatcggcgttttctgccaggaagccgtagccggggtgaatcgcatcagcaccggtcattttggcgacgctgacgatgttcgttatattcaagtagctgtcttttgaaagcttaggtccgatgcaaaatgcttcatcagccatctgaacatggagcgcctctctgtcggcctcggaaaagacggctaccgtttcaatccccagttctttacaagctctgataatcctgacagcaatttctcccctgttcgcaattaatagctttttgatcatcttattgctccttactctgcttttactaaaaataaaggttgtccgtattcaaccagctggccgttttcaactaatacttcaacgatctcgccttccacttcggcttcgatctcattgaagagcttcatcgcttccacaatgcagacgacagaggactctgttaccttcgagccgactgttacgtaagggtcggcttcaggcgaagaagatgcataaaacgttccaaccatcggagaggtgatcttgtggaagtttccgccttcttttgccgcttcttcttttgcaggcgcatcctgaacaggcgcttgcttggcctgagcttccggagccggtgcctgaacaggcgccgcagccacttgctgaatggtttgcacggttccgctttgttttttcagttcaaccttcgatccttcgttttcgtatgtaaattcatttatcgaagattcatcaattaattttatcaactgtctgatttcatcaatgtttaacatgctatcgcactcctaatgaaaaagattttacgcaattatcagttagtactaaaagtacatactatattcatcttacaggagaggaatgccgaattcaactacaatcatggacgccctgcaccaacaggggccttaggcataaaaaaatcccgctttttgcaagcgggataggtttaatctgctggctcgaacgttacagccacatcgtttaagtttttcacttcttttgcgacgatgtcgatgatatcggtggcagcggctttcgagtgctccttcgccttcaccgtaatattgactttatcgccgtcggcgttgaccaaggcgtctttatagccttttgttttgatgagggtttcaagggtcttttccgttccttcagcttcgctgagctctgtcatcttgtcgtaagcttcgcttttttcttttgccgtcgctttatcgcttctgacgatttcggttaattcctccctctccctgctgcgctgatcgtccatttccatgcggtatgttgtgaataaatcttcatcacccgatgattcctctgtgacaacctctccgttctgctcactcgcagacgtttctttatcttttgtatctttcccttcagttttgtctttagcaggcgcggtatcatctttgccatccttggcaggctcttctttcatcggtttttctttttcagcggcaacttgttccttgtcatcaaccgtgacgacattttctccttcgggcgacataatgtagtagacactcagtacaacgacgagacttaacatggttaaaagccaaaccgtttgttttttcagcatcatttatgaatcctccttcatttttttaggggcaacagcgacgcggtggctcggaacatcaagaacccttgtcactgcttcaataatggtcttttttatttgaacgttgtcgactccctgagcgacaacgagaacacccctgatatcgggctttttcgtctgaacgacgacaggcgtctctttatctccgtttttgatgatgacgatttcttcgtctgaagacatttcagacaccgtccgcttgcctccctgtttatctgtctcattcgttgaagtttcctgggtttttctgtttttctcgaatattttcaatgaggttgcatcaacattgacgacgattgacacgtcctcaacgccgatgatggtttccaatatgtctttgagctgattttcatattcctgttcgtaatcttggatcgattccttcggtttgtcatctgaggcgggcttgaacacttctttttctccttcaccgctctgtacggtgctttcagacgtagctttttgtgaagccgccggctgatctgccgctggctcttgggaaggttcggaagagaagatctggctgacgagcatgaaggaaacgccgagaacaaaaagcagcagaaagtagtgatatttcgtcagcttttttccgtctttctcgtctttcgggagcaggtggccgatcagcttttcgatccaggttcttttattcattgccgcttcgttctcccccttcgatatgaactgtaatcttgtcggggcttatttcccagatgcctgctagctgttctctgacttcccccgtctctttcttttctctttcctgcatggactggtagctccggtccgtattgatctcgacaggagcgacggcttggaccgttttttccgatgctggtttcaagaataccgagacttccgcatgcttactgaggtctttctctgttttcagctggctgtcagaagagacctcgactcggtctatcttgtatttgtcgcttgtaaacctgccctctgcgttcttttccaattgaacagccatctgttctaagatatatgcttgttgtgaggcttgtatttcttttttttctgaattcagctgattttttatttcgtttgactgaacttgtccgttttttgtaagcttctcaaaaatcacatccggatctgtcctgaataaagagaagatcgggttcagtattacaacgatcaagagcaggctgatcaccattttcgcgtatttttgcatgctcgaattcggcagaagcatatcgatgacgatcgccatcagaataaatagaataatattcgtgagccactctgtcagaaattccatctcatccctccctacttcatcatcatcgtcagattccccgctgtaatgatcacggttaagcttaagaaaaacatcagcgaaacgatggccatggccgcgaaaatgtagatgacgcttttgctgatgacatccaggcagctgataaccgggccgcctccgagaggctggagaaccgccgcggcaattttgtatatgagcgcgagggaaaggattttgatcgcgggaaaggctgcgatgcaaattaagattgccacaccgagtatcccgacggtgtttttcagcaggagagacgcgctgatcaccgtgtctgtcgcttcggtaaacatgcggcccaatacggggatgaagtttccggtaatgaattttgccgtccgcaaagtaatgccgtccgtcactgcggctgaggcgccctgaaccgagatgacaccgaggaatacggtcaaaaatgcagccagcgtgccgatcgccgcatttctgaggagctgggccagctgtgtgactttatattggtccgtcatcgtgctgacaatgcttaaaatcgctgataaaaataaaagcggcaacacgatatattggataaacaagccgctcgtgttcatgagaaaaagaatgaccggatgaaagaatgcggctgaggcggctccccccgaagtcgccatcagcgccagaagcagaggtacgagcgacaggataaagcttgtcatcgtctgaatcgcttcattcgcatatgtgacggcaacccgaaagctgttgagcgcaagaataatcagcaccatgtagacaattgcatacgccactttgctgacggtgctttgttgaaacgcgttttgcaaaagctgaagcaggacgcagaagatggtcaacaggatcagcgtccccagcagtttcccgttagccagcacttcatggaacaagtaggaaaacagcgctttgccccattcctcaggcgaaaagtgcttttctcctttgacaaattcaagcaggcttcctttttgactttcgggaaggtgtcccccatactctgtcaaaatgttgttccagaactccccgacccggtcaagttccaaaccttcagcctgctctcttgcaatggcttctgccgattcttctgcggcggtttccccagccggctccgcttcttttggcgaagcttgtacattatgcgctccaaagcatacgattccgatgaccaagagccagaacagaaaacgcttcactcaggaaatcctcctttctgactaagacatggaagggatgagtccgatgatcgtttcgataatcacggttaaaataggcacagccatgactaagatgaggattttgcctgccaattcgatcttcgaagcaatcgcaccctgtccggcatcctttgtcagctgggcgccaaactccgcaatataagcaatcccgataatcttcaaaatcgtttcgacatacatcatgttgatgttggcattggcagctattttttcaatcatccgaatgatttcgtagacctgatctactaagaataaaaaaatcgtgcagccggcaaaaacgacaatcaaaaaagcaaacgtcggtttttgctctttcacaatcaagctgaggaaggtggcgatcattcccagtcctacgatttgaacgatttcaatgagtgagcccccctatccttgaaatagaaagacagcttttatcttttggaatagatcatcgacaacagttgccaccatgaacaatatataaatgaatcctaaaagcgtgacccattgggcatattccttcttccccatttgatccagtatggtgtgaagaaaagcgacgacgatcccgacgccggcaatttgaaaaataatatttacgtctactcccatttcgtgtatgctcccctcttcattacatcaatagaagaatcagcagcagtcccgtcaaaaatccaaggcttttgaccattttttcatttttcgcctgggcgagatttgcttcagcttcctctgtctctaaatgggttaacgccagtttgatatgtttttgctgagaaatcagatcatgacggcccagcgtttcgccgaattgccgtaaaatctcgtattctttctttttaagagccgtttcgggccatactttctccaggctgtcttcccatgccgtccctgctgaagcgctgcctttttcaagctgttctgcaaatgtctgaaacaaagaggctaccggctcggtaagctggtgtgcgatctgttttgatgcctgacggagcggtgtatgcccgtacatgatttcagcctccaaagactgcaaagcggccaacagctggcggatttgcttcggcctttccctgaaaggcttcgccatttcaaatcctgtccatgtggctgctgccaaaataagcacggcacctaaaagcttcagcatgataacatcctctttgctgccccgagcggctctccgttcccatttaggatgcggctcaggctgccgggaccgttctttctggaaagttccacgattcgctcaaaaacccggtgctcttgaagcattttcaatgatggacgcctggcgagatctgcatatgtgtagccgtgagccgaaacgatgacagtcacccccgcgtggaccgcttccaagagcgcttctgcgtcttccattctcccgatctcatcggcgatcattacctccggactcatcgatctgatcatcatcatcagcccttccgcttttggacaggcgtcaaggatgtctgcccggtcgccgagccgatattgcggtatgccgtttacacagcctgcgatttcagacctttcgtcaacaattcccacttttttggcaggggcgttgccgcttcccgaactgatcagcctggcgaggtctctgagcagtgttgtttttccggtttgcggcggaccgataatcagcgtgttcagccacgagttttgaaataaatgggggacatacggtttggaaatgccgattttttctttggcaatgcgaatattaaatgatgatatttctctgattcctttgacggccccgttttcgacgacaacccggccggcaagccccacgcggtgtccgcctctgatcgtgacatatccttttttcaattcctcttccagtgtatacatgctgtaatttcccaatctgtttaaaagaagcgccgagtcttcaggcgtcgccacataagggagaaagcgcggctttcctttgttcaccagttccagcggacgacttgtccgaacccgaatttcttctatctgatcgatttcatggtcgccaagaccgctgagcgcgcgtttgatcgtatcggggagaatctctgtgatgtggtgcaaaaacactccctcctctttttgcttgtcttctataaaaatgtatgatcaaaggaagacattatgacaagtcggcctctcttatcatgtgtcgctatttatagatccccgcgatgatcaaaaccactcccataaagatcaaaatcagctttgcgtaagaaagctgccctgcaatctgatagatgccgattgtcattgtaataataaagatgagcggcccgaccatggccagtacgctgttgaccgccacagcttttctgacgtcgtttgtcaaaagcatcacaacagccgccgtcagttcgatcaaagatgataccacccttaacgccgccattgtcaaaaccgtcggattgacttgtccaaagaaaagcttcatgatcttaaacctccagtaacacttcctctttttttacactctatgctctcctttgaaaaagtagtcttccgatttttctatttggcatgtgagaggtaaaagatttcagacagcaaaaaaagagccggcttcaatgaagccggctctttcccgctgttacctttatgctcttgatacgtaagaaccgtcagaagtattgacaacaagcgtatctccttcgtttacgaagaatggcacgttgacgacaaggcctgtttctgtttttgctggttttgttccgcctgaggctgtgtcgcctttaatgcccggttctgtttcaacaactttcagttcgaccgtgttcggaagttcgattccaatcgtctctgtctgatacatcatgatctgaacagacatattttcaagtaggaatttgagctcgtgttcgatttgcttctcgttcagctcaagctgctcgtaagatgtcgtatccataaaaacgtgctgatcgccgttggcatacaagtactgcatcgtttttgtttcaatttgggcgcgggccactttttcacctgcgcggaatgttttttcctgaatcgcacctgtgcgaagatttctcaattttgagcggacaaatgccgcgccttttcccggcttaacgtgctggaagtcaacaacgcgccaaatccctccgtctacttcaatcgttaaacctgtgcgaaaatcgtttactgaaatcatgattatcctcctattgctccaatcaaacggattataaaataattaaatctttcgcggaatgggtaagggattcgtttccttcctctgtcaggacaatatcatcttctatcctgaccccgcctttgcccggtatgtaaattcccggttcaaccgttacaaccatgcctttttcaagcatctggtcagaacgtgctgaaagcgccggactttcatgaacttccatgccgaggccatggcctgttgaatggccgaaataatcgccgtagccttgtgaagatatgtagtcccttgtgtatgcgtcagcctgtttcccggtgattcccggcttgatgctccgcatgccgatagcctgcgcctcaaacacggtttgataaatgcgtttcagctcatcatccggctctcctaccgcgactgtacgcgtaatgtccgagcagtaacctttatagtaagccccaaagtccagcgtcacaaggtcgcctttctcgatcgctttgccgcttgccactccgtgcggcagacttgagcgtacgcctgacgccacgatcatatcgaaggacgaatgatcggctccctggctccgcatgtaaaactcgagctcattggcgacttcaatttcggtgatgccgggcttgatgaccgtcagaatatggctgaatgcatcatctgcaatctttgcagcttcctttaatatcttaatctcttcacttgacttaatcaagcgcaacttttccacagattgagaaacgggaacgagttcagctgcgccaagctgctctttgtaggcggcatacgttccgtatgtcattttatcctgttcaaaaccgattttgtttatccccatctctttgatcacttcggcggtcttttgaacgattccgccggcatgctgaacgatgtcaaaccttttgatttgatccctcgcctgttctgtatagcggaaatccgtaataaagactgcttgatcgtctgagatgaccgccagtcctgaagatccggtaaatccggtgatgtaccgcaaattaacgccgctcgtcaccaatataccgtcaatgcctaaaccgccgaaaagctctctcaatttgtttagtttcattgtccactagtccccctatttgttatttgtgttcataaaataagagatggccagcttataaccttcaaagccgagtccggtgatctggcctcttgcaaccggagcgatgaccgagcggtgccggaactcttcccttgcatgaggatttgaaagatgaacctcaatcaccggtatgctgattgcagccaccgcatcgcggagggcatagctgtaatgcgagaaagcccccggattcaagacgattccatcgtattgctcctctgcctcatgaagagcatcaatcaggtccccttcgtggtttgactgaaaaaaagtcaattctgtctgaatgccttcggcaaattgaaaaagtctttgttccaaatcggttaatgtgtctgtcccgtatacatcgggttcgcgttttccaagccggtttaaattcggtccgttcaaaattaaaatatgcggcaactctgcctcccccttctcatcacacaaaaaaatgtccacttacagtgaacattttatcatattgcttcctgatcaggcactattctcttgtttctccaagggcgcgcgtcagtttttcagaattgagctcattgtattcaaacgaaatggaatagccgacgaataaaccgtaaagcagataaatgcacagcgtcgtcacaatcgtttccctctttaattcagccactgtctgaacatcgggaaacatcggattgaacaggtaaaacacgacagcccacaaaacggctccatagacaatgcctgcccacatgcctctgacctgcttcaaagtgccgtagtaaagcaaggcagccccgatggaaatcactccgatcaagagtatgctgataaacgttccgagaaatccgtttttccagtcgccgatgacaaaaggctggagaatcatgttcgcattgacctcggagaacttaaaaaggtacgccagctcaccgagtgcactccagagcactccgccgacaaagccagtcatgatcacccttccggtgaaagtcatcggggtttcacgcttattctgctcaagctcttccggctgtttttgattgtcttcattacccatacagtccagatcacctccatttccagtatgtccaaaaacagccgcggcaacatcagctttcccagatttttaaaatccgagtgtaaaaagcatgaaaaagggtatactttaattagatttggctttgtaagaggttcgaatttcttaaatttttgagcccgtcaatctagaggtttcagcgtttttcctgtacaataggtgtaaggaaatggttaatgtactcatagattgatacagataggttgatgcaaatgtcaaatcaaacaaaacagcccgcatacggagggcaggctgtcgtcgaaggcgtcatgttcggcggcaggcgccattatgtaaccgcgatccgcagaaaagacggaagcattgaatttttcaagctgcctcggaaaaccaatccgacgcttgaaaaattaaagaaaattccttttctcagagggattatcgcgattgttgaagcgagcgctaacggcaccaagcacttgaatttttcgagcgaacgctatgacctcgacccttctttagacgatcaattgaaagaagagaagccgtccaatctgacaatgatttttggtctcgccgcagtcggcgtcctgtcttttttgttcggcaagtttatttttacgctcgtgcccgtttttttagcggagctcacccgtccggtctttcagtcggacgtcgcgcagattatgatcgaaagcttctttaagctgctccttctcctaagctatatttacgctatatcatgcactccttttattaaaagagtttttcaatatcacggagcagaacacaaggtcataaactgttacgagcaaaatctgccggtcacggttgaaaacgttcagcggcagtcaagactgcactaccgttgcggaagcagctttattctattcaccgtcatcgtgggcatgtttgtttacttgcttgttcctactgaccctctctgggttcgtattttgaatagactcgcactgatacccgtcgttctcggcatttcatttgaagtcctgcagctgacaaacaaactgagagacatccctgtattgaaggcgctcggctacccgggcttatggctgcagcttttaacaacgaaagagccgtctgacgatcaggtggaagtggcaatcgcaagcttcaatgagcttcttcatatggaaaccaaagcagaggacgaacagaaggaaccttctaatatcgtaatgtaatgtaacgaattggttaattttttgggaggtggacagttatgaagcaacgcgtacatcctgtctcagctttaattattgcgtttggaatttttgggtttgtttatttcgccgtcacaagtccgggccgcctgctccaatacttgcttgtttttgccgcggtcggcgccatcatttatttcgtgatcaggcgcatttccaatcgcaatatgggcagtgagggagccgcttttaagaaagcagccaaacaatccaacaagcgttttcaggatcataaaaaacgctctgtaaaaggcagggtcaatcacctgagaagcgtaccgtctatcaataaatcgaagccggtattggtgaagaaaaaaagccagacccagctgacagtgattgaaggcaaaaaaagcaaaaagaaaaacagggctttcttttaaaacgtccactgtttcaaaaataattctgttcgtttttttcctagctcgattagagctagttttttttctgccgacatcgcgaattcagtcgacaaaacttcctcaacaggcaaaaaaatgatgttccgctcatgtttcgtggcaatgtgcctggcgtcatgcgcctctttcatcgtctcaaacagcgccccgaacagctcgaacgcatttttaatcgttttcttcggcctctctttttcattgggcatcagcgtgatgcccaataccggccgttttttttctgttgtaaacagccacatcggaaaattgctcagaactccgccgtctacgacgacgctgattccgagaggtgacttgagcttcaccggctcaaaaaaataagggatgctgcagctcatccggaccgccctggcgacggaaaatcgccctggattcaaaccgtacctgtttaaatcgtcaggcagcacaagcatcttgccgttcgataagtcggaagcgatcaacttcagctttccctgttcaagatccccgaacactgaaatgcccttcgctttcaacttttcggaaatccagttttccaatttatctcctttatataaaccgagccgccaataaatcgatgcccattgcagcaatttcaaaggcaagagtgaaaacctcgggtcaaggagctcgctttcatttaattcctccatcatttggcggatctccgcgcttgtatagccggccgcgataaatgaggcaatgatcgaaccggcgctcgttccggccagccttttaaatcggaagccccgtttttcaagcgcttcgtatgctcccacaagcgcaacccctttcatgccgccgcctgaaaaaaccccgtcgatgtacatcgcgatctcccccccttaaaagatggctctacatcattttaagaaacggacagaaaaaaagaccatgagacaacgagcggcatccggaaaaaatgatacgaaaagaaaaaaaccgccgttacccagcggcttcagcgtgtcgacaaaccctcgcattcgttgtcaggcctgcgcgtcggtgctcacgaattccaacattcgctccgctccgatgctcggccttcctagactgcaagggttttcaatcacgctgaaagggatgacaaaatcccaaaacaaaaagtcgttttgggatttgtcaacaatctgaaaccgccgttacccggcggcttttattgattttcctgttcgtttcttttttggacgcttctcaaatcgtcgattcttttgctgtcgtcttcaaaatactgcacaagatctccgatacggtcaatgctgttccagcttaaatgatgttcgattccttcaacatcatcataaattttctcttcgtcaacaccaatgattcgtaaaaactgctccaataattcatgtctgtatactaaacgcttgcctattttctttcctttaggcgtcagcacgaggccgcgatacttttcataaatcaaatattcgtctttatcgagtttttgaaccatttttgtaaccgaggagggatggacggccagagcttcggctatatctgagactcttgcatatcctttttcttcaatcagcatataaatttgttctatgtaatcttccatactcggtgttgtcatcgaatccctccaaattacacctattcaaatcataacaagtttacactatgtgcatgcaaaaaacaagcaacaggataacgttttcacccgattaccttctataattccattcatctgtcgcatacttcgtcctggcgagatcttcgacaaattccgtttcctcttccgtcagttcataaggctccaaatgaatgttaagccctttttcaaacccttttttaaaagcttcgctcgcttcttcaatcgtgactttttctttcgtcagctcattgatggcgaccgctttttgtttgaagtttctctgcatgcgctctctgaggcggtcatttttgtaaataaacaaatcaaagagcttgtcctcatccagatcaagaaggatcgaaccgtgctgaagaatgactcctttctgccttgtctgggcgcttcctgcgacctttctgccttcgacaacgagctcgtaccacgacggggcgtcaaagcagacggaagatctcgggtttttcagactctgtttctctttttccgttctcggtatggcgaaatacgcatcaagctccagctctctgaagccttcaagaataccttcagagatgacgcggtacgcttccgtcaccgtcttcggcatttccgggtgttcttcagacacaatgacgctgtaggtcagctcttggtcatgaagcacgcctcttcctccggtcggccttctcacaaagcccaaaccgtgttttttgacggcatccagattgatttccttttcgatattttggaaatagccgactgaaagcgttggcggattccagccgtaaaagcggatggtcggcggaatcttattttcgctgtgccaaaaaaggagcgcctcgtcgagcgccatattaaaagcgggatcccgtcgtcccgaatcgataaaacgccatgtttctttttccataacctaccctctttttctttggtataaaataagtctaccattccctcttaaaattgaaaataaattcggcgaatcagatgacagatttctgaggctttactataatagtacttgtcttaacatatcgttaaaaatctcccgcatacttacttaggcgggacgaattcaaaaaggagtcggatcagattgtctaccagcagcattgtcgttctcttgatttgcgccgcgctcatcatctacgcggtcgcttcatacatctatcagcagcgcattatgaaaaccttgacagaagaagaattccgggcaggctatcgcaaagcgcagctcatcgatgtgcgcgagccgaatgagtatgaaggcggccacattttgggtgcgagaaacattccgctttcacagcttaagcaaagaaaaagcgaaatccggcctgacaaaccggtttacctgtactgccaaaacaacgtcagaagcggaagggccgcccaaacgctccgcaaacacggctgtaaggagatttacaacctgaaaggcgggttcaaaaaatggggcggaaaaattaaaacgaaaaattaataaccgaagctgtctctgctatggaaggcttcagttgagtccagcatcctaaagcggtttaacgttttaggatgttttttttgcatccgggaggattcgggtgatgagcggttatccctttccggcaaaaataagccggcgagatgggttcgccggctttgttcgttattttttcaagtcttcgattgaattgacatctttcatatatgtcggaacgacaaggccaatttttacgcctgtcatgctagtaccgatatcttcgtatttgcctttgtatttttcagcatatgttttatgcgtttgcggcagccatgcagcaagtgaagcatcgacgcttccatttgcaatgccagtccacatcgggcctgcttctacttggctgagcgtaacgttgtatcctaagtcttcaagaacttttgcgatgacattcgtgctcgcaatttcgctgtcccatgccacatagccgagcttaattttttcaccgtccgctttatcgacgccttttgtccatttcttaactagatcttgatgttttttcacgaagtctgctgcagcttcttccggttttttgccttcctgaacggcaagcatgacttctcccatatcatcctctgtccagctgaattggctgagcagcttgtttgcgcccggatggtcgtccttgaatcctttgcgcgtaacagtatggatttcttcggcatcgccgtaggaacctttaggatcttttaaatatttcagatcgtattttgcaaacatccaatgcggcgtccagcccgtaatgatgatcggatcttttttgtcataagcttttttcaatgcggctgtcattgctgagcttgatcctgacgttacagtccacttgctgagatcgtagtccttgagcgcctggtccgtcgcattcataatgcccgctccaggatcaatgccggtaattttataattgacttgatcgcctactgacgcattttcattattattgctgcttccgcaggcagccagacccaatgtgagtaccgctgcagtgccgattcccgctatctttttccacattatgcattccccctgctctttttcaattttatattttgtgtaacccggtcaagtacgatcgcaataataacaatcgcaagtccggtttctacaccggtacccgtttgcagctgggtcacagcccggtaaacttcttctccgagtccgggcgcgcctaccattgatgcaataacgaccattgacaaagcaagcatgatgctttgattgataccggccagaatggttttcgtcgcgagcggcagctgcactttaaagagccgctggcttgtcgttgaaccaaatgcttctgtagcttcaatcagatcttcaggcacctgctggatccctaagatcgtcatccggattgtcggaggcatcgcaaagataacggaagcgacaacacccggcacaaccccgatattgaaaaagaagatggccggaagtaaataaacgaatgccggcattgtctgcattaagtcaaggatgggcgtaacgactctccgaaccgttttcttttgggagccccagattccgaccggaatgccgataatgacagaaatcagaacggatgtgacgacaagcgccaatgtctggagcatggcgtcccaatatcctaaataatcaatgataaaaaatccgattaaagtaaacagcgcaatgcctcttttgctgatcagccagacgagcgcggcaaaaataacggtcaacataaccggcggaacaaaacccagcccttggacaatcgcatcaacaaacgattccactccgctggcaattccgttaaataccccgccgaacgacaccgtcagccagtcaacaaactgatcgatccaatcggctaaaggaatgcggggaagcgatgataaagtaaacattatctcacctcctgaataacagcttcatgggctggttcatgagcattaatataccggtcatttccggcaagcgctccgattaatgcgcctttgacgatgatccctttcatccgctgtttttcatcgacgacagcaatcggaatgctggcatcagagaccaattcaaagatatccgtcaggacaacattctcttctacggttgtgatttctcttgagatgacgctctccagcgtctggcttttttcggctgctttcttcgctgtttcagcatcgacggagccgaggagcctattgtgtttgtcaacagcataaatcgaggagatccccaggtttttcatcagcgtcagtgcaacgcgcggccctttgtctacgcgcacggtttcagcccgtttcataatgtggccggccgtcagcactttagataagtcgacatcttcaacgaatttttcaacatattcgttcgacgggttcattaagatctcttccggcgtaccgatttgaacgatgtttccgtctttcatcaatgcgattcgatcgccgattctcagcgcttcatcaagatcatgggtgatgaaaataatcgtttttcctactgattcatgcaaatcgaggagttcatcctgcatatccttgcgaatcagggggtcaagcgcgctgaacgcttcgtccatcagcagaatgtccggatcgttcgtcaatgcgcgggcaagcccgacgcgctgctgcatcccgccgctcagctgatccggatattgctgttcatacccttcaagcccgacaagctttaatgattccatagcttttagccggcgttttcttttatccactttttgcagttccaatccgtactctgtgttttcaagaattgttttgtgcggaaacagagcgaatttttgaaagaccatgctgattttttttcggcggatttcccgaagctggtctttggacatatttgttatcatgtcaccatctatgtgcacatgtcctgcagtcggttcaatcaaacggtttaaaagccgcaccaaggttgatttaccgctccctgatagacccatgatgacaaatatctcaccttcatacacgctaaaatctgcttggttcaccccgacggtcgccccggtttctttcagaatttcttttttggttttgccatcggcaagcagctgcgttgctttctttgtattctttccaaacactttggacactttttctacttttatcttgattcgcttttcgtctgaattcatatttctcctcccgtatgaagcaatctaatataccgtaacatttatgtaacatatgagacaaacggcatattcgctatcattttgtatcataccttcatattcatcgttgtcactctccacccttgcgaatccttctaaatgctccataatcctcttctttcaaggtaaattaaaccattatctcactagaaaacattgaaactatcgcgttttgcaaagtaatttttatttttacttttaaatttgatgaatttactatttaatacgggagacatccttctcattcaatcagtaaatcgcttacataaagatattatttttcacataaaaaaaaccggcgaaatcgatccgccggctttcttatcatttttcatagcgcagcacgggcttccgcgcagcttttgtttcatccatgcgtttcacaacggttgtatgcggtgcttcctgaacgacttcaggcgtttcctccgcttcttttgcgatctggatcatcgtatcgataaacgcatcgagcgtttctttcgactctgtttctgtcggttcaatcatgatgcattcctcgacattgagcgggaaatagatggtcggcggatggaagccgaagtccaaaaggcgctttgcaatgtcaagcgttctgactcccagctttttctggcgccttcccgacagcacaaattcgtgcttggagtgtcggtcaaacggcagatcgtagtaaggagcaagctttctcatcatataattcgcatttaaaacggcgttttccgtcacttctttgagcccgtccggccccattgaacgaatgtacgtatatgccctcacattgatcccgaagtttccgtagtaaggtttcaccctgccgatcgaatgcggacggtcatggtcaaaagtatagtgtccgtcttttttcacaagcaccggcttcggcaaatacggtatcaattccttcttaacgccgacaggaccagacccaggtcctccgcctccgtgcggtcccgtaaaggttttgtgaagattcaaatggacgacgtcgaatcccatgtcacccggccttgctttgctgagtacggcgttgaggttcgctccgtcatagtacagctttcctccggcattatggacgatttcagccatttctaaaatattttcctcaaaaaggccgagcgtatttggattggtcagcattaacgcggcagtttcttcgtctacgacacgctttaaatcttccagatcaacaaggccgtcgtcattcgatttgacggtgaccgtttcaaatccggcaacagtcgcagacgccggatttgtaccgtgggccgaatcaggaacaatgaccttcgtccttttatgatcgccgtttgcctcatggaacgcgcggatcatcatcagcccggtccactcgccgtgcgcgccggcagccggctgaagggtgacctcatccattcctgtgatctcttccaaatgctcgctcaagtcgtacaaaagttccagcgcaccctgcacggtcgcttcatcctggagcggatggatcgcagaaaatccagggattctcgcgattttttcgttaatcttcggattatacttcatcgtgcacgaaccgagcggataaaatcccgaatccactccgtggttgcgcctagataaagccgtataatggcgcataatatcaagctcggacacttcggggagatctgccggttcatctctgatatacgcttcgtcaatgacgtctgtcacatctgtttcagggacgtcaagctcaggaaggctgtagccgacccgcccttcttttgatacttcaaaaataagcgattgatcctgattattcatggcgatcccccaattcattcatgagtgtatcgatttcctcttttgttctgagctctgtcacggcgatcagcatgtgccgttttaaatccggatatgaagcgccgagatcgtagcctccgataatatttttctcaagcaggcgttcattcgctttttcgacaggttcattgagtctgatgacaaactcgttgaacatcggcccctcaaacgcgacttcaagaccggcccgtttagctgcttcttttgcgtaagccgctttttgcaggttctgccatgcgatttccttgacgcctttttttccgagcgccgtcatggcgactgacgcagcaagcgcgttgagcgcctggttggagcatatatttgatgttgctttatcccgtctgatatgctgctcgcgggcctgcagggtgagaacgaatccccttttcccgttttcatcttccgtctgaccgactagacggccaggcacttttctcatcaattttttcgtgacggcaaagaatccgcagtgcggaccgccgaaagcagcagggattccgaacggctgggcatctccgacaacgatgtcagcgcccaacgccccgggcggtgttaaaagcccgagagccagcggattggcggaaacgatgaacatgcttttccctttatgggcgatcggttcaatgtctttcagcggctcaattcgcccgaaaaagttgggatattggacgatcactgctgctgtatcttcgcagacggcttcatcaagagcctcaagatccgctgttccgtttttggaagggacttctaccacatcgatgtactgtcctttcgcatacgtttttagaacctcgcgcgattcgggatggacggtttccgaaacgacgatttttttcttttttgtatgtcctgaagcaagcattgccgcttcggctaacgccgttcctccgtcatacatcgacgagttgctgatatccatgcccgtcagctcgcaaatcatcgtttgaaattcgaaaatcgcctggagctccccttgagaaatttctggctgatacggtgtgtaggccgtgtaaaattccgaccgcgaaatcacgtgatccacgatgacgggctggtaatgatcgtatacgcccgctcccaaaaaagaggcgtacgtcactgtatctttatttttagccgcgagtttcgtcagctcttttgtaagctccgtctcggactttgcctttttaatttggtattcccctttaaatctgacgctttcgggtatatcggagaatagctcgtcgattctctcgactccaattgcctcaagcatctcctttttatcctgatctgtagctggcaggtaacggtgcttcatcttcagtctcctttcaaggtcttggcaaacttacggctgccgtttgtaaaatggggttttcacgattttggctttcaaacgtttatttctgatctccacttcaactacggtgtcgagggcgcaggcttcttttttcagcaatgcgaggccgacgtttttctttaaagtcggcgactgtgtgccggttgtcacctcgcctgcttgttcgccttgataatagacggcgtatccgtgtcttggaatgcctttatcgatcatttcaaggccaaccagctttctgtccgctccatgttccttttggcttgccaggacggcttttccgatgaaatccgaggctttgttcgttttgacggcaaatccgatgccggcttcgatcggcgtaatgtcttttgagagctcctgtccgtaaagcggcagcttcgcttcaaacctcagcgtatcccgagccccgaggccgcacggcaccaatcccgaatccttgcccgtttcaaggagcagcttccaaatgcaggctgcatcttcattccggcagtaaatctcaaagccgtcctctcccgtgtatcccgttctggacacaagcgcctgcacgctgccaaccgctgcatcatcccggaacataaacggctttaattctgcaaggtcatgatctgcgacctgttttaaaattgcttcggccttcggcccttgaagggcaaggagcgcaatctcgtcagatacgtttcgaaccgacacgtcaccctctatatgcttgttcatccaatcgacgtccttgtcgatattggctgcgttaatgacgagcatatagacattggccgcttttttatagacgaggagatcgtcgatcgttccgccgtcttcatagcacatagccgtatactgggcgccgccttctttcagcgtcgaaacatcgtttgtcaacagcttttgcaagaacggaaggctgtccgttcctgtgatttcgacctctcccatgtgtgagacgtcaaaaagccccgctttcgtcctgacggcttcgtgctcctctttaatagaagaaaattggactggcagttcccagccgccaaaatcaatcgttttcccgccatattccttataaaggtcaaataaaggcgtacgtttaagcattctgcttcccccttcgcttttcaaactaaaaacaagtttgccaatcatcagaaaacaagaaagatttcaacatcaacaggatggctgcgccgctttagacggcacaaaaaaggacagagaagcccctttgtcagtttggaggctctctgtcctggcacctgaaagtttactttgcatcaaaagcaaagatgtcccctttggtggtttgcaaaacataatatgatacaaactctctccagagttgcgtcaagcaagagttcttttgcctgagagattcactgtttccccagcttgctccttcggcgccgcttttaggtttccctctgccggtctctccccttgccgtcattcgctcatattcatttcttttcatggacatactatataaagcttacgatttttttactgatgatctacaaatatcctaccatcatcacaacgattgggcaacagaaaaaaccattaacaatttattatttcagaataagaacgttcgtgttttgtttatttcttagtaaaatccgtttttttcacgcaagatttccttttaaaaaagaacatttgaatctcagaagagaaaggcggcatgacgatgagaccagacattcatttcgacaacgaatggccggaacagttcaaaaagcatcttgatgaagacggcccgtgggcgaattgggagctttaccagctttcctgtgaagtgcagaaaaggcttgcgattcccacgtttgaaggcttgcaggccccataccacctccccggcttcacaccgcttccccaccagctcgaagtcgcccggaaggtggtcgaacagatgaacggaaaagccatcttggcggatgaagtgggcctcggcaaaacagtcgaggcggggctgatattaaaagaatacatgattcgcgggctggccaagaaaatattaatccttgtccccgcctcgctcgtctcgcaatgggtaaaggaacttcgggaaaagtttttaattccggccgttgaacagaaaaaaagctatgtatgggagcaatgcgatgttgtcgtctcctcccttgacacggcaaagcggtcgccgcacagagaggcggttttgtcgatccagtacgatgtggtgattattgatgaagctcacaaactgaaaaacaataaaacaaaaaattacgagtttgtccgcagcttaaagaaaaaatactgtctgatgctgacggcgacgccgatccaaaacaagatcgacgaaatatttaatctcgtctccctgctaaaacccggacacttgggaaatgaaagcaacttcaacaaagattatacaaaacagatcaattcagctgaagcacacgagcgcttgaagtcccttatcaataaagtcatgatcagaaacaggcggcatgataccggcatcacctggacaaagcgtcatgtcgaaaccgtgcctatttccttttcgcctacagaacaggctttgtatgacgagattaaaaagctgaagacaaatcatcagcattcatcaagcatgttctcaatcatgacattggagcgcgaatgctgttcaagcagggaggctgtctatatgacgctgaaaaacatgcttgaccgaaaggaccgcgaagcgccggtaatctctgaacctgtcatccaccatttgatcgaaaaggtcaacgaggtcgcacaaaattcaaaagcgctgaaagtcgttgaactcattcaagaactcgatgacaaagtcatcatctttaccgaatacagggcgacgcagatttatctgcaatggttcctccagcagaacggcatcagttccgtaccgttcagaggcggatttaaaagaggaaagaaagactggatgaaagatttgttcaggggcaaagtgcaagttctgatcgcgactgaagcaggcggcgaaggaatcaaccttcaattttgcaataaaatcatcaactatgaccttccgtggaacccgatgcgcctcgaacaaagaatcggcaggattcaccggctcggccaggaacgcgatgtctacatttacaatatggcaacaaagcataccgtagaagaacatattttaaagcttctttatgaaaagattcatttgttcgaaaaagtcgtcggagacttggatgatattttaacaaaaatcgaggtcggcaattttgaagagcacctccacgatattcttttttactctgcgacagacgaggaaatgaaaatcaaaatggaaaacttaacctctttcatctcttacggaaatgaagacgtttcaaaccatacacagataggaggctaaattcaaatgcgtcaggaagaaatctacctgtttttagaacgttttttcaccgcaaacggctgcacgatcaccgacaaaagtccaggccacatgaccgtgcagctgacggttgaggtcgataaacaaatcatgaacaggccgttttactggcactggcttgaaaagacgggaggagagccgaatccgatgaaaatcacgctgatcacgaatgaagacgaggccccttccgatatcgaaggggagtttattcattttggatcaccaagactttttcaaattttccaggcagtgcaaaaaaacggcaaatttattcgcctttatgagaaaatccgttccgaaggggctcatatccctctggaaccttggctcggcatgaatgtgacgatctcgtaccagtccgacatgaaaaaagataagcttctgtcccttggccttcacttaatcagcggccagctgaccgaatcgtttcaagagcaaatggaagcacgcgagctttcctcacagatctctgactactgttatacgatgtcgccgttgattaagccggaaagcggcataaaacggcttgagcgctatatcgaacaggcggccagaagcgaaccgcttgattgggctgaagcttccctgaaacgttggaataacgacctggcactcttaaaccaattttacgaggatactgaagaaaaaccggaggaatacgaaattgagaaaaaggccctccaaacgctttacgagcctaaaatcgatattaaagttcaaaacgggggattattttatctgcgtaaaaaaaattcaggataatttttccaattcgacatcgttcttgtttttattcagagagctggaattataatagaactaaagagaaaagagaaactttcgtaacagcatttggacaagcttggaaaagtgttgagccttgaggtttatctttgtttatcacaacatggttgtctgaaatacataatcaagtattttgggggggaaatgtatgaataaagataaaaatgagaaagaagaattggatgaggagtggacagacttgattaaacacgctcttgaacaaggcattagtccagaggaaatacgtatttttctcaatttgggaaagaagtcttcaaatccttccacatcaattgaaagaagtcattcaataaatcctttctgaatgtgctataatatcgaaaggaaggtgatgacattgattggccagcgtattaaacaatatcgaaaagaaaaaggctactcactatctgaactagctgaaaaggctggggtagcgaagtcttatttaagttcaatagaaagaaacttgcaaacaaacccctccattcaatttctagaaaaagtctccgctgttctggacgtctcggttcataccctgctcgatgagaaagatgaaaccgaatacgatggtcaattagatagtgaatgggaaaatctagttcgtgacgctatggcatcaggggtttctaaaaaacaatttcgagaatttttagattatcaaaagtggaagaaaagacaggaaaaggagtaagggaaacacatcttactccctttggcattttttacgctgaataagccgattcctcatgaacataaaaaaacggatcataaagatccgttttttaaattgcaccattatttatcttcactgtgcgctctttcgttctctttcacataaccttttccatcggcatgttttttgccgtcgattgtcaagccgttccattgagtagcttcgaatgagaagtcaagctgtacagaatcaccttgatatttgttctgtaccattctaccgctggcgtctgttgttttgtcatttacaaactcaatcaccaattgaactttatcaaagtcatatgggtctttcggaatgccgtcgtattcaggcgcagtttttccgttgattgtcgctacattgattttgccattgtcatgcaggaactctggctcaatggctttcttcactttttcatatgcgttcttatcttttttcgcggacatattgtacagatcataaaggttggcttcatctaaaatgatgtttttaggatagccgttaccgccttcaactccgacagtcagaacgctgactttaaattgtttcaggaagtcttccgctgtgctttttccaccgtttttcgcgtttccgtcaacgaaattgctgtagccaacctgcatcagcacttctttaatcgcaagtgatccgtcatttttgaactcgaaatctttagtgaatttgtcgcctggttttaagttggacaagttcactcttgcagatgtatctttcgcatttaagtcaagcgtacctgctgcataagttgcttgagttgtttcgatgtcgttaaacgcagcccaagttcctcctcctactaatgccagtccaagcgcagcagacgcaacgcctaatcctagttttttctttgtacccattgataactcctccttttataattaagaaaatctgtatatatggaaacctgaatgttcaggtgaccaacgaagattacatggaaactgattgatcttttccagcggcttcaattgctttagctttttggtcaatctctcttaaagccgcggatacagtaattactgcataaagaatcaacaagagtcccggcacgatcagcaaaatggctgtgccgatcggtttacttgcaaagtccagcaaatacccggcatacggaaccgtaatgcccgaatacttagcgacaacattttccgccagtaccggatcggaatcagggttttggttattgtcaccctttgtcttgaacatgagatttgatttattttttgttataccgataattcggtgggtaaccatggtgttttcgtcttgcatgaatgtaatgatatctccctttttcaaagacccgggattttcaactttttgaacggcaatcacagaacctgttttaaactccggctccatcgatccggataaaaccgttttcaattgatagccgaagagctgcggctccccgccggacgactttgtcgaaatcacgacgatgaccgcggcgatgatgattgtgaaaataatcacatataagaaattgctgatccatttcatcacatgtttcatgacgcttccccgctttctaatgaattatcttcttttctattttctttatctacggattcactgtcctttggtgtttcctctatatcctgctcagacttttgcgttgtttgagtctgttcagtttgctttggttttgctgaagcttttttaggaggcttcggtgtttcttctttgcagtcttgaagctccattacatttgaccaaatgaaaggtttgccctttttaacatctggatggccttcaggtctgatcaatttaaaagcgtatagccctccttttgctgcccgctttgactctatccggtagatgctgctttcggcttcttttttgaacacgcctttatcgatcacagtcccgtcctctagcggctttttggaatgaccgagtttatgaagctcccacttccattcagagtcggcgatttgactgccgcggtttttatattctgcaaacaatgtcagcggtgcacagaccgttcctttcgtcttcgtctgcttttgaagcttcaaatcgctcccgtcccactgcttctcatcttgaggaaaagttgaggccgctttcattgtcatgctgtatgtttccacatcatgaaatgatgcgtttgtatgctgtgacagctgactccccaatccaattaacaggtatatgatcagcagcgtttgaaaaacgataatgttttttccggctctttttcggcatctcctagttcgagataatcggaacatgactaccctcctagcgagtatgtaatggcttttgtttccgttcgttttaaagaactttatagttagagtataaagaacaagtgtgccgtttgaaaactgtcaaaaaagtcgattaagttcgttctaaagaacattttcgtttaattcctcaaaaaacctctcaaattctcatctttttgaaaagtttgtagttctttatagtgtacacaatttcttcttaatttttgtataaacactgttgacaaggaaaaaataggatagaaaggatgatgacccgtgctgaaaaatgtcatattatgttcttttttactgctttctagcattgggccgctcaatgcccatgcggcagcttacgaaacagcccgcatgtctaagtgggaagaaaaagcggttgaggaagcaaaaaagagatatccggaagcagaagtgcgcctcacgaaaaaagtatgggatcgaaagcgggccgatgaagcggtcaaacaataccatgtcacattgagtgaaggaaataaaaatttcggagtgtttgtcacaatttcatttgaacctgcgacacacaaaattaacaaagtcgtcgttgtggaagaatataaataagccgcattgcagtgcaaagcggcttatttatgctttttaaaaaacatgatacagccaaggggaagaatgccgaaccattgatatatcctggacggcggctttaattctttacgtttttctttcatttcttttctttcctgcttaggcgtgtccatatattttacgagctgttccgtcatatatttaacataatcgttcgttttcatcgcatcacctcttggggagttctgtcagttgaagtgttgtcatccgaatcttttttatacattcttcatgatttggacacacaatttttaatattccttccactgcgtgattttttgatttcttaaatcatattgaaattgagcgcttgtttctgtgccggaagctgtcgttacctgaatctggactcgtgtgagctgctgatgagccgggctgacagaatacgatatcaagccatgctgtttttgaactttttcttttgtctcttcgtgaatatgggacaaggcatggagaattccattttggagaaggttttgctgaatgtgaaattcttttgtttgctgtgcaaacgttcgctgattcgttaataaagcggctgagtgactcgcgcagagcatgcaaatcacagctgcgaaaacagcagcgggataaatgaatccttttgaatttttcacgtgatcacccttttacatatgatagagcggaatagacgtgcggtatgatttgccgcttagacttgtcgcttcaaggatcagcaggtgattttcaatcataaacctcatttttttgacatgctgtaatagaggcacatgaccttttccattgaccctttttcgaataactgtctgatattgctcatagcgaacggtgtcaccttggcggtttgtcatcgctagtgactgatgatcaccggcacttcttatgtcaatcgaattcctagactccttcaatatttgctcggcagtaatcgtccattcacgggggtgaatatccgaaccgtttctttccggggataaaaacagatgaaatatcgaggccatcgtacctgcaacgaacatgtgcaccattaaggaaaacattatattaagaagggtatatcccctttgcccgcaaaatggtgaaacagtgcctttggctgtctctttttttaatagagatgcatacttcataatcatctcccttctccttccattcaataaagtaagatgtattccggtaaagcacagcttctttagcctggaaccgtccggtcagcgtgtagcggctgatcttttcctccaatatgcgatatgtctcttcttctttttcggacgcttcgcgctgcaatgacagctgatgaagcatagggatcaataacatggtgatcattacccatatgccgaatgcggaaacagcttcaaccgttgtaaagcctttattttttttgaacattaatctttccgcttcctaaatagatcgtcagtataaaagaggcatgctgtgtatcgatcacgatctttcccccttgattcggaacaccgcttggattaaaagtaagaattggtttgagcgtcgactttttgattgcgatattgcagctgtatgtcctgaccagttcaggcgatgagccttcgtccgaatgcttcatgatatagcggcagccggcaaagtcaaactgcaccttaaccgtcgtatggcggacgagagccgtctgctgagcgtaaagcaaatcctcttcaagctgtgagacaaagtgctgaacgattcttttttcataaatgggaggcagtagagcaaagagaagagagaacataatagaaccgatcatcaatacagttaaactttccaaaagcgtaaatcctttttgattcataaccgtcaatcagcctgtgctttgccgtttgaaattttaattgctttcccattcggacactttaagttcttttttatgtaaccttcagattcaagctccgccctgttcggcgttttcccgtcatgatccatctgataggccgtgatctgcgcttgaaccatattgattaatccttcgcatcctttcttttggatgctttggttatgcttggtcacattcggaatggtgatcaacagcaggatggagataacgagcatgacgactaacatttctatcagtgtaaatcccttttcattcacagttccgtcctccttatagctggttcatcatttgatacattggcaaaagcatggacaaataaagaattaatatcatcgccgcggttagcccgtaaatcaatggctggatcaggcctgtccatttttcggcctttctttcaagccgctcaatcaaaaactgactatatgaatacagctctctgtataagtgcccatttagttggccgtgtgcaacagcctttgctaaatcattttcataaaacggatgtccggccagcatctgctccagactctccccctgtttcagccgctcgatcaagcgcttcgcttcatttttatgaaatcgtaaaaacggctggctttcaaatgcttttaaactgtcatatacagacagacccgcttgcaaaagattgctcagctggagcgataaaaaatagctgttgaatagtttgaaggtttggcccagcaagggaattgtaatgagaaaggccattttgtcttctggaggtttatggcggaatgaacacagataatagagggatagagctgcggcaaccagcggcagtcccgcgaaaaaaagataaaagtgatcgaaaacataaaagatgagagtcgttgcaaaagacgtttcaacgttcatcgattcatagatggcggaaaattgcggaactattgctgatttcataatagagatgatgacgcagaccgttaaaactaaaaacaaggggtatctggcggctttctttaatttttcgctttgagcgatcttgcggtgaagcagctctccgctctgcctaaaggcaaatggcaaattcccgtgctgttcggcaaagtaaacaatggtgacagcatccttgtgaaaggaaatcatttcaagaacttgaaacacaggacacccttctgtcagcttctccatcgcaaatgtcagatccgctcttcgtctttcattcaattgcaatttcagcatacttaaagcatccaaaatcgtatagccactctgcatcatgtctcctagttttttcagaaggtccgcctgttcccggacaggccacttcattttaatcttcatggcctatccagcgttcataagttttcgacggcagatatccgagtgctattcccttgcggatcagcatttttaaggtgtctgttttgatgccaccgcatctgccttttgcttcttcgatgcagagattaaggctttttccgtacaaaagttcaaagacgcttgctcttctaactggtctcgacaatctgcaatacaaagtgcagctgtcgccgcaaaacggacagacgatatcgacaagacgctgggcgctgactgcgaccaatgtttgttcaatttctgtcatatcaacgccgagctcgagcagcctgtatatcgcacctttagcatttttcgcatgcatgctcgatagaacaaggtgtcccgtcaaagctgccctgactgcgatttgggctgtttcggcatcgcgaatttcccctaggatgatcatgtccggatcgtggcgcagcaccgccttcaaccccgcagaataagtcatgcccgctttttcgttcacttgtacttgcaaaatgttttcgcttcttgattcgaccgggtcttccaacgtaatgatatttcgcttaaaatgccgcttggcgtagtcaattaaagaatagagtgttgtcgtttttcccgagcctgtcgggccggtgaaaagcattaatccgtgggaatgcttcagaaaagacagcagcttgaatgttgcactcgggaacaatgagagctttgtgagcggcttgctgctcatcttgggaagaagcctgatgaccaagctttcatcatggatggtgggcagagtggacatccttaaatgaacgggctcacggttgatataaagagttaaagccccgctttgcggcagccgtctctcgccaatgtccatcgaagaaagaaatttaaagtgagaaatgagtctagagcactcatttctcgttaatccgtctttttgaaacagttcgtcatcaatcctgaagcgtaccaccgcctctttttcaccgggaacaatatgaatgtctgacgccttcattctatatgcctcgtcaattaatcttccgcttaatgattcgatcgtgtacaaaccattgcgcctcctttctaagcgcagtttatacgaaaaccatcggaagcatcaaatccataaaaagcgcaaatcaagccgaatacgtaacaaaaacggaatctccgaataccgatttgactattttattcgacttcaagccgctgaaatagaaatttaaacctgctcttcggccttgccgtcttcatggatgcagaagcctttattgcaaagcgccttagcaagactctgttctgttttaatatgtgaaaaatccatgccgagcttcacaactgtttgggcaatctccggtctcaaacccgaaagaaccgtttcaacgccaagcagctttgtgctgtctacgactttgaacaactgatgggcgaccatcgtatcgacaacaggaacaccggaaatatcaataaaaagatgcgagagatgaagctcagcacactgcgtgagcgcagattcaatgatcaccgttgccctgtgagtatcaatttcaccaatgagcggcagcacaccgatgtgctctgataccggtatgaccggtgcgctcagttcgcgaatcatctcggtctgcgccttcaattggctctttgtcgtatgctcatattcaagaataaactgctctatgacctcatccatcattaagtgaagctgtttattccagataaaaaaatcttttttcgaactgtctggtgcatgttcatctgaaaattgctcgatctcatctattaaaagttcacggcacactttaaaaccatttatgctttcggtaaccggaatttggctgacatccctgtcgtaggcaatttccttggcgcacccggaagctttattccagcatagcgcctgttcatctttggcaaatacctttgaaacagccagtataaagtccttgtattgctgtgccgttttttctttttcagacgctgttcgggacagccattcatctgtgattctgtccgcctgtttgaccagatactcataaagggctgcatgcttgttttccatgtcaatcctcctcattgttttccctttaaatcaatcgcttaatgaccaactgatttgaatgctatgtataaaacgaaatcgattgtcaacactatatgtaagcgcattgggctatagccaagcggtaaggcaacggactttgactccgtgacgcgctggttcgaatccagctagcccagttacacaggcgaaaaaacgaagatatgctgaacatgcaatatgtcagcaatcttcgtttttttcaggaaacagaacggtgtaaggtgtgttttttaattttaagagttcgccgggattgtatccgacgaccagcttatcgccgtttacgataatcgggcgtctcagcagctttggcttttgaattaacaattccagcacttcgcttaccgttaattcttcaatatcaagatttaactctttaaatgcctggcttcttgtcgccaatatttcatcgattccttcggtcgtgagagacaaaatatgtttcaattcatcctggttcggcgtttccctgaaaagatgccggtctgtaaaatcaacctggttcgctttcagccaatgtttcgtttttcggcatgatgtgcagctcgggtatgaataaaaggtcagctcttccatgaatgattcctccttaaatgtactgactttgtctttgtatgtttcagtacccgtgatgttttccgtttaaacacgtgacaggttattttttaaattccttatcacaaaattgtaaaaaatgaattgtttttcccaaaatgaaaatgtttacattttaagataaattgatttataatgaaatcaaaggggctttttgggagggatataaatgaatcgcatgttccgtgtgttaggtttctggacaggtatctttgcggtcatgttttatttaggaaatatgaaagatgcatcactgctgttcttcggtcaaactgtattttttgtgttcttatcgtatctcaacttgaccgagcggatgtacatttatattttcggtgcttacttgacaatcttttttgccgcatttacatattattctgtgttcattatggttcccggacagggaggccattaaaaaaagacgatccagatggatcgtctttttttatgttttacaaagtaaatccgttgatgaacgggttttgttcctgttctgttgcaatgtccgtctcggggccgtgcccgcttaacacaagcgtctcttccggaagtgtcagcagtttttgatgaatactgtccatcagcaccttttgattgccccccggcaggtctgtacgcccgatccctcctttaaacaaaacatcgccggaaacgatcaggttttcctcttcggcataatacgagacgctgcccggagaatgcccaggcgtaaagagcatgcggagcgtaaaagggccgattttaaggtctccctcttcttcgatcagatgatctgctttttctgctgtgatcgtctgccctgtaagcagcgctgaaccgtttaatgaaggatcagtcagccattcagcttcatttttatgcacgtatacaggaatgttccattcttttctgacattgtccacagctccgatatgatcaaaatgagcgtgagtgagcaatacggcaagaggtttcagcccgttttcttttatgtatgcattcagcttccctgattcgctgcctggatcaaatattaagcaggtgccgtcatcattggataaaatataagcgttcgtctggataggccctaaaggcattcttctccatttcattattttcacctcagattcatctttctttgttccattatgaaggttttgtgagaaactttcaatgaatcatgttgtcctcgacaaatttgatgaaaacggttaaaataaaattggaaatatactgcaggggatccaagcgaagggggtttatattgatgttgctcgtgatcattttcggtctagtcacgatattatctgctcttggggttcttcgttctcttaaacaaatcaacgttcttggcatcttgttcggcggggcggcttttttagtgttcggatggtttaccgtcatgacaattattaacagcgggtatccgacagtccactaaacccgatgcctttagacaaagacagccttattccgttatttcggaacaaggctgtctttcttattgactgaaatgacgctgaacgcttgcaagcttgccctccatcgtcgttttcttatcacggcggtcgtcaatcctgatatttgtcgctactctgtggatgcctttttggaaaggcgcttcgtgaatcgtctgaatcacctgaaataaatcgcttagttccccttcaatcaaagtattcatcggtgtcagctgataattgattttgccctcttttttaaatccttccaaaatggtttgaatctccgctacatacgcgcttacgctcggagtctcggtaccgatcggtatgatggtgacgtctgctatggccactgtccattctcctttctattctttggtcacaaggggcgctgctgtttttgagttgagtgaaatgatttgatcctgagtatagccgtacaatgcataatccccgtcaggagataaggtaatcggaagcatttccactttttcacgaatgacttcccgcttgcctgatttgaggttgacggaaatcagatcatacaaggagcccgactcatttggctgatacgtataaaacagctcatgccgagggtcataaccgtattccatcggtgacaggctgccatattccgagaacagcggcaacttgaaagagattttcttttccgatgaagaaacgtctgaaaatatgtaggtgccctggcgctgatctgatgaaggcgttacgatgagccgcatatcgcctacaatatcgagaagtacggcatcgcctgcgagcttcttttcccgtccgtccgctgtgctgtaggaataaacaggagccggcttttcccggtcccgttcattccatttgatatattcaaaagtgtcggcggaagtccaatgaataaaggcggcctgtgcgatgtttttttccgtttgctcttcttttgcatcaattaggcttgattcataattccagtctttcgtgaatgttgtgacatataaaagagaaggatcgaatcgattccagtccacttgcaactcatgcgtgcgaaatttttttgcaaacagctgtttcccctgtaaattaagcaaagttaacttcatttcagagccgtttccggcggtttggataagaatcatgcctttttcactgttgacttccgacgctatcagcctgtcatctgtcttgtagatcgttttgcccgtccctttaaatatatcatatgatttgatttcacttcctccgaccggatcggttgcggtgtatataacggtttcattatcaagccatcctgccgtctcatcaaagtgccggtccttcagcgctatcacttttttatcttttactgctgcaccgctttctcttttcccttccggctcctcatgatgaacgctttttgatccttcttgatgctgcggcgtgcaaccagccgcagccacggccatcagagcggcaataatcaataatgaaactctcaaaccggccattctccctccataaatgtttggctgtctaatttacgattttcaccgtgaaaagtttcagctttcaaaaaaacaggatgcccaaagtattcctctgcttttacaatatatatcgtcaaattgtttcagcggtaaaggattttttcctttgccaagttcaacagtatatccttctcttccgtaataatgaataaaccaatctctaaatcctgcatagctgtctatatatctgacgcccttataaccgctcaggcgctcaaatgtttggatcacatcagctgattcaggaggctccaatcccttgtatccccaataaatttcctccccctgtgtgtgaagcgccacaagccggtctggcggctcgtttgcgattaaatccctcatcgctgccgcttccggttctgtcagcggttcatctccggggtagtctctgtaggaaggggatttaggcggttttctttgtttttcgatctcccagaaagacggaaactgattatttaaatccactccgtttatattggctttccattcccggaaatccggctgatgctcgttcatctcatccagcgcttctctcgcgatcccaagatgaccggggccgttaagtacaaggtcaacaccgtcgggattaacgatcggcacgacggaaagctttgttgatgaaaaaatatcgagcggcgaaaaacctaaagcggtctggcctgtacataaatgataacagtattctttgagccatttcatcaaaacagaagtggtgatccattcattggcatgaaaagaggcattcatatgcgttctttttccggcattttcagctccaaggagcagttcatatataggctggcccatgcttgagcggccgatgatacgggaagtaacaaacggaaagcattccgtcaatctgccaatttcctttttcagttctgctgaatcgtaaacggctgtttttgtcagccactgttcatcttcaaacgtgtattgattcgccaataattgcagctgttcatatgtttctgctgcttgaacgttttttcctgcatgaaaagatactcccggaaaataaagttcgtccgcggatgcatttgcatttgcactgattaaaagcggttcgggtatgttcagaatgtcagacagtctttcaatattctgctttaactccggtttgatgttgatgaatgccatcaatgatccctcccacaatagcatatgaggaatgctcgtttaaaaactctcccggcttgcacttgaaaatcgctttttcaatgagggttcaacccggtttcgcgcgcaaaaaaacttccgcctgacaaggcggaagttcttctattttgttaagttttctgtaataaattcgagctggccctctaatgaaatcggatcggaaaaatagaagccgacagggtcgattttatagacatgttggtttttgaccgccccaaggttcttccaaatggatgtattaagcacggcgctgtcgtctccgcttgattcccaaggtcctataaatatataatctccagcgaaatcaggcagcttttctaaggaaatgctcgtgtagcccgggccttcgtcgattgctttttcctttgtcagctttgtcgcctttaagccgagatcttggtaaacaatgcttcctccccttccgaattgatcgccgaatacaaagatttctttaccgttagtttgcataatggaaaccgttttgttcccgacagctttttgaacttttgatttggccgccgcaacttttttgtcccattcagccagccatttctccgcttgatcttcagtgcctgtcatttttgcgaaatccttcagccgttcagtgctattcagactgtcatatttcaacgcgaccgtcggagcgattttttccagcttttcgatatcagcgccttgggtcgtccatacgacaatcaagtccggttttaattgaataaccttttcagcagaatttccttcacctatgtttgtcacaccatcggttttccccttgaaataaggattcttgaaaaccctgtcaggggcgcccactacattgagaccgagtgtcttgaaatagccgaaataatcgtcagccatgacaaccacccgcttcggatgcttcggcactttaaccgttccgttttcagccttgtatgtaatcgtttcttcgctttttgatttagaagaagaatctttgctctctgtttgattgccgcatgctgtcaatgctgcgatcaataatagtacaaaacacgctgccgcgatcgtcttacctttaatattcactcttcataccttctttcctgtttgatcaccgataaagagaatcattatcaattatatcataaccggcatcggtttgatcatgatttttatgacggcctcttgtcattaaaaacaggccggaacgatatccggcctgctgcatcagctttctccgcctaaaaagaagcttactcgtcttttggcttggagtcagattgcttttttaagcgctcgctgtcataaaacctcagcaagtcgccgtaaatgatttgatctgagtatgaaagctcctgtttggctttttcaatgtacggctcacagccttttttatctttagacggctcgcctgtcgatttatcatagcatatgccgtctgtgtatactttgtctttcgtaataaagctgccgtcgcggagcactgtgaactccgttttgtctttggcaaacaggtcgtttccaaactggatctgatcgcttgaatcgattccgagaagattcagtatagtcggtcgaatgtcgatttggccgccgaccgtgtcaatggttttcggctctttatccgtcactcccggaatgtggatcacaagcgggactctttgaagctgcacttcctcaaaaggggttacttctctgccgaggaattggctcatcgcttcgttatggttttcggaaatcccgtaatggtcaccgtataaaacgataacagaattatcgtagaggccgtcttctttcagcttttcaatgaaacgtttcagcgcttcatcctgatagcggacggtcgggaaatatctgtttaacgtacggctttttgaatcgaattcatcgatcagtttatcttcctcatcaagctcaaacggaaaatggtttgtcagcgtgatcagacgggtataaaaaggctgaggcatttctttcatcagctctgatgtttgttcgaaaaattccttatctttcaatccccatccaactgaattttcttcgtttacatcataggatttgatatcgtaaaacttatcgtatttaaacgtttcgtacataatatcccgattccagaagcttttgttgttcgcatggaaaatcgaggaatagtagccgtggttcttcaatatttcaggcattgccgtatattcgtttcctgcatttgtaaagaagaccgctccccttccaagagggtagagagagttgtcgacaatgaattcggaatcagccgttttgccttggcctgtctgatgatagaaattctcgaagctgtagcttttcttaatcaggtcatttaaatacggcgtaatctctttgccgtttaacttttggtttacgacaaagctttgggtggattccagagaaacgaggatcacattccgtcctttggcgatcccggccagatccttgttggtgtccgtgcggtttgcgttgacatagttttcaatctccgtgaggctgttgctgtcggccagcgcacgctgcgcagactgcttcgactggatcagcccgtcatagatatggaagttgtaaaggctgatgtttttcacaagaacttccctatcaaacgatcttgtcaaaagctgcggtctttctgtttcagaaatccctaaattaaaaaagaaaacggcagcgacaaatagatagtaagccgcgcgctcctttcttgtcgcctttccgcctgttttggcaggctggcgcttgtacagccaaattaaaatggcaatatcaacgatgagaagcaaatcggccggcataaacaaagagttgatgctgcttcccaaatcgcccatattattcgtctggaacaaaacaggaatggttaaaaagtcgttgtaaaaacggtagaaaatcatgttggcaagcaagacaaacgtcaggacgatgcttgccccgataataaaccggtttctgtttttttctttaaaaaacaggccgattccgaatataaacagcaaaaagcttagaggattgatgaacaatataaactcttgcatgaagttttcaattttaatgttgaagcttgttttgtagacgacatacgttttcagccacatcagcaatgtcgcgattaacaaaaacgaaatttttgaaaaaaatgactttcgcattccaaacctccctatgcagcaagacgcatgtttctgcaaacggcatttccacatattgtttattttagaaaaatcgctaaaattactaaatcatatcttaacctgtctgtacaaaaaaatcaatcatttttcacattggcttaaaagtgttaacaatgctgcaaagcggtccgaaaatgctttataaaacaggctgcgcctggcttttcagccattggttttttgcgatccatgcaccgccgatcacgcctgcgtcgtttccaagtgaagcgattacgatctcagccgcctcgccggcccgcgggaatacaaagcgcttgaaagattgttcaactttggagcgcaggatttctcccgcttttgacacgcctccgccgattacgatctttgaaggattaagcgagctcgccaagttagcgaggaccattcctaaatgacccgccacataatcgacgacttcgccggcaacaggatcgttttttctggcggcttcaaagatgtcgcgcgccgttatgtccagacattcacgcaagcttgtatctcgatggtcagattctattttttctttggcaatcctgacgatgccggtagccgaagcgatcgtttcgatacagccgctttttccgcagttgcacggcgctccgccttctggaacagaacagatgtggccgatttcaccgcctgctccgttttgcccgcggacgatttccccgtttacaataatgccgcctccaacgcccgttcccaatgtaacaagaatcaaatccttcgcgctgtctcccgctcccttccacatttcgccgagagctgcgatgttcgcgtcattttcaatgaccgcagctatccctgtctctgcttccagatggtctttcaacgggtagttttcccagcccatattcgtcgttttataaacgatgccggtctccgtattgacgggtccgggagcgcccatgccgatccattttaagatgtgcttcggtttgccgagctcgttcaatttgctgtcgatggctttcgcgatgcttaccgtaaccgttttccctgatttatcggtcgggatttcccacttgtgcaggatttcgccataagcgcttacaaaagcgagttttactgttgttcctccaaggtcgaccccgaccagccagctgtcattcatactgatccccctctaatccctgttttattttctctttatatttgtgagttcattctgcaaaattgaaacaccttgaacccattgttctttttctatcaaatttgaaagaaacatttccttcagttcgtccatcatgtattcaagttcaagctcgcgatctccaaattaaacataacatccaaactgcttcagcaaaagctgtacatcataggctgttttcatctgatttcaccattctttaaaggtctaacattagagtattcataaagctgtccggcgtcaagcaaaaaaaaaagcctgttttcctgccggaaaacagacattcagcggtcgggatcctggggatccaaaaatacgggtcttctgtttttcagcggcatcggcgtgcgaattgcgatatcgcggaaggctctgtagtcaaaaggaataaacggccataaatacggcacatgaaacgacttcattctgacgagataaatcacccagcagaatatcgcaatgacaaagccgatcggtccgaatgcacctgcggcgatcaggagaacgattcttgcaagcctgttcgctatgctcagctcatagctcggcgtagcaaacgtgccgatggctgcgacagcgagatacaagacgacttcatgcgagaaaagcccgacctgcaccgccacttcgccgatcattaaagcagctacgagtccgagagccgtagcaagagacgacggggtgtggattgcagccatccgcatcatgtcgacgccgatttcaataatgatgaattgcgcaagcagcggaagggctccttttttttcaggccctatatattcaagggcgtccggcaaaagatcgggatggacggaaagcagaaaccacagcggcagcaaaaagatcgatgccaagacagatataaaacggactattcgcaaataagcacccgcaagaggtttgtttctgtactcttcggcatgctgcagatggtgccaaaaagtaacaggggtaatcagcgcgcttggcgagccgtccacaaagacgagaatgtgcccttcgtacaaatgaacggccgcagtatcaggtctttctgtatagcggaccgtcggataagggttccaatgacggccgccgatgtattcttccagcgtcttttccgccattgtcaaagcatccgtgtcgatcgcttcaagcgattgtttcagcttttttacactttccaagtcggcgatatcttccaaataacagatgacgacatccgttttgcttcttctgccgacctgcaggaactccattctgagggaacggtcgcggattcttcgtctcgtcagtgcggtgttaaacacgatcgtttcgacgaagccgtctcttgaacccctgacaacgcgttcattgtcgggttcctccggatttcttgccggatacgtctgcgcatcgataataatcgcatggtcaactccgtcagcaaggaggacagccggcccggacagcacctggtcggctgctttgtcgaggtcatcttccgtatcaatttcgatgtatgggatatgcgttttgatcagcttttcaagcggatcgtcttccagattttcaggtgtgagccttgagagatttttaagcaaatgatgcataatatcatcttttacaaagccgtcgacaagataaagcgacatgtctctatcagcataaacgacatcaagccggatcatgtcgaagcttttgtcgacaccaagcttttcatttaaatattcaacatttttcgctaaatttttttggaccgcatgcttttttttcattgtatattaaaagctcccgtcaaatgagtctgttctaaagaccatttttaacataacggaagcttttcatacttgattaccgggcgctttctttctttatttcgtcccgaagctttttatacatctcttcatcaggcttttctgccaacgctctttcaatggactgctcggctttggcaagctcgcctctttgggtataaagccaggcaagactatagagagaggcgtggtccgatggatctttttcaacgacggcctcaaaccttttctcggcgttttcatactcgccgagccgaatttcggaataagcgagcagccttaaagtgtcgctggaagcgtccggttttgagcccgcttccttcaaagcatcctttactttttcatactctccctcttcataccatttcgccgcctgatgcagcatggcatttttctgcaccggagccgaatgtgtcccaaagtacagggcccctcctccgatgacaaagatgaggacccagcctgccagccgctggagcggccttttttttccggggattccgaccgccaaggccgtcaggagaccgccgatcaatccgccgatatggccagcattgtcaacatttgaaatggtgaaaccgaggccgaggttcagaatgatgatcacaatgatatttgttccgatcgtttttaaaaaagctttccggtttgaaaaagccaggtacaaaagggctcccaagcaaccgaagatggctcccgaagcccctgcagacggatacggactgaacagaaagctgccgatcgatccaaaaatcccggctgatatgtatatgacaagaaagcggaatgatccaaacaccctttctgctgcggctccaacagacaataatgcaaatgtattaaacatgagatggaccaatccgatatgaagaacgatcggcgtgactagccgccaccattccccggctaacaggaggctgttttccttcgccccgaaccggacgagcgtttcggtattctggctgccgcccgacatttccagaagcagaaacatgaagacttgaagcactgcgaaaatccaggtaaacatcggtttgcctttctcaaatacagccgcttcccgccgcctttcttcttctcttgctttagccgctgccaatacttcggctctcttctcttccacattttcgtatccggcatcctgcatttggcctgtcagctcatccggctccatgtttaaagccacggcgagtttgcgtaatccttcttcagccgaagcgtgatcaataaaaaccggcacgatgctgatccgcttatctgcgaccggatgaccgacaacatcttcccactcatctacaggcgcttcctgcgacaaatagacattcaatatcgagagctttcgctgacctgatgctgctctcaggcgctccgccctttcataaagagattccaggtcgcggacgagatcctgtctgaagtcgatatccttccggaaaacgcgaaccaaatcatacggcgcgctccccctcgcttcaagccaggcttctccgaatgaagcaggtgcctgcacaagctcaaaatccctgtctaaaaggttcccgatgaaattccaatacaaataatcgattgaatacataccgacgctccacaattgtttttgttcattataacaggaaacgcgacactctgcgtcttttaagagctttaaaaaatcccgttttcaaacgggattcagaatgcctgctggataaacttattgcgaaaaaacggaattctcatcatcaaatggatgaaatagtggcggatttggttttgaccaagaatgaaattgataacacgataacggttttgaaaaaatacaagggctgcaatgacgcctactacaataaacgtaacttttctcatatgatccctcctataacctataaccgtatcgtgtctcattttttaataattattcagcagtgtcgaggcagttgtaaacggcgtcttcggtcaaaacctgcttgaccgggatgtcgtgcggctcatttggaacatgaccgatcacttggcactcgaaggcaagcgacgcggtatcttttgtaaagccggccaggtatctgtcataatagccgcctccatagccgattctgtatcctctccggtcatagcaaattcccggcacaaggatgaagtcgatgtcttcgggttccatccgctcggttttgtgtacgatcggttcctgcaggccaaaatacacgacttcaagatcgctttcatcctgatagctgcgaaagtgcatcttttttgtttcaggcatacatttcggaatgcacaccgtttttccttcaagccgggcctgttcgataatcggttttgtcggtacttcgcgatttctggataccgtaagagcaataacagacgcttttttccactgttttgattggaaaagcttccggtgaatcgcttccgcctttaggtgaaactcctgttccggcatgttagccagcctctttctgacctcgcttcgtaaagaacgcttcacatctctttcccccttaaaaacagaaaaacagcaggaaaatccctgctgcttactttgtttcgcggtgtaatgttgattttttgtcacgtgggcaatactttttgaattcaacgcgatctggattgttacgcttgttctttgtagaaatatagttacgctcgccgcattcagtgcaagctaaagtaatattaacgcgcatttatttttccctccaaactatatatcatttctgttcagacttatctataataccacttatgatgcaggaatgccaggcgttttttttagtttatcacggtttgttaaaaagacgtatgatatacatgatgcaaaaacatattttttacatatccaggatcatgcaaatcaaatatataagcctttgccgtttgtccgaccttgagcagctgctccttattgccgacaatttctgcgagcgcatttgcagccttatgcggatcactaaaatcaattcgaaagccggtcacccgatcgataacgaaatcgttccagcccccgttgattccggcagcgacggcagcgccggcggccatgctttcttgaacagcaatgccgaacggctcataagaacttggaaaaacagccatttcacaaaatgccagccagctctctctttcctcttcacaaaggaaaggaagaatggtcacactgtccttaatgcccaattcttttgctatggtctcgatcccgctttgaagcggcccttccccggcaatgacaagttcaagatcaggacgccggctgcgtagcttctgaaagacgtgcagcaattcgataaaccctttttccggaacaaatcttccgtaggaaaaaaagtagggcgcgcttttcattcgttttttcaccgtgcggctttttatgcacggatgtggaatgacccggatttgctcaaaagaaagcgaaaacgccttttgcatgtctgacttcatcatgctgctcagcacgaggatttgatcgcttttttcagccagaagccgttcgaggattgccctgtatgggtggacatatccgtctgctgccttttttcggccgctttcaaggccgtgcaccgtggaaatcagcggcaccgccagcacctcgctgagataaacggcggcaggcgcggtgacaccatcgtttgcatggacgaaatcaaattgtcctctatgctccagcacgattttgatcatctgaaaattcatggcggctaccgcctcttcaaaagaagcgaacgcttttaaatcaagcggaatctccagcgtttcccatccattgctgttttgcccggcagccgtcgtgcagacggtaaagctgacttcgttccgcaatagttcaaggtggcttttcacatagcgccccgctccgctcttcgatgaaaggggattttccagcgacagcagcaatacgttgatcaacggggccgctcctttccttctattaaagaatatctcgtatatgcggaaaattgagtcgtccaatcctgctgattgtcttgatgctgaaaacagctgctgtttgaatggattccgttttccccaaggtagaagcagtcggatgagagaacggccagtgacatgttgagcgaattgtatatccggtattccgctttgtagaaagcgtttcctgcagcggggaaaaccgaggcctcccctttaaatgcaccggtatggatcgtccgtgcgctgcgctctccgttttttacgcaaaagagaaggatttgcttttcgacgtctctaatattttcaaacagcaccgcttcagccgctgaaagcgcagcctctgagatttcccagctcagccgaacggtttcatgatccggcgaagttatttttaaaatatcgttacaaaacgaagaatcgcctcgaatactatgttgaaaaggttttttcccgatgattgtccttttcaccgcgcgccctcccgttaagccttgttatgtatctatcctattggaaatggccccgcaggcgcaacgaaaataaaattcttcgacaaaatttttattttttgcattaactccttttgaagcaagcgtttttatggtataaaaaagaaggagaaaattagaattgaaggtgatgaacgtggaaattgctatcattgcgctgctcgttgtcagtattgcgctgattgcattctcatattttcaaagagaaccgatcaaggaagttgaacaggagttggaaacccttcagctgtccgccatgcaggaaatctataaactgaaaaagaagatgaccgtgcttgaggaagagctcctcgattcaaatgtggtcgtccgcagaccgaatgccggaatcagccagcatattgcgaagcagattctttcaaaatatcaaaacggcatgtctgtagacgccatcgcaaaagctgagcacgtatctgtcgaagatgtcaaagcgatcattaaagacaatgagagggtgcttgtatgaccagacaaagtgtacaagcatttgccggaggaatgattttggctaccgccgttcttgcaggcgcattttatttgacggataacggaaaagctgaagcttccaaggaggctcaaaacatcagcgaagccgatgtcaaaacctatttaaaggacaatcagcaggtttcgctgaaacgcgaggaataccaacagctgctccactataaagagaccgcgctgaagcaggatgctgcgtctcaaaacaaaaaagagcaggatgatgcgaaaaaaggttccaagtacaagcttgaaatcaaaagcggcatgagcacggctgagatagcagacctccttgcaaaaggaaaagtaatttcttccgccgatgacttcaaagattatgtgaaaaagaccggaaacgaatctaaaatccgcgcaggtaaatacgaactgaagcgcggtgacagcttgaaaaacatcgtcaaaacgctgtccaaataaaaaagcaggctggaacgaatcagcctgctttttttattgtctcgccgccggtgaaaaaagaggctgccgctttaaaacggcagcctctttctcatccgaaccggcctgttatataatctttcgtccgatgatcgtcaggacttgaaaacattttgaccgtatcattgcactcaatcagctcgcccatcaggaaaaacgccgtttgatcggaaattctcgaggcctgctgcatgttgtgcgtgacgatggcaattgtatatttctctttcagcttgagcatcagctcttcgattttcaaagttgaaacgggatcaagggcggatgtcggttcatccatcaagagaacgtcaggattggtggccagcgcccttgcgatgcagaggcgctgctgctgccccccggaaagtccgagcgcctgggaatgaagacggtctttcacttcatcccacagcgctacatccacaagcgccttttccactctctcattcagttcttttttgtttttcaatccatggattcttggtccgtatgcgacattatcaaagatcgactggggaaacgggtttcctttttgaaacaccatgccgacttttttccgtaactcgacaaggtcgactttgctgttgagtacgttcgttccgttgtaactgatctctccggtcattttgacattcggaaccatattgatcatgagattcagcgttttaatgaatgtcgactttccgcaccctgacggtccaatgatggcggtaatttcgtactcgggtattgtcaagttaatgttctttaatgcgtgatgttcgccgtaccataaattcaagtcgttgatctggtatacatcttctggctttacagctgttacagcgctcataccggcccctccttatccaaatctgccgttgatgtaatcctctgtctttttttctgaaggattcataaaaatcttttccgtacgatcgtattcgattaaatctccgttaaggaaaaacgccgtttgatcggaaattcttgaagcttgctgcatgttatgcgtgacaatgatgatcgagtattcctcttttaaaccgacgattaattcctctattttcgcgtttgaaatcgggtcgagcgctgaagcaggctcatccaagagcaggacttcgggcttcatcgcgagcgtccgggcgatgcagagacgctgctgctgcccgcctgacagcgaaagagccgactcatgcagcctgtctttcacttcatcccacagcgcggctttcgtcaagctttcttccacgatctcatcaagcacggatttccgccgttcgcccgcatattttaatgcgtgggtaatgttgctgtaaatcgattttggaaaggggttcggcttctgaaataccatgccgatctcccttctcagattgacgacattgatattggaatcaaggatgttaagcccttcataccgtatttctccggatgttctggctgatggaatcagatcgttcatccggttgatgcttcttaaaaaagtcgattttccgcagcctgacggaccgatcaaagccgtgaccgcatgtttgtcaatacacatgggaatgtcgttgacggcccgcttttctccatagtaaatatttaaatttttcacttctaaaatatgctctttcgcttcagggaacggagcgattccgatattgtcgcgcacggtttccaaaaccggcatctgaacctgagccatatgatttcatccttccttcttatttgtttgccgttaactttttatgaataaaagagccgagccatcgggctgccaggttaaagatcaagacggacagaacgagaacggcggatgcgccgtttgcgatcgcttcagcatcggggatcatcccctgtgtgtttacattccaaatatgaacggccagcgtttcagccggtctgaaaatattgagcggcgatgtctcagaaaacggattccaatcggcaaaattcagtctcggcgtggttagtccggctgtaaacagcaaagcggcagcttcgccaaatacacggcccgacgcaagaatcgcgcctgtgatgatggacggcaccgcgccaggaatcaataccgttttaatcgtgtgccatttggacacgcctaaagcaagggaagcctctttttgctccttaggtacggagcggatcgcatcttctgtcaccctgaccatgacaggcaggttgaaaatcgtcaaagcaagcgctcctccgataatgctgtacccccatccggtcagatttacaaacatcagcatgccgaacatccccataacgatcgaaggaagggatgacaaaacttcaatacagacacggataaaatcggtcaatttgtttgcgggcgcatattccgccatataaattcccccgccgactcccaggggaaccgtgatcagcatcgtcagcacgagaatataaaacgagttgaacagctgatctcgaattcctccgccgcttgacagcgcacttgaacgcgaagttaaaaagctgaggctgatatgcgaaacaccattgatgatgatataagcgaacaaaccgacaagaatagcggcgattaccgcagcaatcaatccaaaaacaccggttgctaaacgatctgttactttgctgttcattacagtttcctcctggatgacagatagcggatgagcaggatgaacaagaacgacatgatcagaaggacaagccccattgaccagagcgtattgttttccacgctcccgtatgttgtatggcccatgttcaacgtaatgatcgttgtcaatgtccccgcagggtctaaaaggctctcaaacagatttcgggaatttccgatgaccatctgcacggccagcgcttcgccgaacgccctcgccattcccaagacgacggctgtcagaagcgaaggcagcgctgccggtatcagcactttgcggatcgtctgccagcgggttgcgcctaatgcgtatgatccttcgcggagatttttcggcagcgacatgagcgcatccgttgaaatcgaagtgaccgtcggcaaaatcatgacagccaggacgatcgttcccgccagaaggctgtggcccgatccgcttgacttaaactgtgaaatgaacggcactaacactgtaaggcctatgaatccataaacgacggaaggaatgccaacaagcaattcgacaaccggctgcagcacttttctgccccatgatggcgcgatttccgtcatgaaaatcgcacctcctattcctagcggtgcagcaatcaaagatgcaagaagggtcactgcaaaagatccgagtataaacggaagtgctccgtattcagggttttcgttcgttggattccaatctagactggttaagaactcaattggacttacaccattggccagaaaagattgcaaccccttatttccgagaaaaattgtgatcgaaatcgccgccgccatcatgataaaggcgcacgacgcaaccaaaatcctcccgcggatttcatccattttgcgattatgcttggagctgatcagccgctctttcgcggacagtttctctattttttgaaccattttttacactcctataagaacaagtcataagagggaaagtgtcaggagcacactttcccgccttctattgtcattatttatcagtttgctttccatccgcgtcgcgttttacttccatgtctgttactggaatgtagccctgctccgtcacgatggatttttgaatgtcatcgctcatcaaatagtcgaggaattctttcgccaagccttcaggttcgcctttcgtataagaatgctggtaagcccagatcgggaatttgcctttttgtacattttcggctgtcggcttaacgccgtcgattgaaagcggagtgacagtatcatccttgatatacgagaacgcaagatatccgattgcaccaggcgtttcagcgattaactttttcactgtgtttgaagaatcttccgtgattccttcagctggagtctctccatcaagtgcatatttgacaaaagtcgcgcgggttcctgaagaatcaggacggttgacaagggtgatcttttgatctttcccgcctagttctttccagtttttgattttacctgtgaatacctttttgagatcttctaacgaaatgtcatcgatgcctacttcagggttaacggcagctgccattccgacaaccgcaacttgatgatcggtaagttctttggcaggaatgccttctttttcttcggcaaagacatcggagtttccgatttggactgtgccttcagccacttgggaaaggcctgtaccagaacctccagcctgaacttgaatatcggcatcaggattttcatccatgaatttttcagccgctgctaagacaagaggctgcatcgccgaagaacccgaaatcgtcaaagaacctgaagccttattctctgttttatcgctttgtttgccttcgtctgcattgttgtttgtactgctgcttccacaagctgctgcgaagacaactaaaacggacatgatgaacatcagtgtgatttttttaaatggtttcacttcttaatcctcccgcgtaaatgtgtaatttgtcctacgggtatagcgtaacttttcagtattaatcttgtttaaatgaattattaaggttttgtaaattaagcttgaactttgtatagaatgcgcacgaaaagaacgggcgcacaaaaaaacacctgcatggttcaatgcaggtgttttaatgaaaaagtcctattctgtagcttctttttcgattttgtctttatttttttcgacagtattttcttttgattgttttgatttcagttcaaaatacttatcaagcacttttcggccgatttcgtttgtgatcgaatatctctggccatagtcattataaacccaaggaacgacgacggaaatagcgacttccggattatcgtaaggtgcgtaggcaacaagcgttgtattgtatgtcgatgttcccgttttcgatttgtccggtccgtcatagaaagactgggccgttcctgtttttccagctggtttatatgaagcagaggcaaactgtcccgctgccgtaccttttgtcattacgcgcctgaatcctttctggacttcttttatatattcatcgctcatgtccactttgttcaatacttcaggctgcacagactgtgtaacggctccgattccttttttcgaatcgggctctctgatctctttcacaagctgcggcttcatgcggtatcccccattggcaatcgttgacacgtactgagccagctgcagcggtgtgtatgtgtcatactgtccgatggaaaagtcaagcaggaaaccgggcagtctttgagatcctttgtagcctgaagcttcatttggcagatcgattccggttttgacgccgaggccgaactggctgaaataatacctgaatgtatcaaatgcttttgtttgaaggtcgagcggctgatgcgccttatattggcctttaccaagggcgatcgccgttttaaacatgaacacgtttgaagacttttcaagagctccctggatacccagtgttcccaagttgctcgcccaagattttttcggttttccttttccgatatagagcggttcatcaagaaaagtcgtatttaaatttatggctcccgtctgcagacctgttaaaacagtggcccctttgacagccgagcccatcgcataagaagacgtcatcgcgccgagcgcatagtcgtcaacctttaatttgccgctttcgtttttaagctgtttgccggcaatcgataacacttccccgtttcgcggatccatcataacgacgaatgcgcggtcgagaagcggagcgctatgcttggctttggcagacttcagttcatcctcgacaattttttcaatcgctttttgcatatcaacatcaatcgtcaagactaaatcctttccgcttttcccctcggaaatgacttccgtatcgacgatatcccctgatttattggtaatatttttcactttctctttctgtccctgaagcacattttcatattcggcttcgaggtagctttttccgacgcggtcattccggttgtagccgagcgacaaataatgatcaagcaggcttttcggaagcccttcatttgaatcggatatgctgccgatcatcgttctgagcagaccgttataaggataatcccgcttccaatcagacgtcacatcgactcccgggagctcgtccaggtgttcgctgacaaccgccatttcttttgcagttacacctttgtttttaatatactgcggagtcagcgcgtatccagaatccatctgacgcttgattgccaagactttcaaatcttgatctgtcaattcattcagtttatcttccgtgatcctgtcaagctgcagctggtataaatcgtcttccttcagcttgccgtccttgacttttttccggtcctcatcggtgatgagcttctcggcttctttcgggcgcgttaaaatccagtagtcctttttatcgcgctccgttattttatctgtatcgattttgatcatttctgcaagtttttttgctattttgagcctgtcctcctgagaggtcgatgatgtccttgtgtatgtaatggcattcatcggtttatttttcacgatcgtattcaagttccggtcatatattttcccccgcggaacgcttgtcgagacatcgacttcttcctgcttctgcacttcgttcgtatagtcttcgccaaagacgatctgcaccatgccgaggcgcacgacgacgatggtgaaaataataaaagcgagaaggaacaatatgttcaacctgatggggagcgatttgcgtttttcatttttcatttttttgttcatcattagcatcacctttttgaaataaagaaaagacaccttatgaaaaggtgccaaatatattgtaaagtttttttcggcatttttctactattttcccttggggcttacctttttccttctaaataattcggttcagctgtttgtttatgcgcatcttttccgaccgtttcgcgggcgggctctgtcagacggatatctttgacgaaatagtagatcagcgtgtggcctgcccccagcaaaacgagagaaaccggaatgcccaagtcctccttcagaagcgacacgagcagcaaaaaaaccaaaatcgagacaatccgtccgatgtttaaaaaaacttctctgacgacaatgtattcgatccgcgctttccgggcatacctcgctttaccgatcacatcatatgtgagcgatgaatacggtacgagcaaaatcggatagccgatagcaatcgcaacagcatacagcaaaagcgtcacatacgtcatatgaaacaaaatcagaaagagagcgccgaacaggacgagaccgcccattaaaatcgcctttttgcgcgctccctttttaataagccgcgttgcgaaatagtatgcaaaaaaagaaacagctgaattaatcaagccgaacttccccaatgccaactcgctctttgtcgtgataaagacaaagacattgattaaaaaaacgaaaatcccttctctcagcccctgaaaaaaatgagcatttgtaatgctgcgccaattcgggtctgaatttcgttccgtccagatttttttcaaaatgtagcggccgcgcgattcacgcctttttaaaaaaaagctcgtaatgacggccactgaaaataaagccaaggacaggctgaaaatcaccgtgtatcccgtgttgtcggcaagccttgaaatgacatagccggcaacaatcggaccgatcattcccgcgccggaatttaaaatgccgaggaacccgttaaaaaaatctctcgtgtccggctcagtgatttcaaatgtcaggacattaaacgcaagccaataaaatccgtagccaattccgagcacacttccgagcagcaccagccgtgatcccgcattttcccccgccaacagcacagttaaataaaatacagctaaaaacgaaacgccaaacctgagtataaaaaccctgtcgatttttttggcaaggcggccggcgaacataaagataatcggctgcatcacgacgatcgacaaattataaatggccaaatcgacaaactgtccggactgcttccacagatatacattcacaaacgtattggaaagggcaatgctaagagaataaaggccgccgactgcaagcagcagcaggaggtccctgtttaattccacatcgcctattatgtttttgattctgctcataactgactcccctttactgatcaccattagtctgtctcatcaaaagtcagttatgtacttcagagcaaaagaaacgaaaaacaaacagaccggcttttcgccggtctttcagcagacgctccgcttcgcggacaacataaaaaggcccgcttctcgcgggcctcttttctcaagctggattattttgcttcgctgtaaaggcgtgcaacttcatcccagttaacgacgttccagaatgctttaatgtaatctggacggcggttttgataattcaggtagtatgcgtgctcccatacatcaagacctaagataggtgtcttgccttctgaaagaggagaatcttggtttggcgtgcttgtgatttcaagctctccgttattgacaacaagccatgcccagccggagccgaaacggcctgctgctgcagccgcaaagtcttctttgaattgatcgaagctgccgaatttgctgttgatggcttctgccaattcaccagttggagcgcctcctccgtttggagaaagaagtttccagaacaatgagtggttggcatgccctccgccattgttgcggacagctgtacggatgttttccggtactgcatcaaggtttgcaacaagctcttcaacagatttgctttcaagatcctgtttgcctgccaccgcttcgttcaattttgtaacatatgtgttatggtgcttcgtatggtgaatattcatcgtctctttgtcgatgtgaggttctaacgcatcgtaagcataaggtaattctggaagtttgtaagccattatcaattcctccttaatattgtatgtattgaaatgccgcctttagcaagcctttcctctttcaatttatcaaaagaaaaggcttgtttcaatggaaatgctcacaaaatgatcacaaatgcatttcaagcgctcactaaactttatccttttccccttctttttaaacatgcaggggaaaattttagagcacggtatataaaaagtagccaatcatcatcagctgaatcacgcttttcgcaaaaacgcctgaaataaacccgatcaatgaaccgattccgattctggccgccgttttcaaatccttctgatggacaatcacctcacccgccaaggccccgataaagggacccaaaataatgcccgccaccggtatcacaaacggtccggccagaaggccgatcgtgctgccccatatcgctgccctgctgccgccaaagcgcttaatgccgaggagatttgtaatatagtcggcggcaaacaatacggctgtaaaaatgccttcaatgatccaaaataggtaggagtaatgcccgaatgtaaataaaaatccgtatagaacaaagccggctacgatgaaaacgacgctcggaataatgggatagacaaggccgatgaaagcaatgacgaacattgccgcaatgatgatccaatacaaaacatccatccgaatccctccaatcgattgtgatgcttcatattatacccatttttctgaaaggaaacttccagagcgcctgttgatcgataagttttcttgtattcgtccttttgtgacgatacaataatgcagatacattatagaaataggaagtgaaaaccgaatgaatttatttcagcgattttttaaaagtacatattcccctcaagctattgggaaaatgcgtttccaaggcataggaaaaacgattttatacgtatttttgctcagcgtgatcgccgctctcccgaacctttaccatatcagcagcggagtggtgaatacgatgaacagctttcagtcagctgtgaaagaattccccgctttctccataaaagacggcacactgcaaacagatgcaaagaaagcgattgaatcacagtcattcggatttgtcatcgtttttgatccgagcggctcttatgaaacaaaacagatcgaagacaaacgcaattccgtcggcatcctgaaagataagttcgtcatcgccattgacggccaagtccaggaaatgccgtacacaatgcttcccgaggacatgtctaaggatgatattctttctttagttgatcaaaataaagcggtgattgttcccgtcttgtgcgttctgctgttcctggcgacggcagccggaaaattcattgatgtctcggttctcgccgtcatcgggctgatcattcgcaacgggcagaagaaaatgctctcctataagcagctttgggtaatgtctgcttattccatcaccctcgcaaccgtgttttttgcaattatggacgcgctggaggcggtggttccaagtcagttcctcctgaactggtttgtgaactttatcatgctgtttctcgccattaaagaaacgccggcttctaaagcagcgaggtaaagcgggcaggagcaaatttgttgtcatgttggaagagggacaagcgtaacataataaaaaatgcacgaaatggggacaaatcagatgaaacgtgtcattgtgctgttttcgattttgctcgccctgttcattgtttattatgacttgaaatcaggcaccatccctcaaaacgccttaccggcttcaaccatggcagcggaagctccggctgcaagcctgcaatataagtccgttacggtaaagcccggacaaacggtattttcaatcatcgggaacagcgccgttccggctgacaaaatagccgaagattttgaagagctgaatccgaatgttgaggcgggccgcattcaagcaggtgtcacctacaagtttcccgtttatcctgattaagcgttaatttcttgtcagtttcatgaacgggctgttacaataagacttgtaaacgatttggtataagaaaaggagcaaccgcctccgaattatacttaaggagcgaattcaagtgagtgaaatcacacatcgtacaaaaacgcgtcccgttaaagtgggacctttaacaataggcggcaataacgaagtcgtcattcaaagcatgacaacaacgaaaacacatgacgttgaagcaaccgtcgccgaaatcaacagactcgcggaagcaggatgtcaaatcgtccgcgtcgcctgtcctgatgaacgggctgccgacgccattccagagatcaaaaagcggatatccatccctcttgtcgtggatattcatttcaactataaattggcattaaaagcgatcgaaggcggagccgataaaatccgcatcaatccgggtaacatcggccgccgcgaaaaggttgaagcggtcgtcaacgcagcgaaggaaaagggcattccgatccggatcggcgtcaatgcaggctctctggaaaaacgaatccttgagaagtacggctatccgacagcagacggcatggtcgaaagcgccctgcaccacattaaaattcttgaggatctcgatttccacgatatcatcgtcagcatgaaggcgtctgatgtaaacctggcgattgaggcatatgaaaaagcggctaaagctttcgattatccgcttcatttaggcatcaccgaatcgggaacgctgtttgccggtacagtgaaaagcgccgcgggtctcggcgcgatcctttcaaaaggaatcggcaatacattgcggatttctttaagcgcggacccggtcgaagaagtaaaagtcgccagggagctcctgaaatctttcgggctcgcttccaatgcggcaacattgatttcctgcccgacttgcggccggatcgaaatcgatttgatcagcattgccaatgaagtcgaagattacatcgcgaaaatcaaggcgccgatcaaagttgccgttctcggctgtgccgtcaacggtcccggagaagcgcgcgaagccgatatcgggatcgccggcgcacgcggcgaaggacttctgttccgcaaaggcgaaatcgtccggaaagtgcctgaagaaacgatggtcgaggaattgaaaaaggaaatcgacaagctcgccgaagagcattatgccaaacaagcggcagaaaaagaaaaattaaacacataataaaaaaaagcttgacggatatccgtcaagctttttccgttagaaaaacggggtgatgaatatgccaagcaccaaggaaactgcaccgatacccattgcccatgctcctaagccagctgctccttgtcttctggctatataaccgacaatgatccctgcaattcctaacagcactggaagcataaacaaggaaataatcgaaagcgcaagcgcaatatatccggttacacgtccgccggcagcatcggcatcgttacgcgcttcgccgttgtccccgttatccgtacgataggtcggggcaacttctgctgctgtttcttctaaaaattcatcattatctaaagtcgcatcgactaagtcagcatcataacctgctcggttacgatcgcgaacattttgatctctttccattcgatatcccccctctttaatccaggagcatttatagtttaagcattttagcccgattcatgtttgctaaactttactgtaaatgttaaaagattatgatacactggaggaatggatgataaggagtgtggacatgttacatttaggaatcgatattgatggaacgatcactgcccaggatacttttgttccctatttgaacgagtcgttcagcctctccattacattggaagatattaaggaatatgacctgacaaagctgctgaatatatctcaagaagatttttggaaatggatgaacgaaaacgagccccgcatctatcaggaagcattgctggctcaatatgccaaacagacgctggatgagctgaaaaagcagcataagctgatatatattacagcaagaagacatcacctggaggatatcacctatgactggttcgagaaacgcgacattcattatgaccatatagaacttgtcggcggtcacgataaattggaagccgtcttcagacatgagattgatgttttctttgaagaccaccacgggaatgcaaccatgatcgcaaaagaagcaggcattcctgttctgttgtttaatacgccgtacaatcagcttccgaccgattcaaacatcgtcagagtcgacagctggcttgaagccgccgaatggctgaaaaagaacgagaaaacgcttaaagccgcaaaaagcatgtaagaggttttatcttacatgctttttgcgttaaaaaaaggacatatggctttaaccgccatatgccgctccctttactgcgcttccgtgctttcttcttcacagcgcgggcaggttccgtaaatttcaaacttatggccgctgatctgatagccgtcaagatcgtctgtcagcttttccatcggacatagctcaatttctttcgttttgccgcacaccatgcaaataaaatggtggtggtggtgagcagaagaacatttaaaacggaacagcttttcaccggaaagctcagtcgtttccaaaatgccgagttcttcaaacagcgacaaattcctgtagattgtatcaaagcttagccccggataatcatcatttaaagcggaaaggacatttttcgccgttaaatatttatctgaatcactaaacagctgaagcatatcctcccgtttgcttgtatatttatatcctttttccttcagtaaatcaagcgcttcctgtacgttcacggcgaatcctccttttgactttattataactgatgcacagtatcaggataaagatcgacagcatcacgatcgttccccccggtgcaagatcgagatgataggcaagcacaaggccgacgatgacggaaagttcaccgaacaggatcgataagaaaatcgcctgcttaaatcctttggcaatgcgcatgctcgcagcgacagggagcgtcatcagcgctgaaacgagaagcgtaccgacgattctcattgaggcggcgataacaagcgcaacgatcaaaataaaaataaaatgaatccactttgcggaaatccctgaagcttttgcatgctcttcatcaaacgacagaagaaacagctctttgaaaagggaaaacaccacgatcaaaacggctgcggaaatgccgacgatcaccagcatgtcttcccgtgaaacagcgctgacgctgccgaataaatagctgaacagatccgtattgaatccgtcggcaagcgaaataaaaataacggaaatgccgattccccccgacatgataatcggaatcgccagttcctggtaatgtttataaaccgttctcagcctctcgatgattaaagagccggcaacggaaaacgccattccgaaatagatcgggctgactcctgcgaacactgcaaactgtttgcctgcatacaggctcgctgctatgccggctaaagagacgtggctgagcgcatctgcgatcagcgacagccgcctgacaacgatgaatacgccgagcaagggcgcgatgaggccgattaatattcctgaaataaaagcgttttgcaaaaactcataatgaaaaaaaggtgtcagcattattcgtgtcctccatgatgatggtgattgtggctgatggcttgaacatcatgcccgtaaaattgagacaagtcttgatctgtcatggactcaaactcttctgtattgccgtgaaaatgaagatgcttattcatgcaggcaacgtgtgtgactttatcggaaaccgtgccgacatcatgggtgacaagaatgagcgtaatgcctttttcacgattcaatttctccagcagcttgtaaaacccttcaactgttttttgatcgactccaaccgtcggctcgtcaagaatgagcagcttcggttcgctcaccagcgctctcgcgatgaaagttctctgctgctgtcctcccgaaagctcgccgatgtttctgtctttcagggacgtgatgccgacagcttcgatcgcttcatccaccttctgcttatcggctttggacatgcgtctgaataagccgagctttgcggttaaaccgcttgccaccacttcataaacggaagcgggaaaaccggtgttaaagctgtttgctttttgggatacgaagccgattttgctccagtccttaaattttctgagaggaacgccaaacagtttaagttcgcctgtctgcggcttaatcagccccaaaatgcatttcagcaatgtcgtctttcccgatccgtttggaccaaccaggccgagaaaagtcccttcttcaatttgcaaatttatatcttctatcacattgcgatgatcataggaatatgatacatgcttcatttcaataataggttgtttcaattcgttcaccttcaaattctccagaatcattacgatttatcgcacaaaaagaaaatggcagccgaaaagcagcaagccattttcacgattgaccagttcatctttaaattatacatataaactttaaaaaagtaaatgaaagcctaatggatggcgtttttaaactttcctccgcgcgtttcgtgcgtgtccataatcgttataaaagcattgtgatcaatatcgaagacaatcgatttcagcttcgtcacttcaagcctggtcacaacggcataaatcacttctgtgtcctcgtcggaatagccgcctttccctttgagcttggtcgttccccggccgaggcgatgcagcagcgaatcggaaatctcctcgtattgatctgaaacgatgatgaccgctttcgtctcttcaagcccttgaatgacggcatcaatcgtcttcatcgcaatataatatgtcataaccgaaaacatagcctgctcaaggccaaacacaaagctcgcccatgcaaaaataaagacattgacgaacatgacaaattcgccgacagaaaacggcagctttttcgtaagcaaaatgccgagtatctcagttccatccatagaaccgccgttacgaataacaagccctacgccgaatccgagcagaagaccgccgaatacggctgccaggacgggctgagtcgtaaccccttctacatgatgcaacagtgtttcaataattgacaagctgacgattccgattagtgttgaaattaagaacgtttttccgatgtgtttgtagcctgaaaacataaacgggatgttgagaacgacgacgagcagagcgaagttgatatacgggttatctttaaagaggtagtccaatattaatgaaatgccgataatgcccccgtcgatgatgttattcggcactagaaataattcgatgctggcggcagcacaggcagccccgataagaatcatgacgatcctaaacgcttttttgaccgctgattcttttttatgctgtttttgagtctttgccattctgtctctccttttcacaaactggccaaaccgttccttatcactatcatatcatttaacagactgaaataaaaaaatgacacatttttaattttacgccatacattagttcagaggggaggaatggacgtgattttatttcaaaagatcgtgctgcagcgtttaaatcaggtcacggctgacgaggtgctgaagtacgctaaacaatacggaattcaagtaacaagaaaacaggcgcttgaagtggaaaagcttgtgaaaggaaaaaacatcaatatttttaatgaagaagaacgcaataaactgctcaagcaagtggaagcggtcacttcaaaagaagcggtgcagctattgaaccagctgtttgctcaatacgtatcataaaaggggagctggtgtgcccccctttttttattgctgcttgattttttcaagcagctcttcatcaaactgtttatttttgagcatttcaatttcaaaccggtaaggcggctttttgttctttttatcttctcctacataaggcgtttcaaggattttcggaatatctttcagctgatcgtggtgaacgatgtattggagcgcatcaaaaccgatttctccgaatccgatgttttcgtggcggtcctttctcgcacctctgacattcttgctgtcattaatatgaagcacttttaaacggtcgattccgacaattttatcgaattcgtttaagacaccgtcaaagtcggatactacatcgtaacccgcgtcatgggtatggcatgtatcgaagcagacggataaatgctcgttgtgtgtaacgccgtcgatgatctgtgcaagctcctcaaacgtccgcccgcattctgaacctttcccggccatcgtttccaaagcgatctgcacattctgattcgggtcgatgacctcgttcaatccttcgatgattttttgaatgcccgtttctgcgcctgcgcctacatgagctcccgggtgaagaacgatttgtctggcgccgattgccgacgtcctttcaatttcagaacgcaagaactcgacaccgagctcaaatgtggccggattcgttgtattggcaatattgataatatacggggcatgaacgacgatatcagagatgccgttctcttccatgtgagcccttcccgcttcaatattcaaatcctcgatttttttcctgcgcgtgttctgcggcgctcccgtatagatcataaatgtattggcgccgtaggagcttgcctcctgactggccgcaagcagcatatgttttccgctcattgagacgtgtgaaccgattttcaacaaaactgtttcccctactttccttttctaaattgctttcttttttgctgtctttttattttttggatttccgtctgcattttcttcttatatccaggcttgacttttctcggttttttcacaagccgcttggcgacctcatccgtttcatcaggcgttctttttcggttctgacggcgcttgcggtcatcgatctttttccactcgcctttttcaatcctcatgttttcaaacacgatccccatctgttcaagcttcacaagtgcatcttcatcagatgtatcataaaacgtcatcgctgttccggatgttccggcgcgcgctgtacggccgacgcggtgaacgtaaaagtcaagatcatcaggcagttcatagttaatgacatggctgacgcctttaatatcgattccccttgcagccaaatcagtggctatgatataggtgaattccagatcgccgatttgcttcatcactttttttcgttcccgcggcgtaagccccccgtgcagaagtccgactttcatccctttgtccgtcagataagcggcgatctcgtcggccgttgtttttgtattggcgaaaacaatcgccaaatacggatttaaatgggtcatgacctcgagcaacagctcatttttatccctgtgcctggaaggtatcagcacgtgttcgattttttcagccgtgatgtgcttcggctcaacatgtgcatacctcggattggccatgtattttttcaggaaaggctttaatttttcgggaatcgttgcggaaaatacaagcatctgcaagccttccggcatatgcgacccgataaaatcgacatcttccaaaaatcccatatcaagcattaagtccgcctcgtcaataacgagcgaaccggctttatgaacatcgagcgcctgctccctgatcaggtctgcaattcgccccggcgtacctaccaccagatggggctgcgtttttaatttgtcaatcgatttttgtttatcggtaccgccgatgaaacatttcgaacgaatcgcttcatcaggccctaaaaacttggtgattttcagaacttcctgatgaatctggttggccagctcccttgtcggagccgtaatcacgacttgaacgaactctttttcaggatcgatcctgcttaaaagcgggagcagataggcgtgcgtttttcccgtacctgtctgcgactgcccgatcgcgctctctcctttcagcgccgcagggattaaccgcttttgaatatcagtcggctcataaaatcccaagtggtgaacagcctctataataaacggctttaaatcgtacatttcaaatttcgtttgtttcattttcccaactccttcttggaaagccgttattccggcgctccaagctttatcctatatggctgaattgtgcgcttatgtatccttttttatgccgcactgctaaaaaaaaggctgatatcatgtccatcattaaattataactgatcctgcagaaaaaaaaccatcacccccgccataatcgggccggcggacaaaggcactttgccaccgttggtgcataccctatcaagagaaggattttgaaaggaggtacaagtatgtttcagcaacagccgatgagaaatcagccaagaccgcaggcgccgcaaaggcccggcagagccttgatgccgagacatccggggatgggaatgcagccccctcaagcgcagcagcgtggcctgcagcagatgtttcagccaatgggcgccgcccagcagcaagcaggcgcgcgaggaggagggattcaggggttgctctcgaaatttcttcccggatctgccgcatccgggggaacaggagcgggtctcggcggaaccggaagcggccttggaggcattcagggtctggccaatccgtctaccatttcaaatatgctcggcaatgttcaaaaagcgctcggcgtagcccagcaagtaacaccgatgattcagcaatacggaccgctcgtccgcaatctccccggaatggtgaaaatgttcagacagctgaattccgatgatacggaagcagaagacggcgaacaacaaaaagacgaaccggaacacaagaccgaaacgagcggcgaaaagaaagaagaaattaaagtgtcatccaaaaaacccgaaaaatccaaacccgaagaaatcagaaaaaaacagagccgttcagcccctccgtctgcaaaaagaaaaaccggaggatctaaacctaaactgtatatataacattctttgatatctcctgcgggatcagatataatgaggtctatagagactgcaaaaataagccgttttttacggctttttatcatgcccggctcttacttctttataggaggactaagaatgaacgtaattaaaatatcgccgcgcggctattgctacggtgtcgtcgacgccatggtcatcgcaaaaaacgcggctctcgataaaagtctgccgagacctatttatattttaggaatgatcgttcacaataaacatgtcacagacgcatttgaaaaagagggcatttatacgcttgacggcccgaacaggctcgagattttgaatcaggtcgacaaaggaacggtgatcttcaccgctcacggcgtttcgcccgaagtccgcaaaatagctgaggataaaggtcttgtcgcgattgacgccacctgccctgatgtgacaaaaacacacgatttaatccggaaaatgaaagccgaaggctatcacgtcatctacatcggaaaaaaaggacacccggagcctgaaggagcggtcggcgtcgccccggatatcgttcatcttgttgaaaccgaagaagatgtggaaaggctggacattgaagcggagaaactgattgtcacgaaccaaacgacgatgtcccaatgggatgtccacgatattatggaaaaggtaaaagaaaaatatccggatgttgaattccaccaggagatttgcctggccacccaagtgcgtcaggaagcggtgtccgaacaagcgaaaaaagccgatttgacgatcgttgtcggcgatccgaaaagcaataactcaaaccgcctcgcccaggtctccgaagaaatcgcgggcacgaaagcataccggatcggtgatttaagcgaattaaagctggaatggcttgacggcgtagaaaccgtcgctgtaacggccggcgcatcgacaccgaccccgattacaaaggaagtcatccgctttttagagcaattcgatcatgaagatccgtccacatggaagatcagtcacgaagtaccgctgcataaaatcttgcctaaagtaaaagcaaaaacctgaagcgctaatagcttcaggttttgttttttatacaaacgtaaacggattcgtattcgtatccgatggaaagaccgagacatcaaattttttctcccggcacatcgctgtcagcttttttgcaaccccgtttttcatgatttgttcagcataatggccggggtcaactacattcagcccgatcatcatggcgtcgtgcgccgtatggaaatacaggtctcccgtgacatatacgtcagcgcccatacgttttgcatgatggatgtatttgttgccgtcaccgcctaatacggcgaccttcttcactttcgcatcagacttgcccaccatccgcgctccgttcgcctccaacttttccttcacatatcgggcaaacgcttcgagtgtcatctcttcattcaattcaccgatgcggcccagccctttttgaagcggattctgctcgaccggataaatatcaaaggccacttcttcatacggatgggcctcactcatcgctttgatcacggatttttcaatacccgccggataaacggtctcgattcttacctcttcgacccgttcaagctcgccccgcttgccgataaacggatcagcttcagatagcggcttgaagctgccgactccttctgcagaaaacgcacagtggctgtaggcgccgatatggccggctccagcgtctccaagagctgtgcgtacctgttcttcataatctttcgggacatagacggcaagttttttcagcggctcttcataggttggaaccagaacttttgtgttctttaattccagcgcttccgctagcatgtcgttgacaccgccgtcagcgacatcgagattcgtatgagccgcataaaccgcgatatcatgcttgatgcacttttcgatcagccttccgccgggctgatctgtgatgacatgtttcagcggcctgaaaacagggggatggtgcgcaataattaaatcaacgttctttgcgatcgcttcatcaaccgtttcttcgagaacatcaagcgtgaccatgacattggccaccgttttgttcagcgtgccgatttgcaggccgattttatctccttcaacggctaaagacttaggcgagaactgttcaaacaattgaatgatttcatgcccgtttatcgtttttgtcatcttctaagtacctcctttaagatctctatccgttctgacagctcaagcaatttttgtcgattttcttcactcggaggagccgcttcaatttgtcgatagatgttttccgtatgtttcagctcctgcgaccattttttgataaaaacatcattttgttctttgaccaaaaatgggccgacaagcatgcctgccgcaaaggaaaccccatcgtaagccgcatcccgatcgcccgcttcagccacgagaacctcatagtacttgccgtcttcttcaaggatctcttcattgatcagtgcatagccttcctggtagagccactctctaatatgttgagcgtggatattcggctgtaaaaccaaacgctccttacctgagagcttatccttgcccgtttttagaatgtgagcaatgagcgagccacccattccggcaatcgtgatcacatcggcttcgcccttttcaatcacttcaagcccgtctcctttcctgacggatatgagcgaacttaactgcagtttctcaacctgctgtttcgcagaaagaaacggaccatctgtgatttctccggcgatcgcggcgcttgccaggcgattcagcacacaatagcaaggcaaatacgcatgatcagacccgatatcagccacaacagccccttttgttatgtattccgccacagtctgcagccttttcgataacttcaattcattcacaatcatcactacttttctagattcattttacttttactatcatataaaaaatcgctttactttccaagctggaacagcaaatcaacattctactcggtcaattttggattctctctgtaatatccacgtaaagtatgggtctcaagatccgcgagccgaaccggaatcggcagcctgctttctcgattgattaagctcatcgcgatgtcataactgctgtctaaatcaatcaaatgtccgcatgatagaaatatcggtttgacatcttgccttgtccgcaccgcacgtccgtagacttcgccatcaatcacaatatctgtataagcgccgaatttattatcaggcatcacaaaatcagtttgttttattttcaagtaagttttcgcaatgccgatcgttggcttttcgagaaaaaacgcagcatgtgtcgcaatccaatatggttaatatggagatagccattcccgtcaaataaaaaaacatccggttcaatcgtcagctttttagctgccttaataataagcggcagctccctaaaagcaagaaaccctgcgatataaggcacggcgattttccctgcacaatgtactttttcaatgacacgcttcgtatgaaaatccagcacgatgatgctgcagacaccaaatgcttcaccatctttctcccaataagctaaatcaacccccgcacaggtttgcagagcgtctttactgatggggttttctagattgatatgtttttttagttttgtttgtatcgttaagaagtcattttcttggtttaaattaaaatcgtgtatattgttgatgttcatctttaaaaaccaactttctacatgcctttttttgaacgcctttatctagatcatatctaaattgttcagttcattaccgggacatcactccgatgccggacagcaaagatgtcttattggggtagcgtcaggaaaatgcggatttacaacgttaaggaaaccaaaatataaaaagtctaatttctcggtgttataagtgaaaaattaggctttagttacttcattaaagcgcctgattgttgaagactaaagtttatattcaccaagaaaattgatgtgctcttatcctaacaaattttatttaggacttacatgtatgccttcactctctcgccaatctgcgtaaagtatacgctttacattatcatatccattggtagttaattggttatctaaccactgttgatcaaatccgagttcatgtaaattatcccataaaatttccccatctataattaacgatgttgggaggtctactggactttctggaagattgagatctggtttttgatacttggattttaataataaacttatttgcccattagcttccaatataccgtatttgacttcgcgaactgaaaagacattattttgacggagtatactcaatacttgatttacatccaatttgttctttgtaagtaactttctgtccataacaccatctcgaatgatgatgttaggattgcctaataagagagaacgtgtcgatttattttttagagtcataaactctattcccaacataagaaacgtccacaatccgatggcatataaaaaatgaaaaatccctaccttatcttcataaatgttatttcctaaaaaatctccaagtactaacacaaaaactaagtgaaacggggtttaactgatagatggatgttctgcctgttatgataatgataaaaaataaagttgcaaaacctactatgactttgattgtcagtaaacccaaaaaaacttcacccaaaatttattcctccattttatatttcactcgatttcaaaaatcctcatgttttaaaatatttatattacaacatgtaagctaattaaaatcagaaagataaataataccggttttttcaacttataataatggagaaagcacgcgagcaccctgttcaacaatgcgctcggtcagggatcgttgcaccaagtcttcaattcttaatggtacagaatcagtaagatccctctcgaactgctctgtgagttcccttgccacatcagcactgtacacgacttgacacacctcataattcaggcgaaaacttctcatatcatagtttgctgagcctacggcagcaatctcctcatcgatggtcaacaccttcgcatgtatcattcctttgtcgtactggtagatttgaactccagcttctataagttctccgtaataagtacggcttgcaagacccacgattttttgattattgtggcgaggaaccagcaatcttacacggacaccacgagttactgctgtctttaatgccatgataatatccgtttctggtacaaaatagggtgttgttaaatcaatagtcttggtcgcctgtgttatacatataaagtaagcttgccgaatgactggggtaggaattccagggtttccttccaacgtatggatatacgctttatgcaatgtcctagtttttccggatatgtccatttctttatcatcaagggtgctcaactctgatcccaattcggctgaccatttggaatgatctgctctgccgattgaattgattttcgttacctctgattttgttttcaaatttgtttttgattttatcctttccggcacagcgatttcccaatgaacatcaaaaacagtctgcaagtcgcctgttgcttcccctataatttgcaaatgagtgtccctccaaaatcctacgtctggctttaatcctgtatattcatacccaacgttcataccgccagtaaaggattcctttctgtcaatcgtcacaatcttacaatgatcccgataattccaattggacaaaatccagggaaatcgcagaggaaatattgtcctgcattctatccctgcttcaaccatctgccggattttttcacgcgggaatttataactccccaagctatctctcataaaacgaacctgcactccatttaatgctttttcgattagcagttctgtgattcgattaccaatttggtcgttccgatagatgaaatattccagatcaatggttttttgggctttttgcagggatacaaggagttgatcatattttgctatcccattgttaaacacttggacttggcccattcgaagcccattcacagtgaaatgccgtaaagcattggcaattaccgatgctgaagcaccgaatgtctcaggtaatttgttagattcatttttagaacaggtcaatctttttcgatgaataaacttagggtttgatatgctaagatatagccagaaaccaatgacaggtaaaaaaaggacgattattatccaattcaaagccttggcaggccgacgaacttcccaaattgctatgaataagataaagaacgtatttaacaggtatagataaaaaatccactccaactggaatccctccttctgttactcttaacatgtacaaactatgtaaccagtatacgtatggaatatgaagggattgtctgttatatattatggactacctttataagaacttgtataagatattaagaacgaaaaaaagagaattaaggttgggaaagttctgacatcaagaaaggcgtaatgatctgggcactgtcctaactagagacttagtgattttgaaaattaccagctggtaaattcctaaatataggtataattttttataaatttggaaaatgaaagtggtaaatgcaataagaagtaaataagagaaaacattaatttatattgggaggaaatcgtcttaaaattagtcgttaacatcttttttgttaatggttaatgaatgatcggtatctctaacagcagcataaaaaaaatctttgatttgaagatatccctttgcctttagttcttcctttaaccacttttcatttttgttgattaattttaaattacgcttttgcactttcccttcaatgacaacggctatgggtaatccgcggtattccactttcatatgtaaatcttttggagtaataggaactaattcttttcttggaaaaatgctaatttcacctgttgcttccaaaatcgcatattcaatatcgtgaatatccggatatcctgatgttcttaaattagacaacagctcaggtaaaggatatctactttcctttaaatttcgatagataattttcccgtgtttaattagaatagtcggttttccgataataaaagggtttaacttatttaataaacttaactttgatataaatagatgaatgcatgttattacaatgattccaataatcccctccatcactccgtttactttaatagaaccaaaagctaaataagataaaaaaagaatcgctccaaaatcatgaggggtaagttgggctagagctgatttccctaaaatttttactgctacaataaacacaatatagataaaaataactttaactaaaaaaatagacacttctaacacctcgtaaaaaaattcaccttagtccgaaattggactaaggtttttaaacttttttcaattaaaaatggtatctttttttcgtcatgtatgaatctaagctaaatccttatccttttaaaataggggtcactttatcaatggcttcttgtaatttttcactgtttaacctatacatttgtttggcctcttttgattccgttccaagagcaaacgattccaagtcagcttgacactttttcatggtagaaagtattaaaggcttttcttgaggggacgggacttggagtttatcatcaaaaaggtcaattgttaattgtccgtaagaatctacctgcccaataaaaacattctcaatcgtcaccccttgtttttctagttcggtttttaaccaaccccgacttctaccaattgtagacagaggctcatctaatatttctccatccataatgacggtctgaggttccttaacggaagcaacagtcaagtttacatctttcggtgtcaaaggttggttttctttcttgagcataacgcttagatccccggttggctctaataccgcaaattccacatcagctaccttaaagacatctttctttcgaagcaattccagtaactcatctgtcgtatatctttccttttttaaattatcttccataatcttcccatctttgataaatacagttgcttttccttctataaaattgcgaaagcctttgctttttaaggaaagcaaacctgctaaaaagggtattgccgcgaagaccacgattccgattatcccgttaaacatgttccgttcaagtcctgtgataacttctgcgccaatacttccaattgtaatacctacaacatattcaaaaaaagaaagttcagaaagttgctttttccctaaccattttgtgattaaaaacaggacaacgacaaataataatgaccgtattaccacctctaaccattcaggcactgcttacacctcctgtaaatatagtttttctagaaacctttgtactgaagttcctctccttctagttctcctactcttttttttaaatcttttgttacttcgtgtactaccatcatagcctcatgcaaagttcgcttcgattcatcatcaagagtccgtaatgctaaacttgagagacttgcttctaccccttttagactggcaaaacactgtttaacatctgatcctactgtcatcctaattctccttatccttttggcttaaaaattaaagctcctatcatgccgaaaacaatggaagctgtaataccagaactagttacttcaaacattcctgtcagtacaccaactaacccatgtttttctgcttcctgcatcgcaccatgaacaagcgaattcccaaaatttgtaatcggaacggtagcccctgccccagcaaaatcaatcaaaggctcgtatagtccaaatccatctaaaagcgccccaatcactacaagagcacttaaggtatgacctggtgtcaatttaaatacatcaaacataatttgcccaatgatacaaattaaaccgcctacgacaaaagcccaaaaatagatcatgttaattgttcacctccgtattcaattgacactgcatgggcgatacaaggaattgtttcattttgctgaaaggacaacggtgaaagcaaagcacctgtagccacaactaacatgcgtttaaattcaccatttttcatgcggtttaataaatgcccataaactaccgttgctgaacagcctgcaccgcttgcccctgcaagaacgggttgtccttcccgataaatcataaggccacaatcttggtattgttcttcactaataggagttccatgctttttaaatagatccatggacacttcctgtccgatttggccaaggtcaccggttacaattaaatcgtaataagatggctcaacatttcgttcctttaaatgggcttcaatggtatcaaccgcagctggcgccatagctcctcccatgttaaatggatctgtcaatcccatatcgattacacgaccaattgtggcagatgtgacatgaggtccttccccagaatcacttaatagggctgcacctgcaccagtaaccgtccattgtgccgtaggtggcttttgtccaccatactcagttggataccgaaattgtttttcaacagctgtatcatgactggaagctcctgttaacaaatatttcgctccttttgtatttacaatataagcacctagagccagtccttccatcgaggtagagcaagcaccgaataagccaaaataaggcgctccaatcgttctgctagcgaaacttgttggggtgatttgattgattaagtccccagctaggataaattgaacttgatccttttgtatgccccctttttccatggctttttggcaagcctcttcaaaaaggattttatgtgctttctcataggaatcctgcccaagccataaatcagcatgaagagtatcgaaatcatctgggatagcaccattggcttcaaatggtccaccaacggttccagtggagataatgacaggcttttgttcgaagatccatgtacgatgacctgctagcattataaaccaccccactggattaaagtggttttaattaaggcaatgacaaaagcagaaaaaacaccaaataaaataaccgcccccgctaatttaaacatgttgccacctacgcccagtacaaatccttcggttcgatgctcaatggcaggcgatataaccgcattgccaaaacctgttacaggtacagctgttccagccccaccaaattgggccattcgatcatatacgccaaaaccagtaagaagcattgtaataaaaattaacgtacccaccgtcggatttccggccgtttgctcagtaaaatcgaaataataaatgtaaaagtctgaaataagctgaccaatcaaacaaataagtccaccggttaaaaaggccttaatacaatttttaacaaccggtcttttgatctctcgttgtttttgcaatttttgatattcctgttgcacaggagtaagttgtttcttttgattgttagacataactcgatccttcctctttaggtttgttccttcataagacttttcagtttgttcaaatcattttttaagttcttcttattcatatcgttttttttcagtctttgctcgaccttttcaagctcccagaatatttttttatcagtcgaaacaaaaactttatagtcgggatattttttttctaagtcggattttactgacttctcgatactctttaatcgaaatcgatcaaaattctcaactttaatcgctgccataagctctttatcagtattcacagcttttacgtctgtaatatcttccttggcaattatcttttctttcgcatgattggcaacggattgatcaattggcttacttgtatgtacttgtgaaataccaaaagtactattaccttgaataaattcattttgattaccattacatcctgatgcgaaaccaatgaccattataataaaaagtaggtttttcaatgtggttattttatctttcaaaaaaatcacctccatgtttttccattatttgctgaaaaaaggttggttaagaggccaaccttttttcgccttactaattactgttgtttgtattgaggttcttcttgttcgatttgttgaacacgtggttcaatgctgtctacaacggattgggtttgcttagctgcatcttggtaaagttgcttagcttgttgattatctgtactaagagcaaatgtttcaaaacttgcttgagcacttttcaatcctgctagagctgttttaacgtcatttattactgtcatgataatttcctccttgaattttttttactcttttattttgctttatggagaattttttattcaatgatttttgggaaatttaaatctaaattatttttgacgtatagctccattttttcgataataaccccttttccatatccccatcatttcttctatttctcgttgacagcaatagctcttataacttttcattaaaggagactttaaataatggtaagcatttgattaaagggattccttgggcaggtaaaggctttattacaaagttggagataagtatcgacggtgggattacttggctaaatgcaatgttagagtcagctaaaaatgctggttatgggtggcgatcttggtcttatgagtggactgtactggacaaaggtgaatataagattatgacaaaagctactgattcttatgatagaactcaaccaaccctacctttctggaatagaaaaggttacggttataatgcaattgatgaaatttaagattgaatagaaagctaaataaagaagagaatgttgtatagaatacctagtccagacctaaatatcggataatgcgactgtcttaaggtgtacagcatgcacccttgattaacttacctttatttaaggcagaaagaaaaacaagccattgtaattatgattaattacagtggctctttattaaagtttacatattgctttttaaacgttttaaaatacgatagtaatcatccaaatcaatccctggagcgaattgctctggaagttctggaaaatcgggtacaggcgcaccttcaggcattccgtcaattacatgcagcctttcacctgtttctgggtttgcacctttccaaatttggttgatatcacgataatccgcttctccccatgtatacaacacattgtacaatccttgatccataaactttttggcataatcaaacttattattatccaaacttggaactggaagcattttacccacatccacacctgtagctacttctagtgcttttgcataggcaataatatgagtcccacctctgacaagcaagtatccggtcatctctaaggcagtcggatgggtcgtcatttcatacacacgcattttgtggtttctagcaccgatttccaataaataattggcgagtagatcttcaacgagcgttccactgttatttacatacgacccattccacggtcttcccatcccgtcacctggaaaagctgtttgagcagtggttgtaaaatgtgtagaataacgggcatcctttccattttgcagtggggcggtatcaggattgccaggaatggtattgccaatcgagagcagattaattgcattcgctactaattcaacatggccaaattcctccgctgtaatacttgcaattaaatcataaaagggctttagcttttttttaccgcggaaattaaaggattgaaacatgtaattgtttaaggtggacatctcaccgaattttccacccattaattcttgtacagctgcagcagcattcatatcgccatgttctggatatggtaactcaatggcaattttattcacgcgtttcatcataagctttacacctccatccgtaaacaataatcattttcatcatatgttggatggagcttggcttattctcacatcgtcggatgaaaccaaattatttgtgctgtacgtacatagaatggtgtcccgcccatcatgatgacgatatgatcaggcatgacctctcgtaatacacctcgtacagagccgtgggtcgtttgaacagcaagggattgattgtgaagtcccattaaagcttgataaacatacggatcactaagtttccatttttcactcattttcaacacactcctttcatgaagcccatagcagtatatgcaaggaagtaaaaatgtgcatttgtccaattggaatgttggttttcggatttattcagacatccattctttcattagaaaaataaacccagattctgaatccaaaataaaaacacctatgaaatagtgtcagggcgtctcaatcttaatccttgtttaacttttaaacacggggtcctaccaacaaaaagcgcaaaacatacgctaggcaaaatttaacatgacgaaactgttgagtgacaataaagttctttccttaccaataaagttgtttactaatcggtttgttttattacaataaagtcgtttgcttttaccataaggttgataaatcaactgtttgaacgcataaaagtaaacaactatttttatgcatttggcgaaaatctaaaaaatggggttgccagcaagatttcttcaggaggctctcttgtgctaaacagccaggccaagtaccttatttcacgataacggttgatcaattccagcacttctccgactttgttttccttcatcaatctctcgctgaacaaaatggcagagatttgtcccaagtttaagcgttgttgtgatgtactgtacaaatcatttgccgcctccgtaaacgaggaaccttcgcctttgcccacccaaaccgggggctgctccgctttttgctgtccctccagcttggccactgtcgagaaatcaagcaattgcaaatacatggtgtattggccatcgacatagtctattccaacagccgtagcatagttcatgttttgcacttcatatctgctccagcaaccggtaagggtgagaagaaggaaaagtgcaaccatacttttatatctcctcatttatgcctgtccccttgccttgtagaatctcgtgtcttcaacatgtccggtcgagtgtttcgccatggccaaggtaatcgaaacaaagcgttggccaagtctttaaatggaggtgatattggggccaagtaaggcaagccgcatgaacgcaatgaggctaaatggctgagcacaataaataatccaagaaagaagccataaatgccaagcgtggcagacagaatgaaaagaaaaaagcgtaaggtactaatcgttccagccaatgataggctcgataaagttgaaccaaagatttgtgtaattgctccgatgacaacgatacctggggataagaatccagcacgaatggccgcatcccccaggataagtcctcctacaaccgttaccgtggagccgaccgcagaaggcaatcggataccagcttcccgcaggatttctaagaagagaagtgcaataaacatttcaactgccacatcaaaagggattcccaaccggttaatccccaaagtggcaagtagataatagggcagctgatcttgatgataggaaagaatggcaacaaaaaatgcaggaagcagtagcgatacggacaagccaagtaaacgaagcgtttgaccaaatgtagctgccaaagcagtaaagtggatatcttcgggtgctttcacaagcaaaaataaattggcaggcgcaatcaacgcagccggtgtaccatccacaatcaacgctacacgcccattgagcatacagttcacggtaaagtctgctctgcctgtataccccatcaaaggaaacaatgcttttgtcggttccattaattcttctagctgagtggcgctaaagcgctaaacgctccgtcaatgtgaagatcatctaatttattctttacatcttgaacaatcttaggatcaacaatgtcacgcatgtaaagaattgcaacggttgttttcgtgcgaacgcctacttttttcgtttcataaaccatgctggttgatttgattcgtttccgaattaacgccacattgactcccacttcttccacaaatccatcctttggcccccgtaccgaaagcattcgcatcatctgtacgttctttcaagctgcgcgtaatatctgctgttctactcattttaatttgcaggccttcataatggttttccaagagatttcggatgctatgggaaatatttaaggtaatttctttttcctgcatcccattgccaatagatcctgggtccattctcccgtgaccaggatctaaatataatttaaacattttacaccacctcgtacaaataaaatatgatcgaagagtaacggaggtataggaattcgtctgagatacatataaaaataggtgatgataggcattacatttcattgaatcagatgatttattttaaagctaagaaattttccaaatgcgagaccatatgtatgagcagcaattaatgttccatatttttcgtgggtcaggcaaactcttgttcatctagacagtaggctgattgattattgatgcttctttcttaacaaaacacctaagtgattctctgtgcatatactgtatcattactacaggattatgattaaatacaactcaatccatacataaaataatcaaggagaggttaattttgaaaattccaaagacagccaaagttagtatcccctttccatccgtatgggggattgatgcttctattgcggggagatccattattagaggtatacttaccattgattccattgtagacaacaaagtagtaggtacagttaattttcgtggtatacctattccgattaatgggtattgggacgaaagcgctaaacaaataagtttcgattcaccatatgcctccttttttggcaacttgacaataattgatgagaccgctataagcattcggcatttcattttaagtggacggtttataatgaaacctccctctttgctggctggtgaatacggaaattggattgctacaacctttacaacccgtttgggacctcccatatatactaatgttttaccacctgttggtgccttttcagtctcaagtatgctcttgggacagcaattgttttaattagaccatgactttataaaaacaaccttcctttgtgactaaggttgttttttaaaagtgttctcgaaaaatacagccttgctttaaatctaagtttagcgtatatctccgttaaaatgtactcggaaccctttgatgatcgtgcctagttagataaacaaatattgatacttccttatagaaatagcctgcttggttaggtacgttgtttcacaatccccggaaatttttaatataagtaatgaatgcttatttttttccttccgatagctttctatataaagaagctctagatacatttgtaatttcacaaatttgatttacagtcatatttccttctttatatagctttactgcataattcattcctgcgtgatttttatgatatttctttaaccgtcctttaaacttcccttctttctttgcgagctcaattccttcacgctgacgcatacgaataaggtctcgctctaattggttaacaccagccattaccgtaattaagaattggctatatggattatcttctgataaatctagccatgtatccttaagtgattttaagcttgcctttttatttcgtattaaatcaatcaattcaaataaatcttgcgtacttcgagtgatccgagttaaaactgtaacataaataatgtcaccttcctgtaaatcctctaacattttttgaagttgttcacgatcttttgtggctcctgaaattttttcttcataaataatatccattccaatttcgttcaattgccgaaattgccttgaaggattttggctagtcgaactgacgcgtacataaccgattttctgcaaaatttcacctcgtttttgagacaagtcttatgagacactcttaactatgatttatatcagtctactatacttgtatcaatagagtacactctattgatatataattgaactaattaactgaataattatggaaatgggatgatactgaatgaaaattgcgagaggtagagaattgcttacactggaacagaggcaggattttatgcaaatccctgaagatgaatggatattggggacctacttcactttttccaaacgggatttagaaatagttaataagcgaaggagagaagaaaaccgtttagggtttgctgttcaattagctgttcttcggtatcccggttggccatacactcatatcaaaagcatcccggaatcagtcatacattatatatcgaaacaaatcggtgccactccatcttcgattagtctttatcctcaaagagaaaatacactttgggatcatttgaaagaacttcgaagtgaatacgactttgtaacttttactctaagagaatatcgaatagcatttaagcatcttcatcaattagcttttgaaaatggcgatgccatacatctactacatgaatgtatagattttctaaaaaaaaacaaaatcatactgcctgctattactacacttgaaagaatggtgtgggaggcaagggcaatggctgaaaagaaactgtttaatactgttagtcaatctcttacaaatgaacaaaaaggaaagcttgaagagatcattacttcgcagcatccatccgaatccaataaaacgatattgggttggttaaaggaaccgccgggtcatccttcacccgaaacatttctaaaagtaatagaacgattcgaatacatacgaggaatggaattagaaacggtacaaattagtcatttgcatcgcaatcgcctgtttcaactatctcgcttaggctcaagatatgagccatatgcattccgtgactttcaagaaaataagcgatattcgatattaaccgtctatttattacatcttactcaagagttaacggataaagcttttgaaattcatgatagacaaatacttagtctgttatcaaaaggccgtaaagctcaagaggaaattcagaaacaaaacggtaaaaagctgaatgagaaagttatacactttacgaacatcggacaagctttaatcaaagcaaaaaaggaaaaattagacgtttttgaggttttagaatccgttatcgaatggaattcttttgtctcttcggtcgaagaagctcaggagcttgcacgccctgacgactatgattatttagacttactgcaaaaacgattttattcacttagaaaatatacgccaacgctattaagggtattggaatttcattctacaaaagcaaatgagccacttttacaagctgttgagattatccgtggaatgaacgaatccggaaagcgaaaagtgcctgataactcacctgtggattttatttcaaaacgttggaaaaagcatttatacgaggatgatggtacaacaatcaatcgtcattactatgaaatggctgttttaacagaacttcgggagcatgttagggcaggagatgtttccattgttggcagcagacaatatagagactttgaagaatatttgttttcagaagatacatggaatcaaacgaaggagaatacaagattatcagttagtttatcattcgaggattatatgacggagagaaccagcagccttaacaaaaggtaaagtggttagctaccaattccaacaagttagacggggtttctcttgaaaaaggaaagctgtcaattgaacgcttagaaaaagatgttccagaagaagcaatagcgcaagcctgtatcagatgctaccaagaataaaattaaccgatttactgatggatattgcttatataacaggatttcatgagcaatttattcatgcttccaataatcgaaaaccggataaagaagaaacaattattattatggctgctcttttaggaatgggaatgaatattggtttaagcaaaatggctgaagcaacacccggacttacatataagcaattggccaatgtatcacaatggcgcatgtatgaagatgcaatgaataaagcccaagccgtattagtaaattttcatcacaaattgcaattgtcctcctattggggagacggtacaacatcctcgtccgatggtatgagaatgcagataggcgtttcatagctacatgcagatgcaaacccacattatggaactggaaaaggagccaccatctatcgttttacaagtgatcaattttcttcttattacacaaagattattcatactaattcaagggatgcgattcacgttttggatggtttgttacaccatgagacggatctaaatatagtagagcattatacagacacggctggttacacagaccaaatattcggactgacccatttattaggatttaaatttgctccaagaatacgagatttatcagactcgaaattatttacaatagataaggcaagtgagtatccaaaattagaagtcattttacgtggacaaataaatacaaaggtcattaaagagaattatgaggatgttttgcgattagctcattctataagggaaggaacagtttcagcatcccttattatggggaaattaggttcttattcaagacaaaacagcttggctacagccttacgtgagatgggccgaatagaaaaaacgatctttattttgaattatatttcggatgaatcattaagaagaaaaatacaaaaaggattgaataaaggagaagccatgaatggactggcaagagctattttcttcggaaaacaaggagagcttagggaacgaaccatacagcatcaattgcaaagagccagtgccttaaacatcattatcaatgccatcagtatctggaatactttacatctaacaaaggcagttgaatatcaaaaacggtcaggtagttttaatgaagaattattgcaccatatgtcacctctaggttgggaacatattaatttacttggagaataccattttaattcagagaaaatggtctcgttagattctttaagacccttgaaactttcttaacgttgttaaaactgggggaatagtcggggaaatgggcttagcgttgtaaatccgcattttcctgactgtaccccttatagaatgatcattgtaaaaaaagagccccttaacaagcaaaaattcgggagctctgtttgtctttttgtaaatcgggtgatgttttaatcattcattattattctttatttctcagcttcatcgtcatgctgtttacaccttcaaaaagggcgtcccgtatgatttcagtgtaattctggtaactgtcgcttttggctttaatgatatctaaaacttgtttaaattgtccatctacgataatcgtaatgccttcgaccttttcacctgtctgatcattctcaaattcctcattcaacatggttaccgtatcattactattcattagaaactctcctatcttttttaaaataaacttttccctttatgatttatccaatacttttaatttgtaggaactagacttgtaaagtcctcataaactccaatccaatgattttggtatatattcttcataacatgctggttctaggtacatggaatacaactttttctgactaaaatcgattaataatgaggggctgaagtcaaacaaagcttcggctgctttttgaagggcggcttctatgtggtccactaatttttccggtcttctcgtttccatgtcttctaacgggttttcccagtccaaattcttaattaatagcatataaaaagtgcctgaaggctcaatatccacgtaccagccgacatctaaaatcaagcggctttctttatgctccaactgtagtaatgatgacgtaaagttaaaccagtcatcactgtcctcctctaactgatctggatcgatatcaattagtttattataagagacggtccatccttgaggaattctaagacgtaaatagtcaggaggcccttcaaaaatgaaaaagttccctccaaatgccgccgcttctattttccaaatgatccgttccagctcttttactagctgcctgcgatcttcaacattgattgtgtcaatcgtttctctatgattgtcataaatatgaataagatattcatcctggcctttaatgattttgaccgcagcatgatatctttgtttttctaattctaataatttggtatttggttcaactttttcatgtgtgtcggttaagtcattatatttaacgaaccagccgcacggtatatttataggttctaatgattttatggaattagacaaatcgttcactcctgatttgtatattcgtctcttgagttcaggtcttgtcctcttatttgttttattaccaagttttatacaaataatgtgtcagtactttactatttgcattagatgactgacggagatcattttatttcacagccagaccaaactgccgacactagaatacaaaggactgtgtccacaagctctcctacttggagcaagcaataatcatgatcgtcttcttgtcttttatgtatgacaaaatgaaatatgaataattctatatagatcaaaatccatggtcaaagtctatttcatacaaatctacccattctataaaaatcggcattgatttagtggtagtaaactcattaattatacggtaagctaaaccacgatctacatagctgcaagacggaaccttcattggctccccacctactaaatgttccaccgtttctatttcaacatttttattcattggaacgaggtagtctggatgtctcattataaagaacccatatggttcatcataaaagaaaattaaccattcatcacagccctctacttcaaaacatgaatccccgcttccttgcttccaataatcctcgtctttttcaaatacaatacttcttataaaatcatcattcgggttttcaattggttcttcaaccggtccattatacgtgatcatattaataccaccttatttggtagcctcaattattattggcttgttactcttccgtgtctttcataagccctgcatgagattcagcatgagttagttgagcatgtcctaagagttttaggtgtactctttttgagcgggacccactgtacttcccttaaaaatatagtggccttttgcgattctaatatgacagttgaatttacatcaaaatgagttctacttttagtcgatggtgttttgcctagttgtttgctctttagatattttatcaatataatcgtccagcgtacaattgtccaatgaacggtagcactgatgcttacggtgattttatctatttccagcttgagccccgagacaatttccgcccctttcaaatccgcgtttttcacttcatgatccaaaaaagggtcttccatataagaatcgtatcccctgtgcttggcaatcaagtgctttattcttaactttaggagagcggttattaaacatatatttaacttgcgattgagttctttcataattaaaataactttataaacgcttctctatttgtggggatctcctcttttgcactctgataaacctcaatgccctttcttatcttttcaacctctttcgatgtgataaaaccagtttccaccgtactatttaaaaagatggtaatgctatctttatttataccctctaacgcttgtggcaaatgttttactttttcttttttataagcttcccaagaagtataagcgacagcatcaactagtagcgaccacagcctggcaatattcgagtcttcttcttcctcagcaaattctgaaattcctgtaaagtctgcgttatcaattagctcgtataagtcatcaccagtaacggcatgagattcaacccataaccaacatttgtccaatgcttctcttccttccggatgcctttcatcatctttgctgattacagaaaatactctttcggcaactgttaaaacaaagcctactttaactttattttgcaaattgtccaaaaatatattattcatgataccctcccttattcacgcagacaattggagtgccgatgtggtcggctgttctacgaagacgcttttctttatgctcaaactataggaagtgataggctgaacttcgttgtaattcatttacctttatatacattaactcattgtcaacactaacctgtatcaaatttctaaaaaaccttgaaaagcatacagctaatcaaggcttgaaatgattatatttattttttcttattcattgctgttagatgggacaaacacaataaattcccctttaggatatgttcccttccaaccgcaaggccatccgccttctttatataactcaaaaaccttttcataaaaattatttgtttttccattgaccaaccaatttaaagcacacattgtgaggtctccttcaatctcctcatgaatatctacataatcagacggaagaaaatgttcagagtaattttcatagtcaccgaaatactcgtataattcatcttgctgagtagctaaatctaaatcgtatatcttttctgcaatattttcagtttctaatgacttaacatgctcccacactgtatcaacttctttaaatcttgtgaccaggcaaaattttgcgcatcactaaaattattaatgactcgcaaattagggacattaaagttctcattgaaaaacatcttgttattacgaataaagctcattacttcttcgactaattgagtgttcttaccaaaattcttttagataaccaccttttcaataactcttcggttgcttcaccgcctctgttccaaatagggagctttttattttttccacttttctaaaattcttgatattcccatccattagataaaataagaaagctggaatatcccaactttcttatttttattctacactattaagtaaaaaatcttgaatgctctccctggaaatttttttctccccctcttttttcaaaaacttcaaaaaagctttttctttttgacctggatttttagataataaactaaagtgactatgaaattcctcaaataactcgtaagaatcaatagattcgatggtttcaggtaaatactcatctttctgatatttatatgctttgtaaattgtataagatattgcatcagcaatacatatccaagcatctagatcatcttcatttgattcaagctgcattaaagttaaaatccctgtgtcatctaaattttccaggtaagtataaagatcgtctgcttctatattcttgtgttcaagccacttccagcaggcatctaatgcttcttttataaaattgaaatcatttgattgttttaatgtaggaactattgcttcacaaagtcctaaataatatgcagattttaaatcatcattcaattcttcccattcttgaaacatatactacactcctcaattaaatatattcaccatttttaataactaaattcaatcttccgtttggcttgattccttgaatagtctcagaagttacttctatcgtcaaattaggaaacatctcgctaaattgcttaaatactccagctggtacattcggattatttagtccttgaatacaggttggacaaacccctttaggattagattggtgaatttttaatgttcctgttatttcagcaggattttttcctaaagcttctactttgcttataaaatcatttaacacgccttcttcagcatgtcttgttgcacttgcgatttttcctggagattttataggtctatctggcattactgagtctaaatcgggaagcccggcttcttttctaactttaggggatccaccctcaaatactaaattttccaaaccttccacatctgtctttccaaccgcaacagtgtcagttttaggaacattccatttttggcgcagaacacctaaatcagcttttccaacatctattttactaccagtcctggctcccttactgacgttccccccaccactcaccatcttcacaattccaagctctttcaccggcgttttttcaacattcacgcggacaattggggtgccgatgcggtggcctgttgcggaggcaggctgttcgacgtagacgcggacgtttgtcgggacttggaaggatttcaccttttcaaggatgttgtttcctttttgcaccagagctgcttttggcgatttggcgagcggaatgtttttgccggccgttttggccaatgtttgagcgccgtggtttgccgtttttgcgacagcacctgcaccgacgaggctcaaggtggcttcgatcaggccttgtttccgcctctcttcagaaactttgtttccaaacatgtccttgcccgtgacggcttctgagaacccatttgaagcgacaaggccgtaggcgcccatttccgtcattttcaagacgttcaacgtttttgaggctttgtaggcgtcaagcgcgtgatcagcggcgatgagtccttttcctgttttataaatggcttttccgcctttgaaggctcggcctgcccaccctacgatcggaataaatcctgctgccgccattgctccggcggcgacacgctggccgtctgtcagcttttctcctgtgaccgggtcgacgccttcagcggctctcttataatcataatacccgctgacttctccgacaaatgttccggcagcgtcaagcgcttttaaatcccaaggcttgttcgcttcttcttcttgtttttcttgaagcctgcgcgcttctgcctgttcatttttgaattcaatataattggcggcttgattttcgacttctatcgtatttttatagatctcgcttgagtggaacgatttcaagctaaaatacatcggtgaggcggtttttccatgacttgtagcttccatcagcccggaatatttgccgagcacggcgctgtcgagcgcttgtaagtttgtgtattcggtcttgagcgattcatccagtttattcacagcgtcgatggtgttttgccgagttgtttgcgctttagacattttatcaatataatcgtcaagcgtccaattgtccaaatcaacgatatcgctgatgcttgcgatgattttatccatttccagcttgagccccgagacgatttccgtcgctttcaaatcagcgtttttcagttcatgatccaaaaaagagacttccacataagaatcggacagctttttgtcttttatgtcacctgatacaccattaaaaaaagcaatctgcgcttcaacaagctttaaccagctgtcaacgatctcggcctgtcccttgtagaagtctttaatgttatccgcacctttcccctgaaaatcatcacctaaatcggcgactccgagaaacgcttttttgagcgtttgcagttgatcctcaaaggtttcgtattgtttcttgcggttattcgctgcttcaattaaagaatgcgcttcaaatactttcattgaattgtcctctctaacctcaggctattttctggcgattgctttgtcctgctctttcagcaaatcgacattttccttcgtatcctttatgtttttgtgtacggcttttttgtaatcggccaccatctgatgaatgttctgctcgcgttcgtggcactttgtcgtatatgtcaatttatttttccctgcagctttcggagggtttggcaggtctagggcatcaatcgccgctcttacggcctccagctttttgatgaccgtttcatgtttcagcttgattgtcgtcattaaaaccagctccaactgtttttgattgagcggattttatcgctcaactgatcaaccgctttttcccccagagaaagcaaatgatccgcctctttagctgccgctcccgccaattcaaggctgtgcttttcaacttcgagcgcaaaaatttttctctccagctgggaaatatagccttcgtactttccgttcacgatgttgtacatagatgtatgagcctcatcccgttcgccatcaaaatcgttggcgaagtcccctgtccagtggctgttcagatgagggtgcaagatttgcctgatctcgacaatcccggtttcgtgttctttctcaatctccttttttgctgttttaactcgttcaatccgcctttctacatcggccagcttttggttaatcgtgctgtggatatgattcaatgtgctcgcatgactcatttgattcacctcagggaaatactcaaatagacggatgacaacagggcatccgctgcattttttccatttatataatagtaaaatagatgcaatcttacttaaatagggtggattgcttatttttcccttgcaaagatgagtgaatcctccagaaaaagtaataaagacctactttcgatagcgccgcaccgcctgaaaggatggaatcgcagatgctggaatagtacaaatcaccctattgaggcgactctttttctagcaagagcctcattgaacaaaaacagaaaaaggattcgcccgaaagctcttttcaaagctttctttgcgaatcctttaagtgattaaacggttttagccaatctgggaaagctatttaatctctgacacccatttggccatatcatcaagcttttccgccgggaccagtcctcccggcattccgttgccgcctttttcaatcttttctttaatcgcacctgtatccatccggtccccgacgcctttcagtttagggcctgacacaccttcataattctcgccgtggcaggttacacagttcgctttgtaaatttcttcaggcgaagcatcggctttgtcttcttgagctgttttattcccttcgcctgcaatttcttttgcgtcataaaggccttttatagataagataaaaaccagtcctatgcccataatggcgattaacaaaaatggtatcaatggattgcggttcattttacatccccctttttaatttgcccctgccccttatgtaaacaattctaattctactttaattttacaaaaagtaaaccggttatgaaacaaaagctgatgaagttcacattttagacaaaaaaatggacgatgaagcgattgtttatttctcatttaaaaaccagtttttgaatacggttacaacaaccattataaagggcttttccttcgatctcaaggttataatgactcaaaatacacttttggatatttgcaaattcgaaagaaattaagtaaaatataatcgggttaccaataatagcgctttcatttcttttgtgaaaaaaagaacggatctcctgacccgttcaagtttattcgagaaaatctttcaagcgtttgcttctgcttggatgtcttaatttacgaagtgctttagcttctatttgacgaattcgttctcttgttaccccgaacaccttaccaacttcttctaatgttcttgtacgaccatcatcaaggccgaagcgaaggcggagcacattttcttcacggtctgtcaatgtatccagcacatcttcaagctgttctttcagcaattcatatgctgcatgatctgatggagaagtcgcttcctgatcctcaatgaagtctcccagatgtgaatcgtcctcttcaccgatcggagtctcgagtgaaaccggttcctgggcgatctttaggatttcacggactttctcaggcgtcagatccatatcttccgcaatctcttcaggcgttggctcgcggccgagatcctgaaggagctgcctttgaacacgaatcagcttgttgatggtttcaaccatatgaacaggaatcctgatcgttctcgcctggtcggcaatcgcccttgtaatcgcctgtctgatccaccatgtcgcgtatgtgctgaacttatatcctttgcggtagtcaaacttttccaccgccttcatcaggcccatgtttccttcctgaataaggtcaaggaaaagcattccgcggccgacataccgttttgcgatgctgacgacaagtctcaagttggcttcagcgagacggcgcttcgactcttcgtcgccttcctcgattttttttgcgtattcgatttcttcttttgcagacaaaaggtttacccgtccgatttctttcaggtacatgcggacagggtcgtttatcttaacgcccggaggcacgcttaaatcgttaaggtcaaattcttcttcggccttggccagctgttgaatattaggatcctcagtttcttcgttctcgctaattaattcaacgccttgttctcctaaaaattcataatactcatccatttggtctgattcgatatcgaagctggacatgcgctctgcaatttcttcatatgtgagcactccgcgctttttgccggcttctgttaattgatccctcacctgttcaaatgtgaattcagtttcggtctcgtgagcttgtttatcagccattcatggatccctccttccaaaacttacagacgaattctaaaagcatcccgcttttttgttcctatttcacgagtaaagccttctctctcatctacggcttcacgggaaagcaaatcataaattgacaatatattgattaggacaagcagcttttgctcctccgttaggattcattgccaaaagcttttcctattatatataacggtttatttcagcgaacggttcaacttaacaatttcctgcgccaaagtcgccgctttgataaagtctttttgcctctcggcttccgcccttgcagcttctttttcttttatcattgaccaatttcgataattcaacactttttttacataatcagataattccgcttcacttaattcttcgttcacctgaagcattaagatatctgtcagaagctggccaagttcctgatcctcgactctcttaaagagctcctggatggaaatgtccgctccttcttcatacatggcgtacaaataagcggcaatcgctcggtgctgatcaaggttgaattcaaagcccacccgttccaaaacctttcgaatgacgtcccggtcatgaatcatgtgggccaggagcatccgctccgcattctcatgagccggccgaagccccgtctttctccgaggggcgcgcgatacggccgcctgccgctctttagagtcctggcggctgctttccctgctgcggcttgcagcctgcttttcaaatacggaaagctgatccttcaaggattcaaatgagattgaaaattcatttgccagctgtttgatgtatatttcctgttccaaaggaccgctgagaaggctgacttccttcagtacatcgttgatataggctaaacggtctccttcatcagacaggtttctgcccttgcggaaatagttcattttaaacgtcatcatcgtaacgctggcccctattacatcatttttgaatttctcgctgccgaattttttgatgtagtcatcgggatccagcccgtcaggtatcatggccaccttgacgttgcagccttttttctgaagaatctccgccgctttcagcgtggcttcataaccggcatgatccgagtcatagcacagtatgacctctccgacatttcgcctgatgatcttcgcatgttcttccgtcagcgatgtacccatcgtggcgatcgattctttcacaccggaggtgacggctgaaatgacatcggcaaatccttcaaaaaggacggctctctcttctttccgaatgtgaaggcgggcctgatggaaatgatagagaagcttgctttttcgaaaaagcggcgtttccgggctgttcatgtattttggctgctccccggtgaacgtccttccggaaaaagcgaccgttgtgccgtgatgatcatgaatcggaaacataatcctgtttctgaaacggtcaaaatatccgtcgccgttctcgcgtctgatgatgagtccagctctttccatcagcgcaagatcaaaacctctccgttccaaaaacttcgtgatgaaatcccacgagtcaagcgcgcatccgatttcaaactgctcgatctgctccatcttaaagcctctttcaagcaaataatcgagcgctgcctggccttcctttgtattgacgagcaaatgatgataaaatttctttaacagatcatgagcttccgccattttctgttcatccgaactgcctgtgctgtatgctgatacagctgcgacctgctccggcagatctatttgatatttgtccgccaggtgagagacagcctcggtaaatgaatagccttccatttgtcttaaaaatgaaaaaacgttccctcccgctccgcagccaaaacaatgaaaaatctgtttttctccagaaacggaaaaagatggtgtgttctcaccatgaaaaggacaaagcccaaaataattacgcccctgttttcttaactggacgtactctccgataacttctacgatatcagctgatttctgcacctgttctacaatttcgtctggtatacgattgcccatgttccaacactccgtcgtacataattcgctgcttagtacgtaaatccttcaattttcgacaagattttttgcagctctttgacaaatcgctcccggtcttccttgaccagttttttcgggcctttcgtgtaacgtccgcttcttctcaatttttgtgcgacgtgacggcggaaaagagcatgatcgatggagttctcttcgaaaagatagcctctctccgacatcacatagacctttttgccaagcaaaagcgatgccagcccgatatcttgtgtgacgacgacatcaccaggtcgaacatggttggcaatgtacagatccgctgcttctttgtgcggatcgacatatgtccaattctcttcttctttccttgtgatttgaaaatgctcgaatgaagccacgaataccacctttacgtcgaaatccgccgctgttttgagcacttcatctttcaccgggcatgcgtctgcatcgacaaaaatcgtcctttctttttcaagaagactaattctccatccctccatcaatctcctgctataaatacaggcaaaatcacacaggtttcaaaattaatcgatctataagaatttgtcgaaagtttttttcgggaaattcttgacacgatacccataatagtttattcgttctgtactaagcttaaacctaaaagttaattattttatcacaattttttattataatacaaatgggttaaagatgctatcattttcacttttcccaaaaccatcaaagcaaaaacccaggatggggtgtcctgagttttattcttagaccctttttgtcatcatgttgtgaataatgttggccgtttcctccaccgctttatttgatacgtctacgacattgcagccaatgcggccgacgatcttttcaaagaattcaagctcttctttgatgcggttgatattagcgtaaatggctttgtcgttgaggccgagcgatttcaggcgctccttgcggatatggttcagtttatccgggctgatttttaacccgatgcatttagccggatcaacggtaaagagctcttcgggagggtccacctcgggaacgatcggaacgtttgccacttttaaccgtttatgcgccaagtattgggataacggagttttggacgttctcgacacgccgatcagcacgatatccgcttttaagatgccccttggatctctgccgtcgtcatatttaaccgcaaattcgatggcctctaccttcttaaaataatcttcgtccagctgtcggactctgcccggctcatatttcgcactgaagccgtagaccgactccattttctcaatcagcgggccgatgatatcgtaatacacgacattcgccttttcggcttcggcgattaaaaattcacgaatctccgggacaacaagcgtaaaacagatgatgccgccgtccgcttctgccagcgagatcacttcttttattgttccgcggtcttcgacataaggaatccgcctgatatttgtctgctcggatgaaccgttaaactggctgatagccgctttgactacgagctcagcggtctcgccgacagagtctgatacaacataaatcgtccgattactcatgatatccctccatttgaagttcactctacatgatttcattttcagataagccgactaaaatttttgtcatgttcgttttcgtaattcttcccacaacttcatagcctttttctgtatcttttacaacaggcagtgcgtcaatttgtttttcgatgagcatcttggcaatgtccaaaatgaaatcgtcgcgcctgcaaagcgtaatgttcggcattctcgtcataatgatatggacgggtattgaagggagctcctgtttgccgatgctggctctgagcaagtcttttcgtgaaagtacaccgactaagatggcattatcatcaacgacaaaaagcgttcctacgtcctctaaaaacatcgtgcaaatcgcatcataaacggagacattttcatgaatgaccaccggaatggactggaagtctttcacctgcagttttttcagcttatcagccaagagctgcgtgcccgtctttcccgtgtagaaataaccgacccgcggccttgcttccaaaaatcccgacatcgtcaatattgccaaatccggacgaagggtagccctcgtcagattcagcttttccgcgatatgttctccggtaatcggcccgttctctttgacaatctgcaaaatatgctcctgacgtttatttagttcgatcgtactcaccacctttaagccgaagctcacaattcgttcgttatgtataaaagtcgataacatattataacgcatatgaagactaaaataacagcaattacaattgaattctatgaaaaagacaggcggtatttgacaaggatgtgaaaaatcgatttgagcaaaaagacgattgccagcctgtcagcaaccgtcttctgcggtgtttattttacaatgatggcattgatgtttgcaaaagatcggatcagctccgccaagcttgccatttgcgccaggcggtttgcttttaatctttcatcttcggcatgtaccatcgtatgatcaaaatacgcttcaatcggctctttcagcttggacagctcactgaaggcgccctcataatcttttgcttggtaaagggtctctatttgctgcctgcacgcctcataagctttgaaaagctcctcttcttgagggttttcaaacagtgaagcgtcaatggcgctcgtttcgctctttttgctgatcgaaataacccttgccagcgcttcagccgtttctttaaattccggtttggctgcagccgattcaaggacggcggcttttttgacagccgaatacggctcaaggttcgtgctttcgagcacggcatccacgacgtcgtatcggatgttttccgctgttaatacatatttgaggcgctgtttaaagaattcgagcagttcgctgtttgcttcctgtccggcaaacgcagccagttctttgaatgaaatgccccagttccggtcaagcaggatttggacgatgccgctcgcctgtcttctcagtccatacggatcctgagatcctgtcggaatgacgccgattttgaagaatgaagcgaccgtatcgagtttgtccgccaatgcgacgacggcgccggcgattgatgaaggcgtttgtcctccggcttgtctcggcatatagtgctcattgactgcgagcgcaacttcttctttctcaccgagcatccgcgcatatttttcacccatgatgccctgcagctcaggaaattcgtaaaccatgtgtgtcacaaggtcgaattttgaaatgtgtgcagcgcgcttgatcagctgcaccgtctcttgatcggcaccgatgacttcagcgatccgttcagcaagcgcctcagtgcgtctcactttatctccgagcgaccccagttcttcatggaaaacgatcttttcgagctttctcacattctcgtcaatgtttaatttttgatcttctttatagaagaaggaagcgtctgaaagccttgctctcagcactttttcattccctctcgccacgttttcaagggcgcggctgtctccgttgcggacggtcacaaagtaaggaagcaagctgccgttttcatctttgacagggaaataacgctgatgctctttcattgttgtcacgagcacctcttcaggaattgcgagaaattcctcttcgtaagaaccgaacagtaccgttggatattcaaccagatggttgacctcatccagcagatcctcgtctctcggaatgtcccaggacttttcagcagccagttcgtcaagctgcttaacgatcagctgcttccgtttggccggatcggcaatcacaaactggctttccagtgtcgcttcgtattcagaaggtgcgctcaagtcggctgcttttccgaggaagcggtgtccctgcgttgtgcgtccggtttcgacatgagcgactgaaaacggaacgacttcacttccgaacagcgcgacgatccatttaatcggcctgatatattttaaatcttcgctgccccagcgcatgtttttcggaaagtggaggcttgtcaccaaatcgcggagctcaggaagcaatgaaaacgtatcctggcctttttggaatttttgcacaaatacatattccgttcctttgatgtctttaaaatacaaatcttccggacttgctccttgcccccgtgaaaagccgatggccgcctttgtccattcgccgttttcgtcaagggcgattttctttgccggtcctttcgcttcttctttcacatcatcctgcttctccgccacgttctcgacaagaacggccagtcttctaggggagttatacagcttgacggaaccaaaggcaatatttttttccttgagccagctttccagcttctcacccagctgagtcatgctgtcatgcatgaagcgcgccggcatttcttctaatccgatttctaaaagcaaatcttgattactcatgtgaagcctcttcctccttcagcattgggaaacccaacttttcgcgttcatcataatacgttttcgccacttttctggccaggtttctcacccttgcgatatatcctgtgcgctctgtgacggaaatcgccccttttgcgtcaagcaagttgaacgtatgcgagcatttcaaaacataatcatatgcaggatggacaagtccctgatccatctggcgatttgcttctttttcgtacgttgcaaacaattcgaacagcatgtcgacgtcagatgtctcaaacgtatagacggaatgctcgtattcagccatcttgaacaggtcttttatcgtatagccgttcgtccattcaagatcaaagacgttttctttatcttggatataagaagcaaggcgttcgataccgtatgtgatttccacggaaaccggtttgcactcaagcccgccgacctgctgaaaataggtgaactgggtaatttccatgccgtcaagccatacttcccagccaagcccggcgcagccgagcgacggattttcccagttatcctcgacaaagcggatatcatgctccagagggtcgattccaagggcttttaatgaatctaaataaagctcttgaatgttgtctggagacggcttaatgatcacctgaaattgatggtgctgataaagcctgttcgggttgtcaccgtatcttccgtccgcagggcgccttgacggctccacataagcgactttccaaggctcaggcccaaggctccgcaaaaatgtatatgggctcatcgtgcctgcacccttctctacatcatacgactgcaaaagtacgcatccttcattggaccaatgcttttgcagggtcagaatcatttcttgaatattcaaatgaagcacctccacaaaacgtgttttcaagtttaatttttggcatagggctggtttgggcagaaaaaaactcccgtccctatgcttgtttacccacaaacatagggacgagagttctcccgcggttccaccctaattgctgagaggaaatgtctcagcctcttttttaaaagttgctcagggaatgcctttcattgcgctctcatccccggctttcaccgccccggagtcgcttcaatgaggctgtgcgcaattacttctttccgtcaacgcaacatcattattgaatccaatcttcatgtcatgatcttataaaaagatgaagaggttgtcaacttttgttttcatcgcccagcatctttttcatattgtccatttgttccatgaagcgccgcgatttcaggtagatccctgagtactcgtcatagtacgtctgaataacccttttcagctcatccttcgtctcctgtttgaccgagacatttccgagccttgacaggtcaaaataaaaaaacagtctcaacagcctggcggatgcgggagacagcggtatcctgtatggatctttcgcaaaacagcggtggcagataaagccgttgtcgcggatcgaaaaatgaaatgtgccgtctttgcttttgcagtgcacacattcatccagctccggatacagccccatcacgctgagcattttgacttcgatgaggttggcgataatgtcgggatctgtaccgtcattcagcctcctcattgactgaagcagcagctcaaataaaaacggattcggtttcttttcctccgttcccttgtcgattaattcagcgatgtaggccgcgtaagctgttaaaaacagatcctcgcggatattcctcatgctttcgatcatctcgccctgctccaatgtgccgaggccggatgatttgcggaataaaaaagatgcataaaggaacggctgggaaatcgctgacaagcggctgttcggctttttggcgccccttgccagcacaccgattttcccgtgttctctcgtcaatagcgtaatgatcttatttgtttcaccatagtcgtttgtacgaaggacgataccttcacatttcgtcagcatatgtgcaccatccaaaaattggaggggtcaagcatgatcacaaaattggaaagtcaatttgcgctagctcttcttcaagtacttcgggtctttccaggttctccttttccaattctttaaaaaggaggtacgtgtcaacgcttcctgtttgtgaaaatacattccaagtaaaattcaacataaaaagccccacctttctgtttataactagctatttaaacatccaagttcttaagattatcttgaccttgtatcctccatttcatgttaaacaattttttctaatatatctttgatttcgagagatattgtcacgattaaaccgcggtcaagttctgtccgttaatactcgtcttctctaaatccaaaatcacgaagctgagacatcttgttgcgccagtctttctgcactttaacccacagctctaaaaacaccgatgacccgagcagcgcctcgatatcggttcttgcccgcttgccgatttctttaagcaggctgcctctttttccgatgacgatccctttttgcgaatctcgctcgacgacgatggtcgcgctcacatacacagaaccgttttcccgttcttgaatggactcgatcgagaccgcaatgctgtgagggatctcttcccttgtcagatgcagcactttttcccgaatcagctcagaaatgataaatcgctccggatgatcggtcacctggtcactcgggtaaaactgcggaccttccggcaaataatcctcaatttgctttaaaagcgtatcgatattatttccctcaagggcggagatcggaacgatttcctgaaacggatacctggttctgtactcatcgatcagcacaagaagctcatccggatgaatccggtcaattttgttgacgatcaaaaataccggcgtcttgactccttttaatcgctcaatgataaattcgtcgccttttccgtagccttcctccgcattgatcatgaacaagatcaagtcgacttcctttaaagtgttgtgcgccaccttcatcataaaatcgcccaatttatgcttcggtttatgaatgccgggcgtatcgataaaaatcgtctgggatgtatcggttgtcagcacaccttgcactttgtttcttgttgtttgcggtttgtcgctcatgatggcgattttttggccgattacgcgattcaaaaaagtagattttcctacgtttggtcgtccgataatcgagacaaatcctgatttaaagctttcctgtgtcatgtaagtcctccgatgaaaatgctcctggcagtaattcttgaaccgtcatttctttgacttggccattcagattggttaagatgacaggcatgtttggcgaacaaagttcggaaatcacctgtctgcaggcgccgcacggcgacaccggacccggcgtatccgcagcaacggcaagcatcttaaaggatttttccccttctgaataagccttgaacagcgctgtccgctcggcgcagttgcacaggctgtatgcagcattttcaatgttgcagcctttgtacaccttgccgtcttcggttaaaagtgcagcgccgactttgaatttcgaatacggaacatatgcaaattcccttgcttttaaagcttctgcaatcaattcttgtttagtcaatgtgtgtattccttcctatagcagtgatggtaccgctaacacttttattttacataaaaatggcttctttttcacgcccaaatcgcaaatgtaaaatttttgtaagaatagcgcacgacgaagggcgggcatcaaaacaattttgacaaaaagataagtaacccaatcatacacgaaacggctgcaaacacgcaaaccgccccggctgccgcgtcctttgcagcttttgcaagcgggtggttctcttttgtgaagaggtcgaccgtatgctcaacagccgtattcatcagctccaaggcgagcattccgccgatcaggatcaagatgacggtccattcgatcagcgtcagcctgaagaaaaagccgcaggcgatcacgaggatggcggctccgcagtgaattctaaaattgcgctctgatatgaacgtcttgataattcctgtaaaggcgtttgaaaaactcattttcagacggcgccattcgttttgtttatgaggatcttgagagcccatatcgattcaaaatttccttttgcttagtgaacatctctttttcttcttcctctgtcatatggtcatagccgaggaggtgcaaaaagccgtgaaccgtcagaaaacccagctccctcatcagtgaatgtccgtattcttcggcctgttcccgggctttatcgacgctgatgatgatatctccgagaacgggcggcatatcagcgccgataatttcaacctctccttcgccgtcttcttcgagggcaaatgaaatgacgtcagtcgggtaatctttgcctctgtactctttgttgattttttgtatctcttcattgttgacgatcgtaaccgagacttcggcgccgtctgcgacgccttcctccgccgctgcgaattgaagaagcttttcaatttcagcaagccggtcttcagggacgcgtccggtctcgtctgtgatatctagaattaaactcatgtatgtttcaccttctgtttaggattagcttccggatattctatccgggaatgaaaaatgcctttcagcgtttcgcagagcgtcttcgcgatagtattgagctcttttaaagtcaaatcgcattcgtcaaactgcccgtcctgcagcttatccgctatgatcccgcgcaccagcttttcaatcctttcgggattagggttatgcattgagcggacggccgcttcgacgctgtcggccaccgagatgatcgccgcctcttttgtctggggcttcggaccgggatagcggaactcttcttcagtcgtctgatcgcctttttctttcgccttatagtaaaaaaacttgagcagcgatgtgccgtgatgctgttcggctatgtcgacaagctccttcggcattttatgatccctcagcatatcggcgccgtccgtcacatgggcaatgataatgtttttgctcagctgcggagaaagcttgtcatgcgggttatcaatattcatttggttttctataaaatattggggccgctttgtcttgccgatatcatggtaataggcgccgacccttgccagcagcccgtttgctccgaccgcttcgcatgccgcctcagataagttcgcgaccataacgctgtgatggtatgtgcccggtgtttccgtcagaattttgcggagcagcggatgattcggatttgaaagctcgagaagcttcatcgtggacaggatgccaaatccgctttcaaaaaacggcatgagtccgagaacaagaactgacgatccgatgccggacaccgcccccatgacaagatatgtacccatctcaagcccggtttgcgccgtgttttgaatcagctgcagggtaaacagaacaacgatgttgatcagagagacaaataaaccggcctggagaattttcgccctcgcgttatgcttccctaaaaacagtatacccgccatcgagctgattaagaaatacgttccgattccatagttgaacgtgcctgtcacaccctggttaaacatcatgcttccgcaaatggaaagaatcatgctcgacaggatcgccagcctttcattgatcagcagtttaatgagcatcacgcccatcgcaatcggcacgagatagccgatatggccgatttcaagctgctgaaacaggctgatcacttccatgacgattaaaacgatccctgtgatcaacgaaaacagcatgagcgacttgtttttcggaatccggctgctgtattgcttttcgaaatagtaaaccaaagctgagatgaaaagcgcgattaaaagcagcagtccgccgacaggtttgaagatgttggctccgctcaagagccctgtcaattcgagctttcgatagacttccctgtcgatcagctgattttcctcaacgagtatctgcccctgcttgatctgtacctgctgtacgctgtcagccgcttcttgacgcttctgctccgtcttgtcaggatcgtatacgtaattgggaatgatcgcaaagcgtccgatttcatcagcggcgttttttaattttgaaggtatcgaattgcccttcagttctttcgttacatgttctttcgcttcatcgagctttcctgcgcggatttctttgctcatcacgtcattgacggcggtgatgaccgaatcctgcgtcatggaaagctctccgtcgctggccctcagcaggtgtttgactgaatcctgtgacagcgagtccgtcacatcggaagtcagcttttcttcaacagatttgatctggtctttttcagatggggcctgcttgtcttttttctcttgttctgcgctttcttttttcacttctttaatgatgtcgaaaatcgatgagacaaggtcgaccctgttgtcagagtactcttttttcaaagtgtactggtcgggaacttcctctctcgcttcctgctttttattagccgttgccttttggtcttcaactgtcgccggcgcatagatcgtattctcgctgatcgaaaataaatcgaggtcgagggactccggcctcacatggaaaaacagcaggatgaacatcagcgcggataaagccgcataaagaatgacgggaaggaagcccccgttattcaagcggataagccgaaactttccgcctctttttttctttttcaacaaaagcacctcttttcccgcgggaaactaaaaaatgacccgataacgggcgatcgggccattcggagttattttgacttttcgtatgcttcaataatacgggcgacaagcgggtgtctgaccacgtccgtctgatccagttcaacaattgaaatgccctcgatatcaaggagcatcttttttgcaacggcaagccctgatgtgacgccctttggcaaatcgatttgcgtaatgtcgcctgtaatgaccattttagatccaaaacccaatctcgtcaaaaacattttcatttgtgccggtgtcgtattctgcgcttcatccaaaatcacaaatgcgtcgtcaagcgtccgccccctcatgtaagcaagcggcgcgatttcaatcgttcctctttcaagcagccgtgccgtatggtccgttccgagcacatcatggagcgcatcgtacagcggccttaaataagggtcgactttctcctttaaatcccccggtaaaaatccgaggctttcccctgcttcaacagctggtcttgtcaaaatgatctttttgatgcgtccgtttttcagttcatgaacggcctttacgacagccaaataggttttccccgttcctgctgggccgatgccgaagattaagtcgtgccttttcatggcggcgatgtattctctttgaccgatggttttgactctgatcggttttcctttggcgtttttcgtaatttcctcttcatacatgctttcaaaaaactcaagcttctgctttttcgccatcttgatcgcatacaagacatcgcgttcggatatctcgattcctttgcggatcagatttaggagagaggcaagcaggctgtccgcgatttcaaacgtttcttcatctcctgtcacatacacggtttctccgcgcgtgacaattgaaatgttcagctcttcctccatcaacttcaaatgggaatcctggttcccaaacagcgcttgagcctcattcggactttccagttgctgatgaatcgcaagtaagtgttctgtcattctttagtctcctgaacaattggtgttgtttgaacaatgtcttcaataacctggtaaaggatgatcaatttaactttaccattctcgctcgtttcgtgcaaaactttttcactgataatgttcccgtcgctgccgatttttttcctgatgtctctttttcccatttcgattccttcaagaactgcttcttttttcgagtacacccttttgatttgttcgctctccctcatatgctccttttcataagcgacaggaagcttaaaattcataaaatgcagcgagtgtttttcggtctccgtcttcgggcgcgagaagtcttcttttttaaatgaaaagccccagatcggcacggaaaatgatccgagggatagcttgtgacttgtccttactttacccgtaaaaacgtcaaatgatgtctcaagaggaaccgttactgttgacttgtaccaggtttcaccgtagattttcccttttgctccgactttttgcttttcctcttcgcttccgatcagcccggaaacgagcatttgccctttttcaacgtgctggttcaccgtgacgagcggctcgcctttttccacgaacattttcgagatggtcgccccttttttggcgacgatgtgcctcggaccgatatatttttctttgtcaggttcattcttttcaacgactttcatgtgaagggcggtgccgtttaactcaatgcccacccaagtgatgttttcgacccgctttgtgagcgcctgctgaattttttccggggtcagcattgaaaactgaaagcggccttttttgacgccgatttgatccaattgctgtctgatttgatgttctgtctccggattggctcctgtaatatcaattttccaaagcatgttggacaataggaacatgatgataaaaaatgcagcaactccaaaagtgaagccgctattccgtttagacttctgcacgaggaaaggaaacccttttcgtttgatgaacctgcacttgcagtcgaagcctctgatgaccttccggaaggcatgtacatcagaaagcggaatataaagaaagacggcgtctttctttttctttacattaaacatcgggatgttgcgcctggtgcattcatttaataaccgttcgatcccttttcccgttatcttaagctggatctttcctgaaaaaaaagaaagccatttattcttcacgcttctttccccccgacttatgaatcgatatagcggacaagctcaatcgtgccttcaagcagaatttcctcaggcaaaatcgttttgatgacaaagtctttgccttgaatgatgcactgcccctgtttgagcatcagccttacttccgtatcgctgaaaagcaaaagccctctgtggttttcaatatatatgtgaagtcttcctatcatcgtaattctcggaagatccatcatgacatcagggggaatttccagtgttcttgtcagccacgctttgatgcggttttttctttgcgccataaaaaaagaaccccctttcatctcatatgtatgagtgagaagggggttctaatacttaaattttaggccggcgcctcattgtgtaatgcggctttctcgaccgcggagggccgaatacttcactgaggacaatgccttgaactattgtttttttattcatgtcgagcagctcttgcttccggttgatcacccggctgctctgctttttaatggtccgttcaacggccggcatggaacgctcggcatcttctttgattctgcggagctctgcttccatatctgcgctgtttgcagctgtcgctgccggccgctggtttttattttttgcaggacggtgctgcgccgtctgtttcggcttcggcgtctgcgtcctctgctgttcaggcgccggttttcgcttcgcttcttcattttcatcgttttttccgagcttgttgaatatgaaggaaatggctgcgatgatggccgccatgataatcggattgtcgaacaggatatcaagcaatgagctccctcctttttacaggggcttgtttatttatgatcctcttcattttggtctttcgtcatctttccgaaagaatcgcgcatgtcagtgtcggcgtcgatgtttttcatattgaggtagtccatgacgccgatttttccgctgcggagagcttcagacattgcaagcggcacttcggcttcggcttcgacgactttggcgcgcatttcttcgacgcgggcgcgcatttcctgttcttgcgcaaccgccatggcgcggcgctcttccgctttcgcctgggcgatgtttttatcggcttcagcctggtcggtttgcagaatcgctccgatgtttttgccgatgtcaacgtcagcgatatcgatcgatagaatttcaaacgctgtacctgaatccaaccctttgctcaatacggtttgtgaaatcatatctgggttttcaagcacttttttatgattatcggaagaaccgattgtcgaaacgatcccttcgccgacacgggcaatgatcgtttcttcgcccgctcccccgacaaggcggtcgatgttagcgcgaaccgtgattctcgcttttgctttcacttcgataccatccattgctacaccggcaataaacggcgtttcgatgactttcggattaacgctcatttgaacggcttcaagcacgtcacggcccgctaaatcgatggccgcacatctggcgaatgtaagttcaatgtttgcacgttgggcagcgataagcgcgttgacgacccggtcaacattaccccctgcaagatagtggctttccagctgattgatggcaacatcaagtcccgctttgtgcgctttgatgagcgggttcaccacgcggtttggaatgacgcggcggagcctcattccgatcagtgtgaaaatgctgattttaacaccagcggccaaagccgagatccacagcatgaccgggacgaatgtaaagaagacagctagtaggatgattccggctgcgatcataagtaaaagaaacagtgttgacggatccattatattcctcctaaaaatgtaatttataattctctcacaacaatgcgtgagccttccactttaaccactttcactttcttatcctttgcggtgaacgagccttcagatacgacatcaagccgttcatcgtcgatgatgaccgttccggacggtctgagcggtgtatacgtgacgccgattttgccaattaaatcgcgccggctttcatttgacacgtatccgctttctgtgcttgtcgagtcggttaagatcaattttttaaaaaatttcatacgcttacccaacacccttgtcaatagaatggatgccgctatcgaaacagcagttgcaatcaaaatggagacggccatgaccttaaagcttcccgaagctaaaaagaggctcgcaacaattgcgatcaggccggcaatccctgctattccgcccggcagaaaaatctctaaaatgattaaaataatgcctgctgcaaacagaaggatcgtttccattccggcaagcccggcgacgagatgaccgtagaaaaagagcagcaatgcggtgagtcccataaagccggggatcccaaaaccaggagaataaagctccacaatcagcccgaggcttccgattgaaagaagaatcggaatcacgaccggatgcgtgataaacctggccaccttttcggcaaagcttacctcggcacgctcgattttggcatccttcaaattcagctttttcaaaagatcatcaaggctcgaaactgtgccttcggaatagccgactttcagcgctttgtcagggcttaatgtgagcagctcgcccttcggcgcccctacttctttagcatcgacgtctgcatcggccatcgcgagagcgtatttcggatcacgtccgttttttttggctgcgtcttccatttcagccagccacagcgattccgactttttgtcagcggcatttccctgcgtgtcaatgatcgcggcagctcccatttttccgccgggcgccatataaatatcgtctgcattcaaggcgaggtaagcgcctgcggacagagcccttctattcacataagcggtcaccggaatgtcggagttatgtatcgtatcagccatgtcaaggactgcgtcgaccgctccgccgggggtattgatatcgagtatgatatgtttggcattcatatcttccgcttcttgaaatgagcgctcaagaaattttgaaagccctttttcaacggtttcttcgatcggaatgacatacactgtatctccatccgctttcacggtcaaatgaacgcctagtaataagaataaaacaaaaccgcaggccagagcaacaaaaattctaaattttttcagcagcaatgatggatgaggcctccttcccctattatcattaacattacatacgttatacatgtagcaaaggtttcatctttctactacttttctattgtatgaacacgcacaaaaaaagacgcctttaattgcttaaaaggcgtctttttctcaagacagttgtttgctgacaagcttattgacgagaccgccgtccgccttgcctttgactttcggcatgacagcgctcatcactttgcccatatccgcttttgaagaagccccgacttcggcgatcgtctcgttgacgatgtcgagcagctcttcttccgtcagctgttcaggcatataagcttccagaatgtctaactctttttgaactttatctactaaatctgaacgattagcgtttgaaaattcatggagggagtctttacgctgttttaattcacgagaaagaacagtcagttcttcatcatcggtcagcctgtctttcttaagcttgattgcttcgttttgaagcgaagctttgaccatgcgaatgacagtcagtttgtctttctcacggtttttcatatagagcttcatatcttgattcagccgctcaagaagactcataaatccaccctcttttagtatttgcgctttcttgcagcttcagactttttcttgcgtcttacgctaggtttttcataaaattcacgctttcttgcttcctgcaaagtacctgtctttgatacactgcgtttgaagcgacgaagagcatcttcaagcgattcgttttttctaacgaccgtttttgacattctctttccctccctccgaatacaccaatcgactgctttaaaaaaagacatacatataaacatgtactttgacattataatataagcctccggtaaggtcaaccaaggagaatcgttttattgttcagtcatgatttcggcagcttgtctgtatatatttataaaggaggctgttcgaaaaactgatgatgatcttgatcttgttcgtattattgatcgttctttttctcaaaggcatgagcatgctgagaaaaggcctgatttcgctgacatttgaaaaaatcgaaaagcggctgctgtttttcacggatcatccggtgaaagcttttttggtcagtattatatttacggggattttgcaaagcagctcggcatttatggtgatcgtcatagggtttgtctcagtaggcgctctttcatttaaacgttcgattccgctcattttagggacaaacatcgggtccactttcacaacggaatttttggcggtgaagctggaatttttgatttttgcccttttggccgcaggtgcagctcttttcattgccggaaaatccccttttcggcaagtcggcgtaagcatgatcggcttgggggttatttttttctgtatcagcggtttcagccggcttgccgtgccgttgtcacagctagactcgggcgcttatatcgtgcagcttgccgaagattcatcgctttacgctttgttcatcggcaccgttttgaccgcgatgattcattccagttcggcgtgtgtcggcatcctgatgagctttatagatcaaggtgtcgtcggattgaccgaagcgatgagcgttgttcttggctccaacatcgggacatgcattacggccgtgatggcatccttcaaaggcggagctgcagccaggcaaacagcttatgcccatgttctgtttaatgtcattggtgtagcagctgtataccctctgctctcatcaatcacaggctttatctccggactgtccgaaagccccgcccagcagattgcccatttcagcctgctgttcaacgtcgtcacgtccctattgtttttgccgctctcaaatctgtttcattcgctgatcatgtttctcattccaaacaaaaaccaggcccgataaacgcctggtttttgtttgattagtagtcttcatccgctgttaaccctttgacaatcgacacgccggcgctcgctccgattctcgtcgctccggcttcaatcatggcaagtgcgctttccttatcgcggacgccacctgaagctttaacgccgatatcaggtccgacagcttcccgcatcagttttatatcccggactgtcgcaccgccgccggaaaaaccggtcgatgttttgacaaagtcggcgcctgcttttacggccggttcacaagccagccttttttcttcatccgtcaaaagcgacgtctctatgatgacttttacaagagctttgccgtcggccgcgtctgtcaccgccctgatgtcatgttccactgttcccgtatcgcggtcttttagtgcaccgatgttgatcaccatatcaacttcaccggcaccgtctgcaatcgcctgcctggtttcaaaggcttttgtttccggagacgctgcacctaaaggaaagccgataactgtacatactttcacctctgactctttaagaagctcggcgcaaagcttcacccagcaagggttgacacaaacggaggcaaaaccgtaaacacgcgcttctttgcaaagcgcttcgatttcggatttgacggtatctggcttcaatgcagtgtgatcgatcattcgcgcaatttgttttgtcatcatcctgactcctttttaggtggttgtttgcttaagatattcgcaaaaaaagccggaacacctttttcgtgaaccggctgaattgatgatttatgacgataagcggatgttttcgcggacgtcgtcttccgcgacgcggacgaactgtcctttgttgtacggatagccggcttttaagatcttcactttaacaagctggccgatcaggtcttctgaaccttcgaaaacgactttcatatagttgtccgtgtagccgacaagcaggttgtcttcgcccgtttccgtgaacggctcttccggaatgatctccagaacgtcgccttcatagtctgatgcatattctttcgcaagctggtctgaaagagcgatcagtttatgaaccctttcgtttttcacgttttcgtcaacctggccgtccatgcgtgctgcaggggttccggtccgtttgctgtacgggaagacgtggagctcagaaaacttgtgttctttgataaagttatacgtctccatgaattcttcttccgtttcacccgggaagccgacaatcacatcagaggtgactgcaagccccggaagagcttttttgagttttgtcagccggtcggcgaaaaactccatcgtatactttcttctcatccgctttaaaacgctgtttgagccggattgaagcgggatgtgaaggtgtctgacgatcttgtctgagcggtcaagcacttcgatgacttcgtctgtaatttggctcgcttcgattgaagagatacggattcttttcagacctttcacacggctgtccaattctttcaacagctgcgcaaagttgtagtctttcatatcttctccataaccgccggtatggataccggtcaaaacgatttctttatagccggcatcaacgagctgctgcgcctggcggatgacttcctcagggtcgcgggaacgaagcaggccgcgcgcccacggaatgatgcagaatgtgcagaaattgttgcagccttcttgaattttcaaagaagcacgcgttctgtcggtaaatgcaggaacatcaagctcctcaaacactctcgctttcataatattgctgacgccgttaatcggctgtctttcttcctggtactgcttaatatagccgagcattttttcgcggtcttgtgtaccgacgacgatatcaacgcccgggatcgccatgatttccgccggggaagtctgggcgtagcaccctgtcacgcaaatgacggcgtcaggattttggcggatcgcccgtctgatcacctggcggctctttttatcacccgtatttgtgacggtgcatgtattaatgacgtatacgtccgccgaactttcaaattcttttctttcgtagccggcttctttaaaaagctgccagattgcttctgtttcataatggttgaccttgcagccaagtgtatgaaatgcaacggttgccattgttattcacctcttaataactctgtatgataagaaactgccgccaacgcgtacagcggagctgtttccgcccttaagatccgcggaccgagcccgcaggcgagggcacctttttcttttagcgcctcaatttcctcttctgtaaatccgccttcaggaccaaacaccatgagtacggatgatccttcagaaaggcttttgagcacggattgaaaccggctcgtctcgccttgctttgatgactcttcgtatgcaacgacacatttatcgaagtcctcaaggctctcaagcaaacgttgaaacgtgtgaaccggcgccacatcgggaatcgcgtttctgtgggactgttctgccgcttccttggcgattttcgcccacctttcccgttttttctttgcctttttttcatcaagtttaacaacggagcgcgatgcctgaaaaggaataaacgagcttgcaccgagctctgtccctttttgaatgatccattccagcttatctccttttggaaggccgtttgcaatatggatctggacgggcagttcgcgtgtttcccccgtccattcgataacgctcaataaaacctcttctttagtgacggactcgatccggcatttcgcttcatggccgtcttttgcacagcaaatgacctcatctccgggagacatcctcatcacagtcgcaatgtgatgaacgtcttcgcctttgatcgagaatgcgggtgcggctgtgacctcttgttttgattgttcgataaaatatcgttgcatacgcttgtcacacctactaacgattattttttagcgatgatgctgacccagtcctccattgaaagaacctcaacgatcgtaaagccttctttcaccagtgcatctttgacttcctgttttttctgctggatgatccccgaagtgatgaaatagccgccgtctttcaacaggctgtatgcttgatccgtaaagcgcaagatgacctcggccaggatattggcgacgatgatgtctttttcgccttcgacgccgtcaagcagattattttgcttaatctcgatatgatcgctgactttattgagcttggagttcaagcgggcgctttcaacggctacaggatcgagatcatatccttcaacctgtttggcgcgaagcatggctgaagcaatgctcaaaatgccggttcccgttccgacgtccacgaccgaatccccttctttcacatacctttcaagcgcctgtatgcaaaggacggttgtcgggtgggtgcctgttccgaacgccattcccgggtccatctcgatgatgagttcatccgtatgaaccggtgtgtactcttcccaagtcggaacaatcgtaaacttctcggaaattttcacgggatgataatattttttccatgctgtcgcccattcttcttcgttaacctcgctgatggtgattttgttgcgtccaaggtcaatatcatacagcagcagattattgatcgtttctttgattccttctacggtctcccccaaaaagctgttgatcggaagatacgctttgatgatgactccttcatcaggataatcattgggatcgagctggtagatttctccgtatacattctcacgctctttaattaaatcaagcggatcttcaatcactactccactcgcaccagcttcatgcaaaatattcgagatgggctcaaccgcttcatgtgtcgtgtgaatgcagatttcggaccatttcatactaccaactcctcatccaatcattaatcgcctttaaaggcgcgctttactttatcgaaaaaactcatttcctgttcatccggcatatttccgctcacttctgcaaattcgcggagaatatttttctggttttctgttaaattcgtcggtgtcacgacgcggacaacgatgtgctgatcgccttgtccgtacccgcgcacgttggcaacgccttttccttttaagcggaacttggtgcccgtctgggtgcccgccggcacttttaattttacttttccgtgaagagtaggcacttcgatttcatccccaagggcagcctgtgcaaatgtcagcggcatttcgcagtaaatatcgtctccatcgcgctcgaaaaattcgtgctcttggacgcggaaaacgacgaataagtcacctgacggaccgccgttgatccccggttcgccctgtccggctactcgaagctgctggccgtcgtccacacccgccgggatggtgacattgattttcttgcgttttttcacttttcctgtgccgccgcaagttgaacatttgtgcttgatttgcttacccgttccattacagtaatgacatactcttctgttgacaacttttccgaacggtgttgactgctccatgttcagctggcctgatccgccgcagtgtgaacatgtttccggctttgttcccggttttgcgccggagccgctgcatgtttcgcacgtttcttcacgcggaatttcgatcgtcgtctcttttccgaaggctgcctcttcaaatgacagtgtcatcgtatactgcagatcggcaccctgcctcggggcattcgggtctctccgccttgcgccgcctccgaaaatgcttgagaaaatatcgtcaaacccaaagccgccgaagtcgcctccgaatccttgatttgggtcggtgtggccgaactggtcgtaatgggcccgtttttggtcatcagaaagtgtttcataggcttctttgacttctttgaatttttcagccgctccggcttctttgttgatgtccgggtgatattttttagaaagcttgcggtaagcttttttaatctcatctttagaagcgctcttacctaccccaagcacctcatagtaatcacgcttactcatctcttcacactcccgattttctcacataaattagattgtatcatttcaaattatgttttttcaattccttttgtcctttaggaagaaaaaagtcaaagtcaagagatcctgactttgactttcatcgcctgtaaggtcatgtgctgtgcaaaccggggtaagcacagcacattttatttcgattatttttgatctttgtcgtcgtttacttcttcatattcagcgtccacgacattatcatcggcttttttagcgccagctccgccgtcttgctgagcctgagcctgttttgcggcttcttcgtaaagcttcattgaaagctcttgaacgatcgcttgcagctcatcttttttcgccttgatttcatcaaggtcatttttctcgatcgcagcttttagcgcgtcttttgcttcattcgcttttttcacctgtgcttcatcggctttgccttcaagatctttcagcgttttttcagttgtgaagacaagctggtccgcttcgttgcgaagctcgatttctttttttttcttcgcatctgcttcggcgttttcttcagcctctttcaccatacgctcgatctcgtcgtcagaaaggcctgaagaagatttgatcgtgatgttttgctctttgccagtgcccagatctttcgcgctgacgttgacgataccgtttttatcaatgtcaaatgacacttcgatttgcggtacgccgcgaggagccggcgggatatctgtaagctggaagcgtccgagcgttttgttgtcggcagccattgggcgctcaccttggagcacgtggatgtcaaccgctgtttggttgtcggccgctgttgagaacacttgggacttgcttgtcgggattgtcgtgttgcgctcaatcagcttcgtgaacacgccgcccatcgtttcgataccaagtgacagcggagttacgtccagaaggacaacatctttgacatcgcctgtgatgacgccgccttgaattgctgcaccaagggctacgacttcgtcagggttgacgcctttatgcgcttcttttccagtttcttttttgatcgcttcctgaacggcaggaatacgtgttgatccgccgacaaggatgactttgtcgatttcgcttgcagaaagtcccgcatcttgaagagcctggcgtacaggacccattgtgcgctctaccaagtgtgaagacagctcttcaaacttcgcgcgggtcagtgtcaattcaaggtgcagcggacctgcttcacccgctgtgataaacggcagggaaatttgcgtagaagatacgccggaaaggtcttttttcgctttctcagcagcatcttttaagcgctgaagcgccattttgtctttagaaaggtcgatggcgttttcttttttgaattctgagacgagatgatcgatgatcacttggtcaaagtcgtctcctccaaggcggttgtcacccgctgtagagcgaacttcgaatacgccgtctcccaattcaaggatggaaacgtcgaatgtaccgccgccaaggtcgtagacgaggatcgtctgatcttcttccgttttatccagaccgtaggcaagcgcagctgcagtcggctcgttgatgatccgctcaacttcaagtccggcgattttaccggcatctttagtcgcttgacgctctgcatcgttgaagtatgcaggaactgtgatcacggctttagacacggtttcgcccaaatagctttcagcatatgatttcaaatgctgaaggatgatggcagacacttcttgcggcgtgtactttttgccttcaatttcaactgtatagtcagtgcccatgtggcgcttgatcgacatgatcgtgttcgggttcgtgatggactggcgtttcgccacttcacccacctggcgttctccgtttttaaatgcgacaactgaaggagtcgtgcgggctccttctggatttgggatgactttcggctctccgccttcaagcactgcaacgcatgagttcgttgttcccaagtcgattccgattactttgctcatgatttttacctcctgctatgtagttattgattgacttttaccatagaaggacggatcacccggtccttaagtttatagcctttttgcagttcctcaacgactgcgtttgattcgtacgcttcatcctcaacctgcataacagcttggtgcatgttcgggtcaaattgctctccgactgatggaatctgttcaactccttcatttttaagagcctccaaaatttgacggtgcaccatttccattccttgaagcaggcttttcgtctgctcattgtcaggatcgatctgaagtgcgcgctcaaagttgtcaagcgccggcagcaaatcgctgatgatgcgctgggagcggtacttttcagcagcctcgagatcaaggcgtgcgcgtcttttgtagttttcaaagtccgcctgaacacgtaaaagtttattttctttttcttcaagacgttcttgaagttcttttagttgtttttcaagcatttctgtttgagtttcttctgccggggcatcagcttcagcagccgtttgttcagcttcggctgtctccgcttctgtctcgttcagttcctcttgttcgtttagctcttcgttttgtttttcttctgccatctgtgttcacctcccttaaaggatgagtttcatgataaagaagggattcctcccttctgtttgttttcaggtactgccttacccatcatacaaacttgtcagcgcttttgacaagtcagatgatacgtgctgaagcaagccgacgacgcgggagtagtccatgcgcgtcggtccgatgaccgcaatggagccgatctgttttgagccgaccgtgtatgttgcggtaatcaggctgcagttttccatctcttcatagtcgttttctttgccgattttgatggtaattccggactcagtcgactgaaagagccggagaatctcctgttctttctcaatgagcgacaatagcgatttcactctgtcaatatcgtgaaattcgggctggttcagcatgttaatcttgccgccgaaaaacagccggtcggtttgaacagatgaatccagcgttgcgccgagcgcgtgcaaaatcgtatcgtaattttgaatgtgcgacttcaagaagatgacaacctctttgaaaatcctgtctttcagttctgagatcggcacgcctctaaggcgttcatttaatatattcaccagcttctcgagatcggaaagatcgacctccgccgggaaattaatcgttttattctccacatggccggtattcgttactagaatggcaacggccttcttgggctgaatcggtacaatctggatctgtttgagatggttttcactcagtctcggaccgaggacaatcgatgtataatttgtcaggtcggacagcacttgggccgacttctgcacggctttttcgagttcaaagattttttctttgaaaatcgaatgaataatgtttaagtccgtttttgacagctttccaggtgaaagcagatgatcgacataatagcgatagcccttttcagaaggaatccggcctgaagacgagtgggttttttcgataaaaccgagctcttccaagtcagccatttcgtttctgatcgttgccgagctgaatgtgatatcttcctttttggaaagcgttcttgatcctaccggctgagctgaacgaatgaaatcgttgacgataacctgcaagattaacagctgacgatttgttaacatccatatcacccctgttagcactcggcacaactgagtgctaattgtatatcaaaattaccaaaccgaaatcaaaatgtcaattataactcacccaggaatgcctgaaatacttcatttcccaacagttttccattatgtgttagaaacacgtttttgttcatgttcacaatcaaccctgtttcttccagcgaatggagcaccttcggaaagagatcgtcaacagatcttccatatttttcgaaaaagcgctctttgtttactccctcagtttttcgaagaccgagaaacatttcttcttcaatctgttcattttttgtgaccatgtgcttttccttataaggaaagccggattgttcaatcaggtcgatataatgtttgacagggcccgcatttaccgttctttcaccattgatataaccgtgtgcgcccgcgccaaaaccgaaataatcctcattgttccaatatgtgagattatgtttgctctcatatccttttttggcgtagttgctgatttcgtattggccgatgcccgcttcttccattttccgcataacgagttcgtacatttcagcttcctgatcctgcggcggcaggtgaagccggccttttttcatcaagttgtagaaaacggttttcggttcgacgatcagcgaataaaccgaatagtgttcagcaccgagggcaagcgccgtatcgagcgatgaagcgaggtggccgatggtttgtccgggcagaccgaacatcagatcaaggctgatattatcaaaccccgcctttctcgctctttcaaacgaaacgagtacgtctttttgctcgtgaaccctgccgatttttttcagcagctcgtcttcaaacgtctgcacgccaaagctcagcctgtctacaccggcagcttttaaaacatccagcttttcagctgataaatcgtcgggattggcttccactgcaaattcagcaaggctttcggacggtttcaaaacgcgatgaatggaatccaggagccgttcgagctgagctgccgacagcgatgtcggcgttcctcccccgataaagatcgttttcagctccggatgtccggttgcctccattgaattggccatttccttctctaaggaacgcaaatattcatcaacgggctgagattgaataaaaaacttgttgaagtcgcaataatggcaaatgtgctcgcaaaacggaatatggatatatgctgctttcattgttttcaccttcttttacaggaagaagccgcagtgtgttacgctgcggcggctcatgattatgatttcgggccgctgtcgtccattttcaggactgccataaaggcttcctgcggaacttcgacagagccgacctgtttcattcttcgctttccttccttttgcttttcaagcagtttgcgctttctggaaatatccccgccgtagcacttcgccaaaacgtttttgcgcattgctttgatggttgaacgggcgacaatttttgtaccgatggctgcctggacaggcacttcaaactgctggcgcggaatgagctctttcagcttttcgacgataacttttcctcgttcataagcataatcgcggtgaacgataaaggaaagggcatcgattttttcgccgttcagcataatatccattttcacgagcttggacggtttatatccgatgagttcgtaatcaaatgacgcatagcctttcgtatttgatttaagctgatcgaaaaactcgtagacgatttccgcaagcggaatttcgtagacaatgctgacgcggttcgcatcaaggtactgcatatcaataaactggccgcgcttgccctggcacagttccatgaccgctccgacaaagtcgttcggcaccatcatcgtcgctttgacgaacggttcttccacccggtcgatcttctgcggatcaggcatgtttgacgggttatcgacgacgattttttcaccgtctgtcatgtacacgtcgtagattacgctcggagccgtcgtaatcaaatcgatgttgaattcgcgttcaatccgctcctggatgatttccatgtggagcatccctaagaaaccgcagcggaagccgaatccgagagcttgggacgtttccgcttcgtactgcagggctgaatcgttcagctcaagtttttcaagcgcttcccgcaagtcgttgtatttcgctgtatcaatcggatacaggccgcaataaaccatcggattcagctttctgtagcctggcagggcttcgggtgcagggttttccgcgctcgtaatcgtatcccctacacgagtgtctccgacgtttttgattgcggccgtcaggaatccgacgtcgccgacagtcagttcgtcagccggaacggccttcggtgtgaaaacgccgacttcagtgacttcaaattcctttccggtcgccatcatcttgattttttgaccggcttttacggtaccttgcacgactctgatataggcgacgaccccgcggtaagcatcatacagggagtcaaagatcagcgcctgaagcggcgcttccggatctccgcttggtgcgggaaccttttcaacgatctgctccaatatttcctcaattccgatgcctgcttttgctgaagcaaggacggcttctgaagcgtcaagaccgataacatcctcgacttcctggcggacgcgttcgggttctgcgctcggaaggtcgattttattaatgaccggcaggatttcaaggtcgttgtcaagcgcaaggtaaacgtttgccagcgtttgcgcctcgattccctgggcggcgtcgacgacgagaatcgcgccttcgcatgcggcaaggcttctcgaaacctcatacgtaaaatcgacgtgtcccggggtatcgatcagatgaaaaatatattcctctccgtccttcgcctgatatttcagctgtacggagttcagtttaatggtgattcctctttcacgttccaaatccattgagtcgaggagctgttctttcatttccctttgagtgattgccgccgttttttccaagattcgatccgcaagcgttgacttgccgtggtcgatatgggcgataatagagaaatttcggattctcgactgcctttgtaatcgtttttctttatctgtcacactaatcactcctactatgaaacgcaatatgcgctagcttagattatatcaatagggttgtgaagattcaatgctaagtcacatatgctttctaaacccgaaaaagaaaaaacgagtcctgcatccggctcgttttttcttttacctattccgttttttcctttatccagtcatacaatgaacgggctgtgtttgtgaccgaatcggccagggctcggccggccgaggaaaagaggttgaaagcttccagctgttccagctctttttgtttttcctccaaatcgatttgatggccgaggactgacgcctctttcgcatccccttcagatatgctgagcgctgcttttaaatcagggtcctcgtaccctttcatttcaatcattccgttgttcgcctgctgcatgccgagaagaacgccgaaaaacatgacagcgcaagccaatatgcattttcccataaaagaagccacttcgatcacctgcctctattgttttttcttatcgtcttcaccggagtctgcatcaactttttcagcattccagtacatctcgctgaatacatccgccatcgcttctgcagcccgctccagctcttcgcggttattatctacgccgccaaattcgattaagacggatctttcgtttaaatcctgattatatatgccattatccccggcagctcccttagatataactccgcggctcaaaccgggatattttttttccatccgttcatgcagctcttttgccagctttaagttcgattcgaaattagagctcttcttgccgagcacaaacgcaacgcgtgcatagctttttcctttgacagtcgcggttgtcgctttcttccgttgcgaatccctgtgaatatcgataaaatactgcaagtctttgttctgggccatcgcctctttgacgaccggccttgattcatcataggaacgggcataggcccagccttttttccgcaaattcgcctgaaaatcggttttatccaccatcgccccgacgccctgcgatttcatcgcatttgcgagcatatcgctgacaagcgtaacatttgctttcgaatgaatcgcccgatcaggatctgcctcaccttttaaaaagggaagatacgattccgtattgtgcgtattgtagataaatacgactttgcggccgcccgtcgattgttcaggaggtttttccccgtctgttttctttttctgtttcccttcaagctctgcaagattcgcttctctctcctcttttaagacctcagtcggcggcggagattctgacggcatattcgtataatccgtcccttgcccggcaatgaggatttccgagtcaaaatgagagaatcccggaagctcccgtccgagaaaacttcgcggatctttcaaattaatgctggtcgccagcttcaggacgaggggggaaagctcaaagcgcttattcggttccggcaattctgatgcaaagtagtggttttccattcccaaaatgagcccaaaggtctcgcccttcagttcatcagccacccggtacaacgatgaagacggccttaactcaggacgcagcgatgtgagcacgcctgataaaataaaaacgagcagcaggctgacgataaataagaatactgtcttaaccgcgcttcttccatttacagccagcacaaactgacgattcctgcctctttttctcattgtaaatccctccagagcttgtctagtaaatagactatgtacaagatagaggaagtagaacaagttccggcaatgctaaatgtcatgaaaaaaagcggccgggccagccgccttgatcttagtggttatacattcctttattgtcttgcgatacattttcatggagcgctgtgttcagaccgtttgcaatcacatttgccatatcatcgataaaagtatcgacttctttaggggtcaccattaagttatggccgagcggagcgaggacttcatggatcagctgccttttttcatcctctgcgaggcctccgactataccgagaaacgatttgcggtgctcttcatcgggaaggtcttcttcggtgaggacctttcttttcccaaagctcatccccgcgggaacgagcgacctggacggactgtcgtctctcatctctcttccaaaatgcttcagcatgtaatcaatcgtgtcgctcgtgatcgtgacggcatcgaccactgtcggaacaccgatggcgatgaccggaatgccgagcgtatccttgcttaactcttttcttttattccccacaccagacccggggtgtatcccgctgtctgaaatttgaatggtagaattcacacgctcgatccctcttgatgccagcgcatcaatggcaatgacaaaatcgggctttgagcgatcgatcaccccttggataatgtcgctcgtttcaattccggtcaagcccatgactcccggggaaagcgcactcaccggacggtagccttcctctacattttcgggctgcagctgaaacaggtgcctcgtcacgagaaggttctccgtcactagggggccgagcgagtcgggcgtgacattccagttgccgagcccgactattaagcagctggcatcccgcggaatgcccaaataatcgagaaacgaggaaaattcctttgcgaagacatcgacgactttttcctgcaatacggaatcctgctgtctgatcccttgtgtttcaaaggttaaatagcggccggcttttttccccgacagcttcgctccttcttcatcaatatccatcgtctgaattttgatcccgtctttttcgtattctttgactgtaaaccctttcagctctttctttggagaagcttccttttcctctgccagatccctcgcttccacggctaagtctgtccggactgcatatttacttaaatcgagcttctttttctccatatttgcattccctccaaaaacataactggtgttagtgtgcccacaaggtctgcaaacattcccgcgaagcggagctttcaaataaaaatactttacatttatattgcaatctaagggtgtgtttgatagaatacaatttgttctattgttgagatctaacctatagaaaaggaacagaggttatgtcttaggaggtgaaacacattgccaaacattaaatcagcgatcaaacgcacaaaaacaaacaacgagcgccgcgcgcacaacgcaacaatcaaatctgcaatgcgcactgctatgaaacaagttgaaactttcgtaagcaacaacgaagcagacaaagcgaaagcagctctatctgcagcagcaaagaaaatcgataaagcagctaaaaaaggtcttgtccacaaaaacaccgccgctcgttacaaatcaaacctagcgaaaaaagtgaacggactttctgcataatagaaagcttggctatgccaagcttttttgcttgcgtgaaggatgaaaaaaacggctctctttaaaggaggccgtttttttcatgaggctgcagcagcttcagcaaaaacagttcaagcaggagctgcttgtcttttttgcctgtcttcatttcataatccatcacggcgagctgctcgataatgttcctaagctcctgctctgaaaaaagcctcgcctgctcgatcgccagcttcaccctgaacgggtgcactttaaggtttgaggcgatttgcttttgtccgtatccctggtcagaaaaatatttggtctgcatcagcagcctgaactgattagcaatcagcgccatcattttaatcggctcttcattttgctttaatagatcgtagaaaatctgcagcgcttctgtacgtttccgattgacgaccttattgatcagttcgaaaatattttgttcaagccctctcgctacaagctttctgacatcctctatggtgatctctccgcggtcaccggtatatgtactgagctttttaacctcctgggcaatggctgacagacttgcatgacataacaggacaagctcctccgccgcttccggttcgatttgtttgccttccgacttcgcgaggcctgcgataaagtcagccgtttctttggcggttaattccttcgcttccaccatgtgcgcatgctttttcaggagcttggtcagctttttccgttcatcgagcttttcataaggcgcaagcaaaacaaacacggaataaggtgccggctgcgtaatgtaagcttccagtacaccgagattatgctcaagcttatccttctttttttcagctgttaaaaacgccgggtttttcgccacgacaagacgcctttcccccataaacggaaaggtttccgcatcctccacggcaagatcgagcgcgtcttcttccagatcaaatatcgagaagttaaagtctttcgtctcttcatcaacaacggcttgtctgatcctttgaaccgtctcctgcagaagatacgtctctttcccgtacaagcaataaacaggatgaatgtcgccttttttcaagcttttccaaacatcaaataccgtcatctgcactttcccctctttcatccttcctttctatcctaaagcgtgttttgcaattagtaaagagagaagcggagtcacccgctctctcatttataataaacgccttccataaacccccgggtcagtttatagaagacgatgttcataaattttagaaaacggttgcatgaagctcctagatttttgcaaagaattgaattatactggatatcaataggaggggtaaattgtgaatgaatttgaaaaagacgtgcaaagcaaacgtaacgatcttgtagattcaggtgtcggttttatcgtgtcttttggctttttcgctacaatgtttattatcgctactgttatacatctggccgcttaatcaagccaagtcatggacaccgctttactctccgtcaggcaagcggctttttgacgactgctgtttttcagcagtcattttttcttgcggggaatgtactttatcatatggaggatgtagcaaaaacgttccgttcccgcctcgaaataggtgctgaatcgaaccgtgccgatccgttctgaacaccttcacatcgtggcggtttaggatgtccagcacttccccgtggggatgcccgtagcggttgtgctcccccgccgaaatgagggcggttttcggctcaatttgcttgatcagctcttcacccgtcgaacctttgcttccatggtgaccgactttcagaatatccgctttaagattcggatacacttccatcatctccttttcgccctccttctccaaatctccagttaacagccacgaaaatccgcctgctttcatccacaatacgagggaaccattgtttttgctgtttttgtccgcctctttcggtgaaagaacataaaattcaagattgccaatatgaaggatgtcacctcttttggctacattcacctcgacgccttccttcaaggcaaggcgaagcagcttttcatcagacggttcggctgcgaagcctttcggcacgatcaattgcttcactttatgtttttggatcagcacatgcgcttcaccgatatgatcctgatcagcatgggtcaaaattaaagcatcgagcttcttgacccctttggttgccagaaaaggcattaacacgctctcccccaatgaaaaatccttcttccgctttctccaccgctctttccggaaggatacggttcctcccgtatcaatgaagaccgtgccattctgaccgggagcgctgacatacatgctgtccccttggccgatatcaagcattgtaacctctccctcacctgcaagctgaggaagacatgcgtgaatcacaaacacagcagcaagcaggccggacggaatcatgaccgcacgaagcgacatctctttttccagcaacagcaaaaacagaaaaatggctgtgaagtagaaaaacaacaaaagatccggcggcttagccgcagaaaagaccgaaacatccgcggcagacaccgttttaacagcctgatggctccacacaagcagacggtcaagaacggcggctgccgcctcccccaagggatgaaaacatatgagagcaagcaggcttccgaaagacagcggcatgatgatgaaaatataaagaggtataaaaaatagattcattaatgtgctgagaaatgaaaactcttgaaaatgaaaaagcagaatcgggagggaagcgagctgagccaaaaatgaccccaatagcagctgagagattcggcttttcggcctggtcaatatctcctttgaaagaatgaaaacgaaggatacagcaaaagaaagctggaatccggcttgaaataacagataaggatgatacagcagcagtccgaggcaggcaatgctgatcacatcggcacttttgaagttctttttagacagtgatgccagcagatagatttcagacatgaaaaccgctctcatcaccgacggggcgcctccggtcaaaactgcggcaacgggaaggccgatcacgagcagccattttgcgcattccctcgtgacgccgaagcgaataaatatgtaaaacagagcggctgagagcagaccgacatgaagcccggaaatcgctaaaaggtgaatgattccaagacgctgatagccgtccaggacatcttgttcaatgagaaaccggtctccgaaaattagcgctcttccaataccggcagccgagtccgccatattttcctctataaaatcaaggcccgcttttctgattttcaatagagatggcatcaggccgccgcccggcttgcagcttgtaatagactgaactgcaaaaatccagtgaatccctttttgatacatggattctttttgattaaaagtgccaggaaccgtctcttttttcggctcttttaattcaccttgcatgacacagaggctgcccggctgaagagctgagagcgcccgtttttcttgtggagaccggagcgtatatcccgctttcaaagcttctccctcatctgtttcggctgtgaaagaaagccggtctccgtctattacgggaatatcctgaacagaagcgagcgtgtgaaatttgccttcatgataaatcgttgtattgaaatggtcgatcacgtaaaaagaagtaaaatataaaatacaaaccgctgcacataaagcgaaaaggagtatttgttttttgaagaaacagaggataaagaacagaaaaaaaccgacggcgaggaagagataaagagaagagtgagcggaggcgattccggctgccgctgaaatcgctccgcacgggaagatgcgatgtctgtccattggttacacgtagcttgtaaacagtttgttggcctcttcgtgtattttcctgatctcctcttcctcaaggcctttatcagccagctgtttgatcagatcggctacaaacgccaacttttcctggtttttcaagtcgataatcatctcatcgagctctacctgctccactttaacagaagcctgatcgaaaagttcaaccgcgtaaggatggtttttgtaatccttcgcatagtatatcgttttaatacctgcctgaatgatcgatttacagcattgaatgcacggaaaatgtgtgacatatatttcagcgccttcggtcggaacaccgaattttgcacactgaagaatcgcgttcatctcggcgtgaatcgttctaatgcagtgcccgtccaccatatagcagccttcatccgcacagtgaacgcctccggcgatcgatccgttgtagcctcccgctataattcgtttatccctgacaatcgtcgctcctacagcaagccttgtacacgtgctgcgaagcgccagcaaatggctttgcgccataaaatattgatcccaagaaatccgttccacttgttttccctccaaaaatacgatgtcgacttccctaagtttacatatgatgatccgcaaacgtcaatttactttaccgtgattgcagattttattctttcaaaagacttttctccaattcccgaaacgtttgttatgtcttctaccgtgtgaaacggtccgttctcctcgcggtattcgataaccgcttccgcttttgaagggccgatgccgggaatcgcctgaagctcctcagaggaagccgtattgatattgacgatatcgacggaagcgccatctgcccttgaacccgctttcgagaaagaatcagcagcctcttccccctcaaatggaatgtaaaccaccataccgtcctgcaaaacggctgcaaggttaatttgcttttgatccgcttttttctcggtgccgcctgcttttttcaatacatcgtggaccctgtctccctctttcatttgatagacgcccggatttttcacagcgcctttcaaatcgatgataaccgcctcttttcccgcgcttttttcccgtttcacctcctccttcttgtcatacgtctgtgcagaagcctcctcgggaatggagaggccggatgaagtttcacgctttccgcttaacagcatgaaggcagcgctgatgatcaagacgagtgcaacgcctcccgcagcatgccatttatattgttttagccaatctgtcaaacctgctcacctgctttcatacatattttgactgaagccttcatatcgtttaaaagatacaggttcaaaggaggggagaacgattgaatatcggctttatcgggacaggaaatatggggaccattttaattgaggcgttgattgaatccagagcggtcattccctcatctttaacaattactaaccgaacgatcgacaaagcgttaaacataaaaaaacgattcccagacattcaggttgcagaacggccggaagaagtgattacggaaagtgatgccgtgtttatctgtgtaaagccgctggatatttatcctttgctaaaacggctttcacccgtcttcacccgcgatcagactgtggtaaccattacgagtccggtgcaggtcgaacagctggaaaccatcgtctcctgccaggcggcaagagtgatcccgagcattacgaacagagcgctgtccggcgtgtcattattgactttcggagaaagctgcacagctgaggcaaaagaaaaattgacggctttagtaagcaagatctcaatccctctcgaaatcgaaagcgggattacgagggtcgcctcagacattgtcagctgcggccctgcctttgtcagctatttggttcaggagtttattcaggcggctgtcgaagaaacatccgtgtcaaaagaggacgctattttaatgacgaaagagatgctggtcggtttgggaaggctcctcgaaacaggcctttacacactgcccgccctgcaggaaaaggtttgcgttaaaggcggtgtaaccggtgagggaattaaggcgctggaaagcggtgttcaggatatgttccgccagatgttccgaaacacccatttgaagtatgaagaagatatcgctctagtcaagaagcaattttccgtttgattcattgtttcacgaatgtactgagatctcaacaaaggaaaaatgcattatgaaaaaccatcgttacgattaaacgatggtttttgttttttttgctgtataaaaatgacgttccgactctgcgctaggctccaattttgaaaaatcagcactgatgcactgcacctcaaatccggcttgccgcaataaactgatgtacttttccgtctggaaagtccgctgttcatgcgattcatcaaacctttcgtatacgtctctattttgtacaaagaaggtcaaatcgtgaacagctgaatgaggctcttcccccgcatagctttgccagatgacgctcacttcttcatcctgatcggcatacgtacttcccggaaaaatgacatccattttgtaaacggaatgaacatcaaacagaagaagaccgccctcttttaatagagaaaaaacgtttttaaaagtattgaaaacgtctttttcgctctttagataattcagcgagtcacagcagatcgcaaccgcgtcaaactcttgtccgtgcccggcaagttcgcgcatatcctgctgaaagaactgaatatcgagctgcctgacggctgctttgtactgggcctgggcaagcatgtcttcgctgatatcgattcctgtgacatcatagcctttttcagccaggcggacagatatttcacccgttccgcacgccagatcaagcacccgtatacgttctttctgctgcgcgccgatcgtttgttcaatccagctgacccactgatcgtaaggagcatgagacatcagcttgtcataaatactggaaaatcctttatagatcattcgttaactccgaacgaaaggtcttcaatcggcgcgtctccccacagcttttcaaggttgtaatagcctcgttcctctttgtggaaaacgtggacaacgacgtcgcccaaatcgattaaaacccatctggcttcgtcaaagccctccattttcttcacatcaattccattttcttcagcttgatccttaatttcccgggcaatggcctgaacctgtttgtcagagttcccatggcaaatcagaaaatagtcagccacgagggaaatcccctgcatattcaaggcgataatatcttccgcccgtttatcatcgcaggcctctgcggcaatttttaaaattgaagcttgatccattcagtaattcctcctaatgtctatcgtttactaaagcattatatgtggcgaccgtttccggataaacggcctgattttttgaaattaaaaaggtaatcgtatttttcaatgcctggatgagcgccgaatccaaatcttcctcagcgagagtccgaacctcttcaacccccggaaaacggcggcccggctcgatataatccgctacataaaccactttttcaagaagagtcatattgggccttccagatgtatggaaccgaatggctgacaggatgtcttcatccgtaattccgacctctgttttgacaagcgctgctcctgccggcgcatgccaaagttcatgatgaaaattgagcacttcaagcggcccgcctccgtcgaggatgatttgtttcatctcctcttttgggcgaaatttggcgtagtcatgaaagatcgcggcgatttcggcttttttcagatctgcgccaaaccgttcagcaagtttgacagccgtctccatcacgccgaccgtatggatgtagcgctgttctgtcagctgttctttcacgcaggctaaggcttcctcacgtttcatataaacgattctccttcacatagaccttcacttcgtcaggtattaaataatctgtcggctgccgatttttaatgcggtccctgagcaaagatgatgacacttcaaaaataggcacatcgacaaaaacgagcggatacggcgtctcaatttgaaagccgggccgcttcaccccgacaaactgaatcatgttgacaagcttgtcaatgtttgaccatttcggcaggtattccaccatatccgcgccgataataaagtaaaactcatgatcagggtatcggtctttcagcaggcgaacggtatcaaatgtataagaagggccttccctttcgagttcgatcgtctccagtttaaattgctctttccccgaaatggcgagcttcagcatttcaaccctgtgcatacttagtgaaaacgagtttttttgtttatgcggcggaatttggttgggcataaaccagatttcatcaagatccagtttgtacaggacttcatttgccattaataaatgcccgttgtgcggaggatcgaatgtccctccaaaaatcccgattttcctcatgattaccacctttaagcattaaggaagctcaatttttttattttcttttgactccttatacagcacaataatgtttccgatcgtctgcaccagttcggcgcgcgctccgcccgccagcgcttcggctacttcctctttaggctgctcgcagttttgcagcacgctcaccttgatcaattctcttgcttcaagagcttcgctgatttgtttgaccatattttcgttgactccgcctttgccgacttgaaaaatcggtgacagatgatgcgcttcccggcgcaaatagcgtttttgttttcctgttagcatgattttcctcctagttgctgcaacacaattgatttcattttttccatattcggctcatgtcctgtccacagctcaaaagcaagggctgcctggccgatgaacatgccgactccgtccaatgttttcaagccttttgcttcagcctcatgcagcagggccgttttcagcggattgtagataatatcgcatacaaggcacgtttctttcgcattcgccaatgaaagcggggcagcttcgacattcggatgcatcccgaccgacgtcgtttgaatcacgatatcatatgctgacaagtctgcttccgcttcctgcagtgacaaggcgcgtgcctctccatcaaaacgctgagtgaatgctaatgccttttcaggcgtacgattcgccacatcaagccgcttgggcgtctcggctgccagagtggtaaatatcgccctcgccgcaccgcctgctccgatcaacagtatcgagagctcagaaagcggacgatcaagggatggcttcagcgatttaagaaaccctgctccatctgtattatatccgaccagcccttctttttctcttctgacagtgtttaccgccccgagagcttcggcgctttcatcaatacggtcgagatgcttcatgatcgatactttgtgggggacggtcacattaaacccttgaatgccaagggcccgcatacctttcacagcatcttcaagatcttcgttttccacgcgaaaagcgtgataatgcccttctaaagaaagatccttcaaagccgcattatggatgtccggagacatggaatgggccaccggattgccaatcagtccgtatatcggtttcataactctctccccttagcacttatattagagatctgcgcaaaaacacgtgaacgcctttaggggcgtgggcgacaattttttggtttgccccctggaccgttacccagccaaggcccgagaacacaacgtccgttttcggctctttaatcgtaaacgtatgtttgacaagcgccggaaacgagtcaagatcttcttttgcagggggagcaagcatttccccagcgtgcttttcatacagctgatccgcgttttcaagctttgttctatggatcttgagttcattcggcatatagcatacaaacgaagacctgcctccgcttgcataatcaaaccgcgataatccgccgaaaaacagcgtctgttcctcgttcagctgaaaggtgcgcggcttcagctccttcttcggcgtcaatattttcagatcgcgtttcgcgacatagtgcgccatttgatgatggttgatgattcccggcgtatcatacatcgcagatccatcatccagagggatttcaatcgcatcaagcgtcgtccccggatattgggatgtcgtgataatgtcgtcttctccggaaacctctttaataatccggttgatgaacgttgatttcccgacgttcgtacatccgacgacatacacgtccttgccttgtctgtaatgttcgatcgcgtcgatcgcatctttcatcccctgcccgcgcccggcgctgacgagcagcacatcaacaggccttaagccaagctctttcgcctcgcgcttcatccagtttacaaggcgctcgcgcttgactgatttagggagaatatctgctttgtttcctattaataagatcggattacctccgacaaagcggttcagtccgttgatccagcttccgttgaaatcaaagatgtcgacgattttcacgatgagtgaatccgtttccccgatgccgtgcagaatcttcaaaaagtcatcgtccgtcagtgaaacatcttgaatttcgttataatttttcaatctgaagcagcgctggcagatgacgtcttcttttaacagcgatgcttcaggcgcatagcccagtttatttttatcttcggtttgaatggcgactccgcatccgatacaaactaccttttccattcattattcctcccactgaatatggcctttccgttttagagcgctgagaattctgcgttcgacttggcggttgaaacgcgtaaaaaagccgtcggaagcagccacaggcacgacaagaatggtatggaacccgttgcggttccctccaagcacatctgtcatgagctgatctcctatgacaacgacgtcttcttttttaagacccatatttttaacggcttttctgaaagctctgcccatcggttttttcgctttgtaaataaacggaatattaagcggttcagaaaatattttgacgcgtttttcattattattagagacaattgtcactttaatcccgtgctctttcatctcttcaaaccactcgataagacgcggtgtagcactcggcctgtcccattctacaagcgtattgtccaaatctgtaataatcccttttacattgcgctcttttagtttttcaggggtaatatgaaaaatattttttacaaattcatccggcaaaaaaaacttttttaacacaaagccgcaccctttcctttcaattactacttcttttttcaatgtgtcgaatcaaatctaaaagtgtcttaaaaaatcggctgtccgaaaagttttcgacatataataggattcttcaacaggtgtggataaaattacacacagtatccactcatatttcatcgaccttttattaaattataaacatgatacccacaagttatccactttttggtgtggataacagaacgattgttctcgcccaatattcatgatagattataggtacttcaaacaaagatcatataacttaacattttatgcttattccaaacaggttattccaattttcatgaggaggtgtcttccccattaaatgggtaccgagtatgaaaaagctgtctgatgaacttttaatagaatcatacattaaagcaaatgagatgaatttgaaccgcgaattcatcgagctgattgaaaccgaaatcaaaagaaggtcgctcggtcatctgctttccgtctcttcatagctcaagtactcccgggcgctcttgccgctttttttcacttaggttgatattatatcacttgaataatacgcttactactgtttttcatgaaaaaacacctctctataaaagaggtgctatttgaagaatccgcgaggactaagccagtagaacccgccgatgaccagcaggacgactaaaaggacgacaacgaacgcatatccgtatgcggcgcctgcatatccgggataagccgggtacgaacacggaccagcgggaaaaggatatcccatcgcatcattcctcctttggtctgttatagtaacagcctatgaagaaaaaggagaaatggctaggccttttacttaaatcaagacgtttttatgattttgcttttgttaattccttcaaaaataattcgcgcgccttttggggttaagtgatttcccgatgggtcgataaacctcgaatggatcagcttctcatctgtagctccgcccgcttttttcacgatgtttttccagttgtcgataagcggaacatcaagttcccgcgccgtttcccttgtgacgtcattataggaatcgtgccatttacgcgctccaccgtatttttcaaacgaagaagcccggtatcttgcataataaaagatgttgtccccgcttccttcgacgatcggcaggcacgtcattaaaaccggctctatcccgcggcggcggctttctttaacaaaataataaaggttttctttaaacctttttttggatacgcgcggcagccctttcgtaagaattgctgcatcatttgttccgaacatgataaaaagatatgccggctgcttgtccagcacatccttcctgaaccgaaacctggcgtcttccgtcgtttctccgcctattcctgcattatttattttgtactgcccttgaagggaagtctgaagtaaattgacccacttttccgcttttggataatcgcgaaattgccaatttgagccgcgtgtattgctgtctccaaatgctacgacttttctgggatcgtcctctccgcagcctgaaagcagaagcagaaaaacgagaaccatcaccaagctttttttcattcgttccacctccaaaagccaatactacgatcatataggagagaagccgcactttcaacgggagaactctttgtcatcctgccgcatccagtccttgctatgcctttaacctgtcccccctgtttaaaacattcgtattggttcacggttttccgacaaataaagaataagttttgacaggtcgaaaacctaatttttcagcgaggcggatcgatgcgcggttttgccggtcgcaatcccaacgcggtttcaaacggttctttattgcatgtgcgataaaggcgctggcgcagctgactgcaaatccccgccccctgtaatccgggtgtgttgcgatatcaacttcggcaaagcgttccgaacaaaaaatggtgacacattcgcttgcgaccacacctccatgcaacactttaaacccgaaaccgttcttcaaaaaacggctggcccctccccaatactcatcagcgtatttttcagtaaaattcgcgcttttttgaaggtcatcttcagtaaatctttcaaccccggcaaatgctgcgccgcaatcacgctcctcttttccgaggaaaaatgacacgcgctccatttgctgcagaggatcgccaagccccccgattaaaaaagcgtcccactcttcagaagccgaaaacacggtaaagcgcgctccgctcctctgttcatttaaataatggagccactcgcttcttccgctgtccggagggtttccagcgacataataaatcccggaagatgttcgaaaaagagcagtggccggtgtgaggaaatcatcgacatagacgtttccttcgatgattccttcggctatcgcatgcgcgaatgtcgggctttcttccgctaacaaagcctttgcttttcgtttttcactcgatttcagttcaatcatcatgactccccctcgaacttgagacagatcatcaagccccgccggctgattcggcgacgccttcaatattgcggtcaaagataaaaacagacactgcaatatcctcctgaattttgatgtccgtaaaaaggtgctctagcttcgctccgataagctcctccattccttccggcacgtgattggagtagtgtttctgaatcagggtcgtccttgccgcatgcaccatttcccttccctccggcgtgcttgcgataaactgctcgctcgccgtcaaattgccgtacagtgtcgaaactgccatattgtcgacaaagaccgttcgtatccgttcaggccccttgccaaacagctcttttcgaagcttgcgaatcatatcgttgaattcatggatttttttagacatcatgcataccccttccgtttaaaaccttacacctgtctcgatgtccccttagacatttcacttggttaaaattttcctattctattgaattataatcaatatcactttataattaaagccgggctgatggatttgtaataccgtcgtgttatgaatctatcgaatctgacaatataggattggtctgttagtaagctttgctagtaaactattccgccatgtatgtttataccgctttcccgcgccggaaatcggtatatatgtacatggcttttttgattttgaacatgatggagggaaatgaagatggacggaaagccaatcagtgtccggatagacggcaaagaatttgaagcagtggccggggcaaccgttttagatatattgaacaaaaacgggtttgaacacccgcaaatatgccatgtaccagagacggatcctattcaaacgtgtgatacgtgtattgtggaagcagacggaaaattaaaacgggcatgctccctgcgggctgaagacggaatgacgatcagcctgtcagcagaacgggtcaaagctgcacaaaaagaagcaatggaccgcctgctcgaaaatcatttgctctattgtacggtatgcgacaacaacaacgggaactgtaagctacataatacggcagaaatgatgggaatcgaagaccagaaatacccttacacgcctaaagaagacccgtcttgcgccgtcgatatgtcacaccccttttaccgctatgatccgaatcagtgcattgcttgcggacaatgtgttgaagtttgccaaaacctgcaggtcaatgagacgctctcgattgactgggagcttgaacggccgcgggtaatctgggatgaaggcgtatcaatcaacgaatcctcatgcgtcagctgcgggcagtgtgtcacggtctgtccgtgcaatgcgttaatggaaaaatcaatgcttggaaaagccggtttcatgacaggcatcaaaccggatgtcatggagccgatgatcgaccttgtcaaagatgtagagccgggatacagcagcatctttgccgtttcagaagtcgaggcggcgatgcgttcacagcggaccaaaaagacaaaaaccgtctgtacgttctgcggtgtcggctgttcatttgaagtatggacaaaaggccgtgacatcttaaaaattcagccggtttcagaagctccagtcaatgccatctcgacgtgtgtgaaagggaaattcggatgggatttcgtcaattcggaagaacgtttaaccaaaccgctgatccgcaaaaataacgaatttgtcgaatcgacttgggaagaagcgcttgactacgttgcccgcagattaggctcgattcgggagcagaacggaaaagacgcagtcggatttatttcgtcttcaaaaatcacgaatgaagaaaactacttaatgcaaaagctggcgcggcaagtatttggcactaacaatgtcgacaactgctcgcgctactgccagtctccggcaacagacggattgttccgcacggtcggcatgggcggcgatgcaggcaccattcaagacatcgcgaaagcaggcctcgtcatcatcgtcggcgccaacccggccgaaggccacccggtactggcgacccgcgtgaagcgcgcccataagcttcacggacaaaagctgatcgtcgccgatcttcgcaaaaacgaaatggccgaacgctcggatctgttcatcagaccgcggcaaggaactgatcaagtatggctgatggccgtgacaaagtatatgatcgaccagggctggcacgatcaggcgtttatcgatgaaaacgtcaatttctttgaggaatataagcaatctcttgagacatacacccttgaatatgcagaaaaaattacaggcatccataaacagacgctgattcaaatcgctgagatgatccgcgacgccgacggtacatgcattctttggggaatgggggtcacccaaaacacgggcggttccgacacgtccgcagcgatttcaaacctgcttttagctaccgggaattaccgccgcccgggcgcaggagcttacccgctccgcggccacaacaatgtccagggcgcctgcgacatggggacgcttcccggctggcttccgggatatcagcacattacagatgacaaagcgcggaaaaagttcgaacaagcttacggcacaacaatcgacgaggagcccggacttgacaacattgaaatgcttcacgccgttgaagaaggcaaaatgaaagccatgtatatcgtcggagaagatatggctttagtcgattcaaacgcaaaccgggtccatgacattttatcaagccttgaattccttgtggttcaggatgtgttcctttcgaaaacagctcaatacgccgacgtcgttctgcctgcgtcagcttctcttgaaaaagatggaacttttacaaacacggaaagacgtgtccagcggttgtatcaggcgctcccgccgctcggagatgcgaagccggactgggttatcattcaagacatcgcaaaccggcttggagctgactggagttacagccaccctggcgacattttttcagaaatggtaagcctgtctccgctgttctccaaggcggattatgacgcaattgaaggatggaacagcttcctgtggggcagcttgaccggagaaagcacgcctcttttgtatgaagacggctttaactttcctgaccggaaagcgcgctttgccatcgcagactgggcagagcccgccgaatttcctgaggagtacgaccttcacattaacaacggccgaatgctggagcattttcacgaaggcaatatgacaaacaaatcggcaggcatccaggcaaaagtgccggacgtctttgtggaagtctcgcctgagctcgccaaagaacggggcatctgcgacggatcgcaggtcaggctgatctcgccgtttggcgccgtaaaattaacggcgcttgtgacagaccgggtcagagcgaacgaactttatctgccgatgaactcgacagataaagaatcggcgatcaatttcttgaccggtcccgcagtagatgcgcgcaccaatacaccggcttacaagcagaccaaggttcgtatggaagtgctcggcggatgtgcagaaccgccgcttccgaaaacaaatccgcgcaataagaaacgccatccgcaaaacggggctgaagtcgagcggaaatggaagcgtccggggtacgttcatttaacagactaaatcaaaaggaggtcatcacacatggcagctcccatcaccgccatccgcaaagaagaaaaatctgaggagcaaataaagcttgaaaaactcgaagaactcaaagcccttttggctgaacaggaagccgccgtttcaaaaacgatgaagcttctcggcgaactgaacggcctcgggatccttgatgccgcagacagcatgatcggcgcgaaggaagacatcgccaaaatcgtcctcggccagctgtccaaagagccggccaaaaacctgatgaatacagccattgcagcaggcggcgctctctccaaagccgaaccggaagtcatggggaaacttgtagaaagcatcgtcgccggcacaaaacaaggagaggactttttaaaaagcgataaaaaaaccggagtcctcgatctgctgaaagccatgaacgatccggacatcaaccgggccgtcggcttcggcctgcaatttttaaaaggcatgggaaaagcgctgaaagaataacaaataagaaaaccggctcaccactttgagccggttttcctattggcgatagaagcaccgtcgctttctgtcgcctcatttgctgtgtgtttcatcttttttattcagcgattcttttaaaatattaaaaactgccgccgcaataacgacagtcattaaccctgtcgtcagcaggtttgggaaggtttcctgaactccgatcatgaccacgctcaacacaatcaacgaaagtatgaacagacgtttgtttttcatctgccgcaccggaccggctggttgatagcgtttacgatatggtgaaccgtccggcaccctcacccccttacctttattatcccgctcttgttaacttttgtaaacggctaaaaaatggaagcgattgcaacggtcgccctttccggcgaaaacaagcggcttcatgccgaacagaacgccggaatatttggcagtccggcaattttgccgggtacagacacagacatcccccctcccacatacatttacatataggcttctgcctacatacattttgtggaggtgccgttaatgacaggtgtttttgcagcgctcggttatgtcatcaaggaactcgtttttttagtatcatatgtgaaaaacaatgcctttccacaaccgctgtcaagcagtgacgaaaaaaagtacttggagctgatggcccagggggatgaacacgcgagaaacatgctgatcgaacataacctccggctggtcgcccacatcgtcaaaaaattcgaaaacacaggcgaggatgcagaagacctgatttccatcggaacgatcgggctgatcaaagcaatcgaaagctattcagccggaaaaggaactaagctcgccacttatgcggcgcgttgtatagaaaacgagatcctcatgcatttgcgcgcattgaaaaaaacgaaaaaagacgtctcactccatgacccgatcggccaggacaaagaaggcaacgaaatttctctcctcgatgtcctgaaagcggaaaacgaagacgtcatcgacaccatccagctcaacatggagcttgaaaaagtcaaaaaatacatcgacatcttggacggcagagaaaaagaagtcatcgtcggcagatttggccttgatttgaagaaagagaagacgcagcgcgaaatcgcgaaagagctcgggatttcgcggagctatgtgtcgcggattgagaaacgggcgctgatgaagatgtttcatgagttttatcgggctgagaaggaaaagctgaagaagacgaagaggaagtgaaattcatttattgtgtttcgattctaattcagaaaatgtaagtgggggatgctttaaaaactcccccacttctaaccacttttaagcctgttaaaaagtaacgtttgaaccaaccaccacactaacagtatggtaagtttcactcaagcaggaacattgccaacacaaaaatgttagctaatctaaattaatttttatatggtgagggggatactctaatcgagttcttcccattatttttaaggataacgggttaaatttaaaagtattatagcacctctcccccaaaataataggctttaacattgctaaaggtcaattgagtttggtttagaaaacttatttgacctttatgaaattagtcatcatcaagcccttaaccctgtactgagacagcccactgtcatcgatcgaagccggttttcgtttcattttcagttctcattttgataactgcaggaaatagactggcctgcctatctagctgcagctaacttaggagataacctcctctctttgcccatcgaaccacttagcttgggtcatatacatattataatattcaccctttaacgccataagctctttgtggctgccttcttctaaaatctgaccatcttttaaatgaataattcgatctgccatcttaaccgaagctaatcgatgtgaaataaaaatagctgttttattctcggtcaattctctaaatttctcaaagacataggcctctgttttaggatctagagcagcagttggctcatccagtattatcaattttgattttttgaaaattgatctagcaagagctatccgctgccactgacctcctgagatatcaatactattcgggagaacttttcccaaagtcgtatcataaccgttaggcaatgcctctataaagctgtctgctccgcttaaaaatgcagtctgtttaatttcatttagattgtctatttgactaatatcgcttaaagcaatatattttctttaactgacaaggcatatctaacaaagtcttggaaaacaacgctaacatactcacttaactcattttcgtctatttggcataaatcttttccttctaaaaagatgtttccggcagtgggtttatatagaccgataatcaattgaatcaatgtagtttttcctgaaccattatgacctacaatcgcaactttttctttatcctttatttccaaattaatgtccttcagagagtaaccattgcttagtggatatttaaagtaaacatgcttaagtgagatatttgctgtatccgatttatttgcaatatttttttctaacttttctttttttgcatcatcttcattttgatattcaataaaatcaaagaagtcttttatttaaagattgctttcgaaaagggaagctaataaatgtgatgtttggttaacagttccttgtagtccctgaattgcttgtgctgttgatacaaagcttcctatattcatttttcctaatttcaacagccagaccattaaaactgcagacatggaataaagaacagcggtcagagagtccaatcctatgtttgcccaattttgtttaaaaaagagctttaagatttttttattgtttgatgtggtgagcttcctccatctattaattaaaaagttccctgatctaaataatttgatctctttaatgctttgtttgtttctaaataaggaattgatatagctcgcttctctcattaatccggattggagcctatttaaattgaaatttgagtaaccaaacttgtactggatgatgaaggcaggaattgaagctaggatccctaagaccacaagtccccaatgaataaagaacaaaaagcctatatacgaaacaattgttatacataattgcagtacatgcatagagttgctgatcggccttaaaaaactgtgcccatagttgttaatcctaaattgatggttataaaactcaggcatgtcaaaataaaaaaagggggaattcaaggatttttcaatgatcatgtttcccaacttaagattcaattttaattccatatccttgtctaatacattcattatatgaacacaagaagacctagatatcataattattaattgtataaataataagaagactaatgttaaaacgttgtcttttttgtctattatgatacttgctgtttcgttaacaagtctagtaagtatccataattcacatacaggaaacaatccattcaagatacgaataaatagagaaccaaaaatccatagcttattagttttgaaaattaaatgaaaagatttcaaaaagtatgtaatcacaattttaacctcttaagagaggatcggattaatacccgaccccctttattttacgcgaagtacccacatccacaatgctgtttataaggcactctatctggtccattacaatattctattgtagcttgtcttcctggtccacaagtgttagtggagcaataaatataccagcagtctgcatcttgaggtgcaaaatcaagattaagttcttcgttctccattttttcaccccctttcaagttctgaatatcttaagatattttttttacttgtaacatagatactaaaaagtcaatatcttttttataatttatcaaacccttttcgatgacttttccttcatttgaaattaagtaagaaaaaggaaaaccggttattccaagggtatgtaagtgttcatggtcgattattgatactgaccaatcttctaaattatataaagatatagtttcttgtgcctgtttcttgttcgctaacattattagttcaaattgtattttgggatactctttcttaagtaattcaagaaatgggtaaactctcttacaaccactacatccatatgaagtgaagatcaatataactcctcgtgtcttttttgagatagtcacttcttgccccacaatcgtttttaatgtggtgattgggtaagtttctcctttcggtagtccttcgtcactttttaataatccctgttgcttctttgttcttagcatattcctataaagttgcagtaccaagaatgcaactgttataactaaaaaagacagggagatcattagaattgtttcactcaatatttattcctcctcatatacattaaatgtatgtaagtattaattaaaaagtatgtaagcatgacagcaatacttgataagaatagatttagagtcgtattaagaggaacgagttcaatacctatttgggaccttctaaaaaaaattagagttcccagtaacagacctaaaactgttatacgataatatgaaaccttgtcaccaagaaattcttcacttagtttcccaaaacaattgcatttgattttctgctttttaaattgaaccaatagattgcttattaagaatgccagcaataacatcaaaatgatcacttcaccaaaaagcttggtagtattaaatgctattgttatcgctgctaacgcctctaagataaggaaaaagtatgcggaaatttttgcaacaaaaagattgcttattatggaagagactgtttcgatgaaaccgctaatgtttttcaatttaacgataaaagagattgagaacattacactaaagaaacattgtatgaaaaaaattaactccatccaatcccaccctttcagcaaagaattaagttctttgtattcatttcttcaagactacaaaaaatctttttttttcatataaaaaaaataaaagggaaatttggttcgaaaagggttgttttttgaaacttgtctatttatgattctattccctcttactctttcatatacttacaaggaaatcgttttttaggaggggcattatgaaaagaaagggaaaaaagagatatgtcttcctttatattcaagcagggattttatcctttgttggtttgtttataatcataggattgatgacaacgtttctttcaattagaatctcagcggactttatgaatactgcattaaaagaaaccgattctcaaaaggtttttcgctattttctagccagtgaaaataaatattttgcagcaaatcaaaatccattagaggacatttcaataactaagttagcttttcaattaatgaccaatgtaaaaccagatgactacagaaccttcttaggaaaagaaattccggggttttcagaatttgatacgaaaattgaagtcgctggacaagggacagatttcactactctacctgaagagtcttcacccccaatggaagtattgctaaaagaaaaagaaatttcacaagaaatgttgacagaggatagtaaagaaaataaagattcgaacccaaaaccttctcagaccactaacggaagaaaagttgtttacctttatcatactcacagctgggaatccttccttcctcttcttaagaatgcaaatacgccagatgatgcagttagttctgatgaaagagttaatgttataggggtggggaaaaaattaaaacaaaacctagaaagtaaaggaattggtgttgaacaaagtactgtaaatgcaactgaaaaacttcataatagaggatggaacgccaatcaatcatatcgctattcccgttcacttgttaaagaagcaactgcaacaaataaagatttaacatatgcaatcgatattcatagagatgcacttagaaaagagaaaactacgattaatatacaaggtaagagttatgctcgcttggtttttgttataggcaaagcaaatcctaactacgaagaaaatctagaatttgcaaaaaaacttcataaagaactagaaaaaaaataccctggaataagcagaggtgtactagcgaaagggagagatgctgggaatggcctttataatcaagatttgtccaagcactctattttattagaagctggtggagtagataacaatatgcaagagctagacaattcaatggaggcttttgcaggcgttttttctgattatttctggaaacagaacgatgctgaaaaatattgagctgaaagggatggatgatcttgaaacaaaaaagcccacctttaatttggttaatttacacctttatcagtacttttttttcttacttcctttttgattggaaaattacgattggtttttttatagctggtgtcttaatgggggggctttgtttagccgaaaatttcttaaaagaataaatactttgtgtcccatctattaccttgacactctctctgttttggtcaattaagtcctggttagaaaacttaattgacctttctgaaattgaacagctatcaactccttttattcaacacaagtgaatcagccctatacttggataagagctttagaagagagtgcttgattcgatcccgataatgttatctacttataatacatctttaatctgtaaggctcatagatctcactttaaggtatcaatataatggaatgtccagtcaactcttttatcttctctctcttctgataaaagaaaaattgcaaaagtttattctcttccattgcataacggattactttattattgagttcgtcatatttttgttaatctaaaatcggctttttcaccttacaagaccttcatgatattctttgagcaattcaacgtgttccggtaacatcattgatacccatttgatacccctctgtcccgcagcatacacaattttcctttctagcttaaatctaaatcgtgcggttcaggcgtttgtataagaatcgtgtagaagtgctgacgatccgtaccgttttctgaaaccgcccataacgtacccacgtattcgctttttcttgatcagggcgaaatagatcgaacttgattaagttgtctcccgaatattggaaagagaaaccgggatttctttgtttcacatctcggcatgcgttaagacagagttttgccagcagcgtatcagttcaattccaacagttcatggcacaccaaattatcttttcatgtcatgtttgattttcaactcaattgtttgtgcgtttgcccatatattttcaagatggtttactttcatcgatactatacgtgtgaatagcatcatgggggacataccaaatacgtatgtatgttttttaaaaaatacgttaaactcaaaaattctttattgctttaatgcaacaaaaacggataacctgcgagtggcattgaaatcagcctcattgatgtcctcaaatcagaaaacgaagacgtcatcgacaccatccagctcaacatggagcttgaaaaagtcaaaaaatacatcgacatccttgacggcagagaaaaagaagtcatcgtcggccgcttcggccttgatttgaagaaagaaaaaacgcagcgcgaaattgcgaaagagcttgggatttcgcggagctatgtgtcgcggattgagaagcgcgcgctgatgaagatgtttcatgagttttaccgggcggagaaggagaaaaggaagaaggcgaaggggaagtgagatcgatgaagaggctcggaattatataaacccggcctctttttatgcgagctaatttggctgggtaacgggcgcgtcttctgcttgatgaagtttccccgtatggaataaatcagccaattttgaatgctcttggagcgtgtaaacttcaccagtgagcatttgtttatttggcttttttatgtgtgggacgaagattatggcaaggacaattgtagaaactaagaacccggcatgataaccttttaagctattcgcaatcgttggttgcaatccttccatgacagttgcgccaacggttgcgatcacagctgaaccgaagcttgaaccagggttttcaatattattaataccgacacctgcttctggaagttgttttctgtcaagccctgtataagcgtcactcgccaacggaagatttcccccgatactggtgcagcggatgaacaatacgatggaaatccagatcaaacttgttttatcggtgattaagataagcggaaaaacaagactgatcataaccacggatttcgcaccaatcttatcaatcatttttccgatcattggcctggtaacgagcatcccgattcccaaagcaaccaaacagatttttttatttcatctgcctacctttaggggagcatataataacacgtagatcattttataacaaaaaaccatttatatccgtccagccgatagcaatagctttgaaataatcttcaccgaattgtatttgttttgttgtgctctgccttccacctagcttttcataaaaatttatcgatggattaccggctaaaacccataccaataatgattttatgtttttctttacaagctcctctacaatcgccttcattagtcgagatccgattccttttttctgatactgtaacaacagataaatcgcggaaacttcacccttatatttgctaagatgatcgcggtttggacctccggaagcaaagcctataattttaccgtcggtttcttctgcaacatagacaatatcttgatttttaggatcacttaatgaagttctccaaagctttgcctgattttcgacagaaagcttagataacgtgtcatcaggcaatactccttgatatgtggttttccaactttccacatgaactttggcaattgaattagcgtctgacactttggcttttcttattaaaatcattttccctcctataattaatatttttcttaaagaggatatcgcaaatatcggcggcttctcttaaatggttaaaatctgaatatatcttttatcttttattggattacatcgaaggtctaggggtattgttttgaagaaggcctcgccttacacctggcaattcttcaatcaaattacttctaggaactagagcttcctgaggtatatctcccccaaaattctgggagattacatttatattttattagcttccctgaattgatataataagcaacattggtttcggggtcttgaattaaaatgctaatttccattgattcctcaacaggagttatctctatcagttcttgcaataactcttcattcgaacagctaatgaagttatggtcaaaactgtttgttttactctgctcgcaggaacccttgtctatacctgtcaaagaaattgccgctccaaccaaagtgcctgccgaaacgttatttgttatagtccccttgtacttctttgtatgctgacaagcctcattcaaattctttttttgattctaatattacaccgtttaataagttcatgcccgttgacggagtcataaaacaagcacctgcaaaaaaagtgctactctcccacttgaatatacaaatcattaccttttattttataaaaaggagttttttacgcaatacttttgtcaattccaattctctaaagtcaataaatcgcttttggtatgtaacatgctattgtaaaactctttttatctgaacttttcacctgaattccaaacagtaacctatgggccgccacgaaaccagtctcatcgatgtcctcgggatcagaaaacgaagacgtcatcgacaccatccagctcaggcacaggcctgaaaaagtcaaaaaatacaacgacatcctcgacgtcagagaaaaagaagtcatcgccggcgcctcagccttgatttgaagaaaaaaacgcagcgcgagatcgcgaaggagctcgggatttcgcgctgcgatgtgtcccggattgaaaagcgcgcattgttcaagatgtttcatgagttttaccaggcggagaaggggaaggggaaatgatgtcatggaagccggcctaaaacaccggcttccatttctttctgcaaggcccttaataaagcttgttatccaattacagaggcctgttgaagttacttttaattttcttctgagtttatttgtgttgctataatgttcataacatttttcataaatttctcttttgtgaatgaagcagtccctccaccttgagcgaacattttatttcccccaccttttccatcaataagggaaagagcttcttgcattaggtctctcatgttcattttatttgcttcacctcgcccgcaaaccaattggaagcgatgatcgttctctgacaagaaaaaaataagggcccatttttctcgatcagcaatcatttttgctagcttttgaagttcttgaatcgatcgatctgaaaacgtttctatcaccattacagtatcattttgaattgcgctttttgctaataattcattggcttcatactgaaggtttttttcataagattctagaagcgctttgtctagcttctttacattttcaagcaaccgtttgacagcttcgcttaattccccttcaggacgattaagtaatccagtcaattcaacgattgctttttgtttttgatcgaattgggttatgacccgattaccgcatacaaaatacagacgaatttttttcctctgtctttcccaattcaatacttttattgctccgacttctcctgtagcgctcgggtgtgttccgccgcatccgttgtaatcaaattcatcaatcatgacaagacgaatattttcttttacagatgggagtttacgaatcggataatttactaagtcatcatattctacccactttgcgactatggacctattttccgttatgatctcgtttgcaagcttctctgctttgcctgccatttcctctgttaattctgatacatcaaggtcaatggtaaccgtatcatttccaagatggaatccaactgtatgaagatcatacagctgcgcgaatgccgccgacaaaatatgctgcccggtgtgctgttgcatgtgatcaaaacgccgctcccaatcaataaccccaacaacctgatcatttaaatgcggcaaaggcctttctacataatgacgaatttctccatctatctcatcaacgtttaaaactttgactccgttcaatgttcctgtatcatgaggctggtccccgcctgttggataaaaggctgtttcctctaggataatataaacatcaccttttttgtcctgttgttgtttcaagattttcgtttcaaacgtttttagatagggatctttgtaaaatagtttgtgatgattcggactcatgccatctccccttattttttaaattattgaagtcttcctctagcttcaatatttaattcatctacaacctctccattatcgactaaataggctttatcgtgcaagttgcatactgggcagatatgatttggaataattcgcaccttatctccaatgcttacttttttgttgaattcttcatgataaataatagcatgttcgtcgaatacgccatgaatataaacgtcctcgtattctttgatacggccaagccctttggttgcagtaagcccttcgcttcgtgtttgggcggtaattcccttggcccctacgtctgtaatgactcgttcttttgttggtttactaatcacggttgtgagtacagaagcagcacagcgatcatacgtaccaattacatttgcttgtgaggcgtccataaaaatgtaagtgccaggtctgatttctgtcaccccttctggaatatcaaacttaaacatgaagggaggagtagagccaatactaaccactttcggctttagatccatttcttccgcaattcgggcgaaatgtaatgttcgttctacactttctttatagagttctttacaatgggctacacttttcgctttataagaatgtccgtcatgtgagaagattccttttagctcgacattttgacacgttttgattaattctaataaagtacgaaaatcatcttcttcaataattccggagcgttgttctcctacttcaatttccaccaacacttgggctttctttgaagctccttcaaatacttcttcaatttcacgtacttgatacgcactatcgattccaaaagagatatcaatcgtttcagatagttttctaatacgttcaagctttgatttcccaacaatttcatttgcgataaagatatcttttaagccatttctcgccatcacttcagcttctcctactttcgctacagcgattcctacagctcccatctcttcttgcagtttagctaatttaggcattttatgtgtttttgtatgagggcgtaagcttaccttctgttcgttagcgtaattttgcatatccttcatattgcttaacatcacgtctttatcgattaaaagagctggtgtatctaattgtaaatcattcattgtgcctcctcctttatcgctgcaatggcttcaacttcaacaagacacccggcatataaatgatttgatggaacaactactcttgccggtttatgattgccgaagaaatgagcatagacctcattgatatccggccaatactttacatctggggtataaagtctgcataatatcacatcttccttggctaatccccgttccttgaggacaagctccatatttgccaatgcctgttttgcttcttcttttatgcccccagctggaatttttcccgtttctggattcatcgacaactgccctgaaatatagagaacatcattgtgttccatagctggcacgtaatggcccccatcccgtgttgaatacttcgtgtgtacaggcttcaatataatctccccctattattcttaatatttaaagctagcctcatcaatcttctgtccagcagccagcaaaacagcgagtttgatccttgctttcttactgtcatagctgccgccaagtatgattccggcatctgcatatgttgaagcacttcctttgaatccatatactcccttgacttcaccttcgtgagcacttgttgtcagaacgacaggaatccctttctctgcggctttctttgcactttctaatattgctggagccgtatgccctcttcccggcgcctcaataatgattcctgcacttccgtacttaactgcataatctataaactttccgtctgatccaagtgaacacttaataagttccacatttggtaatggttgaatcagctgatacgtctcacgcttgattaatctttgatgaattgcgatctcatcttgatcggcagttcccaaataaccgaatcccggtgagaaaaaaccatcaacatttgacgcatgctgttttttcacatatcgagcagcaaaaaccctctcattaaacaacactgttacccctaagcctcgcgcatcaggatgtgccgctaataagaaagcttgtcttaggttcacaaacgcatctgtaccttcaagtgtcggtcctctttgcgaccccgttaacacgaccggcctttcatcagaaataaccagatcaaggaaatacgaagtctcttcaagggtatctgttccatgcgatatcacaattccggcaacatcctcattccggaagaaactctctatattttgcttgagaatgtcaaggtgatgaaaagtcatatgactgcttgacatttaaaagactgacttgatttcaatctctatatgagaaggcagtcgacacatttcagaaagctcttcacctgtcatagcacctgcttctaatagacctgtttcaggatcaggcttacttgcaattgtaccgccggtactcagcaaaatgattttcttgttttccatgctaactcccccattttcatattaaaggtttctctcttagttcctaattagatttaatcccagccccgcataatggaatcgcgattttttcatcagaagaatgactgtattttaaatatcctgcatagttagccgctgttgttggctcaacataaaagcctttacttgctaatgctgtacgagcttttagaatctcttcctcattggttgtaatgatttgaccgtttgtggcacggatggtttctaatatttgagcagatcttgccggtttggcaatcgcgatgccctctgcaagtgttccgctgcttttgacgggttcagcagctttttgattgttgataaatgcctttgccaacggcgcacaattctctgcctgtatcgcaaccagccttggcattttgtctatacatttgttctctaataactctttaaatccatagtaaaccccaagcaataacgtaccattgccaactggaataataagcgtatccggcgctccattcatttgttcccaaatctcaaaggcatacgtttttgttccttcatagaaatatggattaaaaacgtgactggcatagaattttttctctatatccacagccttttgcgctgcttcagccacatcttctcttgtgccttcaatttcgcgaacgttggctccatgcgctttcgcctgcgcgattttcttaggcgatgtaccctttcgaagaaagatgtcacatgcgatttcagcccgcttggcgtaagctgcaatagatgtccctgcatttccgctgctgtcggcgatcacatgcttcactcccagctcctttgccttagctattaatacagccgcaccgcgatctttaaaagacaaagtaggcatcatatagtccactttcacaagagtattcggctccccgctgtctaacacgattaaaggcgtgtatccctcccccatggtgatgccgctccatatggcggagtcgcgatcaaatggcatagcttcaatatatctccacatagaaggaatatctttgagcacttttgaatcggaccattctactttttcttttacaaggtctaacactccgccacactggcatttccacacctgttcagacacattgtatttcgtacggcaagaatgacattgatactgttccattatttttagaccctcctattatatatttttttatattttatatatttttttatatgttttagacaaaaaaatatattacagactggcgattgcttcaatttcaacctgaaaaccgtaatgcagctcggtcgtcgaaacaactgaccgtgctgggcgataatcgtgaaaaaaaccctgacagacattgtcaacacggtctaacaaattgatatcgtgaagatataaggttatctttaaaatttttcctttatgactgccggctttttttaagatatactctatatttgacaatacctgcaaagtctcttcttcaatggtgccaaatttcttttcctgcgtgattggatcaatggcaaattgccctgatacatagaccgtgttttgatgaatcacagctaaggcataatgaccgttcgattttaaattccctgcctcaaaaatactctccactttgttcactccgattgtcttttttttacttcatctaaatagctgtagacagttacctttgaaatgcctaattgttctgccactttatcaaccgcacctttcatgaggaatatccccttttcatccataaacctgatcagctcgattttttcccggcgtttcatcatagagtgtttgcggttcgctacaatttgttcaattaactggttcgtgatctcttctacattctgaatcgaagcttcctgctccgccgtattcgaagtttgtatttgatttttcttttcaacaccaggcataaatgcatctaacatttctttcatttgaatcattacattcatgtcgtaattgatgcaaaaagccccaatcacctgctgctggccatctctaatgagggtagtcgatgattttattgttctcccatcatctgcttggatttcatatccagctaagtaatcctctttaaattcattggataaaagaacttttttcaccaaatggtcaaaggattggccaacctctcttcctgttacatgattgttgattgtgaaaatgacggaagactcgggggttgtcaaatcatgaatgacaacctcacaatttggaccaaacatttcccctatcgtttttgcaaatggtatgtaactttttaaaacctgttttgcttcagtcaaaacctgaacacctaactttcatttacccgcatttatctcaagtgatttcattcatggattcattatataattttttatacaaaaatgaaacaaaaatatatttttttatacacagaattgatcattcattaccttcagtttgtatctttttattttgtcatcaaacaggaactatttagatattgttcggtatctttttagttcagtccctcaacctattaaaacctgtgagtggcattgaaatcagcctcattgatgccctcaggatcggaaaacgaagacgtcatcgacaccatccagctcaacatggagcttgaaaaagtcaaaaaatacatcgacatcctggacggcagagaaaaagaagtttattgccggccgctttagccttgatttgaagaaagaaaaaacgcagcgggaaattgcgaaggagctcgggatttcacggagctatgtgtcgcggatagagaagcgggcgctgatgaaggtgtttcacgagttttaccgggagaagaaggagctttttcctaatttggaatataaaaagaccgcaaagctttcttaaagaaacgttgcggtctttgggtctctttcttgcttagtataaagtcaatggatttccagcgcgaatccagtggacatacatccattgattggcttcccctgctcgagtgaatgtggagaaacctgaatatgtcaatcagcttcggaattaaatgcgtgttgatgctcctctgcttgactatttaatatgcgatagctggaccctccaatatgaagcggaacatccaatttttctaaattcggcatgccgttttttaagaaaagctctttatcttgatatctctgtaaaacttctcccgcaatccactcttgatcgcccaaagtggaaatactgtgtactttacactcataagcaaaatatgcatcagttaaaatcggtacctcggcttttagcccttcttcgtattgaatatgaaatgcttcaaacttattgatatctctgccgctgtgggtgcctaatgcttgaattaattccgagcatctccccggaagaaaattcacaccgaaaacgccacttttctcaatcaatttgtaagtaaatgtctctttatttaacgatatcccatacattccgggagaagatccgatatacgtatgccacccggaggccatggcgtttttttcaccttcatattgagccgtaacgacagctaccatgccgggataggcgtaccaaatgggttcatcaatcggtgctctcatctccaccgctccttttagattcattttttattaaaatttgagaggctcgcatctggatcgacatgttctcttcaaaaggaccgttcgttttagctgcaagccagtttaataaatgggctcacagcaggctgtttccgacttgccattgccggcatgagtaaacgaagtgtcttattttctgccaattatacacccttcctttcaaatattcataagaacgatgcataaatgataaaccctatagcaactatagggtcaaggggttcgttattttttcagcactctgaattctgtgaggaagtcttcttcttttaatgagttatagctgtttggaaaagaaacttgatatacttttccatccgtttgaatgccatgagattcaataaaatggtacagtttttgatagtatgaaaaataatttgttgaagagcaatcaaatgaaatacacacatattcaccggatgggatcgtatctatcccaatattttgttcgtctgtatctatctttgctccttcataaatcgtcgtataaacactgttgcaataaatgtcacctgaatttttataaggctttaaatcataaatcagtccataatagttatcgaccatatctcctctttcttccaggacttcagccagttttcggtaatacaaatctgattggtcatgaggattcacttgaggtgtcgctgcttttaaaatggtttggccttctatatgccgaacatacaccagaccttcttcttttttagcgcgtatctccaattgttcatgaagctggtcctttcttctttgaagcaattgcctggcacgttcgagtctttccatttcacgctcaatcacgttttcttgctcctccagaaaggtttgcatcagttcaggggcagatgtatgtgagataatgcgcttaatttcttccaaaggcgttttaatggatttgagatattttataatatccaaataaaagaactgtttaacatggtaatatcgatagccgttatcccggtctgtacattgaggcttgaaaattccgatcttatcataatagcgcaatgtttgaatggaaatgttatttagacgggctgtttccccgattgaaaaatattccttcatgaatcccatcctttcttcttagttctaagaattatccttcctctccacaattaccttcaaaaagtgaaaaatcacatcaacatcttggacggacggaaaaaagtcatcgacagccgtttcggccttgatccgaagaaagagaaaacgcgaagaagcgggcgctgcggatatgtttcagaagtgtgatcagacggagaaggaaaagcggaaacactatcagtcaagaggccgggagtaagacatagcggcctcttgactttttattccatgcgcttgagcagagaaattttctttcattttaattcgctgcaaggggttgaaatggcaagcccgtctttctgccattggacaatgccgccgcttaaactcaatacttgtttgaaactaccgttagcttgcaggatgctggctcctattgcagatcgggctccggaatggcattgcacaagaatcggacagtcttttctaatttcatcgagccgttctgggagcgttcccagcatgatgtgttgcgcattcggaatgtgaccttcctgccattcagtcagattgcgaacatcaagcacttgcacgaagccgtcttccactaattttgcgatctcacgtggtgtgatctcagcgtacgattcaagtgaaaaagcaccgtctgccaagattttgtcacgatcgataaaccctgccgcgttgtcaatgcctacggagcgcagcgcttccaggagttcgttcacttctgccggattcgcgattaagtacacaggacgattgtagtcgatgagccagcctgcccagtttgtaaaccccttgttgaatggaatgttgatcgtgcctttgaggtgcccttcagcaaattcccgggaggagcgggtatccacaatttgctctttcccctgcaaatctttcacttgttcaatcgacataatctctaaaacggcagaaagatctttgagcaatgcagggccttctttattcactcgtttcatctcagcaaaatacttcggcggttctggttgtccatcaagcaaggcatttacgaattcctcttcatcggtgtaagccattgcccagttaaacatcttttcgtagccgacagtcgtagttggaatggctcccaatgccttgccgcaagcgctccctgcgccgtgagccggccaaacctgcaagtaatccgggagctgtttaaacttcatgagggacttgaacatcgctcttgcccccgactctgacgttcccttaatccccgccgccttttcaagcaaatcgggtctgccgatgtcgcctgcaaagacgaaatctccagtaaagatgccgattggacgatccgcatttcctccgccgtccgtcaacaggaaagaaatgctttccggggtatggccgggagtatgcataacctcaaacatcaggttaccaatggaaaagcgatcgccgtctttcacaagttgatgtttcgattcatcgacatattggtatttccaatttgcgtctccttcatcggaaagatacagcttcgcttgatgtgtagcgcgagttcgcgggcaccggaaacaaagtcggcgtgaatatgggtttctgcggccgctgtgatgtttagcccttcttccttggctgcttgcaaatatggttttagattgcggccggggtcaatcacaatggcttcccctgttttttggcagccaaccagataggatgcatgggccagttttttatcgtaaaaatagcgcaataacatgttgtattccccctcttgaaacatttatcgtaatatatccttttttgagttcgcatcatgctttgtcctgtcttacatcagtccttttaacatgccattccaatacatgatgggaagcagtcttctttttaacaggtacatgctgaatcgttccttggactgatcaaatggaaacgtttcttgcggcaccttgtgatagtcaaactcggccagcacgagtttgttgtaccctgtaaccaaggggcacgaggtatatccatcgtactttgcatctaatgaagagccttttatcaaggacatcagatttcgcacgacaaccggagcctgtttgcgaactgccgcccctgttttggacgtcggcaggttggcacagtcaccaattccgaaaacattggcaaactttttgtgctgcagagtgtacggatcaacatcgacccagccgccggcatccgccaatgcgctttcttttatacatgaaggtgctttcatcggtggagtcacatgaagaagatcatatgtgaatacttcctgctcccccgtctccaaatgttcgaacaaggcttcttttgaatcaggccgaatttcgattaagtttctcttgtacatcgtttggatatccttgcgcaggacgactttttcgagcgcatttgcgtatttggtgacatcaaaaatgatcgatttcgccgatgcaaaaataatctccgactgatggcggacatttgacttgcggaaatagtcgtctgctaagtacataattttctgtggagctcccccgcattttacgggagaatcaggatgagtgaaaatggcggttccgcctttaaaattgcggatgttttcccaagtgctgtctaccgtatgatatgaatagttgctgcaaaccccgttttttccgaccgcatctttcaagcctttgaccccgtcccaatcgatttgcaaaccggctgctgcaacaagataatcataggaaacgatcgttccttgttttgtaagaagtgtgttctgattcggccgaaactccgttacagcatcgccgatcaagtcgacaccagcgggaattaaagaagccagatctcgctcggactcttccttcttcgctgcgccgcctccaactaatgtccacaaaggctggtagtagtgctttgtttgcgggtcaatgatggcaatttgtcctttgagttttttagaaatccttacgagacgggcggcgacagagatgccagcagtcccggctcctacaatgacaatggaataacgagcatgtcttgccatggtcaacccccttatgtttatagaaagctgctgtttttcttaatgatgcgtctctctttttttaagttaaattcaatcttcctttttctgtataggggaactcccctactttttatgtgagctccgtcttcacaagctgacaggggttaaggggccgtatgttacaacgacagatcgagatatttatttttgatcgcatattgaatcaattcgtgtttcgagtccagatctaacttctgcatcatattcgttttgtggttttcgacggttttgacgctgattgagagtttatcggcaatctccttattggcataacccagcacaatgaatctgagaatctccttttcgcggacagttaatacagaggtcggctttttgggctctgaattgagccattgatcaatgatgtcttgcgatacagatgttttgtaaaagagattgcccctgtacacttcgacaatcgcctgataaagcaaccgataatggctgtttttcaagacgtagccatgcgcccccgcctctattgctttttggacaaaaatttcctcatcatgcattgtcaaaatcacgattttaacagaaggattcaactttcggatctcactgctcgctgtgaatccgtccaacccgttcggcatcgacaaatccatcagcacgacatccggctttaactgtccggcgctaagaacggctttgttgccattattgctttctcccgcaatttcaattccagaaaagccttccaaaaggacacggatgcccttgcgaatcatcatatggtcatcgaccagcaataccctgatcactctccttcccctccttgtcctgtactttcactttaatcgtcgtgccactctgaagtgcagagtgaattcgaagacttccatccatctgatcgactctctctttcatatgtttgaaccccaggccttcctctgtcagcccgcgttcaaaaccaatgccatcgtcctgaatgatcaaaacgagctcgccgtcttctttgtaaagtatgacttcaataagtgtcgcctgcgaatatttcagggcattatgaagcgcctcctgaatgatgcggtacaaattgatttcaaaaatcggcagcaagcgattgctgatatcgcttgaggcaaacgtaatagaaacatcctgatgcgtcttgtttaagctggaaacaagatgcttgacagcagggatcagccccaattgatcgagactgtgcgggcgcagctggagagagtagagcttgacgtcttggattgctttttccagttcatcgatgatgtcctgcatgtaatctttaaatgtttcttcctgctccatgagcgattgaatcgcttgaatgcctactgaaaccgaataaagcgattgccctacaccatcgtgcagttcctgggcaagccgcttgtgttcgttttcctgggcctctaacgttttttgcaaaaccagcttggagatcttcgcttcttcctcctttttcttcattgttaaatctttcaggaccaaaagaacttccatttgatcgccgttttcggaaatgacagccgtactcatctccatgtcgacgaatcgcccttcataggtgggcatcgaggagagaaaataaggaatttcccgcttggccagcaaataacaacgctcttctcccgcttccagttttctcgtttggcagcagtaggaacagtacggaaccttatcccctagtttccatcccgtcatcttctctgcggacggattcatcaccagaattgtgcgttcctgatccatcatgatgatcccatcctgcaaatggtcgaagatctgccttaaatagccgctttcatttgacattccttcttctgtataccgagccgggttttgacacatcatggaccctcccttagctatctattcctcgtacaactgatagactctttttaacttctgttcaagctgttcaaaatgaataaaacgcgcttctcgtagacattcggttccctcaataaacaaaagaagcacaggaactgtgaagactgaaaacctgccggcaacctcttccactatgtcagcatttatatgtcctaatttgatctttggaaagcgggccaacagtgctctaagctgaggcagaacagcgtgacagactgtgcattgaggtcttgatatatatataaaacttaattgatgatcagttataaatttctcaattgacaccattgaagttagttctgcagcttctttcatccaattcctccttcaagacggtcaatacagtaagatatcaacccaaattttcactgttgtaagaaaaataacgaatatcaaaataccttgaagaactttagcattcactttcttgccaatgaaaacacctagcggggatgcaatcagactggcagccattacaaccaaagccggcataataggcacctgtccaatgacgagctttgtagctgttgttccaatcgatgaaataaatgtaactgcgagtgatgttgcgattgtgattcgtgcaggtatttttataatgactaacatgagcggaacaagcagaaaagctccgcccgcaccgactatacctgaagccaaaccgaccacaaaagtcatgattgaggttaatatctttggaaagcgaatgtgatcactttgattaccttctgttcctgtctttggaatcaacatgatgatggctgcaatgatcgccaataatccgtaaaccatgtttatggcatcttcggagaaaaaatgtgacccatagccgccgattagacttccaagcaaaatacttaaccccatgatgaagatcagttctttatttaagtaaccgtctttccggtaagcccacacaccggaaaatgcagcaataaaaacctggactgccactatacctgaaacctggtgtgcgttaaagcctgtaaaccctaataaagcaggtatatataatagcaacgggtaattaataattgctcccccgacaccaagcattccggacataaaagagccaatgaatccgatgaaaaatataagaagaataaaagatatgtccactacctttcctcctttccatcaataaaaagggggaatagcccccttttatcacatttaaccttttttaagccaaaactttaatataccatcttcctctgtatctttaagcaactcatgaccgcctgacttcgcccatgctgttagatcgctttttgcccctttatcagtggcatgtacttctaacacttctccggattgcaattcatccatcgctttttttgttttcacaattggcatcgggcacgcaaatcctttagcatctattactttatctgatttcattttttatctctccctatcttcaaatctatattcatccatgaaccgcacaacggttcggtcccatttccatctcgctttgcctgtcagcatcaggcattattttgcccatgttggtttgacggatttcctgatatgcatttggctgtggcggcagattttctgatacagcccctttgaattcattttcatccagatttaaaccggcattctttttatataaatcactcagcttagcttggacttgcccctgatcgcctaattcactgactgtcgaaaagtgagctggaagaacaatcaagtcacctgatatttgtttgtattttacatacaatgtgttacgcaaatcctctgcccaatccccggcttttccagctaagtccggccggccaatcgattcaacaaataaaatatctcctgttaacaaatagcgattatcaatcattaaagaggtgctaccaatcgtatgtccaggtgagtaaataggttctgctttcatacctgcgcttcctacagaaatattttcatcttcaactagcggttcatatgaaaatagcacttcctccgcatcttttggcggcaggtagtatgcagctcctgtacgcttacgcagtaaacgtccgcccgaaatatgatccgcatgtaagtgtgtatcgaccacatgtttaatcgtaacgtttctctctttcgcaaaatctatatatgcatcaacagaacgagcagggtcaactacaattgcttctccgtcggtttcgataaaataggataaacagcctttccccattcttacgaattgatagatcgtccctccttctttcaagtctccgattttgactggatgtaaaaatttgctccacgccttcataccgcctttaagtaccagcactctttcaaaaccggcatccactaaatgctgtgcaaccatctctgaagacccttgtttggcgcaaacgactagaacatcttgatctttaggaacttggccatcaattttttctataccatcaattaaatcaaaatacggaacatttaaatgttcaacccggcttccctcgattttccaatcactaagggcctctttatttcgtacgtctaaaataaaaaatgattcttttcttaatagcttttcagctacttcttttggtgaaacgaatgtaaaattcacatttaaacctccttaaaatgttagagcccaaatggcatcagaacttgttgcaatgattgcaacttttacggccattcaaatcattcctccaatttttcttttattgatttttttcaacagggcctgaccactccgccataccttggacaacattttcaacatctttaaagccattatccgcaagctgtttagctgccagatcgcttctattacccgtacggcaaacaacataaattttcccgtctctattcagttcgtgcgctcttttttcaagttcacctaatggaattgaaatcgctccgggaatatggccgaaacggtattctgcaggttcccgaacatcaactactgttagccgctcgcccgcctctacctttttttgaagctcttcattttgaatcgtataaggaaacgtttttactttctttatttcagagtgacccgcttttcgaagataatgctttaatatatctccgtcttctgttgtaccgagatactggtgaccgcttccctttgcccatgcccgtatatcagcaagagaccctttatcagtagcatgcacttcaattacctgccccggttttaactcattcatggcttttttcgtttttacgacgggcattggacaagcaagcccttttgcatctaatacgcgatcagttttgatgttcatcaatcatccctccatattcattttctgttttatatcactgttccatttggctgcttcaggatttcctgttttgcattcccgaagaagcaaccgttcaatttggagattatataaataaattcacctttgcttcgttggcatcgcctagataagcggcaacacctgcataatcaaggccgtcgatgagttcttctttttgcaagcctaacaagtccattgtcattgtacaggcaacaagcttaactccttgttcttgcgccatttcaatcagttgaggcagagacagtacgccgtgctttttcatgacatgtttgatcattttaggcccgataccggcaaaattcattttagataatccgagtttctttgaaccacggggcatcataaagccgaacgctttttcaagcggtcctttctttactggcaccggttcatcttttcttaaagcgttaagcccccaaaaagtatgaaaaactgttacctcatgatcataagcagcggcgccatttgcaataataaaagcggcaatcgccttatctaggtcaccgctaaataaaacaatggtcgttttttctttttggtctgacatataacaactctcccacttttgtatacttatacccgtacaggtatataaaaactaaaaaaaatataagtcagctttttataccctaaagggtataaaaacagcaaaatttcttttaaccaggggtatatagaggctgtatcataaacaacagccatctaaacattatctgcttttaaccaataaattaacggcttcttggatgaggtcttcggtatcttctcctctttcaatttgaaggcggacgcatttctccaagttactgcttacaacaacaccgatggcccgatctaatgcagaacgaacagctgacatttggcttacgagttctttacactcttttccttcatccatcatctttaatatccctcgaacttgaccttcaactcgtttgatcctattttttaattgatcatcgtattccatcacataacctcctatttccttatgatgatgacatatccttcaacttttccgcaaaccgttactacgcagatatgaactgtcctgcatttctgtcacattcgttaagaccagtgatggctttttgtccagacaagctttatcctaatggaccatcgcccgcctatacatatacccctatgcgtataatactgaactgctgaggataaatcaaatttttagttctgcaaaagtataataagcgccatctttaaaaacaaaaaaacatcgacaaaagaagtcaccgtcggccgtttcggactgaattaagaaaaaaagcgcagtgcgaaaccgcgaaggagcttagatttcgcgaacccgagaaacgggcgttgatcgaaaatgcatgatgagttttaccgtccagagaaaaagaagtgatgaaaaaagccgggtcattttccggcttttcctatttcattttaaaaaaacaagaaatcactttatgctgctggatataaacattgaagcatcttgattcataaaaatacgccggccgtgaaaaaatgtcttcatttcagttgatttaaatccaacatcggataatctttttttcaattcttcgtgcgaaaaaccgttgtgaactttcggatgttgtattttgtcatttttgtcaaaatcaataattatgagcttgccgccatcatttaaaatgccgaacagttcttgtaaaattttatttgtatccggaatatgaagaaggactagtgacattaaaacgatgtctgccttcagttcaggagtttcttgggtgaaatctgaataaagcgtctttgcgttggcgattcctttgcgagaaattttagctttcgccacctccagcatttgtttggatgaatcgaccagcaaaatagaatgtactaaatctgataattctaaactaatgagacccgtaccgctcccatagtcaattaaagattttgattgactgtttcgcaattccggtcttacttcattcacgatcactttagctaattcaattctttcttctgtatcatatcgctttgcgatctgttcaaaaacgttattttccatattccacttcctatttatttttagatggtttactgaaaactatgctaacaccttacatatttccgtttgaaaccgagatggcctctatcaatatctttttgaatatttttggaagcattcaggatactgctttttttcttgccccgcctgagttcgaccgggcctactgcttttgcggtttcaaccgccttttcatgaagcggcaaatatgaaatcccgactgtgtagataaaattattcatagccgattttgttcgatctggagaatcgtgaatcgtacgttccacctgatcaagcatactggcaattttagctacattaaattcatcgtccggtcgattacctaaaagccagcagtaacagctccagcctgccgacattttaagctcttcaccgcttgagatccattatcagcaacagcctgcgcaaaatcggtttctgccaaagttacggcaacaacataatcagatagcatatagaaatacgccgcatcgatccaccgctcaaaatccgcttcagtcattgtcattgggtcagcaataatgccggcaaaatacatggcatcgtagttcccggtagcgtaaagctgctccgccaagggctgatttttcttgattttctttgcgagcggcttcattttgcctgtagccacgccaaacagcggttcgtgtgcaccattcgttatgtatctttttttcatgttttccgtacccagcgcttccagttctttcataaccgtttcaagatccatgctttcacttccttcttaaattaaattcattactttaactccattatcatgctctttcacttcatctaatcattacaaatccactttatttgttttaatgctctccatcaacggctacatcagcatgaaaagatcagttgccatgtatgatcctcatcttttttagcggttgttttgtttcctaagtctgatcaaaactaaacttcctctgcatatcatttatgtttattatatgaaacattttaaagcagaaagggggtgtttttgaccgccttttctcttcatgcgtcaatttcgaatgccaccgatatttgcaaaaagaagactcttaaaaaaagagtctcctaacttgatcaataaaacgagccaaatcagctgatcacagcttttgttttttcaggtatgttttcatacatccattttgcatctggaatcgcaagcctgatacatccatgggaagctttttttcctaatttttttgcttccttttaaatgacttttttatctttgttgaatggtacgctatgaagacgaatttttatgggaaagaccatcagatcccattaatcggcggcacgttttataaacctaatcttcagaacatttatcaatatgaaccggatttggtgattgggattggcggtgttcacgataccttaagagacggaagtccgtcttcgagcggattacatttggacctgctcatttgcagctttcattttttcttccatttttttaatgcatcggcagaattttggcggctgttttcgtttatgtattaagcgcttataccaagaagatgtcgtctgtctttttgttaaacggcatggttaatttcagcggtattgcaagctgtgacttcatttattttacttagacatcaagaagcgcttggaagcattttattgtggacgatcggatcactgaatggaagggtttggattcacttgaaccttttatggccaattgcagttcctgcgctcattgcgggattgttgacagcgggaatcgcaaatgcctggaggctggaacagaatcagctgtgctcctgggcctttctttaaagaaaacaaatgctcttttatttttcatctctgcccttttaaccgcaggggccgtttcgattgttggagcaattggctttattggtttaatcggccctcacattgccaaacttgatcgttggagaggatgcgagaaaaagtcctaccatttccaaatctattaaagaatttagattggggagtttttcatttataaatcggttaaataattgtatattatttgattgtccaacaaacaggccagaagttcatagccgtgagctccggggttttggattagcaagccaaggataagtaagggaattatggtttcatcaccatcgccatccgcgcctcgaattccgcgtacgtgattttacccgaagccaaatccatgctgtgaaggtaaatctgttctgttttagaatagtcaccattcactttcagtgattgctcctctcccgaaatgggtttcaggatatggtactttttcgaaaaagcctcgaaatagcggtaaccgaatttgcgttgtgaagctgcatctaaatgaatgccatcaggattcgcagtcaaacctgccgcagcaacaaaataacaattctgttgttcattagcaaaacgcagcaattgttcattaacctgtcgaaattcggtcgcgtgctgtccaaaaccggtcttcccaagaaagtcaccaagccctccaataatcaacggtacctcatcaagtttcaactcgtttcttagcgtctcgatgataagggttaatttctcgtaataagtttcatgtagcgaacgataactgtcactctcaccctggtgccaaaggattccacaaatttgactggagcggagggcgaagcgggcttcggacaaagcatgctgaaaaaggatgccttccggatgccagtcattcaatgaactgccaccttccgcacaagggatcaagccaatttcttcatcgggatgagctttcgaccatgcatctgcaaaagatgccgccaggccaacgccggaaaccggacggtcgtaattaatcggctctgtcatcatctgccactgcccattgcgcagcatttttattttttcattatagatagggtctacttcattcaaaaatccacggcctgccatattcgactgccccaacattaaaaaagactttatcatctaatttccacttctttacatcaatattttggtctaattagactatagtcaattcagtttgtcttgtaaagttttaacaaggttttatttattatcagtatgtatgaaaaacaaactaatatgaaaatttggtggatatatttgtgaaatagcaagttcttttgcttttcttattcaactatcgggggctttagttgaataacgatcttccacaatcgggcgcgattattgaacaagaactaaaggagttatacatattagtcatgtaaaatatatataactccttattttttatgactttttttgatttaggtcttgataaataacgaaatttctcgtataaaaatacacaattagatgaccgggtgtattgctgaaacatacacccggtcatctttatgcagccttttcatttactgctctgaatgtgcaggagttcttcaggaaagcggtcaacttcccctgcctgccctgcaaggaaaaacgatcaatagatcatcctacaatattaatctgaatccccttcctttttttgatctgttttgcttggaacaggatcaaagcctcccggatgaagagggtggcatttcagtaatcgtttaataagcagataactgcctttgataaacccgaacctttgaatcgcttcaagcccatagttggagcatgttggataaaatctgcaagtcggcgggaaaagaggggatatcgccttttggtagaatcgaatgaatatgatcgctgcccgtttcatgattcctcccgaagaaattttgctatatcttttgcaaaatatgtaacaataagatccgcaccggccctcttcatcgcaagcatgctttccaacactgtatttttttcgtcaatccagccgttttgcgatgcggcttttatttgggcatattctccgcttacttgatatgaaaccagcggaatctggagagaatttcgcatatccctgatgatgtctaaataaggcagaccaggtttaatgcttgttcatcacggccttctattagatcgaaacgtaataatggcatttgcttatcccctttttgatcattttaaatttcgttagagaaataagaggttttacctgtccctgatcaattgtttcgcttttggtacaaagaatgatttctgctaacttgataaaaacataacacataatcaaaatatattcaataattgaccatatgttcatcataatagaagatacaagagctatatcattaaaaatcagctcgcacccaatctttaggtgattagtatataaacaacactttatcaaaatgtgacaatgatatgactatcagcactctacttatttcttaaagaaagcacaagctttctcaacccgaatatgattaaagcagcaacaataatgaaaggtataaatccaatcaggctaaaacttgtaagcatgacaagctcctttcctcaatgtccaattgatttttcattttacgatattcacattttaaaatcataataaagatgtaaatgttatgttaaaaaccggttggtatacaaaaaatcaccgtccgagatagcggatggtgattttctttacatgaaggtttatttattccagatttgcatgatttgcgtacatgttatgagtattcagcccttttatttccattattcgcaatatgatagcatcataaatcaataaaagagtctgttcaaaaagcgatcccatcggttgtatagtctgtttactgcccgtcgtttgatccttgggtgaacccggcagctgcaggatcagatcagctatttcagcgattggcgaatctgaagaggtcgtaactgccgctacagtgcctccgatatcttttgccttttccgccatatgaagcaaactttctgttttccctgatcctgtgcccacgataagcaagtcgttttcggtaaatgcaggtgttacggtttctcctgttacaaatgcattgatacccaggtgcattaatctcatagcaaatgacttccccattaaaccggaacgacctgcaccggtaacaaacactttttcagaagacatgatactggatatgaagttctctattccttccgcttgagtttgagacgttgcatgatcaagctctgcgatgatcgcttttacataatcatgggtcttcatgattgctggatcatctgcttcatttttgcggctgccgcagctttatcatcttgatttgcaataccgcccccaacaataatcaaatcgggctttaatttaacgactttgggcaatgtgtccaatttaattccgcctgcaatagccgttttagcgttttttactacattcttaatggtcattaagtctgcaaatgaattttggccaatggcttgaagatcataacccgtatgcacacaaatataatccacaccaagttcatccaactcggcagcgcgtgattcgatgtccttaattccgatcatatccaccaggattttttttccttgagcttttgcctcttctacagcgcctttaatagacatatcttcagcggctcctaaaatggtgatgatatcggctcctgcttctgaggctttcattacttcatacccggccgcatccataattttaaggtctgccagcactttcaaattcgggaaagcatctttcatctcttttactgcacgaaggccttcatttatcacaaccggcgtaccgatttctacaatgtcaatgtattcttctacttcttttaccactttgattgcttccggtatattgactaaatctaatgctaactgtaattccacttaacgtcacccctgttaaattaagaattccgcggatgattctcttttgatatttctgttacatcaaaagtataacaaggggaaaatgcctttaatagtacgcactttttttttacatactatacttttcctcatatggtgtagaaaaagatactgtctctagaacaatatctcaaagtcaattattctatttgtcatcttttgaaaagttggtttctatataatttttaccccactcatacatcgcctctaatataggcattaaactttctccctgttttgtaagggaatattcaacttttgggggaacaaccggatatacttccctatgtacaatatgatcttcttccaattcacgcagctgattcaccagcattctttgcgtaatgccgggcatcagggcttttaattctccgaatcttttcgtaccttcttttcctaaaaaccacaaaatcagcattttccactttcctccgataatgttgagcgtcaactccttttcacaattaaatgttttattctccattcgtgacatatgaattcactccttatctaaatgactaatatatgatcatcaattacatcattgtaaaagaactttgtttcattaatcaatcatcgcacgttttagccgttccttaacttcacctgcttgccatattgtcaatcttcttatatccattcgagttaaggaaacatgacaagtgtcatgtttgaagcatgatgtgtgctactacaaagacatctctctgtgccgtaaacttaatttaagacctatttatgagaggataactttactatgactgaacaaaccattgcccataaacaaaaacagttgacaaaacaggttgctgcgtttgcacagcctgataccaagaacagtctgcttcagcttttgaatacgtttattcctttcttcggactgtggtttcttgcctatttcagcctcaatgtctcctatctccttactttaggaataacggtgattgccgcagggtttttgacgagaattttcattatttttcacgactgctgccatttatcctttttcaaacaaaaacgccttaaccatattctcggttttttgacaggcgttctgactttatttccttatcttcaatggcagcacagccattcgattcatcatgcgacaagcagcaacctggataaacggggaacgggtgacatctggctgctgacggtaaatgaatataaagccgcacctctgcgcacaaaaatcgcatacagactttacagaaatccgtttatcatgtttattctcggaccgatttatgtctttctgatcacaaaccgctttaacaaaaaaggagcaagacggaaagagcgtgtgaacacatacctcaccaaccttgcaatcgcggcattggctgctgtctgctgcctgatttttggctggcaatcatttttgctcgtacaaggtccgatctttctgatctcaggttcgatcggcgtttggctgttttatgttcagcacacatttgaagattcttattttgaagcggatgaaaattggagctatgttcaggccgctgtggaaggaagttcgttttataaactcccgaaactgcttcaatggcttacaggcaatatcgggtaccaccatgttcaccatctcagtccaaaggtgcctaactataaacttgaaaccgcacatgaacagcacgaacctttaaaaaacgtcccgaccatcactttgaaaacaagcctgcaatcactcgcgttccggctttgggatgaagaaaaaaagcaatttgtaacctttcgggacatgaaacaaacatcttcccatccttcgccggattcaacgaaaaaacagaagctgcggaagaacgcctgacgataaggaggtcttcttatatcaacaagaagacttcctttttattgtccgatgatgcaatcaggctccggcaatggtaaagttactctaaagatgaaaagctgaaaatgaggttataacatgttcaaaaaacattttacatttcaaaaactgaacgggatctcgccgtatatatggacaatatttttcatccttcccttctactttatcatgcaatcatcatctacacttgttatcgtcgtcggcatcattttgacgcttttattttttgcggtatacagatttgcttttgtctcaaaaggctgggacgtttatttgtgggcgtttattttaatcggcatttcaaccgcttcgattatgatgttcagttatatttattttgctttttttatcgcatattttatagggaacattaaaaaacgggccccttttcatattttatattacgtccacttaataagcgcagccgtcgctgccaacttcagtctcgtgttaaaaaaggaattttttctgacacaaattccctttgtggtcatcaccctcatcagtgcgattttattgccgttcagcattagaagccgcaaggagcgtgaacgcctggaagaaaaactcgagtatgctaatgaacggattgccaatttggtaaaattagaagaacggcagcggattgcccgcgacctccatgatacacttggacaaaagctgtctcttatcggtttaaaaagcgacttggcgagaaaattaatttacaaagatcccgatcaagccgcgcgtgaactgaaaagcgttcagcaaactgcgagaacttctttaaatgaagtcagaaaaatcgtatcctccatgaaaggcatccggctcaaggatgaaatcataaacatcaaacaaattcttgaagcagccggcattgcgttcatctatgaagaagataaattgccggaaaatatctcattgcttaatgaaaacatattgagcatgtgcttgaaggaagctgtcactaatgtcgtcaaacacagccaggctaagacctgccgcgttgacatccagcagctctggaaggaggttgtcattacagtgactgacgatggaacgtttcaaggtgaagagaagtgcttttcaaaaggacacggcttgcttggcatgagagaacggcttgaatttgcaaacggaagcctacacattgatacaaaaaacggcaccaagcttaccatgtcaattcctaacaactcaaaataaaaaaaaaggatggcttacatgattagtatatttattgcggaagatcagcagatgctcttgggcgctttaggatcgcttctgaacttagaagatgatatggaagtcgtcggcaaaggcactaccggacaagatgccgttgatttcacaaaaaaacatcggcctgatatatgcattatggacattgaaatgcccggaaagacggggcttgaagctgctgaggaattaaaggatacaggctgcaacattattatcttaaccacttttgcccgccccggctattttcagcgagccattaaagcaggtgttaaaggctatttgttaaaggacagcccaagcgaagagcttgcgagcgccatccgcagcgtcatgaaaggaaagcggatctatgcgcctgaactgatggaagacatgtacagtgaggccaatcccctcacagatagagaaaaagaagtgcttgaacttgtggctgacggaaaaaacacaaaagaaatcgcccaagaactcagcatcaaaagcggaaccgtacgaaattatatctcaatgattcttgaaaagcttgaggtgaaaaatcggattgaagccattactcgttcaaaggaaaaaggctggtttaaataaaaagaggatcttgccatatgtccaagatcctctttgacgaatcagccgctcccgcgggtgaaaaatattccttatctacacgaacatcttcttgacaagctcgcggttgcgctctttgaaaacctcattatgcgacgacaccatcgcactcttgtgcgcttcgggatcgataaatcgcttggcgctgttgaccgcgtttgccgcatcttgaaacgctccggcgatcaggtgcagcttgccttcgtaatgcacaatatcccccgccgcatacagaccgggcacggaagactggcagttggaagtacctgcaatataatagtcatccactcgggtaacatcaaggcggctgttctccagaagtgaggtgtcgcgttcatatccgtggttgataaccacctcgtcgacaggcagttccatcacctcacctgtttgagcgttcgtgagctcgacccgttcgatcacctcatgatcttccgaagcgatcagcttggtaatctctgtatgaaagaagcagctcaccgagctgttcagaagctgatccacctgggcctcatgcccgctgagcgcatctttgcggtaagcgaggtagacctttttcgctacaggttcgagttcgttggcccaatcgacagccgaattgccgccgccggatacaatgaccgttttatctttaaaatgctgcagtgacttaaccgtataattcagattggacacttcaaaacgctctgcgccttctatctgaagcttttgcggattgaggatgccgccgcccacggcaacgatgaccgtcttggaaagatgcacacctgaggcagccgtatgtaattcaaacaacccttcttcattgcgggcaatcgattcgactttctcattcagcagcacttcaggatgaaacgttaacccctgctgcaccagctgttctatcagcttggctccggaaataggcgttaatcccccgacatcccagatcattttttcaggataaacgtgaacctttccgcccagcatcggctgatattcaataatctttgtcttcattccccgcagtccgctgtaaaaggcggaatataacccagccggacctccgccgataacggtcacatcaaacaattcatttctgctcatcgctcttcactcccggtatatgtcatgagttcacaaactccaaacgtaaatgattatcattatcattaagtgtactttgattgctccatttttacaatccattttaataaaaagttcatgcttcgcccacttcgattttgccgcttccccctttccgctcgttcttcatgagttgccgccgctccctattccgcagcatttagatagttcctatatcttacattgacaatggtatgccccctgcataaattgaaaatgattatcaacttcatttaggaggaaacaaagcatgatgagcggaaggaatagtttgaaaattaaaattatttttatattaatgctcgccttttctattttattagccggatgtacaacctcaggaaattcaacagagaaaactcatgaaaacttggtcacaatggcttggcctagagatataggcgaaatgaatccgcatgtgtataatccttcccaattatttgcccagtcgatggtatatgaacctttggttacctatgaagcgggaggaaagcttaaaccgcatttagccgaatcttgggatatatcaagtgacggtaaagtatatacgtttcatttgcgtaagaatgtaacattttcagatggaacgaagtttgatgcgaaaattgtgaaaaagaattttgactccattttaaaacatactgaattacatagctggttagggtttatttcaaaaatagcccaaacagaagtgatcgatgaccatacatttaaattaaaattgactgaaccatactacccgaccattcaggaactagccgttgtacggccggtccggtttttgggagaagcgggcttccctgaggacggcgatacatcaaagggtgtcgaaaaaccggttggtacgggcccatgggtattggaagagcataaagctgatgaatatgcggtttttaaacgcaatgaacattattggggtgaaaagccaaaagtcgagaaaatcaaagtgaaagttatcccagatgccgaaacaagggtgctagcatttgaaaaaggcgagcttgatctcatttacggcgaaggcgttatcagtttggatgcatacaagcagctgcaatcgacaggtcaatatgaaacaagcctttctgaacccgtggcgacgagacagctcgtcatgaatacgaaaaaagaacagctttctgatgagcgcgtgcggcaggccctgcaatacggttttgacaaagaagccatggtgaaaggcatcacctcagggttagaagaaaaagcagatcatattttgccgacagacttcccatacacgtctgatattgatgtaaagcaaatcaactatgatacagaaaaagcaaaagagttattagatgcggccggctggaagcttccgaatggcaagaccgtgcgcgagaaagacggaaagcctcttgaatttagtttaatgtatgattcagctgaatccattcaaaaaacaatggctgaaacgctgcaggcagaatgggcagcgatcggggtaaagctgaatcttgaaggcgtagaattggcaacccaagtcaaacggtttaaggcaaatgagtttgatatgaacttctttagcaactatggtgcgccttatgacccgcatacatttttaaacattgtcgcgtccaaaggattcggatttaatgaagcgatctcagcctatccaaacaaggacgagctaatcaaacagatggcaaaggtgcctcaaacgactgatgaaaaagagcggcaggagctttactcatctattttaaaatcacttcaagaccagggagccatcgtacctgtttcttacattaaaaagacggcgatatatcaaaagaatatcaccgactttacgttccctgctaaccgtgacgaacatccatttacaggcattcgcgtcaagcagcaacactaggaggcttttatgggcaactatatattgaaacgaatcatgtcgattattccagtttttcttttagctgcacttctgacaactggaatgattcatctctcgccggttgacccagctgaagcatacttagccgcagcgcatatccagccaactgatgaaattttagcgcaaaaaagacatgagtttggcttggatcagccattttttattcaatatgtaaactctgttttgaagatatgccagcttgattttggcatatcttatgtttcaaaccagccggtttgggacgaagtggcacaccgaatgccggcaacggtcgaacttgcgcttgggagtttattgattgcggtgcttgtcagtgtgccgctcggcttcttagcgggaatcaaaagaaatggtgcagttgatcatatcagccgcttcatttcctttttcggggcatccatcccaactttttggttagggtatatgctggtttttttcttttctgttcaattagaccttttcccggtagagggcgctgggacatggcagcatctcgtactgccgtctatgacattggcgcttcctttaattgcgatgtatacaaggctgctccgtgcaaacgtcatcgaaaacctgcaggaaccatatgttcaatttgcacgcataagaggaatagcgaagttgaacattatggccaaacatgtattgcgaatggccatttctccgatgattacgggtctgggaatgaatcttggcaagctgcttaccggcacaattattgttgaagtcgttttttcttggcccggctttggccgttattttattgaggccattttcaatcgggacatccctgtcattcaatgctatgtgttcttagccgctaccttttttatattgagcaacttaattgttgatctcattcaaatgtatattgacccgcgcatttcaagaaaagaagggcagcatcgatgatgataagtatacgcaggatattcaaaggccaaaaagtgattacggtatgcaccactatattaaccatcctttttattatcgctgtattcgccccttggattgcgccgcaccatcctgctgatgtccatatggtatataagctgcagcctccatcctgggaatttcctttaggaactgatcatctgggaagatgcaacttatcccgccttttgtacggcgcccggatttctttgggattcgcgatgcttattttcatttcctccctcgttatcggcctcattgtcgggacgatttcagggtataaaggcggctggattgaccagctgttaatgatatgctgcgatggtgtaatggcctttccgaacttaattttagttcttggcctcgtgggcattttcggccccggacttcctcaagtcattctggccctcatgcttgtgcaatgggtctattatgcgagaattttcagaggaatggtgctgagtctgaaagaggagaactttattgcggcggcaaaaatcaatggatcttcacaatggaaaatcattaaaaatcatatcatccctaatgtcctccctcccctcgtcgtcatcggtacgttggaaatgggctgggccattatggatatctcggctatgtcttttctcggcttgggcgtccagcccccggcggctgaatggggagcgatgattcatgaaggtaaatcgtatattcggtcgaatcccgggttaatgatttatccaggggtgatgatcatgattgtggttgtgacattcaatttattgggcgaagccttatcagatcaatacggtgtcaaacgtcgattttaaaaaggaatgaggaagttgggaacagaacaatcaacggtgcttcgagtcagagatttgcatgtacaggttaacaaccaaaaaggacattcaacccttgtgcaagacatcaattttgatttgaagcgcggccaagtccttggtctgattggtgagagcggttgcggaaaaacggtaacaagcatgtctattcttcagacgcttgatccaaaaacaactaaggtggaaggaagtattgcattgcgaggccgtgaattgaacggattagcagataaggaaatgcgtaaaatccgcggcaaagatattgcctatatcatgcaaaatccgatgaacgcttttacacccgtttttacgataggacagcaaatgaccgaatcgattcgctctcatacatcttttagcaagaaacaggcgaaagagcttgcgaccgaagcattgcatcatgtgaacctaccccaccctgctaaacttttacattcttatccttttcaattaagcggcggaatgcttcaacgggtcatgattgcaattgcatcatgcttaaagcctgccattctcatcgcggatgagcctaccactgcgctcgacgtgtataatcagaagacggtgctgaaatatttagacggcatgcgttctgacttcggcacggcgattttgcttatatctcatgacctcggcgttattgctgaaatggcggatgaagttgctgtgatgcagaatgggagaattgtagaaaatagagatgtgtttcagctgtttgatgaaccaaagcatgaatatactaagaagctattaagtgcacggttgacattgccggtggatcaacttgcgacttgagtcagtatgaggaaggccggcatttgagatggggtgaacaagtgagtttattacaagtgaaagaagtcactcatcattatacagcgcgcaaattattcaagtggaaaattcaatcgaaacaagtcctttccaatgtcagcttttcgattgaggaaggcgcatgcttaggcatggttggaccgagcggagccgggaaaagcacattgggaaaagtgatgcttggtttggagcggccgcaatcggggcaaatcttttttcaaggacatgatctctataaagcagatcagtcaatccggcggaaaatccgccgcgaccttcaagctgtttttcaagactcctattcttccgtcaacccgagaatgacggctgaacaaattctagcagaaccgctagaaaactatgaaaggctcacaatcgctgagaaaaaacggaccattatcgagctcttggaaagagtaggcttaactgaaaaggatttaacaaaatatccgcaccagttcagcggcggccaattgcagcggattaatattgcaagagcggtctcgctcaagccgaagctgatcgtattagacgagtctgtcagcagcctggacatggtaacccaaacgcttatattgggtttattaaaagagctcaaagacgatttcggaatgtcttatttttttatcacacatgatttaaaagccgcctatcaattgagtgatacactaggtgtattagaccacggccaattggccggactttacgataaacatcgttttttaaagtcagaccacccggttgtacaagaaatgaagcgttccatactggcagaacacccgcgctttcgttcgatcagaacaagagcggttcggcaataaattagccgggagctttcctgaatgagcttctttaatcaaactgtatacagatttttttattcgcagtgaaaaaaaatatggcaaatgagggcttccaatgatggagccctcatttatttttaaaaatcctcaatagattggtttggcaaaaagaattgttttgcatcgaacagattgcttagggatactgggcctccttattgaccaggcatgtattttcacctaatgtcaatagtagacttaatacatattccgataaccgaatagctctgtatttggtgatatcactaaaacgaacagatgaggtgaaacatgatgaacaatcgattccgtgtaggagaagtagcaagacttttcaagctgcctgcatcgactctgcgttactatgatgaaatcgggctgttcaggccaaagtataccgatcctgaaacatcttatcgatattatggtgttgaacaatttcagatcctggatacgattatttttttaaggaaaaatggattttcgttaaaagatattcagcatcagttagatcaaaggactccggaaacaacgatggaaattttgaagaaaaagcttgaggaagtcagagcggaaatttttcgtctccaacgcaacgcggcgagaatcgagaacaaaatttccacaatcgaagaaggaataaaacttgccgaacatcctgctttaacatttcagtatttcccaaaacgggctatttcctacctgtattttgacaagcctgtcgacctgatggaggaaggcgacgacatttatttaaaggataaagaaacgctttcaagccagtcgattgagaataacggcttcttcaccggagacattggaacaatcgttgatatggagagcttgaagcaagaaggaccggtaaaatatatcggcgtatttgaattgctgcacgaggaagacagtgaagactatttaaacgaagggttgtatgcgagttacccccatattggtccctacgaggacatcaggaaaagttatcagctcgttttaagccagctgaaagagaaggaatacgagctggcgggaatccctgttgaaatctcatttcttgatgatgctgtgatcaaggagtcagctcgttatgtcactttaatccaaattccggtaacaaagagttttgattgaccttcaagtaacttgaaggtttagaatactcctgtagctcattataggaggaatacatgatgacagaaacacatcagcagctcatgaaattaccagtaaatcaagtgttttttaaatatttcgtccctgcaacgcttggattaatcctgatgtcagcgaatattttaattgatggcctgttcgtaggcaatggcattggaaccgcagcactggctggagtgaagctttcctatccggttatttcactcattatggccatcgctctttggattgggataggcggagcaacaaagtactccatcagcatcggggagaatcgccccaagaaggccagcagcattttttcattggctctcttcttggcgcttatcatcagcgtgcttttaggagtattcgggattctcaacattcaaaccatttcgatatggcttggtgccaactccgacacctcttcttttgtcatagagtacttaagtgtcatgtttttattcggctgggtcattacattagaacaggtcttaagtatttttgtaaggaatgacggcagtccgaagctttcgatgatggctcttgcaacgacatcgattgtgaatatcattctgaatttttatacgatcatgattttggacatgggggtaacaggcgctgcgatttcaacggtgcttggcggattcgccggactgcttgtattatccctgcacttcttcaaccgtcaagcgcaactgagaaggccggcgtttcagtggtcttggaaatcccttatgcacatctttgccatcgggtttccatgctttctggcagaggccgggctcctcgtatttgttacaggatacaacttggcaatggcaagcctggcaggcacggaaggagtcgctgccttctcggtcattaactaccttcacgggttcatgttcctgtccttcttcggcattgaaatggcacttcagcccatgattagctattatcatggtgctgaagaaaccgaacaaatcaaaagcagcatgaagattggggagaagaccgccgtaatcctgggcatacttttgctcgttatcggctggggggctgccccattccttgtaggcttattcggaatagaatcaaccgaaatccagcagctggccatcgatggaatccgcctgttttttatcggctataccttccttggctataactttgtctatatgagttactttcaatctattggccgggccggctcatcggttgttatcattatattgcgaagcttcgtgtccctgttcatcctgctttggattttgccaaagtttattggcgtcacgggagtttggctatccttgccgctttccgagttttttgttgccgtcctcctctttttcattgcaagaaaacatgtgatgggaaaaggaaatcccgctatcgggaagggatgattttacagccgggagattttcctcgcttgttgtcctatagaacttaatttgtccattcaaggaaaagaaatgtttgtgctgtttgaatcccctcctattcgaaggacatgatagattaaaggcgcctgcctgtcacagccttcgtacgcatatggcgggctgacacgttcggcgtgatcggcaagttaaatgtcgctctttgctagttacagatcgacaatggttaggtaaagttataactgtcccgccaacaaggctggacagaatgacgaccaaacgagcgaaggtgcagaaagttaaaggagtgctcaagatgtctcatactcgaattaaattcccggcaggattttgggcaggattgcgtcaattaggaattaacgcccctgatgtgcttcgaaaagcccggctgccgctcaccgtgatgactgaaccagttgtcaccgccgcccaatacttcgcgatctggcaggcgtattccgaccttgttgatgacgtttccaaaggaatcatcaagcttgcgaccggctttgagccggcacattaccctccggccgtattagcggcttaccatgcccgtgactaccgcggcgcgctaaaacgaatggcccgctacaaacaattatgccctcctgaaagcctgcgtatcaccgaagaagatgagcactgcgcaatcgaactggaatggttggatgataagctacccggtccgccgctcttgattggcattacactggcatttcttctggaactcgggcgccggggcacaggtcagccgttgacagcgaagtcggtcgagtttgcacacccaatgggcgacatgcaggcgcttgaagcatacttcggctgacgcatccggagcggtgcagctcggaaccggctgacgctgaatcgaggagatcttgaccgcccttttgtctcgtataacgcggagttgctggagattttgactcccgtgctggatcaatcgttgaatgatcagcaaaatagcctttcaatcagcggagcggtcaagtggatcatgaaacgcacgcttccaggagggcaccccgacattcagactgttgcgagcgagttgggaatgagcggccgcaccttgcagcgccggcttactgacgaaggcactagcttcaaacagctgttgatccaagtcagacatgagcaggcgcgggagtacttggcagacccttcgctcgatattaaagaagtggccattctgatcggatatgaagatcagaactcgttctaccgggccttccgcctttgggaaggcgagactccttctaattggcgtaagaagacccggctgaatggatttaactagaataggagaaatgtttaatggatatgggattaaaaaataaaacagctttagttaccggaacgacgaaaggtataggaaaagccatcgctattgaacttgccaaagaaggtgttcatgtactcattaacggacgaaatgaggaagaggcagaacgaacagtcaatgaaataaaatcagcttttcctgacacctttccccaaaacgccgcggctgatattgtggatattaggcaaagggaagctttatttaaaaaacaccctcaaatcgatattttagtaaacaatatgggcatttatgaactgatgcaatatgaggacgttgacgatgaagtatgggaaaaatacttccgcaccaatgtgctggctgcaaacggtttatctaaattttatttgcctaaaatgctgaaaagtgattttggccgcatcatctttatcgcaagtgaagaagcgatgatgccttcaggccagatgcctcagtattgtatgacaaaatcaatgctattatcattgtcaaaaagcttatcaaaattaacaatcggaacagaagtgacagtcaatacgatcatgccggggccgacgctctctgagaatgtgaagcaaatcactgagggaatgtaccccgatgaagggatgactttttcagaaaaagagaagaaatttatgacgacaaacctgcctcaatccgaaatacagcgatttatcaagcctattgaaatcggcagactggctgcatttgtatgcagtccctatgcatccgcatttaaagggtccccgatccgtatggacgggggaatggtgccgactattttttaagattccccattcaagatgtacagccattctggctgtgatttcatcaaaactaaaagcaagctggcggcagtatgcgccagcttgcagcttttgagtgaatcctcttgcagatcagcttctccccttttgctcaactttcaactgaatactgttggatttatagatgatcttcactttatacttgcttggcaatccactggtctcgacggaagaaaatgatccatgacgcttgcggaaggttatgatcgccgatccgtcagccggtacgtaattgtccgtaaaattgagacgcaatgtccctttcaatcttgcttttcccttaattttcaactgatcttttttgccgctgagctgaagttcaagtattcctttagcagattgtttgtagtctccttcgatgatcagttttcccggcgcatcttccttaaggatgcctccgtttagtgcaacatcacctctcccgaaagctgtctccgaaccgccctcaagtgttccttgatcaatccgtgtaccgccggaatatgtattatccccttccagcttcaaagcgcctgtcccttttttggtcagctttccggtgccggagatgtcgttgcgccagcgatcggctgtatggaagccgccttttgcggaatccatggtcacggtaacatttttggtaaaagccccatacccatctgccgcggaaaagagattaagccttccccatccttctcgatcatcaagaacagggtagccggccggaagaccggtagtggctaaaaccgaacggcgctgctttttgtcaaggtaaggaaaacgtgtttccagcagaacttcggctccctttggaactgccattggtttggcggttttgttcatttgacgaaatccatatgtcaatcgttccgtatattgttttttattcttctcataatcgctgtatctgtcttcagctgtaccggtttgcgttaataatttacggcgggcttcatcaaaagccgttttcttcaatctttcatttgcggggtcagacaggattgctgcagacaaagccgttgccattactcgtccccccatgacgtccagcggggaatgcataccggcaacaatccggttatgaccgagttctgaagcgcgagtcagcagctcctgataacgctccggtatcgcataggccatagcaaaagcgctgagatatgcggcgttcgtgtgtccgcttggaaaacctccgtctttgttcggatcaggattgatgacggggataagcgttggaacaatgatcgaattgtctttccagcgaaacgggcggggatagttgaaatagcttttagccggattcgatgaagaatagttgccgcgtaaagtattgaccaaacttacgacatttccaagttcagagctggtgctgcccgaattggttccttcatcattgtattttctaatcgaggcatctgccggaatgctggtgatcgttgtcgtcgctcccgcgttcattcgatagacgccggcaagcttgccgaggccgtcaattatactgtagctctggctccgccgatcatcaaaataggcagcattttcctcaagcatcgtgcggcgttcagcaatatccacgactttttgaatgttggcatccagcaccctgctgttcagtttagtaccggtattccatgtctttccgggagtccaaagtttattaaattcggaaagcaggccgatgacaggattggattccgccgtcgtattggcagagatattatttttgtaatggtctacgaaaaatccggaagattgcggcgaatctgcagttgttggtttagttgccgggctcgcatcgcttacaatcggggaacttagaagaagtgccaaagtacagacagctatcagtaaatgcttcctcatccttaatcgtttcattctcacatcatatctcccttgctcttaatcttctctcaaaatgcttttcccaatcatcaagttctatatgatcgtatcgtaaatttgttaatcaaatggcttgattttattaatgttttgtttatattttgggaattttcagatcgatgtcttatgagtaagggggtgccaagtgtgagaagaggccgaatttaacattttcggcctttctctgctagtttaacagctgtttatatcctttcagcaagtacatgtaggaagccgagtcggccgtttgatctatttattttccttctctaaaaacgccataaccgcttttgtcagattctgcgcttctgccggtgcatctggagagccgaacatcttgtttaaatcactgtgagataagctgttgacttgatacacaaattccgttgccttcgctttgtttgcggtttccgcgaacttgtaaacggcagggtcttcccagcgggtcacaagataggccggcggcaattttgagttgtttatgtatgagagcggcgatgcttttgtccacaccttttcgtctgtgccaaacacttctttataagacgggatcgcttcgatgaatcgtttcatatccaaggggccatctaaaacaacaatcgaattgagtgcggccggcgtgaggccgacacgatttaaatatgttgaatttgcggcaattaatccggccaagtgtccccctgccgaatgtcccatgacgttgatttttgacggatcgatttgatactcgtccgcatgatccatcacccattttacggccttggccgcatcatcagccatttcatcatactgaacatcgggatgaagccgatagttgacagatacaaaaacatagccgttatccgtaaaaaatgccggcttcgaagcagccctgcttttgtcgccgcttgtccatcctccgccgtgaaggtagatgagaacgggatgtttttcgccctcgtttgactgcggtgtataaatatccaatgtttgtctgtcgtcttttgcataatgaacattttcggcattcctgttagaagtacacgcaaacaagccaatacacagaatcgccaatcctgcccatttgatgaatcctctcaaattaaaaaacacctttcttctttagccagtatattttaaagagcctcacataatattccggaatgcccatctgtcaagcggtttcaacaggtgccggaacattaacatatgtttctaattataaacagaaacaagaaacttacaaatattaaaatcaataagaaagttaaagctgttgtgcggtaaacctgcgaggaaaatatgagaggaggcattcgtgaaagcgaacctgaataacaatagacgactaagccggcaagaggagtactccccgtcatatcggggagtacgatttttttatgagccttgtgatagagatgaacgtctcatcgtctgatgttctattttcaagatgaaaacattccataccttctcttgccgaaatggcagatagcacatcacagctgatcgcaaatcccatcatttaaaaagataatggcagctcttctaaagctctcatcaaaaagttgcctttccatttgatctgctccctttcgcctttaatctctatatgttcaaagcggcgcagcaaggtttgaatggcgattttggcttccaatcgggcaagcggtgcgcccaggcaaaaatggctgccatggccaaaggctaggtggcggttatcctttctttcaatatcaaagcggtcggcattcgaaaagaccgtatcatcgcggttggccgaggctaatgaaatgatgaccacatcttttctcttaatctcctggccgtgcaatgtaaacggttcggccgcccagcggagggtggttaattccacggggctgtaaaatctgagcgcctcttcaatggctgagtcgattaaatctgcgttttggcgaagcttttccagttgctcagggtggttcagcaaggccaaggtcatattggttattaagtttaccgttgtctcatgtcctgcgacgataagaagcataatcgtcgcatacagctcttctatgcttaatttcgttccttcgctttctgcctgaattaatgcactgagccggctcgtccctttttttgcgtaccaaatattccaggtattcagcgaattcgcctattttatacttgtattcctccaggctttcgggcgtgtcagaaaaatcaataaccgcctgggaccaaactctgaatttttgccgatcttcaagcggaataccaagcatctcgctgatgacaatgatcggcagcgggaaagcgaagtcgtctacaagattcatggaatgattcggttctacttgatccaataaggaatcagctattttttggattctgttttcgagctgtaaaaccatccggggagtaaatgctttctgaacaagagaccgcaaacggccgtggtcggggggatctgcgttgagcatatgctttgataaaggttcttcattttccagagcggagaagttctctaattcttcttcggtaaacgcattttcgtaattttttttcactcttgcatcctttaatatatggaccgcatcatcgtacctcgtaatgagccagccttcgcccagctcccccatcgatacgggacagacaggacgggaagcgcgtaatcgcttgtaaaattcatacgcctcatctttaaatgctgcagaagacaattctctctcagttaatatggcgacgctctcctcttgttttgaagacatacatccaacctccatctctgtttttgtaaataacagcctgcatcggaattgtataccgaaataatgcgttaggctgttcacatccactcattcacaaatattataattccaggaaaatccacattcaatcggcaatcaagcgggaggtgttcattaatgaacaccttccgcattccttgtatagaaatgagacggagagatgtaaaaaaggaatgaaaacaagctgagaccggtgctatgccgatctcgctataagtaaatttaaaaataaaaaatcctcttagttaacagttcctttttaaggaacggcagtctaacaggagcccttcggttgtccgatcggaatctattcgtttgttgacggcgacgtccatgaaagcctaaagccgtcgcagagttactgattgaacgcttgagcagtttgatcacttgttcttatttttacaacaatatagacaatagctgatatccaaactgcgataattccaatataaataaccggatataatgctgtttgatcgatccacgaatggataagcgttcttgtgttgacgaggatgatcagcccgccgaccagaacgcccattaatcgggcatgcaccttctgcaccagccaggcggcaatcggtgccgcaataattccgccaatcatcaatgcaccaacccacagccaattgacttcttcccagccgagcgaaatgaaaaatcctaacgttgccgaaacggcaatggcaaactcgcttgtgtcaacagttcccactacttttctcgcactgacgccttttttggataacaaaacaggagtggcaatcggcccccagccgccccctccggttgcatcggcaaaacccgcgatcaatcccagggggacggctttttttctcgaaaggctgatattgtttttttgctctcctattttaaacatgaatagaaatcgaatgagcacatacacgccgagaacaagcagaaacattgaaatataaggtttcgcaagctcacccggaatgttgcttaaaaaggaagcgccgagaaatgccccgagcgatcctgggatgacgagtcgtttgaccgtttgtttatcgacgtttccaaactttatatgcgacacaccagatgccgcggttgtaacgacttccgccaggtgaacggatgctgacgcaaccgccggtgcgatgccgaaggcaagcagcaatgatgacgatgtcaccccgtacgccatccctaaggcgccatctatcagctgcgcaaataatcctatcaagacaaacacaatcagctttttcatgttggcctcccacttcaattggtttatttttattgttaaatataatctatactatgcctacctgtaaagtgcgaattttaaaaaatataaattttttgttatttttcatcgacaccagcaaaaaagagcatatgcatgcaaaatgagcgcctatcccccggtcttttgtcttaatgaaagacagtttatggatgctgcttacaaaaaatgcatcgtgcagaaaaggcgtcggggagtaacgcctcattcgtttcattggcaatgatgatataatcccccatgtaatgacttcaaaaggaggctcaagccatgaaattcagcaaaatcggtgccttactgctcactttggcgtgtttgcttttgcctttttcttcggcgactgcagcaggtgccggtgtatgggataatatcggcacatacggcatgacgtcgcaaactccgatcatcaaatcaagcggagggaaattttattttcacaacaacagcttttacggctttacatttacgctgtatgaagttgacggggcgggaagcacgcctgaaatcgcaagaaaaaatttctacgtcggaccgaaaagcaacagtccggcgatcgatgtcagcagttttacagatggtgcgaataaacaagcagaactcgtcctgtttaaagggaatgatacatatatcaccgttacttgttatgattgaatgtcccataaacagcaagcccgccgtttacagccggcgggtttttttgatcaagttccctccttatacctataggcacaaaaaagtgcctatatgacttaaaagtgcgtacttccgttttggtgtcttctgttccataatcataattgatgttttgtttgacattgttctgtttataatgaaaagaaaacggagggatcaatgatgaacttggatttacggggaaaaagagcgttggtgaccggatcgacgtccggaatcggcaaagcgattgccacttcacttgcgaaagaaggtgcgtctgtcatcattaacggacgccggcaagaaaaggtcaaccaaacaatagacgaattgaaaggccaatttcccgaggctgttcttcaagcggccccttatgaccttggcactgaaaaagggtgtcaaagcctattagcagcattcccggatgttgatattctggtcaataatttagggatctttgaaccggcggaatatttcgagataccggatgaggattggttccgctttttcgaagtgaatattatgagcggggtaaggctctcgcggaggtatttgcaaagcatgatcgagaaaaaagaaggccgggtcatttttattgcgagcgaagccgcggttatgccgtcacaggaaatggctcattacagcgcaacaaaaacgatgcagctttcgatttcccggagcctggcagagcttgcggcaggtacaaatgtgaccgtcaatacggttatgccgggctcaaccttaaccgaaggcgttgaaacgatgctgaagaccctctatccggatgaaaacctgacagtcgaagaagcggaaaagcggtttatgaaagaaaaccggccgacctctatcatacaaaggctgattcggccggaagaaatcgcgcactttgtcacatttttaagcagtccgctttcttcgccgatcaatggtgcagccttgcgtgcggacggcggattggtccgcagcgtcttttaaaggaaaggctggaatgcccggcattccagccacatgatcatcgtttggcataaacatgttggaagactgcggtcgcatcccatgcattcaaaccgaaggctccatcggcaaacgttgaatcccgggcgcttatcaccaattgatcatcaaggtaaatataaaagtttgcaccgcgggccaccgttttcaggtgatatttccggccggtttctatcggtgtgcggtgttcggcaataacagaggccgagccgtcttcaaatttgaaaaacttcaccacgtcatgcttggcatccacattggcaaggtatccgtttttaacatcctgatcggcccgaaacacgagagcccctgcccctcttccatttccatcctttatcgcgacatctgcttcatatgtgaaatctgttgcttttgctgaagataaaatgaacgaatctccttcagagcgcccttgttttccatcaatcgtatcggcccatacaccgtttacggtcgtccagccggtcaaatttgattgaaagggcgacgctccccatacttttttcagaggatgaaccgtcatggaattcagcttgacaaacccgtttgatgcgtatacttctagccctttgctggattggtccggcaaaataatgtcggtgatcacctgcctcccgtcgttgccgaatacttcgactgaagagcggtcgacataaatgcgcatcttcaccttcccagcgaccggttccagcggggccgcatgctttccagtgttaaagttcggattaaaggagacgtttcctgattggctccggtcgacgaacagtgaagcgctgtttttgctgtagccgattttcgtatactcgttttcccctgttcggactttaaagccgaattcggccgcagctccggtatttacttgaaattccgcattgatttcataagcatcgcctgacagccctttcagcaaatttccgtttcgaggcgaaatgatcttgtttttccacgtttgcgatgctccccgtatcgactgcagctccgctaccggagcctgaatcattctaagtccttcggaaaacgctttcaattttacttctctcgggatcgacattgcgcttctccacggggaagtgggaacatcgtttgcgtattgccaattgctcatccaccctaaccaaagccttcgtccgtctgacttcgggatatcagaccagctgacagctgcgtagaagtctttgccgtaatctgtccatagtacgcgattcggcgggttttcatttttaaaggttgttccgtcaaaactgccgacgaaatattgcatgcctgatcctcctgagacagcaccgtctccaacactgacttgcattacccatttcgtttcattcggcctgccctctacaggaagctcaaacagatccggacattcccacacgcctccatggctgccctctccttcgccgaattcgctcgcatatgtccaccgcttcaagtcaggcgatgtatagatcagaattcgatcgccccccgcaagcaacatcacccacttttttgtctgttcatgccaaatgactttcggatcgcggaaatctctttttcccggatttggaatgacagggttgcctgagtacttcgtccatgtcctgcctttgtcattgctgtaggcgatgctttgcacttgttccccgctccggtcctgcgtataaatggcaacgagcggcttctccgtccctgtttgaaaccctgtagtattatgccgatcggcgacagcgctgcccgaaaaaatcgttcctttttcatccggatacagtgcgaccggcaaatgctcccacttgactaaatctttgcttaccgcgtgcccccaatgcattggcccccagcgcaagccatatggatgatattgataaaacaggtgatattcccccgcgtaatacaccatcccgttcgggtcattcatccagtttgcttccggcgtgaaatgatacttgggccgatgatcctcgttatagtagtccgggtcggcagcagctgcggaaaaggcttccgggaacatcatagcccctatgatccccatctgaatcattctctttttcatgactttttccccctcttcttcactcggttttttaggcaggaagtccaaacagccgcccccttttttgcggccgaatggacctgcttctcaaaagctaagaaaagaacacccaaaacatgttatgccaaaaaacctgcccaatagccgacaatcccgatgataaaaataccgaaaatcatgagcagaggattcacccctttgcgaagcatccaggcagcgagcaatgtcaatcctaaaggcagcacaccaggcatgatgctgtctaaaatgttttgcacggtctgtacatcgactttgcctgcatcatccttaattctcgacacgacgatcgggatattgattgtggtccacttggaaacgagagctcccatcacaaacagcccgagtattgaagcgccttccgtcagtttttgaatgcggttccccaccaagtcctgcaatatttccatgcctttcacatagccgtactttaatccgtagtatttagtgcttaatctgacggcgttgattaaaaagaaaaacaaaagcgggccggcgatgtttccgcttaaagcaagcgacgctcccaaggccgccaaaaccgggcgcaacgtcccccagaaaatcgggtcgcccacgcctgccaacgggcccattaagccgattttcattccattaattgctttggcatcaatctttttattgttggccatttcttcttccatcgcagcggttacgccaaatatcggcgctgtcagccacggatgtgtattaaaccattccaaatggcgctggagcgcttcgctccgttttgctcccggaccgtacagttttttgatcgccggaatcatgacgtagcagtagccgagcgcctgtacacgctcaaagttaaaagatccgagcaaaaagtttgagcggataaacatactgaaaatctctctcttcgttaatcttttttctgtgcccattattcgtccctcctttaatttttaagcatccagatcatcgtcatcatcataagcggccatgctgccgtcactggcggcagcaaccgccccttgagcatgatttttttgcatcacttgctgatataaaaatgccagacagagcccgagggcgccgaagccgactaaattgaaatcggtgaacgcggccagcaaaaaaccgatatagaaaaacggcttcaaatacggaatgttcatcatgttgatgaccatcgcatacccgacaacaacgataatgcctccgcctatttgcaagccttttgtgatgacttccggaatatttcccaaaaacgcctgaacagcgctgacactgatcagagccacgatcaatgtcggaatcataacgcgcagcgcctgaaacgccatggcagttatatgcataatttcaattcctttaaaattgccatcctttgcgtatttgtcggcgcggtgaattaaaaatacggtgatcgtccggacgaaaatcgtcagcgcctgacccgcagctgccaaagccaccgcgacggcgatcccttcgccgattccctgatcggcggtaatcactaagatagtcgaaatcacggaagcgatggccgtatcgggggccattgcaagaccgacattcatccagccaagcgccatcagctccagcgttccgccgagaatgatgcctgttttcagatccccgaggacaaggccgaccaaagtgcaggcaatcagcgggcgatgtgtctgcccttcgtccaatacactacctatacctgttatagcagcgatgacgagcagcaaaataatttgaatcgttgacatgcctttagaaccctccttctaggattttgttgcgtttcttaaaatctgcataaagtcttcgctcgaatctgacggcagctgcctcagttcaagctttacgcccaattcttgcaattgttcaaacgctttgatgtccttttcagtaacgcttaccgatttcgtgatttgcctgcggttattctcgaaacgcatcccgccgacattgactgtttcgatcggaacgcctgcttcgattaaggaaacaatgtcgcccggattttcgaataacagcattgccgtcgtatcttcgtaccgcggactgtggaacgctttggccattttggaaatcgaaacggcgctggcttttacatttgaaggtgcaacagaaaggatcagcgtttttctcatttcgtcctgtgccacctcatcggagacaacgataatgcgatcagcagcgtggattttgatccatcttgttaatacttggccgtgaataaagcggtcatcaattcttgccaaaacgattttcattacaattcatcctctcttccctgattggactgactgaatttttccaattgctcgctgcatatttggaagcattcccggctcatctttttcaactggttcagcagttgtttgagcggcatatgctccctcaagctcaatgcctctaacaaaatcggcaggttcactccggctgccatatcgaatctccgctctttcgcgatgtaaggggtcgctgcgttatatggcgtcccgccgaaaatatccactaaaaaaagcacctcgtgttcctccggaacatccttcagcgtctgatgatatttttcttgcagtgtctgaatgccttcccctttcagaaacggcaccgcgatcaggctctcctcttctccgaatatcatccctgaagattcttttaatgctatgggaaagtttccgtggccgctgataatgactgtaatcatgtacatttgctcctttcttttttcgttcgcttatttataatgcaagtatcgtgccaacaaagctgtattaagcgctttcattgtatttcaagacgaattattttcatatttgaaacacgtttaagcataaaaataaacctgtattaaaatgggggtccacttaatacaggtttacatgaaaaaattgccgatgggaaacagctataactcttcagcaaagatggacgcgataaacattttttcatcttcgctgatcgcaagaccaagcttttcttcgtaaggctttaatgttttctctgtgatgtgaagaacgttttcaagctgatcattcatctcttcctcctccggaaaagcgatcgggttctgtttgatcaccctttcaaaagcaaaagcggtatgcatgatgactttgatcagcacagcgttgctgaatgtcatacgcagttcgtcttgaaccgtctgaagccactccaacagcatgtctatcacatgatagggattcaaaaagacaagatacttcttcaggctgtcttcgcaaagctccttcaccaccacattttcaccggataatccgccgctcatcgggatatcgc

SEQ ID NO: 1 - DNA, 4345159 bp, Bacillus licheniformis (residues 2,896,775-4,345,159 of 4,345,159)
cggttgcaatcacctgctgaatcactttttccccttcgccttcaatcaatacttctaaagggacgtgcggagcatcgattttagggttcttcgtgccaaccgtggcaagaatctcatacgctttttcaatttctttgatgcggcttgctaatttgatcgatggcaccgtcaaaatgctgatttgttcatcagatgtcctgctcacgattgatgttaaaatctcttcgagcttcttcgccgttccgccgcctgttgtgcaaatggagacgatcgccttctttttgcctgagacccgcggtttatcggcccataaatcgatgaaatcctttgtaaccgaatcgtagatggcgtgcaaattcaaattcaaataattcaccttgcggacggcatcgagcaccatcgatgtcgtaacattgctgatcgttttttttttaacgcccgtttgttgttcaagcctgctttccagcatcgcaagcgatcccatgtcgacaagcattaaaacgccttctccttcatcaacctgcttcactttctccgccaggcagctgacgatttccgagggtgaaacggtcaaaggcatatcaaccgcagcgatcggggtgcttcccagcagttcagtggctacttcaaccatagagcttgccgtgctgtttccatgggcggccacgacaatgcccgtccttttgttttctttccatgatttaatcgactgaatgagcatcgtcaagtagatgacttcgatttccggaacggttactttgaaatatgcttgaattttatctttgaaaatgagtgcgacctcgtattctttcacatgggtttccctgatttcatctgtttcctgcgaatttaagacatcaatctgctttccgcgctttaaaaatgcggcgatgtgcatgctcaggaaatagatgaatttacggtcgaacttgcagtcaagctcatgttcggcgactccctttaattctttcgtcatctgaatcacgtcgtctacaacgaatttgagtaaactgtggttttgaagcattttctgattaaaaaagcttctgacgtgcaaatgaatatccgttaatatatattgattgatttgcttttttgttaagccttctttattgaggattttcgctttttcttctatgacatgatacaagttaaaggagtcatcgattttcgttgcttcatcttccacaatcggagagatgatcgttgtaatgttgacatattcagaaatcattttgctccgttcaatatttttgctgctggacatccagtcctctttgatctcgtccggaagatcccggacggtcagttcaacaacctcgtctttgtcaaggttatttaaaaacccgtgcgcacagaccagctgtacatttgatttcagctgcccgacatttccgaattttgcagaatgaatcagtgcattatacacatcgatgtgcacatttaagttttttttgatccgctctgcctctttccccaataaaaacgttgtcagttccactctttctccaagggaccgttcatcgagcgaagggatatgtacggtcatcggaattctccgcaaaaatgtcttcagcaatgcagagctcggattttctgttgtcgcacagataaacaggacttttgccgttcgtttatgctctgtttcaccaagcctgttgtatgtgccgctgtctatgaaataaaacagcatttcctgcccctccggcgggaggcgatggatttcatccataaacagaatgcccccgtccgcctgctcgactaatcctgctttgtcttcacccgcacctgtaaaagacccttttttatgtccgaacaattgagagagcaataattgagggttgttatagtaatctgcacagttgaatgtgatgaacggggaatcgggcttcaatatgtcagaataaacggcgaactggtagatccgattcgcaaacagcgatttccccgaacccgtcggcccgagcagcagcatatgcaagccgtgcggaggataaaagactgccgctttcgcctgagaaattgcctttttcaagctccctttagccccgatcatgagctcgaggggatcggcggatatattgcgcgccggctttttttggccgtcagccagccgcctcagttcttcaacctccatcaactctgaattccatttgatgttcaagacgttttcaacaatttccaccgggatgtagcggacggggaacgttttaatcttgatcacctttttggcccgaacgagattgtttaattcaaagctgacattggaacgctccatttgcagctgcccggcgatttctttagccgaattcccttgtatctttaaaagctgattgatattcgtttcgcgaaaattatccagcagctgatggtagattttatctattcttttcatatgtatcatcctttgttctcgattgatcagcaaaaggctggggactttcttgaagattcagaattccaaaagcgtatcacgggataaaaaaagatcttttacagattgacaaccccggttcaccctacttttatatcgattagagagagctctcatgacacatttggtgtttttgcttcatcggcatctatggaaacaccctcccaaagtagcagcttgtcaatagtgtatcatcattgagaaaaatattggtgaaaacatcctgtatttttctttaaatgcaaatgttttgtgacgagctctgctggttcgaggtcgcttcgatatcgtatggccgaacgatcggctgcctaagtcattaaaaaaagaccgttgacgatgaacggccattttttcttcatgattcatctcccttgaaaatgaacgtttcctttaaaagtctgccttcgcttcctttttccgtccaaatcatgtccacttccaattcggtcgcattctctgccataagcagattgcggtgcttgacagagcttccgtgatttaagcttttggctaaagaaaccggattttcgtgaggaatgttccaaagcgaaaatttcgttgaagaattaggctcgttccgatagacaaaaatttccgccgaagccacatcgtgtccaatgtttttgatttcgacagcataagtatgaaacgctcctttttccggtttcgccattccgtttccggcttcggctttaccgatttgaacttcccattgttttgaagcttgtttaaccggcaattcttcaaacgtcagcgctttcgtttcaaatgacggaacaatcaagccgaacaggcacgatgcacatatgaataaccgcatatttttcactcctggatggtttatttccccatatgttttcctaattcataaatcctatgtataccggcttttcactccggcttccggcagggtaaataaaaggattggagtgatcaagcaatgccgcaaaacaataacaatcgatatgaactctttttcaaaaaaagatacaaagttctacatatattaaacgattttctcatcggccttttattccttgtcgggagcttctgctttttctccgaggaactgaagccggcgggactatggatgtttgtgatcggcagctttcagctgttaatcaggccgacgatccgtttggttcatgattttcactacagaaagtttgttgagagccggcgttccaaatgccgggagtaaacacaccacagtaagaccgctaagcagcgcatataaaaaaggccgaatcatatcggcctttcctctgtcacacaagccactccttacaatcggcggcaagccgtgccaactcgttcatgaaggcgccggcatgatagccgtcacacacggcatggtgtacttgcagggaaacgggcaaaaatgtttcccggccttctgaaaagtatttcccgtttgtgataatcggcagcaagtgttcgctgttatcaaggtttaaattgaagtttgtaaagctcacccatggaatagatgaaactgagaacgtattgggcgggatgtccggcttagcccaaaggccccttttgtctccaaagcgctcagcgtccagaagatattgatgataaaactgcgaaaaatcgtctgagtattccgtccagagggcggaaaacgtttggtcgtcctgatgaaaaatcgcatagcacggatgcatttgttcccaataacccagccgtcctttgtcatcaaaagttgttctaaactcagggcgcgaatgaatgacccttgatacgatataaataaaagccgggtacagcttgatcttctttttcttgagcaaggcgagcaaatttgtcacattgacgtttgccgtgatgcagaaagaacatttcgcatccttcatgtaatggtcaaaataggattttctataccaagtgtcaagctcgattgtttgaaaattcatgttttacctcctaaaatatagatttttattttaggaggactgcttcactgatttcggcaatattctcacctcatcctgtattgtaaatgaattgtagcgcgtttcggaggccgaagcaaccgatccctccttctttgtattcttgctgtgccgttctccgtctctcacccccggctgtcatttaggttatactgacatatatcggggtgaagatatgaacagcaaatcacgattgacgcctgaaatgtggcgggcaattacggaaaacgattccgcctatgacggagttttttattacgcggtcaaaacgaccggcatattttgccgcccatcctgcaaatcgagagttccgcaaatcgacaatgtgcagatttttttcaatgcaaaagatgctttatcagaagggttccgcccctgcaaacgctgcaatcccgccggagcgctgctgccggatgaagagctggcacagcgggtagtgcaaatcatcgagaaatcttatcgcgatacgctgtctctgcaagctttggctgacaggtgccatatcagcccttttcacctgcagcggacatttaaacgaatcaaaggcgtctcgccggcagaatacatcctgcagaaaaggattgagaaagcggtcgatttgcttgctcattcagaacgatcgatcgcagaaatcgcttcaatggtaggcattgcgaatgcggaatattttgcctctttgtttaaaaagaagactgggcaatcgccgacgtcgtaccggcaaatgaaacggaggtaaacatatggacgatcaaatcgtatactggcgtacgcttatttgccgaggttggcagattcacattggggcgactgcccgcgggctctgttttacagggggatggaatcaaggcttcgaggatttggccgcttgggctgaaaaaagatttacacagccagttttcattcgggatgacaaaggattggcagaatacgccgagcagctgcaggcgtatttgaacggcaagcgaactcatttcagctttcctgtcgaccttgccggcacgccttttcagctggcagtgtggaaggcgctctccgaaatcccttacggcagcacttgctcctattccgatatcgccgagcatattgaaaagcaggccgctgtgcgggcagtaggcgcggcgatcggcgcaaatccgctgttaatggtggtgccttgccatcgggttatcggtaaaagcgggcagctcacgggataccggggcggattggatatgaaaaaagaactgatgatgatggagtccggcggtgtaaccgcacaattcaattaaagccccgttcgaatgtcgaacggggccgttttgttaaaagtcaaagttatcgggatcagggccgacacgggtgttttcattcagcgcgtcaatttgcttcatttcctcggtggtcagttcaaaatcaaatatgtccgcgttttgggcaatccgctccgctttagtcgacttcggaatcgtaacgaccccgttttgcaaatcccagcgcaaaatgacttgggccggtgtcttgccgtacttgtccgcgatatctttcagcagtggatggctgagcaattggccttgcatcagcggcgaccatgcttgcagctggatgccgtgcgcacggcaaaacgcttgcagctctttctgcgtcagccgcggatgatactcaacctggttgatcgccggtttgacggcggcatctttcagcaagtcttccagatggtgaatctgaaaattgctcactccgattgcttttacgcgtccttgttcataaagtgtttcaagcgctttccacgccgctttgtagcgtccttcaacaggccagtggatcaggtataaatcaaggtagtcaagtccgagcttttcgagactcgcctcataggctgcaatcgtttcgtcatagcctaaatcgtcattccagacctttgatgtaacaaacaggtcttctcttgaaatgccggcttctttcaacccctcgcggattccttgcccaaccccctcttcattaccgtagatggctgcggtatcaatactgcggtagccgtgtttaatcgccgtttttacggcttgtaccagttcgggcccttcttctactttaaatacgccaagtccaaaccaaggcatagctgtcccgttattcaatttgattcgatcttgcaaattttttgctgtcatcatttaattggcctccttatattttgtatgcgtcatgcgcagttttcctttaaagcttgattttgtttttgatcattttgtttttgatcatttcgttccagcgccctgctccagcctgtcagcacgacggcgccgagcaccatcaaagctcccacccatggagtgtgaatcaatccgatcgattgtgtgatggcgcctcctgtataagaaccgatcgctataccggcgttgaacgccgcaatattgacagctgatgcgacatcaaccgcccctggaacaaaccgttcagccagaatcaccacataggactggagcccggggacattcatgaaggctaaaaatcccatcagcatgatgacgataaagcccgctgcctgataaggagcagccgccgttaagatgagaagcacagccgcctgggcgatgaacatatagaataatgcagtaagcggttttttgttggccgctttacctccgataatatttccgagcgcgacggcaatgccgtaagcaagcaaaatgacggcaacagcttcctgtttaaagcccgtcacatgctgaagcagcggggataaatacgtaaagacaacaaatgtccctccataaccaagcgccgtaatgatgaataaaagcagcagccgcccattggtcacaagcttcaactggctcttgaaagacgttcggacgcctttcggcaaatcgcccggaacaagtaagctgttggcgataaacgccagtgcgccgacagcgacgatcgccgcaaaagcaatccgccagccgaactgctgacctaggaacgtgccgatgggaactccggtaatcattgcaatcgtcagcccggtaaacatgatcgatatcgctccggctcttttatccgccgggactaggcttgccgcaatcgttgaaccgattgacataaatacgccatgagaaaacgccgaaatcacgcgggcggttaataaaacaccgatgcttccggcacatgccgcaagcccgttgccgatcataaaaatgagcataatcaccagcagcagcgcttttctcggcatactggatgtgacagacgtcagaacaggtgcgccgactgttacgcccagtgcgtataatgatacggtcagtcctgccgtcgtcaccgaaatattcatgtcttcagcaattaaaggcagaagccccacgctgatgaattcggtcgtgccgatggcaaatgcgctggccgccaaggctaaaagcgctaatatactgcgttttttatcatgaacagaggtcattctttttctcctttcttttttaaggtatagcaaatggctgccggctaatgatattatggtacatatcatctgcgaaaaaaagtacgcacttttaagtgtgataggaaccaaaaagtgagataggtacttttcggtacctatggattggaggagaacatgaagccgaaaaagtataatatatctgtcgaagctacacttgaagtgatcggcgggaaatggaaatgcgtgattttgtgtcacttgacgcacggcaaaaaacgcacgagcgagctcaagcggctgatgccgaacattacgcagaaaatgctgacccagcagctgcgcgaactggaggaggacggcgtcatcaaccggatcgtgtaccagcaggtgccgccgaaggtcgaatacgaactcagcgaatacggatggacgcttaaagacattttggattcgctgtgctcctggggcgaaaaacacattacaaaagtgtatggagacaaatttgctgttttggaggacagcgtgctgaatgaacaattacaggaaacatgataaataagtggaggtcaggatgggaaaatggtttctttccggaggcggagatgcacaccaaaccgaacagctggatcggcatattgcccggagcatctgtcctcataagccattattgtatattccgattgccatggacgccgacaggtatgatgacggcttcgactggatcagccggctctttcacccgctcggcatcaaaaacattgtcatgtggacggatgtcaaaggtaaaaccgtacacgatttagacgtgttttctgccgtatatatcggcggaggaaacacgtttcgtctgctaaaacaattcatcgaatcgcattttaccgcggttttaaagcgctatgccgaaagcggcggcgccatttacggcggaagcgccggcgccgtcattctcggaaagaacattatgacttgctcttatatggatcgcaacgcttgcggattgcgggattttaacggcttaaagctcctcggagactattcggtttggtgccactacaaggctgaacatgatccgctgattaaaaggtttaggaatgcttttggcactcccgtcatcgccttgccagaggaaacaggaatcgcagcaagcacttcagacatccgggtcatcggaacaaagcccgcccgtatgtttaaagaagacggcgcagtattcgtctcagatcaatttgttttataaagcaaaaaacgcttcggctcatcagcgaagcgtttttcttgtttttgcggatgcaagccgtttgaccaggcgttccgtcagaaaaaacacggctaagcctaagcctagcaaaaaagaaaaattcgcaatcaacggctcatgatcaaaatattcaaaagtactatttccaaaaagtatcacggcccagaaaataaaagccgcacggcaagctgcatcttcggcttttttccttttgggtctgcatctttaaaaaacatcacaacgcccccaaggagactcccacaccccaatctgctgatttctttcgcacttactgtgttcttatcccctcttccgtttcataaaaccgcgccagctccacaatcatcgctcccatccgttcgagatccggagcgagaaggcgttcgactccttcttctcttaaagcttctgccgtcacttttccgacagcggccgccaacacgctgtcttgaaaagattgaacaattttctccgcatagccgttttctttcgcgaaatgaaaaagcgagcggacttggacagccgttgtaaagcaaaccgcatccacttcacggttgatgatctcgctgcacaataaagcgacggtttcccggtctggagcaacatgccgatacggcagaagcggaacagcgtctgcacctttctcttccaaaaactgaagcagtgacggagcgttttcgccgtggagctgaaccatcacccgtttgccggaaaaatcgtgggattggagcgagtcgatcagtcccttggtcgtgccgtcttcatccgccgcaacgggcgtaatgccgagcttttttaaagcggcgattgttttgtagcctctcgatgccgatttcgccctgcggatcgcttgtaaatagcgctctccgatcccaagtttctcagctaggctgacaagcgtttccgtcccgattccggtcgtgaaaatcacccagtcggctcccgtttcaacgaaggcacgcaaatcagggcctacttctttttcggccaaaaacacggtaccctgaagggagcgaatgaggggaaccccgccttgctttttgatcagcgtgctcatttcatccgtttttcgcgatgctccgatggcaattcttctgccgttcaatccttttcccaatgcaatccctcttttccgtaatctgttttttgtcaatgcaactgtttactagcatcttccaaatgagatatgattgaattatctaaaaataacaggaggttttttcaatgcattctcaattcgaaacccgagccgagcatttgacgaaacatgcccgttttttcgagtataccactgcctctgacccgattggaagcggaataatcagcccggttcctgtgaaagagttcgggcctgaattgtatgagacaggtgaaacgcggatcatcccgctggacatttccgaagaactgaagacggattatcccgcttcaagcccttcccttctcgcccacttcatcaagattcgttcaggcgacacgatacacactgccccccgtgcgacaagcgaactatattacattgtcagcggcgcagggaaaaccgaaacgggcgaagatacgattcactggcagaaaggcgattttttgactttgcctgccggttcaggcagccggcataccgcagcagaagatgcagccatttattacatcaccgattcacctctcctgaattatttgggcgtaaagccgtcggaatcccgctttcaaccaactctctacaccgctgaacagtcaaaagcaaaattggctgaagcggccgccgctcctgacgcccgttatcgcaaccgcatttccgttctcttgaacaatgaaatattcgatcaaacgctgacgatcacccatgtattgtgggcaatgttcggcatcgtgcctcccggctccaatcaagctcctcacagccacaagtcggtggctctcgattttgtcgcctatgccgcacccggcacgtatacattagtcggaagcaaaatcgatccggccacaaaggaaatcattgatccgaaacgaattgactgggtaaccggaaaagccttcattacaccgccgggattatggcattcccaccataatgagtcagatgaagccgcctatatcatccccatccaagatgcgggcctgcaaacgtacctccggacactggatattcaatttcagcattatgaaaaatgaaaaagcgggaagccggatcattcttttcggctccccgcttttctatttatttttcgctttcttggaaatcatgtcggcgatttcttcggcctgtgcctgaacagcgtttggatcatacggccaaaatctgtccggatcgaggaaaaagaccttgccttttttcaccgcgtcaagcgatgcccaaaccggattgtcctgatcaagctttccgttgtatgattcgtcgacaaatatgtagtctccggcatatttcggcaggacctcgaaagatatggctttatatccgtcagctgtatcaatggcatcctttttaacagattcaggcggcgtcagtcccagctgcgtatagatcgcttctccgccccgatacccgtatgccccgtagacatataaagattttgcatatgcgccgattaaagagaacgtttcaccttttacagatgcatctttaattttcgcgcgggcggctttcattttttgattaaacgttttcgtccactcccgagcttccttttccttgccgagcagcttgccaaacgttttcatttcatcgcgtgcatctttaaatgtgccgaacggatagacgacagtgggagcgatttttgacagctttttatattcttttgaatcgttcgtcatcgatacgattaaatcgggtttaagttcaagaactttttccacagatactgaaaaaccgtcttttcccccgatatcctttattcctgaaacttgatctttaatataaggacttccgaggtactttcccgtttctccaagcggcttgatcccgaatgcaagcatggttcccgcatagccaatcgtcacgacgcgcttcggattagccggtacagtgacatttccgttgatggttttcaccactcttgttttctcttcatttttctctgatgcagcctgtttctggccgctttgacagcctgaaagaaatacagcgaaagcgagtaaaagggtgaatatataagaatattgctttttcgtcatatttaatcctccaattgataataattatcattatcaatatacaggatatttgtcatcttgagaagtccttatttgagttacggctgatcagaccgttcgttccggcgatagtattcaattacaaattctttaaagttgcgtgccgccggcgacaaataatggtctttcaggacggcgagaccgatcgtcctctcagaacggtagtctgacactcggcaaaatgccactggagaatggacgtgctccgccgttttcggcaggattgctacaccgagccctgctgatactagtcccaaaatcgtcgacacttcttccccttcaaaagcaagcttcgggctgatggacagtccccggcacatttgatcaaacacatatcgaagaccatagcccggcttaaaacagacaaagtcttcgtgtgcaatcgaccggatcgcgacttctttccgatctgcaagcgggtggtcggctggaagcaccagataaagcggctcagtatccaacaccgtccattcaagatgctcgtttggaagcggcggagagctgaggcagatatcagcttcgcccgtctccaccatgtgctgaagatgttcatttgcggcctgatacagacggaaagcaacattcgggtatttctttttaaattcggcaatcagctgcggcatgagccgcgaaccaagcgtatgcaaaaatgataccgagatttccccggcattcggattgacgctttccctgatttgctgaacgccttcgtcaagggcaaggcgggcctgcttcgctttgatgaggaactgctcgccgtactttgtcaggcggatcgattttgtttttcgaataaacagcgggacgcccaattcttcttcaagctttttgatcgacctgctcaaagccggctgggaaatccgttgttccaaggctgcttttgtaaagtgtttatgcctgctcacggcaataaaatggtcaatttgatagagttccaatgctcatccgctccttcataaataaaacgcatgatgatgatagttattataaattagacacatcacaaatgaaagcgtaccatgaaacatagattgtcattctagaaaagaggagctgccatgacctacatacagccgcattcgaaggattatcacaaagcgagcatcgccttattcatcagcggttttgtgacatttgccacactttacaccacacagccgctcatgcctctgtttgcggaggaattcggcatatcggcggcagctgcaagcttaactttatccatttcaacaggcatattggcttttgcattgctcacggcagcagctttatctgacgggttcggccggaaaacgattatggcaatatccctgtttgcgacatcagtgctcggcctcttgaccgcctttagtccgaacttcgcggcgctcttggcgatgagagggctgcttggctttttccttgcaggcgtgcccgcgatcgccatggcttatgtcggagaggaatttgatccgcgagggctcggcaaaatgatggggctatacattagcggcacaagcctcggaggaatgagcggaaggcttttgaccggccttttgacagacttgttcagctggcgcgcggcgctaggaatcatcggggcattatcagtactattaagctatttgttttggattttgctgccccggccgcagcactccgctaagcgaaaaacaagtgtgaaaaaagcgagcttggcctacggcgccgtcttgatgaacaaacggctgctgtcaatcatttcacttggatttctattaatgggaagctttgttacgctgttcaattatatcgggtttcagttgatgggacctccgtacagactctctcaaactgtcatcgggttcatctttatcgtttatttggcggggacgctcagttctgtctatatggggaagaaagccgatcgttttggcagcccgttgatgctgaaaatcgggattgccattatcgcaggaggcgcattgcttacgcttctgcctcagcttcctcttaaaattgccggaatcgctgtttttacatttggatttttcgggtcgcattcgatcgcaagctcctgggtcgggcagacggccggcgaacagcgcgttcaagcttcctccctttatttgctgagctattatctcggctcaagcttagcggggtctttcggaggcttcttctggacccattttaaatggccgggaatcatctcattcattatcgggctgcttttgatcgcttatccggtcattttctttgccgaagccaaaagaaacaaacggcaagacaattcacaggtccgaaataaaagctaaactttcttcaccgcatgccgatatttaaatcaaagccagcatggcgattcctcctgaagatcagccgtttttagaatgattgaacacagcctgtcatgttggcttttcctttatctccctctataatggtttgagggggggaatcaccttgcttaaaacaatcggattttatggatttttggcatctgtatgtttaaatctttttctcaggtttgggctcaagataaacggcacagcgaatgatatcatctcaacggcctccctcgtattcgtgctggtgtacgtatgggacgacttgaaaaaacgaagtgcaaaaacgctcatcttacagggaatcactctcatcatctttgtggcgttattggtgtttgtcatcatgaaaggacaaacattcattgcttctctgccttttttcgagggttgggaaacgccggcaaaatgggtgtatattttgctcgttttgttcttgggatcaaaccttttcatctatatcaatgaaaaaataacaaactctaaaaaagaggcatcctgatcaattcagaatgcctctttttgtttacgttcttgcaatgcagtccgccttcacattatgttgggaaacgccgccgtcccatacatcctttgcatagcgcccttcttctaaaagtgcggacagccagctttgcgactcttcccgactcgcaccctgtactatgcgatacgcctcgcacaaagcttgttcaacagctggagccatgcggcttccgtctccgcacacatacaggcggccgccttcgttcaacaagtgaatcagcaaggctgcatcctctctgagcaaatcttgcacatatgttttcggccggccctcaagccgggaaaacgctgtatgcagatggacgattccgtccttttccgcttgctccaactcgtctcgatacagaaaatcttcgttcggacggcggcagccgaagtacaaatgcgcttcaccgagcttcacaccggcatcgcgctggatgcggcgcgcctgaagaaatccgcggtaaggggcgattccggtgcccggcccgaccatgatcaccggtgtttcaggatcttcgggaagccggaagcctgactgaggctctctgatgaaacacgaaatcgcgtctcccggctcaaggccggcgagatagttcgatgcaactcccttataatgcccacggccgctcaacgccgggccgcttacgacagagacggtgatgcttgtttgccgcgggttaagctgcggcgaactggaaatcgaatagtacctcggttttagcggaggaagaagcgccagaaaacgggcgaacggcagttcacaggccgggtattgctcaagcaggtcaagcattgtcagccgcttattcaacacttgatccttatagacgtcatctttcagcaggtcttcaagctcgcgctgatgaggcggacaaacagtatgagccgccagctcgcgtatctgggcccttgtggccggttcctggagctcgacgcaatgttgaaaaaggtctttgacatgaacgggcctctccaaaggcaaatgtgatgcttgattccggccgctaatcagaatttgttcatttccgttcagcccaaaccgctgaaaaacgcggccaatcagcacttcgctgttttgcggtagcacaccgagatggtctccctcctgatatgcggcgccttcaggaagcgatatttcaatatgccttgtgcttctcccgctcttttcacactgcagttctcggtttgccgatatcttcgctgtgaacacctgataagctttagccagcggcgaagccgcaggtgcgtttacgaactcgacagataaggcttgcctgtctgtttctgtttgattcggctcgggttcggccaatgaaaattcggttcttaaaagcggccacagatcatatttccatgactcaaactgtccttcaaaatcatcgcctgcatccccttctccaagcttgtgcagcctttgggcgccttttttttccaatacgctgtcaatcaggcgcggaatccgctggtaggtgctggcccagctgcggttaccgcagccgaataccgcatatttgacaccacgcaaatcgtctgtctgatcatgctcaagccaattgacaaattcctttgcgcaatcgggcgggtttccgttataggaagccgtcacaatgataacagccccttctgccgggatggcgcctgcgtattgatcaagctccgccgtccggctgtgaaacccttgctcacgcgcttcttcagcaagctccttcgcaatctcttcggctgtgccgagatttgaaccgtagagcacaagaagaggggttccgtgcgtattttccgccgccggtgcggaaggccgttcttcctgccgtccgttctcttcaggctgagcgcccggcatcgccgtcattgcttcttttttcctcggcctcacccggattgtgaaaccatccggttttaatgtcagcgattctttgatcttcaattggtagtttgcatgatcttcaagatcaaagtactgaagaatcatgccgagcacaagcgtcgcttcatgaagggcgaactgcatgccgatgcatgccctttggccgttgccaaacggtttgtatgcgtgcgccggaatgctgtccatctgctcgaaccgttcaggccggaatgcctcggcatcttctccccagacgctttgatctctgtgcagttttgggatgagcactgtaacgctctgtccttttggaatcaaatattttcccccgataaccgtttcttcttttgcataaagagagaaagccggtgccgtcggccaaagccttatcgattcattcaaaatcattcggatgtatttcagctgctgaacctgtttgtaggatgggacgggatcggtcagcacgcggtctgcttcttcatacgctttcttaagcttatccggatgcttcaggagcagatagattgcaaacgataataaaccgctcgtcgtctcgtgtccggcaatcaaaaatgtaataatttgatagcggatattctcatcatccagtttttcgccggtctcagggtctttcgcatgaagcataagcgacaagaggtcatttccgctttcactctcggcctgcttccggtcagcgatgatccggtcaacaagagaaaacatcgactcgacatcgctgttaaaccggcgcttcgtttgaatcatcagcttatcctgcagcgggaagcgcttcgtctgtctcatcgcttcgctcaaaccccggaccatgctctcaataaacggatgctgcccttcacggtagaagctgttaaagcggtagttaaacccgcataagccgatcgtgtccagcgtcagccgcgtcatatcgtccggcacatcaatgctttcatcctgattgagacgggaccacttttgaatgagctggacggcgatatcctgcatcatgggatggtatcccttcatcgctttctggctgaagctcggcagaaggatgttgtgggctttccgccaattgggttcttccgtccagcttgtaaagagcccgtctccgctgaactcgcgaactttcaatagccccttccccatgtttttgtcaaaacgggattcttcagagacttctttaaccagttcatggctggacacaaaaaccccaatcgcatccgcaaacttaaattgaaagataggccccatctcatccgcgattttccaaagtgactgggagaccctgtttttgtcaagcaaaggcaggttgccgagcggcccgtaagttttagggattggaattccatctaacttgttcatgaaaatcatcctttctgttttggaaaaaagcatttcatccatgatgtttaacagcatcccaggaacattcttcaatctcctccatcagttcggtagggtcctcgaattcccctgctcttaccaacttctgaatatgaacgaacgctccgaatacaacagccgacaaaatgtgggaaggcaaagggcgaatcatgccggccgctttccctttttcaaaaaataaatagatgaaatccagcagttcgttcaagacctcgcggcttttctcagtcaagtaatgagaggtcttgtcaatttccaaaaaatacagcgcatggatattttcctgagaaaactcgaaaaggcagcggaaaatgtgctgaaattgtttttttatgcctgctgaatcttcaggatagccctcctctatcttttctttaaatctcttcacactgtcttggaacaagacgtttacaagtgcttccttgctgtcaaagtagcggtagatggtgcctgcaccgacgtttgccttatcggcgatcatcggaatggttgcggcgtcaaagcctctgtccgcgaaaaggacgagcgaagcctcgataatcttctgatatttgctttccgattccattgattttgccctccaagtcagcggaatgaacgttcattccgctgtttccaatacattcactttttgacagaacacccgaagattccttttttaatataaaaatttttaagggaaaatgaaaaaagggataataggaccaattggcgatatgagctgaaatcacaaattgaaaacagacagtgcagatttaataatattcttatatattaattttgatgaaaaaaagaggaactgatatgtcatcagttcctccgccatcggattattttgcctttttgacttttattttgctcactttgctcgtattgccggctttatcttttgcagtgaccgctaaaacggtgtttgccttttgtttttttattttgacaaaaaacgcgccttttttatcggccttgccggttccgatcgttttctttcctgatttgacgatgatggcggcgttcgcttctgctttccccttaacggccgtgctcttgtttgtcaccggattcaccttcggcgcagacggcggggttttgtcaagcacagtgacggctgtcgctttgctgacatttccggctttatcctttgctgttacaccgatgacggttccggctttttgcctgctgattttcagcttgtattcaccttttccgttcgctttgccggaagcgatcgtctttcctttagcttttgcgctgacttgcgcgtttgcttctgtttttccctgaatcaccgtacttttatcggaaacctgataaactttcggggcgcctggcgggatgacgtcagccaccgtcattttgacatcgccgctttctctgtggtcatcagcagatgcggagacatacaaaacggcatattctttttgcttgttgattttcactttaaacgctccggatgcatccgctttgccttgcgcgatcacttttttggacgtgtttttcactttgatcgtgtagccggctgccgttctacccgttacggcagtatctttgttcgtgatgcgtttgacggacgggtttttcggcgctttttccacgacggttctgagcgaggtttccgcctgatggcccgatgccgcgacatgaagaacttgccccgccttctgggccggaattttcactgaaaacgcgcctgattttccggccgtgcccgtccccaatacttgcttccctcgcaagattttgaccgtcacaccgcttttggctgtgcctgtcactgccgtatggcggtttaaaacgggatgaaccttcatgttcagctcaaaaacgctggctgcatgaaaaacattcagccttccccacccggagacgaagtcatatccgggaatttgtgcagccggttctatatccaggtcataatccgggtttggattatcctgctcttcaaatgccacatctgctgtcgtctcggtcaataggcttgcgatttgctttggtttcaaggacggattctgtgacaaaagaagtcctgctgcagctgccacgtgcggcgccgccatcgatgttccgctcatataagtgacattcccgtccggaacgaggcttggaatatcggttcccggcgccaccatatcgagaccttttccataattggagtagtccgagacaagatcgagattattggtcgccccgactgaaagcgtatatttcgaagatgcagggtaggaaatctccgatactccgtcatttccggtggcggcaacgatcgtcacatttttagaagccgcatatttaagcgcatattccatcacccggctgtatggcccgccaagacttaaattgatgacttttgcaccgtggtcggcggcatagatgatgccgtttgcaatctgttccgtatctccactgcctgaagaatccagcactttgacaggcagaattttggcataagcattgattcccgccatcgaaaaatggttgtcttgcgcggctgcaatgatgcctgacacgtgtgtgccgtggccattgtcatccatcgcatccgccgtgcggccgacatagttatagccttcgtcttttttgacgctgccgcttaaatccgcaagggtatgatcaacgcctgtgtcaacgacggcgattactgtatctttcagctttttgcctttcatcagcttctgaagctgttcaaattgtatgtcagcattcgcagcacggtttttgccgttatttttgagcgaccattgatatggatattgggtgtctcttgacagtgcttcatattgctgaacctgttcgacgaattccacttcaggcatcttggcgatcttggaggctgccgcctgatattgctttgccgccgctttgaatccggaagaacggctttccttcatttccacaacgtacatatctttaaatgccgttttgcttttaccgaggggctctaatgcctggacgccggatgattgggctttagatttgaaagatcccggttttttgccttctttcaattttacgatgtaacggttttcgggcgcgcttgatgaagctgtcgccatccccgctttttcaagcacagccgatactttgctgcctgttaattgttcgatgccgatgtctttcgcgacttgatccagctgttttttcaacggctcgggaacggacgcgcgagctgtttcgtacaggcgactgatcgctttttgatcatcattcgtaatcgagtatgcgctcacttgtccgtttttagcgacatctgcaaacagcggcttcagctgcaccaggtctttgtagacactgtctctcatcgatttgttaaagagcatttttgcgctgatgaatggagctgctttatagtaaagggaagacagctcttttcctttttcagtttttgaaagaacttcatccctgatcgttcttaactgttttaatatgcccttgcctgtttccctttcggaaacgcttaattctgccggacactcttcttctgcctcttggattgacggaggcagggtgacgccttcatagctgatggtgtaagaaatatctgtaattgaagtggtttcgttttcctcatcatggtgattttctacttttatgtagtaaggacctttccaggcaatcggaaaatcgattaaagcaggattattttcataggagtagccgttgtatcggtcaaacgtttgatgaccagttgcattttccaggctggagtagacggaaatgttcagctctgcatctgatttcaatttgacgcggaagtgcgtatagtttgcgatttcctgatttgaaggattgactttataccaatgcacctcgtcatcgctttgaaacgaagcttcaacaggggacgcgctggtcaatgtggtttcgttattcggaacgctgtcttcggctgccattgtcttcggtaaaggcagctggccaaaaattaatgcggcaaggagaaagaaaacaattgaacttttcacgatccttttgttcataaatacctccggaaaatatagtaaaaacgttcactttgatattaaaccatgtttgctatgttaatggaatacttttctttaaaaatacaaaaatatgatatttaagatccagtttcaactctatcaaacataaaaaatcccttccgtattgaaagggatgatcatacaaagttcatgattttaccgcagaaatgcagcagtaatttttgttcatatgtaccgtgatgtctctgaaatggctttcctcaagcagttgcttgatttgctcttctgagtataaggaaaagccttttgtttttttcgattttttcatttgcccttccagatgcacagcgagaaacagcgtgccgtcaacctgtaaaacacggtaaatttcttttaatgcctgtttgaaatccgtccaaaaataaatggtgtggactgaaaatactttatgaaaagaacgatccggataaggaatttgttcggcatggccaagctttaattcggcttttccttcttctttcacatgacggattcgccgcattccctgcttgaccatgctttttgatgcgtctatgccgcaggccttgccgccctcaagcatctccgcaatccgataaagtgccgctccgcttcccgttccgatttcaaggatgcgctcatgcggacagatatccatcaagttgatggtccattcgtttatatcatgattcccgttttccatatatgacgcgacccatttcgacaaaatgcctctcgggctccgcaattgttttccaagccattgttcaaacacgttaaaacacctgctttaattctaattagcccgatttttgctgcaaatcgtacaaacgggcctttctccactcatatcggccaatgaaccgaatattaaaagcatttgcaaaaaataactgcattgttttgttacattccataactagacggcttcagctttgaaaagtttcgctttaagaaaactgtttttttaatgaattggtctatccgccctttccacaacttaatcccatgcatagtatatatggaattttcactaaaaggtggtgctatttatgggctttggttacggcggcggatgctgcggcggctggggtggctaccctggcggatacggcggcggatacggctatggaggcggattcgcgcttgttgtggttctattcattcttttaattatcatcggcgcttgttacgtctgctaaatgaacaggaggggggctttaaagctcccctttcattttgccatttagtttgttcaaatgaaaaagagcagaaaacaaaccgttttctgctctttctcaataataccaataatgcggccaatacccgaagtggcgcaccatctccattctttggcgccggtacggattaccgtatccgtgcttgaaagaatggggcatcgatgtatacccgtggccgataaaaggcattctgccgtttttctgcatgcttttcacctgcattccttgaattgcttgcttcatattatgcagaaaagcggagatgcggaactcgttttgccccggctaaacctggtccttctcccgagtgtaatgtgccaacagttcccttctataaatcatcatgatctcctcctttattttttttcgcgctttaagttagcgctggctgttcaggtaaagatattttagctgcagatctttcatttcattgtacatttgttcaatttcgtattctcgctcgtactcttccggacttttaaatcgtctctgaatggttagtgttaagaagaatagattaatggtcacatcgctcaccccctttcaagttcgctaaaaaacaaaaacagcccgcagatcatctgacaaacctgcgggcgcaaacaaaaaccgccagataaaaacgaatcgagtctttatcttgcgggaggagcagcgtattattatgcctaacttcctaacgtatcggctgtgctgtaaaagcatcggttaaggaagtgcacaatctctcccacaggtttgatgaatcatggtattggcattcacaaagtctaatgtatgtagtcagtgctggtttcatgttcatcaacctcctttgctttttgtttactttgtaagtatatccatcaaattcctgtttgtaaaccgttttttttaaaaatggacggattgatcgagcaaaaaaaaagcagagaaccccttcaggagtctctctgcttatgattcttccatttcgtctaattgtcttttatatttgagcgagcgcttcacacaatagaaagctcctcctaaaaagccgcacgtcgcgagcatcattgtcatcttttggcctgtttccaaaccttgtcccggaatgacagatccgatatataaaaatgcgcttacgctgagaagcgtaaaagcaaactgcttatagtcttccatcagcgatttgacttttttcttctgcatgtcatgatcacctgcttttgtttcataatggatatgatttgagaataacatagattgacagatgaccagacatgtaaattcagccattttaagaaagaggggccagcgcttgctgcaagtcttccaacagatcgtcaatatcctcaaccccggcggaaatacggattaatccgtctgtgatgccaagctccagcctgcgttcaggcgggatcgaagcatgagtcattcgcgccggcaccgatatcagactttcaaccgcaccaaggctttcggcgatcgtaaaccatttcaaacggccaaggacaaggtccacgttctcttcttttccgatatcaaacgagatcatgcctccgaagcccgtactttgccgcttggcaagctcatgtcccggatgggacggcagccctgggtaataaacctttttgacggcgggatgatcgtctaaaaacgccgcgattttccgggcattttgctcatgggcttccattctcaagccaagggttttcatccccctcattaagagccaggaatcctgaggcccgagaatcccgcctgtagagttttgaatgaaatggatctcttctgcgagttccttcgaggctgctacgacaagtccgccgacgacatcgctgtgtccgcccaagtacttcgtcgcgctgtggaggacgatatcggctcccaacgagattggattttgaaagtacggcgtgtagaaggtgttgtcgacaatcagcaataagtcgtgctttttcgctgtttcagcagttttcttgatgtcagtgattttcaataaaggatttgtcggcgtctcaacataaatcgcttttgtattcggcttgatcgctttttcgatgtcttcgatgctgctcgtatcactgaaggtcgcttcaatgccgatgcgattcaatacctttgtcatcacgcggtaggtgccgccgtatacatcatctgtcaatacgatgtgatcgccgcttttaaaaagcatcatgacggctgtgatcgccgccatcccagagccgaacgcatagcctgctgcaccgccttcaacatccgcgatcaaggattcgagcgccgttctcgtcggatttcccgtccgggaatattcgtatcctgtatgctggccggcgcgaggctgtttgtacgtgctgacctgatagataggaaccgataccgctcctgttttttcgtctcctgtaattccgccgtgaatcattttcgtttttggcttcatatcatattcctccttcgtaaatttttttgcttaaatagcggtcgctgctgtcgggaaaaatcgtcactatgtttgtgccggctttcgctttttcggcttctttcaatgcggcaaacaacgcggcgcctgatgagcttccaatcagaagcccttccttttccgcggcttcttttacgagtcgaaacgcatcttcgtcaagcactgtgtaaatctcatcgaaatggctttcctccatgtattccgggatgaattccattccgattccttcggtcttatgcccatgcggttcccctccgtttaaaatcgagcctttcggttcaacaataaccgttttaatggacggatttttttctttcagaaacttggcggttcccgcaaatgtgccgcctgaccccgctccggcgacgaagacgtcaatcctgccgccaagatcattccatatttccggggcaatcgttttatagtaagccaatggatttactgggtttttaaactgcaaaacgcaataagaatcgggaatctccttctcaagttcaagtgctttttcaatcgcacccttcatcccggcacttctgggggtatgaactatccgagcgccgagcgctttcataatcgactgtttttccatgctgaaatgctcgggtacgcaaaaaacgggtcgaatgccgtgctttctggcggcgagagccagaccgattcccgtattgcctgctgttgcctcaatgaccgttccaccgggtttcagctttcccgaaccgatcgcttcagcaatcagcacttctccgagccggtctttaatgctgcctcccggattcatcatttcaagttttgcatatatgttaacgcctttagggattcgaaaattcaaaatctgcagaagcggcgttttgccgatcaattcggtgatatccttgatcacattcatgttccttcctccttcaagaggtgcaaaacagagggggagcctcccccctgttttaattgattcttttaatcatgcgaagcacaagatctgtcgaatgcttggcagcctgttccaaaaattggtcaaatgaaatttcagattcttttccggcgatgtctgagagcgccctgatgacaacaaacggcgtattaaattgataagaaacctgcgcgacagccgcagcttccatttcaaccgcgtaaaggtcttcaaacttgccgcggatgaatgcgacgcggtcaggatcgctcataaaggaatcgcctgttgcaatcgttcctttgacaacctgaatgtgccccagttcagacgcttcgtcttccgccgcttggatcaatgcactgtcggctttgtatgcagccggcagattcggaacctgtccatattcataatcaaatgccgtgacatcgacatcgtgatggcggacttcggtcgagatgacgatgtctccgacattaagcgaatgatgaaagccgccggctgatccggtgttgatgacaacgtccggtttaaagcggtcaagcagaatcgtcgtgctcatggctgcattgactttgccgatgccggactttaaaagcacgacctcttttccttcataaaacccgctggtaaattcacagtttgcgatgacttcccggttcgtctgttcgagtttgcttcgcaaaatcgtgacttcttcttccattgctccgataactgcgattttcatatcttaaaacttcccttcaaattacaattttgccgcttccattacccagacaaaatcattatgcttttgaaaggcgatactgaaatgttctgaggtaaagatcgtttccatctccgaaatcgtcggataatgttccgtttcaaggtcttccgccaattgcagaaacccgttttccttcgcttttttaacagcgacagagaaggcttcccgatccttgaagacggtatcagcaaacactattttaccatgcttcccgagcatttttccatatcgcttcacagcttcccgcttctcttcgtttgtcagatggtgaaacgcataagaactgacaatcgtgtcgggagaaaacggagggtccggaaagtcaagaaagtctccgtcaacgatcaatgcattctccggcagctttgcctcggcaatttccctcatcgcttttgaaggctctacaccggtgactgcctttccggccgccagcaattttgcagtcagattgcctgtgccgacgccgaattcaagaactttatgccccgagcggctgacgacatcatccaaaatgccgtcgtagtcgcgaaacacttctttgtattgaagatcgcggccaactactgtatcatcataagaatttgcccagttctcaaataaaggaatgaactctcttcccattttgtcgtcactctccatctatttttacaattcctataagtatagtatgatttattcgattgattagttcttatcctaccacaagtcattcgttttgggtacaaaaaaggcttggttatatttcccttgtcacccggccgcttctctgctttaataaaaaatgacttgaaacgaatggaggattggtttatgaacttcggcctcgatctgatcaaagataaaattgagttttttgaggcactgagcttagaggagcttgaaaaaaagatcagtcagcagattgaaaacaaccaggcgattttgctgagggtccattcggtttcccaccatacggcggttattgacggacggatccactacagcgcagtcgttcattttaaagccgaatcataaaaaaagcgcccggttttagcaaccggccgcttttttctttatttcaattgttcaacttttgtcggcttccagccttttccgtcaacccaagtaatggctacctggtatttgacgccagtgtccttcgcccgaatggttcctttcgcatcttgcgggctgccgttgtttccgagccagatcaccgtcatgttattcttagaaacccctgtcgcatatgaaatggcttcaagcatttccttccagtcttgtgaagaggaatcatatgttgcggtatgctgtccgctctgttgtgtgccgacaggctcccagtcaggattgatgatcgttttttcaacattggcgcttgaaccgccttctgtcacttcggctccttcaaacggatcatctgatgttgacttgtcctcgtctgaagcagattctttatccttgtctgagtcggaatcgctgtcttctttatcggcagaatcgctttttcctttgtcctcatcttttacatcttcatcagatgtttgtttcttattgtcggaagcaggcgcttctgtcgtctgttcagaatcgtttttcgagacatcttgctgcgcctgctccttcggactgttcatcatcagactgctggcaacgacaacgattaataccaatacgatgcctattaaaatgttaagcacaagattcgctttcctgcgcttatcacgattttcaaaacgagattcccttgtttcgctcaagttcattgcactcctttttccctcttgcctcgcttcctattttatcatcacctgaggcattcttctatgtctggttcttttcaatttcatatacttttttaacaatatcataaaatacggcatttgtcgcagccttgctatccggcgtatccatatggacgacgacgagcgcatatttcggcttgtccgccggaaaataaccggcaaaccatttatgatagagcgtttttttgtcatctgtcgtcctgcctgtctgcgctgtgcccgattttcccgctacatcgtacggaagatcgctgaagcgccggcccgtccccttttcagatgtgacaacttttctgagcagtttttgcagcttttgcgctgtatactggtcgattttctctcctgggagctcgtgatctttaaaagccgtcatcaatgtgccgtttttatattcgatctggtctgcgatcttgacttgttttttctctccgcctcttgcgatggtcgccatcatgttgacgatttccaacggagtcagcttcacattcttttggccgatagcggtctgggctacagcttttttaacttttttgtccttttcatccccccagattgatcctgcagtttcatgataaaactgtctgaactcatcttcatgatacagctttccttcccagccgacccgtccggtcagcccaagctttgcagcagtatcttcgatcacggagctgtttttttctacgagctgtccggcaagatttgtaaacgtgtagttgcagctttccgcaaaactgtcttccaggctgagctttcctttgtcctctccggcctcaccgtacaggttcaaattgcagttaaaggttttagacggatgatccaagccgttttcaatcgctgcagcggcaatcacggttttaaaaaccgagccgggatataccggagtcagcatatagttctgccttgttttttgcgcagccatgtttaagtcgggcttgctcgcaatcgccaccacgccgttcgtctcgatgtcaagcaggaccgccccgcctttatcgagctgatggtcatcaagtacatcttccattgcctgctgaacctttttatcgagcgttgttttgacttgcagcgggtaaaacggatttgcgtctgctgtatatttgacgtccatgccgaacaaagggtttcccaatccgtccacatgatacaacagttttgtgtcttgttcaggcagcaggaattcatcaaacgtccgctccatgccgaaggtgccgattttcgtgctgatggagaggccctctttatcgggatatttgcgtctgaggaggtccgggtcttgattggtcataccgagcgtatgcgaagccagcctgttcttttctgtttcttctatgtatacgccgtaaacgcccggatatttcagtttattgattttttcgagagccgtctttgaaacggacgctccgtcatgttttgtgagaatcacgggtttttttgcatggtccagcttgcttccaagctcatcttctgtcatgtttaaaatttcggctgcttctttggccggccacggctgattttttaaaaaagggaacaagacgatggccggtttttggctgacggacaaatgttcgccgttccgatctaaaaaagatcctctcccgtctgaaatccgaacttcctccgtgcgctgtttgacgctttcctggattaagttcacattccgtttagaaaaggactcggtaaaaaacagttgaatttcagccagcctgatcagcagaaataaaagagcagccgaaatgataatcgatacccacttcatacgcttttgccatttcattataaaaacacctcatccacattgtggacgaggtcatcgtttgctaaacaaattttatgaaattttcacaatttttacaagcatttcgccgccaggtgtttgaacggttacttcgtctccaacctgcttgccgagaaggcttttcgcgattggggaatcgttcgagatttttccttcaaacggatcggcttccgcgctgcccacaatcgtataagattcttcttcaccgtcaggaagctccgtaaatgtaacggtttttccaaggctgacgatgtctgagtttgcaccgtcatcttcgatgatctttgcgttgcggatcatattgtcaagggttgtgatgcgcccttctacaaaagcttgttcttcttttgctgaatcgtattcggagttttcggaaaggtctccgaagcttcttgccactttaatacgttcaacaacttctttacgtttaaccgttttcaaatactcaagttcttcttccagttttttctttcccgtttctgtcataggaaatactttctcttgtgccatgttccttcactccttctagttggttcctcatcacttgtatgtgagagtatagacttgaatatacaagaatgaggacaacccttgtccccttcttctctcccatatttgtaaagtatcatataaaccggatggaaggctccggtaaatggtgcttatacagttaaagaagggctcaggatgagaacccttcaatttctatacataatatggtcagagttgtgtttgtctatgctatgttattataaaatcgcgttttgttcaagaatagtttgtatttttgttaccatcaggtcgatggcgacgcggttttggccgccctccggaataatgatatcggcatagcgtttcgtcggttcgacaaactggttatgcatcggtctgacgactgagatgtactgctcgatgacagaatcgatcgaacgtcctctttcttttatgtctctgagcatccttctgatgatccgcaggtcggcgtccgtatcgacatacagcttgatgtccattaagtcgcggagcctttcatcctcgagaacaaggattccttccaaaataataacatctttcggatcgacgtgcacgacttcctctgaacgcgtatgcagcttgtaatcgtaaatcggctttttgatcggcctgtacgcgagcaattcgtttaaatgctcgatcaaatagtcattgtcaaatgcaagcggatggtcgtagttcgtattcagccgctcttcaaacggcagatggctctgatctttataatataaatcctgttcgagcattaagatcgaatgacctttaaactgttcataaatggatctggtgacgctcgtttttcctgatccggagcctcccgctatgccgataactaccggttttttccccatgccattactgcccctttctcatcatgttgctaggataaatcttgttgtccactctaaatttgacgatctgcaggggatggcgggctgcgtcaagcacattgcctttttcgtcccaaatcgtgtcaattttgcatgtgaaattttcgatttccggaccgaaaaattcgacttcatctccggatttaaagaagttccgctgctggagcgtgaccatttttgtctcttcatcatagtcaaggacaagtccgacaaagtcgtatgttgtctttttgccgtggacgccgaacatctgctcttcatatcctggcgttccttcaaagaaagcaggcgccgtgtctctattggcgcatttgtccagttctttcagccattcttctttgatgacgaagttttcaggatcagcgcaataagcatcgatcacttttctgtacacactgacgactgtcgcaatgtagtggatcgatttcatccggccttcgattttcaggctgtcgatgcccatttcaatcatttgcggtatcgattcgaccagcttcagatctttcgggctcatcgcaaatggagcatcgccttcttcatatagcggcagtgcattcgtcccgtccgtctgatacaaatcatagtcccagcggcatgactggcagcagcctccgcggttggagtcccttgccgtcatatggttgctgagcacgcagcggccggaataagcgatacacatcgcaccgtgaataaacgtttcgatttcaatatccactttttctttcatttccctgatttcaagtgcgctcgtttcacgtgcgagcacaacccgctcaaggccttcttccttccagaactgaacggctttccagtttgaaagggactgctgtgtgctcaaatgcacttccagcttcggcgcaaccctgcggcacgtttcaatgatcaggggatcagcgacgataatgcctgacacgcctgctccctcgagatcgcgcaaatagtcttccagtccgtcgatattttcttcatgcgcaaaaatgtttgtcgtgacataaattcttgcgccgtattttttcgcgaattcgacaccttcagccatttcttcaattgaaaagttatctgcgtttgagcggagtccatattcacgtccgccgataaatacagcgtctgctccatagtggacagcgattttcagtttttccaaattccccgccggagcaagaagttctggctttttcgtaatgacgcgttttccattaacgattttggaaattttatcttttactgcagacatggctatccctccttttagtatactgtttctttgaaaaagaatccggtatcaatgctgcggtttgcaggctgcagctgttcgatccgctcgatccattgttctttcttgtcttcatatgcttccctgtctgcgatgcaaaggtcgatggcttcgcggtacatggccgttacttcagtcatgtattcgaccgattttaaaattccgtcgattttaaatgaatcgatgccggcatcgattaaatcttcaagctcatcaatgatgcagacgtcattcggactcatgatgtgcgtgccgttttcgtcttcgaaaatcggatatttatttccgcgttctttatcatggagatacatgcctttttcttttttcttgccttcgatatccatgacttttccctggtattcaaaatagttgccgatcagggagcgctttgactggaacatgcatgtcatgccgtgaacctgaatttcaatctcgacttctgctttctctttaatctcaacgatactgtccatgttgagctctcttgcaagcaccgcgcgcttcgcgcccttgcgcccccaatagttgcaggaataatgattggttgcggtcgtttccgtattccagtgaagcttcatgttcggcgctgattcccgtgcagccatcagtacggcgggatcgccgaagacaaccgcatccgcgcctgcctcgtccaagaatgaaaggtagtcattcagttccggaacccggtcattgtgaaaaatcgcgttcacagcaacatatacttttgcgcctttttcatgagcctgaatgatggcttcttttacttcttctctggaaaactccccggctaaacgcagaccgtacctttgttcaccgatgataaacgcatcggcgcccgcctctgccaaaggcttaatatccgaaacagaagtcggcgtgacaagcagttcaggctttttcatatccgttcacctcttttttgactgacggccaatccgtcgcccacaggcaggatcgccgtgtggtagtcaggatgctccatcagccaatgattgtaatgatctattttcgatacaagctttttgatgcgcttgctttcgatctgattgtattctgatgcgacaaggcctttgaaaaggacattgtccgtaaaaatgatgccgtcatcggcaagcattttttcatatatactgaaaaacttctgatactggccttttgcggcatcgataaacagcgcatcatagggagccatcgattgaacggggtcagactcgctgagcgcatcgccgaagaacacgtgaattctgttttcaagctggaatgaccggatgtttttcagcgcttcccgatacctgtcctcatcgcgctcgattgtaaaaatctcggcttcgggaagggcaagcgccatccgaatcgccgaatagccgatggcggtaccgatttcaagaatttttttcggatttttgaatgaaagaagctgcaggagcacttcgattcctgtcggttccataatgggcacgccatgctcttcggcataggcctccagtttcataatttcagccggccgcggctttagcagcttttcaagatagccggtcaattcttcgtgtccaatcttcacgggcagatggcctccctttcataaaaaagagccttaggtcaggtgttcagcactctcctaaagcagttgactgtcttttctccaataaacaacccgatatattttatcataaaacctttgtatttgcgaataaaaggagagtattttttactctcctttttcctcgtcctgcgtgttcgtaatatatttggcttttgctttattgtgttcttcaagcgtttttgtaaagacgacttccccgtttttctttgcaagaaaataaacatagtctgtttgctccggatttaatgccgcctcccaggaagtctctccagcgtttgcaatcggcccgggcggaagaccggtatgtttgtacgtattatatggggaatccgcttcaaggtctttgtacatgacgcggtttttatgttctcccagtgcatataagacggtcggatccgtttgcaatggcatatttttgctgatgcggttgtagaaaacgcttgagattttgtgccggtccgctttttcggtagcttcttcttcaattaacgaagccatcgtcaaggctttgtggacggacatctttttgtctttcatctgcttttcatacttttcagccagctgatctgtttgtttgatcatcgcttcgataatggcatcaagcttcgtctcagggtcgtaaaatggatatgtcgcaggatgcaggtatccttcgagcggatgcttgatgttcttgttcaacacgtcgtctgtgatcagtttcggatacttctgttttaatcggctgatgaattccctgtcatccagctttttcataatgtcctttgccgagtagttcgtttgtccggcgatgatgtctgcgatttcctggagctgccttccttcaggaacggtaattttaaatgccggcacatgtgaagcggttgtcagcttattaatcatgcctgccgcatccatcgactggctgagctgaaagttccccgcttgaaagccggaggcatttttaaatttcacataagcgataaatactttttcatttttaattaggtcctcttttttcagtttggcggcgatggacgtaacggtcgatccttccggaatatagacattgaccgtttttgcattatttttatcgaccggttcgagcgccgatttaacgtagagcgaaacagcgcctgcggttaaaatcagcagaaccgcaaccacagtcagccaaaactttattttatgtttaaggagtctttttataaacggtttctttgtctgatcttcaaacattggtgtcctcctctcctcccatggtatatactacatgattcgttatcattcggcaatttattacaaaatgttttaataaaaaaagccgcctgtcggcagccgggtgagaaaaattgcagatcacgctttaaagaatgacaaaatcctaaaacttcaatcgttttaggattttgtcaagcagtctagccgcttctttattcttcttcgtcttcatccgctaaaaacgtgttcagcgtctcctcaatcatatcccactcttcttctgtttcaatcggcatcagttcgccgtcttctcctgcttcattcggtacgaagcttgaagcatggatctcgatctcttcatcgtcctgtgcttcaatcggataataaagcacgtatgacttgttaaactgatcgctgtcaaatgtaaagagcacttcacacagctgttcattccctttatcgtctacaattgtaatgtttttttctccgtgttccatcgtaatcacctcatgagtttaggctgtcgagatatccttgaaggatcatcacggccgccattttatcaattactttttttctcttttgcctgcttacatctgctgaaatcagcattctttcggccgccattgtcgagaggcgctcgtcccaaagcacgacgggaacttgaaacgtttcttcaagcacttccgcgaacttctggctcgcttcccccctcgggccgacggttccgttcatgtttttgggaaaaccgagtacaatcttgtctattacatagtctttcgtcaattcggcaaggcggttcaagccgtagtcaccgcccgcctcgtcgattttaatcgtttctatcccttgagccgtccagcccatttcatcgctcagcgctacgccgagcgttttcgaacctaaatccagacctaatattcgcatgcttgtttacgcctctttatgctgttctaagtacgatttaaccaattcttcgattatctcgtctctttctattttccgaatcaggttgcgtgcatctcgatgccttggaatgtaagcgggatctcctgacagcagatatccgacaatttggttgatcgggttgtagcctttttcctgaagcgcgtcatggacggttatcagcacttcatttacattggtttccatcgaatcgtcggaaaagttgaatttcatcgtcttatcaaatgagctcaccgttttgcacctctttcccaaattcgcaggcaaagtttcagcctgattaccttctaatcaccattctacaccacaatggctatttataaaacggattttacccattcttccgcagatgccaatgcttctgccagccgctcaggctgttttcctcccgcctgcgccatgtcaggacggccgcctccgccgcctccgcatgcttctgcgacttgcttgacaagcttgcctgcatggaaaccccgctctattaaatcttttgtaactccggcggaaatattcactttttcgttttgaaccgccccgagaacaataacggctgagcccagtttcgccttcagatcgtcaaccattgtgcgcaggtgattcatatctttggcattcactttttctgcgagcagtttgattccgtcaatttcttttactttttccaaaatctctccggcttctttattgcccagtttcgccaataaagattcgttttctctctgagcatctttcagatcagactggagcgcttcgatccgtttcggcacttccttcacgttggttttcaggacttctgccgcctgttcgagaagctccagtttggcgttcatctcttcgtaagcgccctgccctgttacagcttcgatcctgcgggtgccagccccgattcctgattcggatacgatcttaaagaggccgatttcagccgtatttctcacatggcagcctccgcacagctcgatgctgtagtcgccgacttgaacaacgcggacgatgtccccgtatttttcgccgaacagtgccatggctcccatcgctttcgcttcagcaatcggttttaagtcgatttgaaccggaatcgatgcccaaattttctcgttcacttttgtttcgatttgttcgagttcttcctttgtcacctgtccaaagtgagagaagtcaaagcgcagacggctgtcagtgactagcgagccggcctggttgacatgcgtaccgagcacatctttcagcgcctggtgaagcaggtgtgtcgcggtatggtttttgacgatgtcttttctgagccgctccgtgacttctgcggtcacgctcatgccttttttaattgcgccgctttccacgatcccttcatgcaggtgctggccgtttggcgcttttttaacgtctgtgacgcgaatagccgcatcaccgcttttaacccagcctttatcaccgatttgtccgccgctttcagcatagaacggcgttttttccagaatgaactgaaccttttggccttcctgaacgagatcgacaagttctccgtcttgaagaagctcggcgattttcgtttccgttttgatatcggaatagccgatgaactcgctttctgtcatgatatcgcggagagcgccgccttgaacctgcatgctgccgacgtcctggcgcgcctgccgggcccgttcgcgctgcttgtccatctcgcgctcaaatccttcatgatcgacttccatgccttcatcttcggcgtattcttcggtcagttcaacagggaatccatacgtatcatacagtttaaagacatcttccccggaaatgatgcggtttccttttgctttttccttttgaataacttctgagagaatcgccaagccttcgtgcaatgtttcatggaagcgttcttcctctgttttgatgactttcgcgataaagtccgctttttctttgacttcgccgtagaaagcggccatgatgtcggcaactaccggtacgagctcatacataaacggacggttgatattgatggacttcgcatagcggacagcgcggcgaagcagccttctgatgacatagccgcgcccctcgtttgacggaagcgctccgtcgccgaccgcaaacgcagccgtccggatatgatcggccacaaccttaaacgccgtatctttttcagcagatgtgccgtacttttctcctgaaatggcttctgtcgccttgatgatcggcataaacaaatccgtatcatagttcgtcttggcgtcttgaataacagataccatccgttcaagacccatcccggtatcaatgtttttcttcggaagcggtgtgtatgttccgtcaggattgtggttgaactcggagaacacaaggttccatacttctaggtaacgctcgttctccccgcccgggtaaagctccggatcagacggatcatttccataatcttcaccgcggtcatagaagatttcggtatttggtccgctcgggccttcgccgatatcccagaagtttccttccagtctgatgatccgttcctcaggtatgccgattttttttgaccataattcatacgcttcgtcatcttccggatgcaccgtgactgacaggcgttcgggatcgaagccgatccatttttgatcggttaaaaattcccatgcccactcgatcgcttcttctttgaaataatcgccgatcgaaaagttgccgagcatctcaaagaacgtatggtggcgggctgttttcccgacattctcaatatcgttcgtcctgattgatttttgagcgttgcagatgcgcggattctccggcacaacccgtccgtcaaaatattttttcagcgtcgcgactccgctgttgatccaaagcagggagggatcttcatgcggaataagagaggcgctcggttcaacggcatgccctttttctttaaaaaagtctaaaaacatttggcgcacttgtgcggatgttaatgtcttcattattttttcctcctttaatgatgcacatgcaaattaaaaagcccccgccccatgcaaacaacgtttacacagggacgagagctcctctcgcggtaccaccctgattatgtgcgtaacaaaacgaaacgcccatcaccttgatatccgaataacgccggatgaagacggcaggttttcgcctgcactcaggattagcttctactgatcttctgttaaagctctttcaccgctatggagcttctctctataaaacagggcttcagtatactcggatccgtcaatcgagatacgtatgtatgtctatttcgaaattatagacaacggaagccgttatgtcaaacttctgccgcttacgcttttcttgccgctaaaaaatggacgagcatcactttgataacagccatgacaggcacagccagaatcatgccgatgatgccggcaagctccccgcccgccagcaatccaagcataatgacaaccggatgcatatgcaggcttttgccgacgacaaggggcccgaggatattgccttcaataaactgaagaatcaaaatcgtaatgatcaccacgaaaacgagcctcgtcgataaagcggctgctaccatgacagccggaatcgcgccgatgacagggccgaaatacggaatgacatttgtcgcgccgatgacaaggccgaggatcagcggatagggcaggtcaaaaaaccaaaatgacaggctcgctcccaagccgatgacaaggcagacaaaaagctggcctctgatgtagtccccgagagaatcatcgacatcccggatgaattcgctgcctcttgctctccatgaagaaggcgtcaaataccataccgcctttttcatcgtatcaatatctttcaccatgtagaatactaaaaacggaatgatcgccgccaagagcatataatcaaaaacgaatcggatgcttcgtatcgtccgttctacccagcttgcaacgaattcttccgtctgattgacgaacctgtcgactctgtcgtgcatgccgtcaggccagccgtctgtatgatgatgcagctgatccagcatgttttcgtatgatgcggcaagaaccggaattccctctgaaagctctgtcagctgtttaatgaggatcggcacccctttgtaaaaagcgtagccgagacctgcaaaaaacagaaaataaatcagcaaaatactcaatgttctcggcacgcctgcccggtgtatcttttccacgacaggcaaaagcagataggtgataaaaaccgcgatcgccagcgggatcagaatcgacttgagcagcacgcagacaggctcccaaatcattctcagctgcaaaaagatatagacggttaatagcaaaagcataaagatcgagacccacattaaaagctgcagcggttttttcagcatgtttttcaccccttgttagcttttgatttctgcttgtaattattccctaagaaaaaaagggacaccccttttaagggtatccctttctgcttaaaacattttcatgacgcgtcttctcagctttctcatgtttcgcttgttcatcatatcgttctgagacgccatgtagtacattaaagccccggctcctaaagaaatgagagaagtcattgtacgattcaactttctaacctccattcaaaggttgatcgttcgttcgtcatctgtaaacagatcgtccaggctgctcaatgttccgtcctcttcgacttgatgggtcgaaatttttccttttgatagggtcagctcaataaagcatccccagcagtaatattgatttacaccgattttgccgatgtttttgcttttgcaattcgggcaaacgagcatttgaacacacacctcttattcgttcaagacgattgtgcttctgcctacttcaagcggttccccagatgagtgaatctgctttttgtcgcctgacaaatcggcaaaaaaaccgtctgatagttcatatgctacgattatgcccgtgtcggaagaaaagtatacatcttccagcatgcccagcgtatctcctgctccgtttttgaccattttttgcttcatctggtcataagaaagactctgcttcggaacttgcatcggcttgaactcggtgaaatcaacgtatacgccgtcacgtccgatttcggtgaccgcgggaagcggaagaagcgaacggggattgtaaaagcgccgcttctcttccataatcaatccgagacatgtcccttcgtgagaaaaacagatatccgttaccaccccaagcgggagagaagactgtctgtcgtaaacattgagtccttccagctcattgcatgttctcaaagtgtgatcaaccaccttttacgaacactcttatgatctgctgttgcgccgcgactcatacgatgaaatggattccatgaaaaacacttattctgcttccttttccataaaatcaaaaggtgtaatgccttccatcccgatattggcgtcatagacgctgaatggcagctctttttgaagcgccatgagctcttcatcctcttcatgtgccgcctgctgaagccgtcttttaagcgatgtctgcctttctgatgattccttatttttcacgccccattcaagggcttcctcttcgccgcacagaatcaggaattttttgcttcttgtaatagccgtgtaaagcaagttccttctcagcatccggtaatagcttttgacgaccggaaggatgacgatcggaaattcgctgccttgcgatttgtggatcgaacagcaataggcgtgcgtaaactggttgaaatctttttttgcaaacgtgatttcattcccgtcgaaagagacaacggccatatcttctttttccgtattttctttcgcataaaaaatcgagacgatctcgcccatgtcaccgttaaacacgttatgctccggctggttgacgagctggagcactttatctccggtacggtacacgacatctccgtacttcatttccctgcctttcggcttcggcggattcagtatgccctgcaaaagggcgttcaactcattgatgccggccgctcctctgtacatcggagccaaaacctgaatatccctggccgaatatcctttttgcagcgcgtttttgacgactttttcgacgacttctttgatctgctgctggcggcagcgaataaaagaacggtcttttgtcggggcggccaagttttccggaagctttccctgtttcatttcgtgcgccagttcaacgattgaagagccttcagcctgtctgtaaatgtcggttaatctgacagaaggaatcacattcgatgccaacagatcccttagcacctgtccgggaccgacggacggaagctggtcttcatctccgaccatgatcacctgtatccgatcggggatcgccttgaataattggttggcaagccatatatcaagcatgctcgtttcatcaataatgagcagccgtccttcaatcggattgtcttcatcgtgcgtaaatccttcggctccgttccagccgagaagcctgtgaatcgtaacggccggcagaccggtcgactcgctcatccgcttagcggcccggccggtcggtgctgccagcacaaacggaaacgtttcatcttttttgtaatcagccggatttaagcttaagccgtgcagctcgctgtacaactcgacgattcccctgatgacggtcgttttcccggttcccggtccgcccgtcaaaagcagcatcggcgacatcagcgctttttgtatggcttctttttggcttggcgcgtactgcactttcatccgttcttcaagctcccctaaagcgagcaggaattccgattcgggaaactggtcatcgtattcggtctgtccggcgattttctgcacccttttggcaaagctttgttcagcgtagtaaagggacggataataacacctttcatcttcaatgaacagctctttttgctcccctaaggaaatgatcgcgtccgccacatccatctcggttactttttcatcgcctgctgactggtttaacagcttttgcgtctcgatgatgagctgtctcgtttctatgtacgtatgcccttcttgaaggcatgtcgcttcaaccgtgtataaaatcgccgctttgatccgctcttcatgtttgcctgagatccccattctgccgcccagttcgtctgctttgataaagccgattccttcaacatctttgacaagctggtacggattttcgcggattttatcgagcgtttccgcttcgtacgcctgataaattttcatggacagctgggggccgaagccgaattcgctcaaggagatcataatctgctcgagcccctgatgctgctgaagggcagcggcaagcttatccgccttttttttggagagcttcgggacatcatacaggacggcgccgtcgcttaaaattttgttgattgccccttcccccagcttattgacaatttcctcggccgttttcttgccgattccttcaaataaatcgctggccaagtattggatcacgccttctttcgttgtcggcacttcctttttgaaatgatccgcttgaaattgcaggccaaatttcggatgggaggcggtttttccgtaaaatgtgtagatatcgtcttcatggatcaaaggaaagtaaccggtgacagaaacggttttgtcttcaaaagactctgatgtttcttccacttttactttcagtacggtatacaggtttgtttcattatgatatatgacagccgttaccgttccttttacaaatgaagcttcttccatttcgatctggtccgggttatggcgctgcatcactgttatcccccctccattcaaaatcggtcatgacggcccttgatcaatcaagcttcttctaaaagctgcttggcgcgaatgctgagcatatgatccggctgaatgtccagcgccttgttcagcatgtcgagcgctgttttccgatcttccttaaacgcataggcaacgcctaaattataaaatgcatcggcatgggacgggtcgcgctccgttacatttgaaaattccgtgatcgcttcgtccagcatcccttcattggcaaggcacatcgcgtaatgaaaacgggcttcgacatccgcatcgttcagctcggcggctctttgcaaatacggcattgcgagcttcggctgctcaagcttcacgagcgtggttccgagcatataatataagtcgctgttttccatgcccgtccgatgcgctttttcgaacatgtccttcgcttcttgataccgctctttcatgacatagacattccctgctccataataagccgctcctgctttctcatccaaagcagccgccctgtcgtaaaacttaagcgccctgtccaattcgccgactgcagaaagcaggttggcaaagttgatataaggcaccggatctccgctgttttcatcaattgcctttgtaaaggcttcagcggctttttcaaagtcgcctttttgcattgcatctattccaatttgattgtaatccaaaagccctctccctttcacgaactattttaaaaaggccgccgacattgccggcagccgttcgagaagctccggggtgtatccagagccccggttttatacataccaaagttgttgtccgtctttaaacacatcatcaatcgttccgccgccgaggcattcttcgcctttgtaaaagacaaccgcttgtcccggcgtcacggcgcggaccggctctttaaagacgacctccgcttcatccgtcccggtcattctgacagtgacttcatgatcggcttggcggtagcggaatttggccgtgcaggcgagctcctcttcgccgccgaagacgcccttatgcacaaagcttacgtttgtcgccgtaatcttatcggagaaaagcagcggattgtcgaaaccttgatctacatacaagatgtttttttcaaggtcttttccgacgacgaaccacggctctccgcttccgccgatgccgaggccgtgcctttgtccaatcgtatagtacattaaaccgtcgtggcggcctttaaattcgccttccatcgtccgcatatctcccggctgtgctggaaggtactggctgagaaacgttttgaaattccgttccccgataaagcagatgcctgtgctgtcttttttggcagctgtcgcaagccccgcttcttttgcaatttccctgacgcggcttttttgaagctgcccgatcggaaacagcactttgctcagttgctcttctgtcagctggtttagaaaataggtttgatctttattttcatcaagccctctgagcattttaacacgcccgtccgtacggtcgacccgcgcatagtggccggtggccaaataatcggctccaagcgacaaagcatgctccaaaaaggctttgaatttaatttctttattgcacatgacatctggattcggcgttctgcccgctttatattcatcaaggaaatattgaaaaaccttttcccaatactgcttttcaaaattcaccgcataatacggtatgccgatttgattacatacctttatgacatcttcgtaatcttccgtcgctgtgcaaaaaccgttctcatctgtgtcatcccagtttttcataaaaattccgatgacatcatagccctgctctttcaaaagcaaagccgccacagaggaatcaacgcctccggacattccgacgaccacccgtgtatcttcaggccgcttcgccattttcatcaactccaataaatcaattcaaaaacttgtcctttcagatcatatcatcattttcgggcaggatgcgaatctttagctcggagcatggcttcccgaaatttatgacagacgcttaacaactttagcaagttctttcgcggcgcgctcaacctgttcctctgtattgccaaagccgaagctgatccggacggatgacgtgagccgatcgtcttcttcgccaaacatggcggagagaacatgagacggaagcacagacccggccgtgcacgccgatccgctcgatactgcgattcccgccatatcgagattgacgagcagcgattcaacagatactcccgggaaatacagattcaaaatatgcggcagactgtgccgcctgctgccgttcacatcgaatgagacgccttctgcttccagcgtacgggtgatgatgtctttaaaccggcggtaaagatccgatttttcttctctttcccgacccgagagcaaaacagcttcaccgagccccgcgattcccgggacattttccgttcccgcccggcgtttgcgttcctgctctcctccgaaaagaagctggctgagcttcacgttttcgttgacgtataaaaagcctgttcccttcggcccgttaagtttatgtccggagacagacatcatatcgatacggcttttttgcacatcaatcggcaaaaaaccgaaggcttgaaccgcatctgtatgaaacagcgcgggatggtcctttagcagatcgccgatctcatctatcggctgaatcgttcccacttcattgttcccatacataaccgtcaccaggatggtatcgtctcgcagtgcgtctttcacctgctcggcggagattcttccgctttcgtcgacgtctagatatgtgacgtcaaatcccatttcttcaagcctgttgcacgtatgcagaacggcatggtgctcgatctttgtcgtgatgatgtggcggccctgcttctctctcgccagcgcgcttccgagaatcgccatattgtcggcttcggttcccccgctcgtaaaaacgatttcattgggatgcgctccgatttcctgagcgatcagctccctcgtgctgtcaagccatttccggctctcccttccaaaggaatgaatgcttgaagggtttccgaagttttccgttaagtaaggcagcattttttccactacccgggggtcagtcggagaagtcgctgcatggtctaagtaaatccgttccatcctaccattacacctcgatcttaaatgtaaaacatatacgcttcctgctcgccctctgtatagctggccaagtcttcaagcgtcgtggagtccagcacttccttgacagcatcgcgaatcttgatccacagttcgcgctttgccggctcctcattttcaagcacttccaccgggctgatcggcccttccaggacgcgaatgatatcgcccgccgtaatcgccgcaggctcctcaccaagaatgtagccgccgtaggccccgcgaatgcttttcacaagcccggcgttccgcaaaggtgaaacaagctgttccaaataatgttccgataaatcgtttgtctgagcaatacttttcaaagaagtcgggccttccccatgctttttcgcaagctcaatcataatcgtcagcccgtatctgcctttagttgatattttcaaaataaacacctctaacctataataaatcatgccttcaggacgaaggtactcggcgtttttcgcaggacgcgaaagaccttagccgagtctcctttcacaccaggacgaaggtgaccggcgtttttcgcaggacgcgaaagaccttagccgagtctcctttcacaccaggacgaaggtactcggcttttttcacaggatgtgaaagcccttagccgagtccttttcacaccagaacaaaggtgctcggcgttcctcacagcaaacaaaagcccttaagccgagtcccgttcaggcgcagaaagcgccgcggtgcatcctcataaggcataagccgatctccaagattgaaacaccggcaggaagccggctgtcggattcaagcgtctgttatatattaaaaactcggttgggacaaggttccggccttgtccgtctgatagattacaggttattatagcacactttatataaactttcattttcggccttatattcagcttgccatattcatttcttttctaatcgtcttttttccgttactctataaaaagaatacattcgggagagatcaatcatgaaaccactcgcatttcgaatgcgccctacaaaaatcgaagaggttctcggccaggatcacctggtcggggaaggaaagatcattcatcggatggtgcaggccaaacacctttcatcgatgattctgtacggccccccgggcatcggcaaaacgtcgatcgccacggcgattgccggcagcacgagcatcgctttccgaaagctgaacgcagtcatcaataataaaaaggatatggaagccattgccgccgaagcaaaaatgtcggggcaggttatcttaatccttgatgaggtgcaccggcttgacaaaggcaagcaggactttctccttccgtatttggaaaacggcatgattatcatgatcggggcgacgacagccaacccgtaccatgcgatcaatccggcgatcagaagcagaacgcagattttcgagctgcatccgttagaccctgaacaaatcaaaacggccattaaacgggcgcttgaagataaacacagaggcctcggttcgtatgacgttgccgtcgatgatgaggcgcttgaccatttggcccgcggctgcggcggagatgtccgctcagctttgaatgcgctcgaacttgccgtattgtccacaaaggaaaacagtgagggagcgatacgcattacattggaaatcgcagaagaatgcctgcagaaaaaaggctttgtccatgacaaagatggagacgcgcattatgatgtcatttccgccttccaaaaatcaatcagaggctctgatgtcaatgctgcactgcactacatggcaaggcttattgaagcgggggatttggaaagccttgcacggaggctgcttgttatcgcctatgaggatgtcgggctggcgagtccgcaggctggtggaagaacgcttcaagccattcaaacggcggaacgaatcggatttccggaagcgaggattccgctggccaacgccgtgattgagctctgcctgtctcctaaatcgaactcggcgatccttgcagttgacgaagcgctgtcagacgtccgctccggaaagatcggcgatgtgccgaaccatttaaaggacgcccattacaaaggagccgctgagcttggcagaggtgtggaatacaaatatccgcacgattacgagaacggctgggtcaaacagcagtacctgcctgatccgctgaaaaacaaagtttactatcagccgaagcagacgggaaaatttgaactcgcactgaaacaagtatacgacaagctgatgaaacaaaaataataaacggcctgtttcttttcattaaggagacaggccgtttgtcttgaaaccaaaaacgacagcacctctgctgtcgtttttgtattacttatctttcacccttttgatcggaatatctttcaaaagctccatgatcacatggccgcccataatcaagcctgcgactgacggaacaaaagcatttgaagacggcggcatctgcgctttgcggattttcgcttcatcatttccgacgacttggcgtacgtcttcacggatcacgatcggactttcgtcagaaaagacgactttaatgcctttcgtaatgccttccttgcgaagcctcgtccggatgacttttgcaatcggatcggtgtgggtttttgaaatatcggccacttgaaaccttgtcggatctgttttattggccgctcccatgcttgagatgatgttgatgccgcgcttcaggcactctttcattaagtggattttataatgaatcgtgtctgaagcgtcgattacataatccggttcatatgcaaaaaactgttcatacgtctcttcggtatagaacatttttaaagcgatgacgtcgcattccggattaatatcggcgattctcgctttcattaagtcaactttcggctgtccgaccgttgaaagtaaagcaggcagctgacggttgacattcgtgatgtcaacatcgtctttatcgaccatcacgattctgccgacacctgaacgggcgagcgcttccgcggcgaaagaaccgaccccgccgacgcccaaaacggcgaccgtgctgttttttaaaatatttaaaccttcttttccaatcgctaattcgttgcgtgaaaactgatgtaacaagaatctcactccatctttataaacagttaccgatagtatcttatcataatcgggtgattaaacaagcggtctatttcattttgccgtcatattttttcgcttcgcctcatagattatcctatgtatggccgaaaaacggccttttcaagcacaaaaaagtcccgattgtgccgttgtcgtattccttcgttttgatcccgctctcggcaggtgggtgttctgttccaaactttgcaagtcctcctgagcacacgagtgataagaggcatttgctccattcggaaacatcgaactcccaagtaaaaaaatgttcggtcaaaactaggtgtacaacaaacacatcaggactttatttgttaaaaatgatatcatacgtccctttgattttcaatgggatgtacagccgtatattttacaatttactgtcgaattttgcgtttgatttcaaggtgcagctcatcaagctgagcattgtcgacctcgcttggcgcttcggtcatcaggcagcttgcgctggccgttttcggaaatgcgatcgtatccctcaaattcgtacggccgctgagcagcatcaccagcctgtcaagaccgagcgcaattccgccatgcggaggagccccgtaatcaaaagcctcgagcaggaacccgaattgctccttcgcttcttcttctgaaaagccgagaaggccaaacattttctcctgaacgtctttttcaaaaatacggatcgagccgccgccaagttcatagccgtttaggacaaggtcgtaagcctgcgctttcatgtcctgcggattcgtctcgatcagcttgagatcctctctgacaggcattgtgaacgggtggtgtgcggcatagtagcggccttcctcagcatcgtactcaagaagcggccagtcgacaacccataagaagttaaacaagctttcatcgattaggttcagctctttaccaagctttaaacgaagcgctcccagcgcgtcattgacgacttcgagcttgtcggccacaaagagaagcagatccccgtctgcggcgtcaagcgcctgaacaagtgcctcctgtttttcgccggcaaaaaacttcgcaatcggtcctttaagtccatccgcttctgttttcagccaagccagcccttttgctccatagtttgcagcgaactctccaagcgcatcgatatctttgcgagagtagtttgcagcggctcctttaacattgatcgctttgaccgctccgccgttcgccacagccgaagcgaacactttaaagtcggaatccttcactgcttctgacacatccgtcaacagcatgccgaagcgcgtatccggtttgtctgagccgtatcggttcatagcatcctcatacgacattctaggaaggggaagcgagatttcaatgccgtgcgtttcacgcatcacatgcgccatcatttcttctgagagcttcatgatgtcttcctggctcataaatgacatttcgatatcgatttgcgtaaactcaggctgacggtcggcgcgcaggtcctcatccctgaagcagcgggcgatttgataatagcggtcaaaccctgacaccatcaagagctgcttaaagatttgcggagattgcggaagcgcataaaattccccttcatgcacccggctcggtacaagatagtcgcgcgcgccttcaggcgtgctttttgttaaaacaggcgtttcaatatcaagaaagccgttgtcatccaaaaagcggcggacagcttttgtgacgttatggcgcattttcagggagttgaacatctccggacggcgcaagtcgagatagcggtgctttaatctgatgtcttcagatacttctgcagcctggtcgctgatcgcaaaaggaggcgttttggccgcactcagcacatctaccgattccgcctgaatttcgatccttccggtcttcaagtttggattgactgttgcttcttcacgggcaacgactttgcctgtaatgtcaagcacatattcgctgcggatgctttcagctgtttccagggcgtctttggaaacgtctggattaaatacgacctgcacaatgccggtacgatctctcaaatcaataaaaatcaagcctccgagatcgcgtcttttttgaacccatccttttaaaacgacggtttctccgatcgccttctccgttatttcgccacaataatacgttcgtccaaacaaagcggtcctctcctttaactttcagtgtttgttttcaaaaaacggatgaaatcatcaaggccgatggcctgttgatctcctgttttcccatctttgacattaatttgattttggttcagttcatcctcgcccaaaacagcgatatatttcgcattgagacggtcggcggatttaaactggcctttcatttttttctgttcatagtcgatttccgcggatatccccgcttctctcagtttatagagaagggatacggaatagtctttggctttgtcgccaagtgtcacgatatagcagtcaatgccttcatccgctccgacttttacattttcagcatccagtgcggcgagaaggcgttcgatgctcatcgcaaagccgatgcccggcgctttcggaccgccgaactcctcggtaaggccgtcatagcgccccccgccggcaagcgtcgtaatcgctccgaagccttcggcattgctcatgatttcaaaggccgtgtgattgtaatagtcaagccctctcaccagattcggatcgacctcaaatgcaatgccgatgtccgtcagatattgctgtacctttgcaaaatatgctttagattcttcatttaagtagtcaagaatcgacggagccgttttcagcagttcatgatccctgtcttttttgcagtccagaatccgcagcgggttttgccggagccgtttttgacagtctgaacaaaactcgtcgatccgcggctcaaagtggcggatcagcgcttctctgtgagcggttcggctctctttgtcgccgaggctgttaatgacaagcttcaggttgctgagacccgctttccggtatacactcatcgccaaagcaatgacctccgcgtcaatcgccggatcgttcgaaccgatcgcttcgatgccgaattgataaaattggcggtagcggcccgtctgcggcctttcatagcggaacatcggtccaatgtagtaaagcttcgtcggctgaaccggatttgcaaaaagtttgttttccacaaaagagcgtactgcagatgcagtgccttcaggacgaagcgtcaggcttcttccttttttgtctgcgaatgtatacatttctttttgcacaatatcggtcgattctcccaccccgcgggaaaatagttctgtatgttcaaaaataggcgtccggatttctttatattgatacgcatgacacgtttctctcgcaatcttttcgacatattgccagcgttccgattctccggggagaatatcttgtgttccccttggaatattaaatcccatttttaaaatcctcctcatgacttaaatgcttttctcatttatggaaataaaaaaacccccgaacctactataaaaccaatagtagggacgagagttatacccgtggtgccaccctagttggaacgataaatccgttcccgctcatgcctttaacgcaggttcacgtccgccgcctaattgctcgcatgttatgccgggctttcagcgggaaaccttcggagtgttcattcggtcaagataccgtgcagaccgctttcagcccagggcggttcctctcttttcacgtactcttgcctactattctccatcttcagttcagctcatatgtacactaatttatattataatacgagtgttacgtttgcatgtcaaccctatttgcggttctttttattctgaattgattctttggacgtgagccccagctcagtggccgtttcttccatgaagccggcgcgctccgggtccgcatgctcctttagatgcagattcgcatcttgctcatggatcgccctgcccattctttgattatacctcatgcagcaacatccttttgatatcttttttctatagtataaacaaatcattttcattttattaaaaaaacggcaaggaatatacgatatagaagaagaagtagtgttccaagttttttaccgaaaggaggagatgggaatcaatatgaaaaaaagagcggtattgatcctatcgatgatgctggcagcacaagcagccttttatacatcgtcaaacacagcttctgcagccatcggggaagccgtgattgccaccgatgaaatcaatgtcagaagcgggcctggactgagccacgaaatcgtcagcgtcgtcagcaggaatgaaagctatccgattcttgaagaacgcggggattgggtgcaaatccagctgaacggcgggcaaaaaggctgggtcgtatcctggctgatcaagaaaaagagccaagtctccagcggatctgattccgcatcgggaaaagtcacatcttccgaagcaaacttgagaatcagaaaaggccccggcacttcatatgaagtccaaggcgtattccctgaaggagaacaggctgacctgctaaagaccgacggaaaatggataaagatttcctatcagaacatcacaggctgggtctattcagattatgtcaatcaaggttcaggcgcgaaacagtctcaatcgtcttcatcacatgcttcatcatcaaaatcgggaacggtcggcgtatccaccttaaatgtcaggagcacagcttcccatcaaggccggattattgccacgctccaacggaatgcaagtgtgacgattttaaacgaacagcacggctggtatgaaatcgaatttaatggacaaaaaggctgggccgcaagccactatattctcgaaggaaacaaacagaacagcggaacctcggaaacaagcagcagctccgaagcaaaacggcaggccaccatcgtgtatgaaggcacaaatgttagaagcgggccttcgacatcctcagcgatcgtcaaacgcacgggaaaaggcgagtcttacccgatcgtctctacaaaaggagactggtatgaaatcaaactgtcaaacggcgattccgcttatgtcgcaagctgggtcgttcagactgttgaccaggcaggctcagccggagattcgaaaagcgcagcaccgcctttggcaaagcggtcaagctcgggaggcacaatcaaaaataaaacggttgtcatcgatgccggacatggaggacatgacagcgggacaatcggaacgcgggggacgctcgaaaaacggctgaccatcaaaactgcaacgcttcttgccgcgaaactgagagccgatggcgtcaacgtctatatgacgcggaatgacgattctttcgtcagccttcagtcgcgggtcgcgacctctcattaccgaaacgccgacgcttttatcagcattcattatgatagctttccaaatgcgtccgtcaggggaaatacggcctattactacagcccgtccaaagaccggaagctcgcagcagacgtgcagtccgagatcgaaaggcactcgcctctgccaagccgcggcgtactattcggggactacttcgtattaagagaaaataaacagcccgccgcattgtttgaactcggctacttgagccatcctcaagaagaagcggtagtcagcacgaacgcttacagagaaagagtgacagacggcatcagaagcggtctagaaaactattttgactaatataaaaagctcccaatcgggagctttttatgctttcgaatccataataaacgtgacgggacccgaatttgtcagcttgacatccatcatttctccaaatcttcccgtttcgacagtgacgccttttgcgcgaagcatgctgttccactcttcgtacaattgaagcgcctgatcgggctttgccgcttttgtaaaattcggccgtcttccttttttcgtgtcgccgtacaaggtaaactgagaaaccgataaaacggagcctccgacatctaaaagcgacaggttcatcttttcgccttcatcctcaaaaattcgcagattgacaagcttttccgccaaatatgcggcatcctcgctcgtatcctcgtgcgtcacgccgacaagcaccatcaaaccgaggccgatttcgccgacagtctcgcctcctaccgaaacgcttgcatctgtgacgcgctgaacaactaatctcatgacgcttttcctcctaattcatcaccctgcgcacggagtaaatatctttgatctgcttgatccgttcaactactttatgcaaatggttaatattttgaatgaagatcgccatatggatcgtcgccactttattgcggtccgatttacctgaaacagatgaaatattggtttttgtctcattaacagcctgaagaacttcatttagaagaccgcggcggtcgtagccgagaatctcaatttcgacgttatattcttttctccgctgggtctgcggttcatgctcccattccacttgaatgagcctgtcgagcgcttcatttgttaaaacattcgggcagtcctcgcgatggacggatacgcccctgccttttgtaatgaatccgacgatcggatctcccggaacagggttgcagcattttgacagcctgatcaaaaggttgtcaacgcctttgacgcgaacacccgcttcgcgtttcttcccttggtaaggtttcacttcaggcgttacgtcctgaacgcttttcacctgttcttcctgatctctgatcttccgttctttttccgtaaggcggtttgcaacttgagcggctgtaatgccgttatagccgacagcggcatacatgtcttcttcattggcaaagttgaatttgtcggcgaccttctgcagattctcggctgttaagacgtccttcacttcaaagtccaggtttttaatttctttttcaaccagttctctgcctttttcgacattttcctctctgcgctgctttttaaagaactgacggattttatgcttcgcttgagatgtctgcgcaaggttgatccagtcctgactcggaccgtacgaatgcttggacgtcagaatttctacgatatcccctgtgcgcagcttgtaatcaagggtgaccattttgccgtttactttggccccgatcgttttattgcctatttctgaatggattcggtacgaaaagtcgatcggcacggatcctgacggcaattcgatgacgtcccctttcggcgtaaaaacgaataccatgtcggaaaacaaatcgattttaagagattccataaattcttcggcatcgctcgactcattttgaaattccaaaatttcgcggaaccaggaaagctttttatcaaagcttgaatcttcattggcatttttgccttctttgtaagcccagtgggcagcgattccgtactccgcaatttcatgcatttcaaacgtcctgatctggacttccagcggatcgcccttcggaccgatgaccgtggtgtggagcgattggtacatgttcggcttcggcattgcgatatagtctttaaatctgcccggcatcggcttccagcacgtatgaatgatgcctaaaaccgcgtagcagtccttgatgctgttgacgaggatccggactgcgagcaagtcgtaaatttcgttgaattgcttgttttgcatcgccatttttctgtagatgctgtaaatatgcttcggccggccggaaaagtccgctttaatattgacttcttcgacgcggcttttcacttcgtttacgacctcttcgacgtacaattccctttcggcccgctttttcttcatcaaattgacgatccggtaatattgctgcggatttaaataccgtaaagcggtatcctcaagctcccactttatttttgaaatcccaaggcgatgagccagcggagcaaatatttcaagcgtctcatttgaaattctgcgctgcttttcctgcggcagatgcttcagggttctcatgttgtgaaggcggtccgccagcttgatcaaaatgacgcggatgtcctgagccatagccacaaacattttccgatgattttctgcctgctgttcttcctgtgatttatatttaattttcccaagcttcgtgacgccgtcgacaagcatcgcaacttcttcgttgaatgcttcctttaaatcttcaagcgttacgctcgtatcttccaccacatcatggagaaatcctcccgctattgtggcggggtccatttctaaatcgacgaggattcccgcgacctggatcggatggataatatacggctcgcccgatttgcggtattgttcgcgatgtgcgtcttccgcgtactgataagccttttttataaaagcaacatgttcatcggaaaggtaacttttcgccttctcaatgacttgctcagcggttaatacttgttcgttcgccatggaatcaccttttttataattgaaaactgtattgtaattattatcaagaaaaatgtcacagatgtaaagagaagaaattcaaaagggcttttgccggccccggaatacttttatgaataggaaaaaaagcacccgctttttatgagtgctttttatagtataaaatttgtttagtattgcatcaaggttaaaatatcatatccgtccagtttatttcttccttcaagatatgtcagttcgatcaggaaagcgattccggccacgacgccgccgagctcttcaacaagcttgatcgttgcttcaatcgtcccgccggttgcaagcaggtcgtcagtgatcaagacgcgctgccccggtttaatggcatctttatggatggtcaggacatcttttccatattccaatccgtagtcgactttgatgacttcgcgcggcagtttgccttctttgcggacaggcgcaaaccctaccccaagcgcatatgcgacagggcagccgatgataaatcctctcgcttcaggtcccacgacgagatcgatctctttttccttcgcatacgttacaatttgatctgtcgcgtagcgatagacgtcgcctttgtccatcaatgttgtaatatctttaaattgtacgccttccttcgggtaatccggcacaattgtcacatacttcttcaaatccatctgtcttcatgtcctcctcatactttataagcgccggctttttccgccatccgcttatccagccactgtttaagctcatccgccgaagaataaatgagcttttgctccaattcaatcaggcgctgtttttcccggtaggtttcagaatctgttaaatcgcgcttttcggcatgataaacaacagataaaacaccattctctattgtaacaaaaccgagctcaaaaaacacctttgtcataaaatcaattgtgtcttttgtccagcctttatgtctggcaagctctccgccgtatttcggcaagtcaaaagaacctcttttcaggaggaaagcatagtaccatttaaaatattcccttgttgggaatgttgagaaaaaatgttcgtctgattgataaaaaatcagataaatgcgctccagctttttgccgtttattacatgatcaaagatgtcgagcgactgcggaatatctataaataccgcataacggctctcaaggtcgagccgctctgcatcttcagggccgctgatgacggtcagctcttcttcaaggcctgtccctgccagctttgcttttgtttcctcgcggaagcagatgcacgcccgtttcgcagggtccagcttcaatattttttcttcccatgaccgttttccccgcagatcaaacagctgccattcattgacggccgcatctttgatcatcagctgcggtttttttctgttattccattcgttaatcgacagttccccgacaatcgagatctttgctccaggaacgattccttcttcgatatcgcctttataaaatccgatgcaatcgagcttgttcccgtcgtctgcaagcacaagcttcaaatgattcttgttggcgccgatttttctggcgtcatcaatttttacgtcgctgacaagaacgaacggcttcgggtttcccgtgccgaacggcgccagcaagttcatttcagcaatgctgtcaaccgatatatcttcgagccggcagcacaaatcgacgtcttggacggggataaaatctgcctcggtcagaaccgcttcagcctgacggttgattctctccctcagagccgaaacgtcttccaggttgagcgtcattccggctgccatcgggtggccgccgaagtgcgggagaatatcccggcactcggaaaggttttgaaataaatcaaatcctttgatgctgcgcgcagatcctttggcaattcctttttcttcatcgacgccaaggacgatggcgggcctgtaaaaccgctcgacaagctttgaagccacgattcccacgacgccaggattccagcccggccgcgctacgacgatcacaggctggtcaaggccttcctcctcgatcatctgaacggcttcctctgtcatctgattgacgattttttggcgctccttgttcaaggcgttgatgtcctcagcaagctcttccgcttctctttcgtcttctgtgttcaggaggtaaacggccgggtcagcctgttcaattctgccgaccgcgtttaagcggggcgcgatttgaaaaccgatggtctcttcatccgcgttatgtatctccgctccggcaattttcgccagcgcttttaatcctgggcgcttcgttttcctgaactgttccatgccgcgcttggctatctgcctgttttcatcatgaagcggcacaagatcggcaatcgtaccgatcgcacaaaggtcgagcaaatcttccggaagctctccgttcaaggcatgggcaagcttaaatgccacaccgacgccggcaagctctttaaatggatagccgcagcccggctgtttcggatgaatgatcgcataagcatccggcaaaacgggacccggctcatggtgatccgtaatgatcaggtcgatgccgagctctttagcgacttcagcttcatgaacgccggcaatgcctgtgtcaactgtaatgatcaatgaatagcctgattctttgatcccgcgaaaggccgcttcattcggaccgtacccttctttaaagcggtcaggtatataaaaatcggcttgtgctgaacattttttcaacatttgcaaaaggacagtcgtgcttgtcacaccgtccgcatcataatcgccgtaaatcataatcttttcttgatctgaaattgcctgtttgattcgccgtacagctttttccatatctttcagcagataaggatcgtgaaaacgtgcatcattgccatataaaaatgaagatgctttgtcggctgtatcgtaacctctcatgacaagcaatgaggcggcaaggggagtaatgcctaaccttccggcgagctgctccaccttttctttgtcgggcgtttgcacgtcccaacgcatttttgacgctaacataaattcacccctcaaccacactattatactagagcggcatgaggggattcaatttatttcgtacaatctttctagtctttctgattttcgggcgccgccggttcggcttcgagttcaggatgctttgcccgttcttctttcttgagcgccttgagctcttttttcagccgcatgatctggaaagcgccggccgagccgatgataagcgcccccatcaataccgacaccaaaatcaccaggatcaaaggccattctgctgtaccaaaaagaaaatcaaccttcaccggttcaacattaatgaccgcgaaaacagcaacaattaatgtaaaaataagtgcagcaattaacgtccattgtttgttcatgagatactctctccattcgcgtcgttttctagcgttattttcccgctctgctccaattttaaacaaaaagaagatcgatagaaagccgccaaaacaacttttttctattcaaatcaaaaaaagaccgcccggcagtgcgggcagtccattatttattcttctgcaggcttgcgcttcggctttttcagttcgcgccctttccagacaagccatagttgagctgcgatgtagagtgatgaatatactccgctcaaaagtccgaccaacagcgcaacagagaagttcgaaatcgatgcagcgccgaagatgagaagtgcaatgacgacaatgacgacagtcagcaccgtattaatcgaacgcgtgaacgtctgctgcaagctcaaattcacaatatgcgacaagtcgctgaaggttttcggtttgcgctttttcatatgctccctgatcctgtcaaacgttacaattgtatcatttatcgaatagccgatgatcgtcagcacggcagcaatgaaagtaacatcaacctcaagccttgtcaggctgaagacggcaatgatgaaaaacgcgtcatacagcaatgaagtaatagccgcaatcgccatcttgtattcaaagcggatcgagacatacaaaatgatcccgattgacgcgatgatcaccgcataaagcgcatttctcgccagctccttgccgacggtaggcgatacggtgctgacatttggttcgcttccgtatttgtctttaaaataatctttcacttcagcgatctttttctgattcggcacgccgacaaacctggcgacgccatgatcatttttttcgcctgaaagaacgatcgagtcaggatcaagcccgacttgttcaaagtccttttcgagctgctgggttgtcagcttatgatcgctttgaacttcgattctcgatccgcttgagaaatcgatgccgaggttcagcttaaacacaagcaagacgataagaccagcggccagaagaacgcccgaaaatgcaaagaaccaattgcgcttcccgacgaaatcccatttggaaaacgggttcggaggctccgtattttcgtctgtctttctgatatccaaaatgtcttttttgcgcaccccaaaccagccttttttccggtcaagccagcggctttcgaccagcaggccgagcaggaagcgcgacaggaagacagctgtaataaagcttgtcaaaatggataggatcagcatggtcgcgaagcctttgacagagcttgtaccaaatatgaaaagcacgattccggcaagcatcgtcgtaatattggcatcaaaaatcgttgcaaacgatcttctgtttcctgctttaaaagccgaacggaccgatttgccgagcttcagctcttcttttatgcgttcatacgtaatgatgttggcgtcaaccgccatcccgacgcccaatataagagccgcgatccccggaagggtcagaaccgcattcatccagtcgaatatctgcagtgtaatgtagatgtagaccgaaagcgtaatgaccgcaataaaaccaggcaagcgatagtaaagaagcataaataagaaaataatagcaataccaatgattcccgcaaacacggtatcattcaaagcctgctccccaaactgcgctccgacggatgtcgaatacttttcaacgagtttgacaggaagagctcccgcatttaaaatgctcgccatgtcttttgcttcctgaatcgtaaagttgccttcaatcatcacgtctgacgtattcagcacctggctgacattcggagcggaaatgtatttatgatccgctttttgcgattcctttttaaaagagtcgccttttttgtaatcaagccagatgacgagctggttgttcggcttcatatcgagcactttcttcgtcacttcgccgaatttatcggcatccttcagcttgatcgtcacgatcggctcattcgtatcctgcttgaacgactgtttggcgccgttttcgacaagatccgcaccgttcaaaagctctttgtcattcgtatccctgaacgtaagttgagcctgtgtcgataagatttcccgcgccctgttctggttgtcgacgccggcaagctgaaccctgatccggttgtttccttcaatttgaatgttcggctcgctgacgcctaatacattcgcccggcggttcagcgcttcaaccgtgctgatgagggcatccctgtcaattttgtcgccctgtttggcaggctggacttcatacagaacctcaaaaccgccctgaagatcaaggccgaggctgatgttgtctgcagccggcttcgtgaacattcccagtcctgtaccgatcaagagaacggtaaggaaaaacgcaatcaagcgtccttttttcattatgtatttcctccttaaatcaaccaaaatcaacggctacctcagcagctcatcgagcatatcctgcccttctttgctgtcgagcaaattagacgttttaaacgattctacggttgcatagttcataaattcgccaattttcacagataaaatatcaccggccagctggtgaatttgaacatccttccggttcttccatttcttattcaataagtatgaccacaattcctctatttcaatatcgtcataaccgagtattctaaactcttccgtcttgctgcgaagaaagggttttaaatgatccttgtacagatcagccggatgtttgcccatgccaaagccacgctcctttcacattttttcagagagacttgtcatgcttggacgatgtatgcgcatatcttattgtatatgattaaaggttgtttgagaaggcaggggactctagaaatgacgaagcagacgtttttaaaaggaacgctcattttaatagcggcgggtttgattacgagaatgctcggctttatcaaccggattgtcatcgcaaggttcatcggtggtgaaggcgtcgggctttacatgatggcggccccgactttttttctggccgtcaccctcacccagttcggcctcccggtcgccatcagcaagctggtcgctgaagcggaagcgcgccgagaccataggaagacaaaacagattttagtgatgtctcttgcgatcaccgggacgctcagcgccatcatcactccggtgtttctcatttacgccccgctgatggccgatacgctgctcacagacaaaagaacgctttatccgcttttggcggttacgccggtcgtgccgatcattgccgtttccagcgtgctgaggggctattttcaagggaagcaaaatatgcggccgcttgccgtgtcccaggttctcgaacaaattgtccggatatcgctcgtcgccgtctgcacgacagcattccttccgctcggcatcgagtatgcagcagcgggcgccatgctgtcttccgtgtttggcgaattggcttcactcctttatttgttcgtctcctttaaatacaaaaagaaaatccgcatcagaaaacgttttttccaatcgcttaaagcggggcgaacgacttttttcgagctgatgagcgtctcgctcccaacgacgggcagccgttttatcgggaacctgtcatggttttttgagccgattgtcgtagcgcaaagccttgcgatagcaggggtcgccgcttccgccgcaacgagccagtacggggagttgaccggctttgccctgacgcttctcaccctcccgagctttatcacatattcgctgtctaccgcgctcgttcccgccatcagcgaaggaatcgagcagaaaaaaatgcaggttgtggaatacaggcttgagcaggcgatgaggctttgcctattaagcggcggaatatcagcggtcattttattttcgtatgctgatgagctggtcagcgtgatgtacgggtcgtcaaatgccgccatttacgtcaaaatcatggctccattctttttgttctactatttccaaggccccctgcaggccgtcctgcaggctttaaacctggccggcgcggcaatgatgaacagcttggtcggcgccgttgtgaaaaccggtctcatttttgttctcgcttcacggccttcgctaggcattatgggggctgcgcttgcgatcttgacgggaatcatccttgtcactttgctgcacgctgcaaccgtcagcaaagtgcttcccatcagcattaacctgaaagaatatatcgtatccttcggcgtcattttgatatcagggtggggcagccttctgatgaaagaacacctttttttagcccagtccgagccgatgcgcctgcttttatgtatcgcggttacaagctgtctctacgttttccttctgattgccttcaagctggtcaaaaaggaagaaatccagcggtttccgctgttcggccgctggatttcatagctttctttttaaggcttgaattcatcctttatgtcaataaaaaaagaacctttattgtaagtgcaataagaaattttggaaagatcgcggtgtcctcttttttcaagcttttgctcaagccactcttgatccttcccgatcttttccaattcttctttctgaacaactccgtcaacaatcaacggcagttcgatcattttgttcggcccgtcttttgtaaacactgaaagcttcccggtcggctccaaaatcgcatatgaaacatccccgattcgttccacattcttatctctcagctgcgtcatcaaatcatcgtaattatagcgctgtgtcctcatggcgtgttcatcaatttttccgcggtctatgataatcgtcggtttcccatcgagaagccggcggattttttgatttttcaatgacagatatgcaaatataacctggatcagcgtcaaaacgagaatcgggatgatcgtatggagaaggtggtcatcgagattttcaatagccaaaaccgcgatttcggccatcatgataaaaacgacaagatccagtatgctcagctcgcctatttccctcttccccatcaagcgaaacaaaataaagatgatgaaatacaaaacgatcgtccgaaacgtaagagctaagatttcatccattacggcccgcctccttccgcctatcatgatcataaacatagcctttgttaatttgagtcttttatgtataaaaggtcgggggagctagtctatttgcgaaacatgcagaatacatttaaaaagacgagcccgtctattttgaaaggaggatcgtgatgaacgaaccaaaacaagtcggcaaagggattttatacagcttggtggtcattttcgctttgatgtttgcaggaagcctgcttatttcgctgctccttaccttcacatcattaaccgaaagttcattcagctggttgattaccgccatatcttttattaccttgttcatcggcggttttattgcgggaggaaaatcgaaggaaaaggggtggctgagcggagggttgacagcgctttgcttctcccttacggtgcttttgtttcaatatctcggctttggagaggccttcaatttgaagcagctcctctatcattccggctttttgggagtcagcatgctgggcggggttttcggggtcaatctgcaggggagccgtgcataaaggcagcaaaaagggagcggatgtccgctcccttttcccagtgcccgcaggcttctttcgtcattcacatcagaaacaaatgcagcttcctaaaacaataaggaacggcgcttatagcgcgcggacgtccccgtccgaacagcgccgccgtcacgtcgtgtgaaagcccgatttccgatgtttatgtatctttcggctattctgctgacgcctctctgattgcgcggcggtcgaatgtcagacgggtattgtcgcctgttttgatgacaaccttgctttcgtcaattgaatccacgatgccgtgcaggccgccgatcgttacgaccttatccccttttttcagctcctcctgcatctggcggacagccttctgctgcttttgctgcggacggatcaaaaggaaataaagaaccgcaaacattaaaataatcggaagtaatgttccaagcatctccattattttttcacccctttcaaatggctttatcgctttcttcgtttatgtgtcagaaacttttagcatttggtttattaaaaccgtagcgctcaaaaaactcttcccggaaatcacctaaacgatcttcacgaatggcatctctcacttgccccattaattttaacagaaaataaagattatgataagaagttaaacgaattccaaacgtttcgttgcagcggattaaatgtctgatataagcgcgcgagtaattgcggcacgtatagcagtcgcactgctcatcaatcggcctgaaatctctttcatattttgcatttttgacgacgaggcgcccttcgctcgtcatgagcgtaccgtttctcgctatccttgtcggcagcacgcaatcgaacatatccactccgcggatggctccgtcaatcagtgagtccggtgaaccgacacccattaagtagcgcggtttatccgctggaagcagcggagttgtaaactccagcacacggttcatcacgtcttttggctctccgacggatagtccacctatagcatatcccgggaaatccaatgaaatcaagtctttcgcactttgttttctcaaattttcgtactcgccgccttgaacgattccgaaaagcccctgctcgtcagggcgattgtgagctttcaggcacctttccgcccagcggctcgtgcgttcaacagacttcttcatataatcgtactctgccgggtatggcgggcattcgtcaaacgccatcataatatccgagccgagggcgttttggatttccatcgctttttcaggagataaaaacagcttgtctccgtttaaatgattgcggaaatgaacgccttcctcttcgattttgcggaactcgctcagggaaaacacctgaaagccgcctgaatccgtcaagatggcgcggttccaattcataaactgatgaagcccccccgcctctttgacgatgtcatggcccggtctcagccaaaggtggtacgtattgcttaaaataatgcctgcacccatttctttcagctcttccggcgacatcgttttaacggtggcgagcgttcctacgggcataaacaccggcgtttcaaaagagccgtgcggggtgtgcactctccccagccttgctcctgtttgtttacatgcttttatgaactcatagcgtatcggttgctgcgacaaattatgagccctccaatctttttgaattttatttgatcaacatggcgtctccaaagctgaagaagcggtattcgtgttccactgcggtccggtaggcggaaagcacatgctctctgcctgcgagcgcgctgacaagcataatgagggacgatttcggaagatgaaaattggtaatcatcccgtctattgcccggaatgtgtagccgggatagataaaaatcgatgtccagccgctcgcttcccggaagcggccgtcatgctcggaagcgattgtctcaagcgttctcgtcgatgtcgtgccgacggaaatgatccttccgccttcctgtctgacgcggtttaacaatgctgccgtttcttccgacatttcataaaactcggcatgcatgtcgtgttcctctacattttccgcactgacaggccggaatgtcccaagaccgacatgaagggtgataaacgcaatatgcacgcctttttccctgagcgcatcgagaatctcttccgtaaaatgcagcccggccgtcggcgcagccgccgatccttgtttctttgagtaaaccgtctgatagcgctccctgtcatcgagctgttctttaatataaggaggcagaggcatttcaccgagcgactcgagcacctcgtaaaaaatcccttcatagcggaattcaatttttctgccgccgtgctcgagctcttctgtgcagaccgccgttagacggccgtcaccgaacgaaagaacagttccgcgcttgacccgctttgcgggcttgacaagcgtttcccagacgtccccttcctcctgttttaacagaagaacttcaacctttgctcccgtctcttccttgactccgtacaagcgggccggcagcaccctcgtatcgttcagaacgatgcaatcgcccgcgttcagaaaatcaatcacgtgcttaaacgtgctgtgagtgatctcccctgtttttttatccagcaccatcagcctggacgcatcccgctcttttaaaggaacctgtgcgatgaggcgttcaggcaagtcaaaatcgaataattctactttcatcttttttcaccttactctatctatagacttgaatatcgcatcatttcattcgtccgaagaatgaaacacgacggacagaatgatgctgatgacaatgcatgtaacaacccgggaaagaaaaacgtcacgttttccctttttcacaaaaaatgtcgccgggaagcctgccgatgacttgcatgaataaaccgatgccaaaaatgacggcgcccagcaccattaaaatctttggaaattcagtcatggttcggaacctccattttaaagtggctgtaaacatcaggggttacgatgcgcccccgcggcgttctttgaataaaaccgatttgaagaagatacggctcatacacatcctcaatcgtgtgagactcctcaccgatagtagccgaaatcgtatcgatgccgacggggccgccgccaaatttttcgatcatgcccatcaaaagcttgcggtcgatatggtcaagcccgagtttatcaacctggaggcgttcaagcgcatcaaccgccacttcctctgtgatggagctgtttccaagcacctgggcaaaatccctgaccctccttaaaagcctgttggcaatccgcggcgtccctcttgaccgtctcgcgatttcgagagccgagagcgaatcgatgtcgacttcaaacagctctgccgttctgatcacgatctctgaaagctcatcacgcgtgtaatactcaagcctcgacagaacgccgaacctgtccctgagaggcgcggttaaaagcccaacccttgtggtcgcgccgacgagggtaaaaggaggaagatcgagcctcacagaacgtgccgacggtcctttgccgatcacgatatcaaggcagaaatcttccatcgcaggatacagcacctcttcgatcgaacggtgcaggcggtggatctcgtctataaataaaacgtcacctggctccagagccgttaatatcgccgccaaatcaccggggcgctcgatcgccggacctgacgtcgttctgagattgactcccatttcgttggcgatgatcgcggcgagcgtcgtttttcccaatcccggcggcccgtacaataagacatggtcaagggtttcctcccgcattttcgcagcttcgatgaaaaccttgaggttatctttcactttttcctggccgatatactgagcaagtctttgcggacgcagactttgctcaatcgctgattcatggttgtctagttcacttgatacaagccgctcatccatgatatcaccttactttaacaatttttgcaatgcttttttaacgtattgatctgtcgaaagcgcctcttcctttttcaaatgaggctggacttttttaatttcccgatcggaatagccgagcgccctcaatgcttcaagcgcttcctcaagagccgttgccgcttcatgaatttgctcccgctcttcatggttaaacagatcggcagcgatttcaggaacggcatccgcaagcttccctttcaggtcaaggatgatctgccttgccgtttttttgcctacgccgggaaatttgacgagaaatgcttcgtcctcattctcgatcgcttcaatcaccgctcccggatcgccggaagcgaggatcgcaagcgctccttttgggccgatccccgtaacattcagcattttcgtaaacagcattttttcttcccttgtcgaaaagccgtacagcgcattcgtgtcttctcttacataatggtatgtatagattgtttctttgctgtttttcttataaataaacggatttggcgtgaagatctgatagccgatcccgccgttttcaatgacaatatattggggcgatacataatcaatcgtcccttttacgaattcgatcaacgttcattcacctctttgactgctcttcattgtaacacaaaacaggcaaagctagaatgaaaaagttaacatatgttcgctaaaaaagcttctgtctgcagctgaaaaaagacataacagcgtcatgtcttcatatcttctacatgatgttggcttccggatgattttacggcttcaatgacatgttcaaattcctttttcgtgcggtatggtatccctttgcgcagatcatccgccatccggctttccagccgctttatatcaatctgaaaaaacgattgaatgggttctgataagatgcccgggcgaccgtgaaaagtcgaaatcacgccatcttcagtcactccgatataaccgtttgttttgctgaggggagaaatgtcgtccacctgtttgcgaaacagaataaacccctttttctgatcgatgagctgccaccctttataagcagctttaaagtcttccagtgtgcgagcggcctctactttattctcaattccaacgtctccgtccagataaaccttttcaagctggatttgaactttagccggcttttcggccaaggcctccaggtgaaagctgagcgcggccagcagacttccaataagcaataaaccgattttgaacttgcttcggctgtacatcaatatcaccttcttttttgccttaacgatcatatccttagtttgaccaacgcttttaaaaattaatctaaaaaagcaagcgatctctttttagatgacaaccggtttacgaatgttacattttcaaaccaatatgaagaactcaaaagcatttaaggtgcaaaacagcccattctcatgtataaacaacattatagagagtttttcgtttgaccagcccttaaaaagaaggtgagctcagcgtgaaaaaggcgcatacctatgcagaagccgtaaagtatgatacgaaaaaaaagttcaacaagcttatccaaaaacccgatgacttggaattgatcgggaaaggcaggagcgcatacgtttttaagctgactgaagagggcgacagggaaatggctcttaaagtcttttttcctgaatttaagaacatcgccgcaagggaagcggagatttacaaaaagctttctgattcgaattattatcctgatatatatgaaacagggccatcatatattttaatggagtatattaaaggatatactttttatgagtgtttaaacaaaggcattcggatcgatgatgacatgatctgcgaggtcgaccgcgcattgaacgatgcgaggcggaaaggattgaatccatccgatatccacctccgaaacctgatactgacgccgtctggaacaatcaaagtcatcgatgtcgccagatttttgcagacgaaagaatgcaggcagtgggatgacttaaaaacagcctatcaaaccctttacaaaaaaagccgtttcccgcagaggcttcctaagatgtggatggaattgatcgcttatctttataaaaaaagctggcttcaaaaacaatgggcctccagaaaaaacaaatttcacccgtaatctgaaacttataggaagcatgctcgtatatgaaataaccccattaccgtcaagaaaggagaaacattcgttgaagaaaaaaaataaacgtaatgatgacaaatgggattatctttatctcgtcgatttgcttgagccattgttttatgtgctgaggctggcagtaagaggacttgcgaaaattataaattaaacactcggtctttcgggtgtttttttgatggctgtgtggcaggcaaatccaaaacaaaaccccttcctcagaagggggttctttttaatgttctttcaaatttgcgagcggcacttcctgctcgttctccggctggccgagcggaaagattcttgcggtttcattttgttcgtcgacacgctgaatataaatcggcctgccgttataagtaacatcaaccatatcgggtgattcgacgatttcctgggcacgctgcgtattcacctgacaccctcctttagcttttactcataatgtgtactcccgggtgctttcgtattcctttttaaccggttttctttcaaggagggctctcaggatcaatgaatctttacatacaaaggcagatccgtgtgtcccatttcacggacataaacaaacagattgcctttgtggtgaatttcgtgtccgatcgcgagctgcagcagctgttcgccggctacttttcgtccgaagacgccggtcaaatcgacttcacgatccaattcttcatccgtaaaggattcaagcagcgtttttgttttttctgtatacgttttggcaagctcgctcaagcttgtccctgtttcttcgggcttctttttaaaaggctctccgttcccttcctttgccgccgaagcaaaggtatagaaagattgcagcatatgcgtgacaagttcctttgctggcatcgacgtttcagtcggtttgtaatcgagatgtttttcatcaattttttgaatgagttcttctgtcacaaggcggtgggacataaattcctgaacgatgcggtctttccgttccattcttttattcctccttcatgttttagcagttcatacacagaataacatgagtttccattttcagcatctgtcctgcagcaccttgcggaccgccttgacatattttcggaatgttctcgtttttgtctcttccctctctttataggaaaagtcttcgaaaaactctttcctctgagccgtgctgatttcaagctgcacgctcattcctgtctggctttcattattgatgttttcctcagcagttccggcaaatttcccgtccactttgaccaattctgcggaaaagtcagactttttcagagatttgacgatggcttttgccagctttctgtccgttcctcccacaagcgtgtgcggacggtcgcccgaatagccgtggaatgcgatggtatagcggtgttcttttattttctgcaatgccagaggctcgtcaaagtttgtgctggtaatatgaagatcggagttgttctcatccttttttccttcgaataaataagttgaataatcatcattaaaagctcggacaagctcgctcactccgccttctattcttcctccatggggcgaaaagattaaacagtcgcttcccgctttttcgtgataatcaatgtcatagccgcttttttcgttttcctgcaattccttgaagttcttgtatttgtccccggcctggatctgatagctttcccgggttgttttttcggaccacctgtatacaccatttatcatcactgctgcgatcaccaagtagatgagtacttttttcttcattggttattccccttttacactacctttcgatttataggcatgtcctccatgcctcattgtatatttggcttttttgtgacacagttattttacgctttagacatgacgcgttcaattatgaataagtttgataaaaaataaaaatttaaatatttttattaaaacaatactttttctttagtttaaaagatcgataaattttaagaagaaaatctcataagaatgggctcctctggttgcaggtttttcccaaaagcccatccagcttgagaatgaagcattctatcaggaacggggtatacggtttgataaaagtgagaatcatctgcggccgccaccggcagatgttatattttcttttctcccccgttctgttatcctataaccgacaataaaagtgcaggtgataaaacatggaaacagaatatgaaacaaaaggctacgacctgacaaaagtttatgattacaatcaatatccggatgtccgccacggacggtgcgacaattgcgattacaccctttttaaaagctctgtgaaaaacgggcagtttttgcgcgaatgccggcgctgcgggatgaaaaaaagcatttgaccgttacagcaaaattttcgtatgtataaaaaaaacttgtcgacaaggctgaatgcagctttgccgacaatattatcatgctgtccaatatttaagcgtctttttgatctttgcttgtgacgatgccttggatcgattcaccgatctttccgctgagatcggcattcagattgttgagattttgaatgtattcgctgataatattttggatcgcttgattcagttccgcattctcgctttttgtgaagtcagcctctctcagatcgatgccgctgtttttctgtaccagctcatagatggattcgccaaatccggtgataaggctgccgactctctcgatgatttgagcggtttcctgatcttgcgcaccggcgcccatagccgtgaaaggcttctcatttccttgctgttcagccatttatagatcctcctctcatagatgacagattccttcacaatatatgatcaaaaatcaaatcatgtttccgctggagcttgatacggctgctaaatggtttgatgaagcataaaaggacaccgctaatcttgagcggcgcccttttctttaatgaacgttcgtatacacttcctgcacatcgtcatcatcttcaagcacgtcaatgagcttttcgactttttcctgaagcgcttcatcgacttctgcataggtttgcggaaccattgtaatttcggatgttgccagcttgtagccgcgctcctccaagcttttcttcacttcttcaaactgttcgggctctgtataaatctcgaacaactcttcgctcgtttcaagctcctcagcaccggcatcaatgacctcaagcataaactcttcttcatctatctcaagatcttcacgttcgattgcaatatatcctttccggtcgaacatataagaaacgcatcctgtttctcccaagctgccgccgtttttgctgaaagcggttctgacgcttgtcgccgtccggtttttattatctgtcaaacatttgaccatgacagccacaccgcttggtccgtagccctcatacgtaatttcctcatagctttttccatcctggctgccggaagcttttttgatggcgcggtcgatgttgtcatttggcatgtttgcatttttggctttatcgatgacgagacgcagacttgcgttagattcgggatctggtcccccttctttcgcggctacatatatttctttggcaagcttcatgaaaattttgccgcgtttagcatcttgggcattttttcgtctctgaatatttttccatttagaatggccagccataactttctacctccaaaataattctcgtctctatgtacactttatacggttttccccgtttttgtaaaggaatcggccgagcgcttataaaaaattgccggggaatccccggcaattccctgcttgttattggttccgcaagcggttcaaattgttattcgtcgtgtctccgcgatccctaatgttctgaggatcatcgttcatttcgcgcagccttgtaaatgcgccgtcgtcctcgacaacttgaacggtccggtctccggcaaatgttttggctgcttttctaatttgagttctctcgttatttgtcagccttttatcagaccgtacggcgatgatgaccgtttcattcgttacgactgcctggctttcgtcaacataattcaatttgttgacgcgcccagtgatattccttgagattttacggttttccggtctgtcatagcctgtatccgccgtattcaccaaatggttgtgataattcatgtctccccggctgtaagttccatcgcctgttggaacgggattgccgttgcccgctcgattgtttacgtttgttgcaccgtttctcccgttcatgttttcaagcatttctgtaacaggaccgtcattatcaagacctgcattacgatctgcatcatttgaataatatccgatcgggcgcgtattgtttccattatctatagcgtcgttcgttccgcatgcagatagacctgctgtcaaaagcaaaatccccgaaaacactttcagcttgctgtccaatggtagtaccccccgtgaaaaccgctgaatttgagcattgcgctcttttttaggatgtgcgggatgcgaagagttacccttgacagttatagacattcccgttaaatagcatgaaaatgtttatagcggtccacaataaaaaaggaacgatagatcatcgtcccattccgaatcagtcttcatcatcttccggtctgttaaacatctgtccccctgcaggctgctgtccgtatccccccataccgtacggagctcccatttgcggcatctgtccatatggcgccgcacctggaaaacctcccgggaattggcccggcccgcacccgcagtcatcttctttgccgtgtgccatattagggtccccggcgtgaccgacgtttggcggtgcaaatcccgggaacggctggtaaggcgcatatgccggggcagtcatcggctgatgatggtatccgtgatgaccggcattgtcatgccccatgttgtcatcatcgtcatattcagcaggagatacatagctaggctgatgcatataaggcatttgagcaggatatggataccaaggatggcacaatcccgatccaggcagcaccggtgaaacaggaatccagcagcctccaggatagaacggataaggatatggatggtgatgatatcccgctgcagctacattcggcatgccgtgaaactgcttattttcatcacctgctgcaccgacatttggcggctgcggaacattcggataattgacattttccatatggttttcctcctcatttgtccatggattatacatgttggggcctttctcttgatgttcataaggttttggaggtacgtacggctgatgaagctgattgacgctttgatacaaattcgaaatgtcgccttcaggcaaacttgattgtccgatgttcgggacaggcggaacataaggaaccgaaggcttttctttcggttttatatcttcaacatcaagcttgcttttcggcttttcttttgcaaatggatgttcctgctgttttttcggtaattcctttcgcatattgagctgttcttcttttttgaccggcactccccctgacggtactttgattttcatgcccggcatgatcaagtctggattgctcagctgcgaattcagctttttcagttcttcaaagtccacttcatatctttccgcgattttttccagagaatcgcccttttggacaatatgaattttcaacgttttcccctcctatgcaaaaacgtgaacgaacagatgagaataacaaatatgcttctccacaaatttatgcgcatagcggaggggttatgataaaaacttgttctccaaaaagttaacggatcgttaacatccgattcagcgcaagaatggcatcttttgcaatatcttgatccactttgatcacgcctgtcggttcacctttgtcgatctgctccagcgaccacagcaaatgcggcatgtcgattctgttcattgtcaaacaaggacacatatcagggttaagggattcgatttgtttatcaggatgttcttgaatgatgcgtgaaacaaggttcatctctgttccaatcgcccatttgctccccggttttgcttcattaatggagtcgatgattttttttgtagatccgctgaaatcgctgagcgcaacgacttcgtgggtgcattccggatgaacgataacattgatgtccggatcccgctctttaacacttttgatattcgccacggtaaatttttcgtgaactgaacaatgccccttccacaaaatgattattatgtctttcatatcgccgttatactcaagtttttctgcaattggatcccataccgccatcctgcttagaggaatgccgaggtcaaatgccgtgttgcgtcccaagtgctgatccggaagaaataaaatcctctccttttgcgatagcgcccatgtcaacatgcgcgccgcatttgaggatgtcacggacgctcctccgtttcttcccacaaaagccttaatttcagctgtcgaattgacatatgtgagcggaatgaccgtatcgccaaacagcttcgtcagctcttcccaggcgcgatttgtctgccgcatattggccatatcggccatcgaacagcctgcgcgcatgtccggcaaaacgacaatctgttcgtccgaagtgagcatatcggctgtttccgccataaaatgtacgccgcagaacacgatatattccgcttttttatttttttgggcgacctgtgccagctggagcgaatcgcccgtcgcgtccgcaaattgaatcacttcgtctttttggtagtgatgccccgggataaacagccttgctccgaatttctttttgattttcaaaatccttccggccatttcttcctcagtcaattctttatacacctccggcatcatgccggcgttcctgtcatgaatcacttttaaaatagacatctgtaccctctccaatcccgcttattttttcagatcaacattcatgctgatatcaaggcttttcgccgaatgagtcaagtagcccaatgaaatacagtgcacccctgttcccctgtaagcggggagattttcaaatgaaattccgcctgaagcctccgttataatgccggcgggtgtcatttcagcaaatgctttcaccgtctcgggcgggcaattgtcgaacataatgatatcggcgccggcctcaatcgcttcatgaagctcttgttcagattcgatctccacttcgatcttgaccatatggccgcacgctgaccgcgctttttcaaccgcttttgaaatcgagccgcaggcggcaatatggttgtctttaatcatgatgccgccgtccaatccaaagcggtgattgctgcccccgccggttttgaccgcgtatttttcaaggatgcgcaggcccggggtcgtctttctcgtatcgcaaatcgcgatattcggatcattcagcctgataatggactgctttgttaatgtggcgatcccggacattctttgaatgagattcagcacaacccgttcaccggtcatgagggaagctgcacggcctttgagtcgcgcgatcgtttcccctttacgaaccgcttcgccatctgttttcagcatgtggacggcgatcgtttcatcaagcagccgaaagccttccagaatcactaattctcctgcaaacaagccgtcatccttcgctgtgatgacagcttcgcattgatgattgtcatcaaaaacggcttctgaagtgagatccccccggccgatatcttccttgaaaaattccttaagcatgttcctaagtatgaaccgctgcatatttcacaatcccttcgttttgtctgatcttgatcccgccttttgtgtgaacgatttgcttgccgtgccagtttttatcatcaggcgccggacaatccgaacggtaatggccgcccctgctttctgtacgaagcagtgccgaggccgtcatctgtttggcagtctgccataaatgagctagctcgagctgttctattgtgatttctttcacatttacgatttgaaccggcattcgctcaagccattctttcaccttcgtcaattcatcctccgtacgcacgatcgccgcataatctgtcatttgtttctgaatatccttcacatctgtcaaaggaacagaatacgtcacattctcaggctgaggagattggcctctgacaggctccggtttttggcaggcttgaatccgctccgccgctctccttccgaagacgatgcattccaagagagaattgcttgccagacggttggcaccgtgaaagccggtgcaagcggcttccccgatcacaaaaaggtttggaacagccgtttctccccatttattcacagaaacgccccccattaaaaaatgcatgcccggtgaaaccggaatccggccctcttcaatggaaataccggctttttcgcaaagagaagaaatcgtagggaagcggcttttaaagtctgatatgcgggaaatatctaaaaatacgctgcttccgcaggcaagcttttggtgtatcgcccgagatacaacgtcccgcggcgctaaatccagcaaagaatgtatgccttccatcacccgctgtccgttttcatcaatcaacacagcaccttctccgcgcacagcttctgaaacaagtccgtgcgcgcgcccgtctttgacaagcaatgtaggatgaaattgaacgaattccaagtctgcgagctctgctcctgcccgatacgccaaagaaatcgcatcgcttgtcacagaacggttattcgtgttgatttgaaatagatttccgcagcctcctgccgccagcacgacaaaatcggcttttctgagaaacgtcttcccacggctgtctttcgtccagacgccacagcagcgtccgtcttcaatccataaatccgccgccgtttcgtattctttcagcacgacgtgcggaccgagccgtccgattaagtgccggatcaactcctgtcctgttgcgtctcccccggcatgcaaaattctgttcaccgaatgcgcgccttcttttccgaggctcagctttcctgattcgtcagtatcaaaagggaaatgctgaaggatcagctcatcaacaaggcgctgtccgtctttaatggcatcatggaccgcttcgatttgattgtggccgcacccggcatacaacgtgtcgtccgcatgaagcgaccaggaatcgcgaggcaatacagcagatgcaattcctccctgagcgagggttgaattgctgtcttttacagatgcttttgtcatcacaaccacttcataagacggcggaatggatgcagcaaaagacaacgctgcggcacctgctccgacaacaataatcgtctgatgagacatgtcgactcctcctgtaaatttacatgtgtcttgacacctatatttacacatcgataaaataaactcaagtattttttataaagaatgggagacgagcgccgtgatttatcttgattatgcagcgacgacaccggcatcaaaagaagccttggacgcgtttcaaaaacttagcacagacgtatacggaaattcgagcagtctgcacgatgcaggagggaaagccgaaaacattttgcgctgctgccgccaaaggatggcagaacttttatccggagaagaagaaggcgtttattttacgagcggaggcaccgaagccaactttttagcgattcactccatcttaaatggacttcccgccgggaaaaagcgctttttaatgacagaaatggagcatcagtcgatccatattttgaaacggcatctcgagatgctgggatttgatgtcgacttgatgaagccgaatgcttcaggcatcattacaacggatatacttgaacggcacctccgcccggatacgggtctggtttcgattcagcatgccaattcagaaacaggcgtcatccagcctctggcaaagctctcggcttacctgcataagcgggacgtgctcttgcacagcgactgcgtacagacatttgccaagattccggtccgcattgatgagctcggcgctgatgccttatcggtctcaagccacaaagtatacggcccaaaaggagttggggctgtctatattcggccgggtgtaaactggaaacccgtctacccgggcactttgcatgaaaacggctttaaaagcggcaccgtcaatgtccctggaatcggcgctttcattaccgctgcagattcgacaataaaccgcatggatgccgcgcatctcaaattccaggagctgcgcgcaggttttctggaaggagtaaaagaccggaagcttcccgtctcccttgctgtgcccgattcggcaaattcgcatgttctgccgcatattataggttgtttttttcattcctttgaaggacaatatactatgctggaatgtaatcggagaggaatttgcatttctaccggaagcgcgtgttcagcgggctatcatgagccttcgaatacgatgaaagcccttttgatccctagggagctcgcgcttcaattcgtccggatttcattcggatgcgatacgacaagcgaacatgttgataggctgttggacgttcttgaagatatgatgaatgagaaaggagaccatcggattgacagacggattaaaacttacgggagctgagcggcgccagcagctgctggcttggctgaaggagtcagaggctccgcttacaggaagcgagctggccaaaagagcatctgtttcacggcaggtcatagtacaggatatttctttattaaaagcaaaaaacgaaccgatcatcgcaacaagccaagggtacatgtatttgcggtcagccctcggcaaaaaacagccggttcagcggatcatcgcctgtgaccacgaacccgaaaaaacggaagaagagctgaatctgatcgtcgactttggcgtaacggtgaaagatgtaacgattgaacatccggtctacggagacttaacagcttcgatcagggtcagcacaagaaaagaagtcgcggatttcgtcaaaaaaatctcttcgacaaacgccgcttatctgtctcagctgacaaacggcatccatctccacacattggaggcagatgatgaagagaagatcgaacaagcttgcggcgccctgcaaaaagcgggcatcctcattcccgaataaaagaaaaggtcctttgccgttatcagcgcaaaggacctttcttttatagtgtatatgcgttgtaggcaccgagcattttcaccttgcagcccaaagcttcaagctcagctattgcacctggaatcagcacgtcatccagggccatttcaatatcaataatgaagaaataattgccgagaccggtttttgtcggccgcgattcaattttagaaagattcaaatttctccaggcgaaagccgacagcacttggtggagagctcccgatctgtccgaaggaagggtcaccagcaaagtcgttttcggtcttcccttgagttgagggttgaccggaggggatgcctcgcgatccggatgaagcatcacaaatctcgtgtgattgtattcatagtcatgcacatctcttttgacgatgtctaatccgtaagtatctgctgccatttcattggcgatcacgccgatgttctcttccggattttcgctcacgtattttgcagctgctccggtggatgtcgcatattcaaacggaatggagcggaaccggctgtgcaaaaatttatggcattgcgcgatggcatgggaatgggaataaaccttctgaatgtcttcccaagcctcttttctggtaggatgcacaagcaaatgctgacggatgggagcggtgatttctccgacaatataaagaggctgttcgtgaattaagtagtctattgtcagattcaccgatccttcaatcgcattttcaagcgggacgacagccagatcgatctccccgttcatcgccgcatccatgcaggccggtatcgtgttaaatgcttgctggtctgcatctgaaaagcaggagcagacggcaaggtgcgtaaaagttgcttctggacctaaataacctactctcatactcatgatatatgtcattctctcccttaagcgcccgaacctagtatttcgaccttttctacgaattccagctttcttaatttgttcatcagcaaatcgatattttcatccatgcctctcgtactgacagagagcgtgacattcgctcttccttgaagagggatggtctggtggatcgacagcacattgcagcccgattcagctaccacttgcagcagatgggacagcgttcctgagcggtcctccaaatgaaaaaaaagcgtgataatctgttccttgaccatcgtataaaaaggaaaaaccgcatctctgtacttataaaaagcgcttcggctcaaatctaccttttgtacggcttcagctacagattccgcttttttccgctcaatcagctttttgacctcaagtgttttccgcattgcctccggcagcacgtcttccctgacaagataaaaggtctcctctttcacagacttttctctccttttaaaaaccctgattcctttacattgatcctgcgaaaggaagggcgttcctttcagctaaaagtcggagagcttgcttggcaaactctccggtatgatcagtcgataaattcaaattcaaattcgagaagacggatcgtatccccgtcttttgcaccgcgggcccgaagcgcatcatcgacgcccattccgcgaagctgtctggcaaaacgcttaacagactcatctcttgaaaagtccgtcattttaaataagcgttcaagcttggctccgctgagcacgaaggtgccgtcaggatcacggctgatctcaaacggcgcttcctcatcctcaagcttatacatgactctgttttcagccatgtcttcttcgtcgtagagcgggaattccggcgtcgtttccaaacggtcggcaatttcaaacagcagatccctcaagccttgtctggtcaccgcgctgattggaaaaacaggataatcatctgtgagcttttctttgaaagccttcagattttcttccgcatccggcatatccattttattggcgacaataatttgaggacgttctgtcagcctgagattatactgttcaagctctttattaatggtcacataatcttcatacgggtcgcgcccttcaagacccgacatgtcaataacgtgcacgatgacgcgcgttctttcgatatgcctgaggaattggtgtccgaggccaactccttcgtgcgccccctcaatcagtcccggaagatccgccattacaaagctgcggccgtcttccgtttcgaccattccgagattcgggttcagcgttgtaaagtggtaatcggcaattttcggcttggccgaagacacgacagacaggagcgttgattttccgacgcttgggaagccgacaagaccgacatctgccaaaactttcagctcgagaacaatatagcgctccttgccgggttcgccgttttcagaaagctgcggcgccgggttggcaggcgtcgcaaaacgtgtattgccccgtccgccgcgtcccccttttgcgatgacggcttcctgtccgtgctccgttaaatcagcgatgacctgttttgtatcatcgtcaatgacaaccgtgccgggcgggactttcacaaccatgtcttcggcatttcggccgtgctggtttttagacatgccgtgttctccgcgcgctgccttaaaatgtctttgatatctaaaatccatcagcgtgctgagaccttcgtcaactttgaaaacgacgtctccgccttttccgccgtcacctccggcagggcctccttttggcacatatttttcgcggcggaaagcaaccataccgttgcctccgtctccgccttttacgtatattttcacctgatcaacaaacataatgtcctccgttctattcctaaaaaaccgctttacttgatatgaatttcggcgatgcactcacggtctgttacatcaaaccgcttgatttcataaaagtcggccagtgaatgatgaaagtctttgataccggtcagctttgtgaatacgccgtggaaatcgagaaagatgacgaggcggtcgtccggaccgtccgtctgcagcgtgatcgtcagatgattgtcgctgcctttcaaaacggcatcgtcaaaaatcccaaacagctttctgatgagaacgacgagcctttcttcataagctgacaaatccttgacttgaccgatcacctcatattcaagcgtcagcgaatgggccatccagttaaatgtaagcagctcatacgccgcgcgcgggattctaaggtttgaaagctttgattcatgctgagcttcgatgaccacttcatcgataatttcaaatacgcggtcatacttttttaatgttaagtttcctttaatcaattgcagtttattcatccagtcgtgccttgagtggctgagcagatggataagctcatgggtcaaagccttatcgtccatattcttttctcgttttttcgaagtttcttccattttggcactcccaatcgtttggtctctcttttaggagtctgattcagtttgtactttgaattataacagagaaggcagtataaatgaaacacgtttatatactttaacgaagcagaatcagagcggaaacccggccttatttaggcgtcgggaaggtgttttaagcaagtcatggtgctgaatgtaaaaaactccggtcagaacgaccggagtttcgtttaaaggttaggctacaggatatacgctcacttttttgcggttacggccgaaacgttcgaatttaacagttccgtcgacttttgcatatagagtgtcatctccgccgcgcccaacgttttcacctggatagatttttgttccgcgctgacgataaaggattgaaccgccagatacgaattgaccgtctgcacgtttagcacctaggcgcttcgcctcagagtcacgtccgtttttcgttgaacctactccttttttagatgcaaaaaactgaagatctaatcttagcatgtagctcacctcctatattttgttcgtcgttacttttaagtaacctttgtagtctcgttcgatcgtgtcaagggagacgatcatgccttcgagaaggagctgcgccttttcaaaagcctcacgatccgtaccgtccgggaagcggaaagataaaaaccccccgtcttccccgaggtcaatgaccggctcaatgcccgtcagcttcattacggcattgacggctccaaaggcgaccgccgacgcccctgcgcaaacgagatcctgaccatgttcagcaaaattcgcatgtcccgacatttcaaagcccaagatgtctttgttcgatcgggatcttgtaatctttgcatgaatcatatcatacacgccttaagcgttgattttttcgataacaactttagtgtaaggttgacgatgaccttgttttttgtgttggtttttcttcggcttgtacttaaatacggtaatttttttagcgcggccttgtttttcaactttgcctgttaccgtagcaccttcaaccgtagggctgccaactttaacattttcaccgccgacaaacaatacgttgtcaaaagtaactgtttcgccggcttcagcagcaagcttttcgacgtatacagtttggccttcttcaactttgatttgttttccgcctgtttgaataattgcgtacatctctgcacctcctaataaactaagactcgccagtcacagggggctaagaaagcacttaacgcctgtgctgagcggttgtagcacgggtgctacatccataacattaaaaaatataccagaaaagagcccgagtgtcaatgtcttttagaaggatggtcaataaaccagaagcagatcttccattgaggaagtcgtgcgcttgtctgtaaaataagcgtggagaacttcattttcatccagctggctcagtttttgtccgtccttctcaataatgatcgggtgtttgcagccccttttaaacatgagcatgacctcataaatctgctgttcggcgcacaccgtgatcggtgcgagtcgccgcacttccctctcatttccatagtagcgctcaagcaaaaaacggatatgggcgtaatgccgattgcgatattcctggtaaagggatgcagccaaaaatacgagaagcacccaagcgctcagctgcgacggggagaccagcagagtcgccgcgattagaacagcgcagcaaaagcacgatacagccagcatcatccgctgcgctttctgatacggaaggtgttttgaaaacagcagaaacagcagcttcccgccgtcaagcggccaaataggaaacagatttatcaagaggatggtcagattgtaaaaagtaaacgtttcaaatatatgagggctgatgagcgaattgaccgccaaaagccaggctgcaaattgaagccaaatgtgctgaacaggccccgcggcgatgacggcaagctcttcctttaacggtctgttgccgtgttcatcgacttccagcgttcctccaaaaggcagcaggaaaatgcctttaattctccatgaaaaataaacggcagcagcagcgtggccaagctcgtggatcaaaataatgatcattaaacaaaacagcgctttaatatgtcctgtcatgataccgatcgccatgacaagccacagcagcggatgaatgtgaagcttggtgaagagctccgtccatttactcaaatgtgatcacctgtatcggatcaacaaattcctctccttgtttgatcgcaaagtaatagatgcctttttgatttttatcctgctcaatcgttccgagcttcgttcctttatctatataatcgtataaagcgacatccgcttttttcagctggccgtagtaggtatagctgttgtccgcatgctgcaagaccaccgtcaggcctgtttccggatttttgtccacttcaatgacatagccttccttcatgctgcggatcgtttcgtcttctgtttctaccttaatgccctgccctgagaatttctcctgaacctttcctacggcaggtacagcgagatcctgattcacctcgacctggccggacggtttggcgcctttcggctgaaagaatgcgaggggatcgccgaacttggattcataccaattctggagggccgcaaattggaactcttcagtaaacacctggctgataaccggtttgatttggtttgcgggttcaaactggcctttgtaggcaatggcggacacaagaacaaggcatgccgacagaagacatttcaagatgagcgcatccgccttgacaagcgggtgcttcccgtttatcagcagggaacttccttcaggcggagggaagtctcctcctttttcatcttccgaaaaggctgtccatgcaggcggcttgagcggccgctttttgccgtctgatgaaaagggctgtttgtccggtgttttccgctttcttttcctggccattctttttcgaatctcatctgctctatgactcataaccctcatcctttacattcaggttcgtttgttcaatgatatgccttgtcccagggaattatgacggaacattgacataaaactaaaaggtttcatataatagaaaggaaaccatttggttttacttttttctaggaggtctattatgagcaatcaactagtgcctgatatacataaacaggctgtttttcacgcatcgatagaaaaagtgtgggaggccgtcgccaccagtgaaggcatcgccgcctggtttatgcctaatgatttccgcccggagatcggctgcgaattcaccctgcagtctcctttcggcccctccccgtgcaaagtgatcgagcttgatgcgccgcatcgactcgctttcagctgggatacgtcgggatggatcgtcacatttgaattgaaagagctttctgcagaaaaaaccgaatttaccctgattcattcaggatggggtgcgccggaagaaacggtttcaaaagcgggagaaaagcaagcggatgtccgcaatcggatgaatggcggctgggaaacaatcgtcaatcaaaagctgcgtcaggcagttgagggctagtgacatccgccgcaaaacatgatgtgttccaagccgtttccgatccctcccggcgaaaaatgctggagctcctcgccggcaaagaattgcctgtcacagatatcagcagccatttcccgatgagccggacggctgtttcaaagcatctcagagttttgtccgaagcaggcctagtcagcgggagaaaagcgggcagagaaaaactgtacaggcttcatcccgaacctctcgccgagctgcagcagtggctcgcctacttcgacatgtattgggacaataagctttccttgctaaagcataaagtagaaaacgatcaataaaactgcaaaaaaagcaatctcgctttggagattgctttttgcagttaagcgcgtacgccgaaaaatgatttaatctttgcgaaaacgcctttattttcttcttcaaacgactgtaaaggcacagattcgcccagcacgcggcgggcgatgttccggtatgcgattgaagctttattattcgggtccatgacgacaggctccccgttattggaagctttaatcacttcatcatcatccgcaacaataccgatcagttcgatcgacaagtgctgaatgacttcatcaacatccagcgtatcgccgtttttcattaagtggttgcggatccggttgacgacaagtctcggcggctcaatattttcttccttttcaagcaggccgatgatccggtcagcgtcacgaacagcggagatttccggtgttgtcacgacaatcgccttgtctgcgcccgagaccgcatttttataaccttgctcaatccctgcagggcagtcaatgacaatgtagtcgaagtcttgtttgagctgctggatcagcttgaccatctgctcgggcaaaacagccgacttatcgcttgtctgagcggccggcagcaaataaagcaaatcatcaaagcgcttatctttcacaagcgcctgatggattttgcatcgttcctcaacgacatccaccaaatcatatatgattctattttcaaggcccatgacaacatcaagattgcgcaggccgatatccgtgtcaacgagacatacccgtttccccaaaatggccaaggcggtgccaagatttgcagacgtcgtcgttttgcctactccgcctttccccgaggttattacgatagcttcacccaattttacattcctccctcaagccttgttaaactaggtcttaaatgagctaattgctgaaggcggtcaatgaccatattctcattttcatctaaataagcacattccatgtcgttcccttcttggatgttgtctggggagcgattgagcacatgattgatacgcaattgagtcggtctcatatccgaagccgcaataacagctcgtttatttccattaaaaccggcgtgggcaatccctcttaatgagccgaggatgaaaatattccctccggctttcaccattcctcccggattcacatccccaatgagaagcaaatcaccctccgtttcaaggacttgcccggaacggacaatcttagcgacagaaataatttcgctttccgcttttaagcggtttgcttcatctttggtcatgacttcactttcaatggagtggatgaacagattttgtttctcagtgatcacatcggtcaggatctgttcttgctcctcggtcacatagcggtggccgagcttaacgagaacattgattttctggccttttccatccatataatgttcgagtgacagcatatcctgaagaccgtacaataattcttcaaaagagcatgtgtcatcaagatgaagcgtcaatccatttttcgttcctttaattgttacgtattgctgcttttgggtcttcacggtgttcacctcaacatcatactcttttcgacatcggctcataaaatcctctttttactcattcctcagctctttcttaagactggtaaaaaaccatttgaacgggtaaatgagcagaaggccgccaacggcgttcagcgcaagcgtgggcaggagcctgccgagcacaaattgatggaacggcataatttccggacgtatcagcatctgcacgccatattggtaaaattcaagaacacagacggcgagcagcgaaataaaaatgacgaccagcgcgtttgtctgcaatactttgaacgcttttgacgataaatagcaaataccggcaaaaccaaacatatatacacctaaaaggtcggtgtaattaatatcatataacagtccgaaaataaatccatatgtaatggcaaaaggctgattgacataagccgtcataaaaactaagacaagcagcagaaaacgcgggatgagctgctgttcttccgtcacaaaaggcaagttgacaaaatccgcatagacgctgtcagatactaaaacaaacatcatgacgacgggaagaaggaagcgtttcacgacccttcctcctcatcgtccatcttgtcgacatccaccgtatcaagcgttctgtcgacgacgatgacgttatcaaggttatacatatcggctgccggctctacataagcgattttcgtcaaaccgtaggaatctggttcaacctctgtcacttttccgattgtcaggcctttaggaaaaacgccgcccgcaccggaagtttcgacgaggtcaccttttttcacttccctgtcttcatcaggctcgatgatttccatggaaagcgcctttttatctgagtcgtagccgttgatgattccgttcaccgttttcttgcctttatctgcagcgataactgtggagattctgttgtttctgtctgttgcgcttaaaagctggacggtggaagtgaaattgttcacttttgtgcttttgatttttccgatcaagttgccgttttcatctgttaccgccatatccttctcaacgccgtgctttgaacctttgttgatcgtaatcaggttccaccactcatacttatcgggatttctggcgataacggtcgccagaatcggcgtgtagtctttaattgatttcagatggccgagctcttttcttaaagacttattttcattttcaagctcctgcagctttgcctcgtattgtgtctggccgtcgagctttttccgcaggcgctcattttcgctgtacgtattttttaagtcttcgatattttcaaagaagcccgcaaaaaattgagcgggcgtatgaaaaatcgtctggaatacaccagttgtatcgccaataaatttttcgggccaagttgcattccggtcattctttaacgaaaatccaatcattgccactaaaatgatgatacaaaggagtaaaagcatcaaccgtttatttgtaaaaaactgcggcatgattatacacctcttctattccctgtgtccttaatttttgcctttaaatagatgaatttgctcgagagctttgcctgttccgatcgctacacagtcaagagggtcttccgcaattaaaaccggcattttcgtttcttcgctgatgactttgtccaggtggcgcagcagtgcgccgcctcccgtaaggacgattccgcggtccataatatcagccgcgagttcaggcggagttttttcaagcgtattttttacggcatcgacaatggcggtcacagtgtcgcgaagagccgctgtaatttctttttcagtgatttcaatcgttttcggcaggcctgttaaaagatcgcggccgcggatctccatgctttctccgttttcagaagcttcggcagaaccgatttcaagtttgatcgcttctgcagtccggtcaccgatcatcaagttatatgtttttctaatataagtaatgattgcttcatccatttcatctccggcaacgcggatagactgggatgtgacgatgccgccgagggaaataatcgcgacttcggtcgttccgcctccgatgtcgaccaccatgcttccagtcggctcccaaacaggaaggtttgcaccgatcgccgctgcaaacggttcttcaatcggatatgcatctctcgctccggcctggcgcgtggcgtcgataaccgcacgctgctcgacagccgtaattcccgacgggacacagaccatgacatacggctttctcgcaaataagcctttgtttttaactgctttgctaatataatgcttcatcattgtcgctgttgtttcataatcagcgattacgccatccttcatcgggcggagggcaacgacattgccgggcgtacgtccgatcatgtttttcgcatcatttccgactgcgacaatctgctttgtgtctgtttgcagtgcaacgacagaaggctccctgacgacaattcctttacctttcacaaaaacaagcgtattcgccgttcctaaatctattccaaggtctctcgcaccaattccaaacatttgtatgtatcttcctttcttaaaacaatattcctaagcaaaaacccataaattctattatagcttaatttaatagaaaaaaaaagtgttacaaatatcctttttcttttaagctcacaaatttttgatcaccgatgatgatatgatcgagcaattcgattccgagcagctgtccggactcgtgaaggcgctgtgtaacttctatgtcttcgcggcttggagccggatctccggacggatgattgtggacgcagatgaatgaagctgcggagcgctttaaagcttctttaaacacttccctcggatggacgattgaagagttcaggctccctataaaaaccgtgcgcttgtggatcacctggtttttcgtgttcagatacacacatacgaagtgctcctgagagagaaagcgcatatcccccattaaaaaattggccgcatcttcgggaaaacgaatcacataacggtctttgcaagccagactgtgaatgcgccggccaagctcaagggccgccaaaatctgcacggcttttgcgcggccgatcccggaaatgcttgaaagctcctcggcggatgcttcttttaacaaacggaggccgtcaaacgtttgaagcagccggcttgaaagctgaagaaccgattcttttttcgtaccggttctgagcagtatcgcaagcagttcatggtttgacaaactttcggcgcctgtgttgagaaggcgctcccttggcctttcttcatcaggaaaatcttttaatttcaatggcagatcgcttatgataaaccctcccttttgattcccttctcgttcggtacatcaaaaggagtggagatcaaacgttttcagcattctcatcgttttggaaatcggaaggcccacaactgtataatagtctccttttatctgtttgacaaaaagcgcgccttttccttgtattccgtatgaaccggctttatcaaacggttctcccgtagcgatgtaagcgctgatttccttttcttcaagaggccaaaaagagacttcggtttcctcaaaaaatgtttcgcatctttcgccgtccttaatgcagacgccggtgagcactgaatgggtctgtcccgaaagcatgctcagcatccgttctgcatcttcggcatctttgggcttgcccaaataagctccgtcataataaacaatggtgtcggcgccaagcacgacggcatcaggatattgttcggctactgcacgcactttttgttccgccaaccatttgacgttttctgctggtgaaaagtttcgaattaatttttcttccgcattgctcgtaacgatgctgtacggaatctgcaggagatcgaggagttcctttctgcggggtgattgtgaagccaatatgagctgtcgggtcataagaagccatcctttcaaaggtttttgcataggaaaaaaagatacctgttttatcctaccaaaagaacgccgccgccacaatttcagaaaaataactttttaatgacaaaaatcgcgaaaataaaaaaaccaagcacgtctgctggttttctatttatttaatttggcccagcaatagctgctggctcttccagccgttggctgcggtcggtttctccagaaggttgacggcttccagtatgctcttctttacctcttcagagccttttgattgggccccgtcaagttgagctttgacatcggctatgttttgagatgtaacctccgcgccgagaatcgcttttgccgacagctcagccgcttctttaaaaggctccagcaaaccggactcgattgcaaccggaagctcttttccgccccacgcttcaaaatcgttttcgattaatattttgccaagttcagatgtcatctgcttttctcccgttattccggcgattacataaaacccgtcgtccttggcaatcgacacggcggcataccccttgtctgcgatttgagaggccagcgtatccgctccttctttagacgaaaactttccggcctgaacggcgaagctgttaaaagattctcccgcttgtccgctatttttttctccgctctttttctcctcggcaccggagtcaccggctttaacggtctggccgttttcagcatccgccccaagactgccggaagccggcactccttctttatgcgttgcgagattcagcgcaaactgaccgagtcccgtcccgagcaaaacagcaaagacgatggtcgcggcaaatcgcttcacaggatacgtaagagacgttttcgttttgcggttgtttttgggctcgtttttcttttgataaggcgccaccactttaggatcgtctttgtagacggtttcttcttcgtccggtggcgtccatgtaaattcacctgtttcatgtgtgccgtcctcttttgaagccgatatttcccgttctgcctttctcttttcttcccagttcgaaaaggtaaacttcttttcttcatttctgttggaaaactctttttcatttccgtagatagtctcttctctgccgttgatcatcactttaagcgggtcttgttcgggcgcttttttagctgagtttttcttgcttttccgttttttcatatgcttccctcgctttctgttaattgttttatattgatttaggcggcagcttggccgctctctatacgctcggcagagggaagccagaaggaaggaggagttctcctaaaggctgtccctcttaatgtccacactttatcacagcctacaaaaaaaaagaacaagacttttgtcgtcttgcccaaaaaggtttcgtcaaatttttcaccaccatgccgtttgaaggtaccactcgatcattggttcgccatagaagcagctcgtcagcgtcccggccagaatcgcgggagcaaacggcattggttcatttttcttcagtttgcctgccaggagtgcaataagaccaagcaccgttcctgcggctgccgagatgaaaaaagcgagaacgaggaggcggctgccgagcgccatgccgattaccgcaaacagctttacgtctccccagccgatcccccctttcgtcaaaagcagcgtcaagaggggcagcataccgccggccatcgcaccgctcaaacttgagtgccactgttccagaggaacaaggaatcgtccgacggcaaagacaggcaggaaaaaacaaagaacagcatccggaatgatcatgtgtgtcacatcagatacaaagacgatcaaaagcagagatataagagcaagcacaatcaccagctccccctcatgcccaacgtgcatgccggcaaacgcaaacaggatggcggcggagagctcaactgccggatacacgatcgagagcggggtttgacatcctttgcacctcccccgctgcatcaaataggacaaaaccggtatcagctccgagaagcccagctgccttttgcagacgcggcagagggaacgcggagcaatcaatgatatcttttcaggaatgcggcgcccggccgaattaaaaaaagagccgagcactaaacctgccgtaaaaaggtaaaagatgaacatcgttatcaacctcgcagaatcaaatttcatgaaaaaagctgctgcctagcggctgttattttagcaaatatgaagcgcctccgcttttcctaaaacataaaaatgcgccgtcagccggtggccaaaagcgcatttttatgttttattcagttaaagctgccctgacggcggaaataaaataaagcgacccggtgataacgaccaccgctttttcctcttcagctttttcttcgatataccggaaaacagaggcgatgtcttcatcaaatgttttataatcagcggtactttgctcaaacagcttttgagcggattccgccctcgggaaatcaaaggatgtgaagtgaatcgatgacgcaaacgactcgattttgcggatcatgtctctgtacggcttatctttaagagcgctgaagcatacgtgaatattccgcccggcgaagtgggaggagatcgtctcggccagccgctccatcccttctttgttatgagcgccgtcgatataaacaagaggcttgttcaataccttctcaaaccggccgggccatcccgcgttacgaatgccgcgtttcagctctttttcgccgatcgccgcatgtttttcggctgtcagccattcggccgcaagtatggccaaagacgcgttttgccgctgatgggtgccgatcaggcttgtttcaattccttcataatgatgtaacggtgttttcaacgaaaactgctctccctcaggcaatgaaagctccccgtacagctggcaatcctcgtgaagggatataaaagcagattctgtctccatcgcctttcgctttatcacctcagccgcttcatgctgatgaacggctgtgataacaggaacgccgcgtttgatgatccctgccttttccgcggcaatctctttcaatgtaccgcctaatatcgccgtatggtcatggccgatcgaagtgatgaccgttaacatcggcttcacgacgtttgtcgaatccaaacggccgcctaagcccgtttcaaaaataacaaaatctgtccgcctgtatttagcaaaatataaaaatgcgcatgccgtaataatttcaaattctgtggcggctccgaattcggttttttcaagctcaaggacaagaggcccgacctcattaaagagcgccgtccattcttcatctgagatcggggcgccgtcaacgctgatccgttcgttaaaggtgatgatatacggtgatgtgaaggtgcctgctgtataaccggcttcatttaataccgaacggagaaaagcgatcgttgaaccttttccgtttgttccggcgacatgaaccgcattgagctttttctcggggtgcccgagctttctcagcagccattccattcgttccaaacccggcttcacgccgaatttaagccttccgttaatccagctgagtgcttcatcaaacgttttgaacaagcgcattccttcccttcaattgatgaaggtgttttccagcggctttagaaagacctggaaaacacctcctttttcgtgttatcagtttttcaattcggcgattcttttttctacagcttcacgcttcgccgtataatcggcttctttcgcccgctcttcttcaatgacatgtgcaggtgcttttttcataaatccttcattgcttaatttcttctgaacccgttcaacttccttcgtcagcttatcgagttctttttgaaggcggctgatttcttcgtcaatgttaatcagaccttcgagcggcaagatcagctcggcgccagatacgacagcggtcatcgctttatcgaccgcttgaatatccgttccgatctgaagaaggctcggattcgtaaagcgttctacgtacgaacggttttcttcaagtcgttcagcgatttccggcgtgctcgttttaatataaagttcaatctgcttgctgagcggcgtgttaacttcgctgcggatgttccgtacggcgcggatgacttcaacgagaagcttcatatccgccgcggcctcggtgtccgtatattctttgacggcctcaggccatttggcgactgtaatggattccccttcgtgaggaagatgctgccaaatctcttccgtcaggaacggcataaacggatgcaggaggcgcatcgtttgatccagcacatacgctaaaatggagcgggttgtcttcttcgccgcttcatcttcgccgtaaagcggaagtttagccatttcgatgtaccagtcacagaaatcatcccagataaaattgtagagatggcggccaacctcgccgaattcgtacttgtcggccagctgtgtcacggtttcaatcgtttcattcaaccttgttaaaatccacttatcggcaacggatttttcccctgacaggtcaagctcttcgtatgtcatgccgtccatgttcatcagagcgaaccttgatgcgttccaaatcttgttcgcaaaattccatgttgactctactttttcaaagctgaagcgtaaatcctgacccggagagcttcctgttgcaaggaagtagcgcagcgaatccgctccgtacttgtcgattacatccatcggatcgacgccgtttccgagcgatttgctcattttgcggccctggtcgtcgcggatgagcccgtggatcaagacatctttaaacggacgttctccggtaaattcgataccttggaagatcattctcgatacccagaagaaaataatatcgtagcctgtgacaaggacgttcgtcggatagtagcgcttgaaatcttcctcatcgatatcaggccagcccatcgttgaaaacggccaaagagcggaactgaaccatgtatcaagaacgtctttgtcctgctcccagttttctgcatcttccggcgcttcaacgccgacatagatttcaccggtttctttatggtaccatgccggaatccgatggccccaccagagctggcgggaaatgcaccagtcgcggatattttccatccagtgcagatacgttttttcaaaacggtcagggacgaagttgactttgccttcgcttttttgcaattcgatggcagcgtcggcaagcggctgcatttgcacgaaccactgtgttgacaaatacggctcaacgactgctccgcttcgttcgctgtggccgaccgaatgcgtatgttcttcaatcttgaacagcacgccctcttcctgaagatctttcacgatctgcttgcggcattcaaaacggtccatgcctttatattgaagggcattgtcattcatcgtgccgtcttcattcatgacgagaatgcgttcaaggttgtggcggtttccgatttcaaagtcgttcggatcatgggcaggcgtaattttgacggcgcctgaaccgaattccatatcgacatagtcgtctccgacaatcgggatttctctgcccgtgatcggcagaatgaccgtttttccgattaggtgtttgtaccgctcgtcttccggatgcaccgcaaccgctgtatcgccgagcattgtttccggacgggtcgtcgcaatttcaatcgagcctgaaccgtctttcagcggatatcgcatatgatagaacgcaccttgtacgtctttatagatgacttcgatgtctgacaaagccgttttggttgccggatcccagttaatgatatattctccgcggtaaatcagccctttttcataaagctttacaaatacttcgcgcaccgctttagaaagcccctcatcgagggtgaaccgctccctagaataatcgaggctgagaccgagctttgcccactggctgcgaataaaatcggcatattcctctttccaattccatgtttcttcaaggaatttttcgcgtccgagatcatagcgcgtttttccttcttcacgaagcttcgcttctacttttgcctgggttgcaataccggcgtggtccatacccggcagccagagcacgtcatagccctgcatccgtttcattcttgtcacgatatcctgcaaggtggaatcccaagcatgccccaagtgcagcttacccgtcacattcggcgggggaatgacaacggtgtacggttctttttcaggatcgtttttcgcttcgaaaaatttgccgttcacccaatagtcgtatctgtctttttcaactgcagacggatcgtattttgtcggcatcgtcagttcttgattatccattttcaaacctccaacagtattaaacggctgaacaataaaaaagagtcctcttgatcctgttaaaaggacgaagagaactctctcgcggtaccaccttttttcatgaatgcaaaaaaaacgcattcacgcacttaaatgggataacgggactttcccgaatttctctacttttttgttcgagaaattgcgctcctgggcgaccttccaaaaaagactgactgggagcctttcagcgaaccggcttccctctctgcaagcgtctgtttttgtactcttcccattcaaagcgggtgatcattgacttttcagcacgtactttttctttttcttatattactaaatctttttcattttcgtcaatcatcttttccgtttttctgttgttttatacgagattgggccatgcacacaagctccttttcctcatatgatgctgtaacgaaaaggagaggaggcataagatgcgaaaaaaattcaacacatattcattccagccgtggctgaagcaagtcaggcttgttgctgttcaagtcgtcctcccgattacgatattccagggcatccgcacgatcatctttcctaccacatttgatgtcctccttttgggcattctcatattccttgcgtgcgcctttcaccttgactggatttaagcacgaaaaaaagtccgcatcatgatgatggggactctgtttcttcctgcagttttctgttttcttccgtctcgtgaatgctcatcacaagcggctcagcgtttttcatttgccagtacgcctttaaaagccttgtgcaggcttctttttccccgagccccttctcatgttcgtagcggttcagtacgccgaatacaggccccgggtaagccatatagctgaggaataagccgatttcttcctcccgcaaaggatagacattgtgatacgtataaaaccagtttacacattccgtgcacataacggggttcgtcttaaacattctagtaaaaaatacgatgagatcatttgcaggcggcgcatgtcccgctttctcaaagttcgtaaagtaacccgttccggtatcgttatagagaaaatgccgaacggacaggtgcccgtggtttaagaccattctggcagactctttttctctcatggcttcatgccaatcttcaaggcgggcgagcgcaaagtcggcagctgatatcgtctctttgaaatacatggccgcctgaagctggaacggggacatataccattcgttttccgctttcatgatgaatgcttcatatttctgtttttgctgttcccatttccgttttgtccgttcatagtgtccgagtatttcttcccgcctcacgccgagctctttttccgtccgctggtgaagaagagcgatttctttaaacatatattcgtgtttttgatcccgctcttcctccctttcaagagtaagccagggcatgagatagcagacatcttctccggcttgcgttaaaaattcgcctgtgcggtttcgatagacaggaacgaactgcctgtagcctttttcctccagcatgatcatctgttccgtgaagcgggtgtttcttgaagccgccaattttttcagagcaaatacaccgtgatccgtatacactttccacacctttgaactgacggactccatatattcaggcgtaagaccgtactcatttaaaacagactggatgccttccatcggcttcaccacatttttatcaatgcattaggcatggctgttttgataatccggtatataaaggatctgtccctcttttaattcctcgtcaagggaaagggaattcatccggatgagctgctggacgttaatatcatagcgctcgcacagaagatcaatcgtatcattttgctgaacgatgcacatcctcattcgagtaaactcctcctctccctgctttgtaaacagctttgtcaaatagagtgcgttgtcgttttcctttgctgacacttcctgttcatccgctgcctgcatttcatctctttcttcttcgggctccgtctgctcatgaaacgaatattccgggatttcaatcgtatgcccggcttcctcttcttcatcaatcgcttctgcttcctgtgtcacctcaacctcaaaagcctcaggctccctgtcattctggtcttccttcagaagaggaggaacactgtagaacgggttctctttcagttcctcgtgaggttgataagagctgtgcgacagctccggctcttcttccgcttcttctcttttcagctcatattcttccggttcctcttccactttctctcttttcagcttatattcttccggttcctcttccactttctctcttttcagctcatattcttccggttcctcttccactttctctcttttcagctcatattcttccggttcctcttccactttctctcttttcagcttatattcttcttccggctgttcaagagaggcttctttttgattttctatttcgcgcttcgtacgctctgccgccgacaaagacgctgtaaaaaacggtttagcttcctctgtgtcgtttccgagaaacgactggtaaatcggaaccgtttcctcaccggtatcatgttcttccgcctgttcttcgtcctgctcttcgtaaggtctgtcaagctggatcaaatattctttctcttcaccctgatcttcgtcgtttgaaggtgatctgtaggcaggttcgagctcctcttccggatggacggccgcaggcatagtgcgcggttcttcttcacccgcttcaccgctcacattcaagaggccttcaatcgccaaatcagcctgaatcgtcagcatcctcgcatctgtcagctgataatcgaaagcgtcaataaaaacaaatacgtcgtttaaatgattgactttgtctttcgggatggtgatatccactgggaaacaatgcgtcagctctgcgctgccgtcccctttcagctttacatcttctacaaatcggcttgtcgcaggcagctctgcatactcccgggtttgatctatgttgtattcgcctgtcagctctaatgaccctcgtatggatacataatcatttacttcctgaacagtaatgtcaggatccaatgaaatcgataataattcggatacttcctgtcctttttgaaaacagattgactcttctacagaaaattgcaaacgattgttttgcggcaaactgatatcctcccttcacctaatttttaaaattagatgtcagtaaagatgtatgtgaaaagcaggcagaatatgaacagaaaaatcagcagccgttttcggcaccatgcaaaaaagagccgccggcaatgtccggcagcccttttctttatctggagcggctgattctttcgaatacgcgttcagcagctttaatcgtatgctcaatgtcgtcatccgtatgagcggttgacaagaacagcccttcaaactgtgaaggcggcagaaacacgccttcatcggccattcctttataatattcggcaaacagtccgaggtcagactgtttcgctgtatcataattgatgaccggtccatttgtgaagaaaaagccgatcatagaccccgccctgttgaatgtacacggaatgccatttttctctgcagcttcagaaattcctttttccaagcggtcagctttgcgggagaattcccggtaggattcaggggtcagctgtttcaacgtttcaagtccggctgtcatggcaagcgggttgccggacagcgtcccggcctgatagatcggaccgctcggcgcgatcttctccatgatttccgcctttcctccataagcgccgacaggaagaccgccgccgatcacttttccgaggcatgtcaaatcaggcgtcaccccgaaatagccttgggcacagttgtaatccaccctgaatcctgtcatcacttcatcaaatatcagcagggcgccatgcgtctcagtcagctcgcgaagcccttcgaggaaccctttaaccggcggtacgacgcccatattgccagcgacaggttcaacgatgacgcctgcaatgtcatctccgaattcttgaaagacaagtttcatgctttccagatcattgtaaggaacggtaatcgtgttttttgcaatgctttccggaactccggggctgtcagggaggccgagtgtcgctactcccgagcccgctttaatcagcagggaatcaccgtgtccatggtagcagccttcaaattttacgattttgttacggcctgtgtatccgcgcgccagccgcaaggcgctcatcgtcgcctccgtaccggagctcaccatccggacgatttctatggaaggaacgcggtcgatgacaagctcggcaagctcggtttccagttctgtcggcgcaccgaagcttgtcccgtgttctgccgccttttgaatctctttcaccactttttcattgctgtggcccaaaataagcggtccccatgacaggacataatcgatgtattcgtttccgtcaatatcatagatttttgatccttttccccgctccataaaaatcgggtccatgttgactgatttaaaggctctgaccgggctgttcaccccgcccggcatgactcgttgcgcctcttcgaatgccgctttagacttctcatagctccgcatcctctaaaacccccagttcaaattcttattccgaaatccattttgccgcgtcttttgcaaagtacgtaatgatcaaatcggcgccagcccgcttcatgcttgtcagcatttcgagaacaagagctttttcttcaatccatccgttttgggcggcggctttgaccatagcatactccccgctcacattgtatccgacaacaggcaggttaaattcgttcttcacttctctgacgatatcaagatatgaaagcgtcggcttgacgatcagaacatcggcgccttcttccacatcggattttgcctcccggagagcttccctgcggttggcataatccatttggtacgtcttgcggtcgccaaactgcggactgcttcccgcagcatcgcggaacggtccgtaaaaagcgctcgcatattttacagcgtacgacatgatcggcacatttgtaaatccttcctgatcaagcgcttccctgatagcggcaacgaaaccgtccatcatgtttgacggcgcaataatgtcagcacctgcacgggcttggctgacagcggtttttgccaaaagaacaagcgattcgtcatttaaaatttcaccgttttccaccaggccgcagtgaccgtggtccgtgtactcgcataggcacgtatcggcgataacgacaagttcaggaaagtcctgtttaatttgtgcaatcgctttttggacgatgccgtgatcgtgataggctccgcttcccacatcatctttgtgctcaggcacgccgaagacgatcacagattgaatgccgaggcttgcgacttcctccatctcctctttcaaacggtccaaagacagctggtacacgcccggcatagaaggaacttcgcttttgacgttctcttcctcggtaacaaatatcggataaatgaaatcagatgctcttaactcggtttcccttaccaatttccgcatacctgctgtcgtccgcaggcggcggtgtctttgaaatgatgcttccattagtcattctccctttcttgaaatgcggcacatttcgcgcagcattccgtcgattgtatagacgtccggcatatatgatggaattccgtagtccgacagcgccttctttgtcaaaggcccgatcgtaataaaagccgtccggttcttttcggcccacgctaagctctcctctttcagaatggacatgaatgtatgtaccgtcgaagaactggtaaacgtcacaaaatcaaaagacgcgtgctttgctgcttccttcaggtccagaattcccctttcatcacgcacggtttcatacaaaatccattccgaaacttgaattccgagaggagagatggttttcttgatgacgtcccgggataaattcccttttaaaacgaccactttgtcatgacgtccggcattttgcttaagtgcctccgccaaatgttcagccacgtataactccggcatcagatcgacagaaagacccctgtcgcgcaaataccgggctgttttttcaccgacagcagcaaccttcgcctttgatgcgggaggatcgcacaacccggcgtcctttaaataagaaaaaaagaattttgccccgttcacgcttgtaaaaacaagccagtccgcgctttcaagatccgcttgaaagcgctgggccgcctctggcggaagggcgggccgaaacgaaatcaatgacgttaaaacagcttccccgcccaaagcctccaccttttccctgaaagattgggcttgcgctttattgcgggtgacgagcactttctttccctctaaaggaagatcatgcttcatggtcttccagctcctgtttcacccggtcaatcagtgcctttgctcctttttccgacatgactgcggcgcattctctgccgacagcctccggatcttttccttttactgtttctctgtatacggtttttccgtcaggcgatgccacaagaccggtcagttcgatgacgccgtcttcgtccatctttgcaaatcctgcgatcggcacttggcagccgccttccatcgcatgaagaaaagcgcgctcagccgtgacggtcagctgtgtgtagcggtcgttcaggcgcgaaaagagagacagcagctcctcatcagagcctctgcactcgatcgccaaagcgccttgcccaacggcgggaaggcagctttccggatcaagaaattcagtgacgacatcgtccttccaccccattcttgacaggccggccgcagctaaaataatcgcgtcgtaatcttcggtttcaagttttttcagccttgtatcgatatttcccctgatccacttgatctcaaggtcggggcgcatttgcaaaagctgtgcgcttcttctgaggctgctcgttccgacaactgctccttgtttcaagtcagccagcttttgacggccttttgaaatgagaacatccctggcgtcttcccgttttggaatgcagccgaccatcagcccttcgggaagcaccgacggcatgtccttcatgctgtgaacggccatatcaatttccccggagagcatcgcctgttcgatttctttgacgaacagaccttttccgccgacctttgacagcgtaacatccaatatccggtcgccttttgtaacgatttcctttatttcaaacgtgaaatccggatttaattcctccagctttttgatcacccattttgtctgggtcatcgccaatttgcttcttcttgagcctacaatgatgtttctcatgttttcttcctcccaatccgtcacgggcaaccgttttaactaactaaaccaatgaaactgcgaaaagctgccgagcaaaaagaaattgattaaaagaacaagaaaagacgcggcattccacatggccgcgatccttccctgcagctctttgacaatcctgataaataaatagtatccgtataaaaaaagcagcacgatcgatccgagcactttcggatcggcccaatacagggtttcaagcgatacatacgaccagataatccccagaatcaggctcagcagaagcatgggaacgccgatgatattgaggacataagccatatgatcaagttttgacaaatcttcgattctcaagagccatttcccccacttcttctttttcaataagcgatactgaaaaagatacagcacggaaaagacaaaggacaatgaaaatgctccatacgaaagaatcgccattgtaatgtggatgatcaagagctcggacacgagcctgcccgaaagctccgccgactgctgagccgttggagtaaatgtgtggatcgccgccattgagaagccgatgagattggtgaaaaaaacgagaaattccactttcaaaagcttcgtcaaaacgagagacagcgtgacgagcacccacgcgtaaaaataaagcccctgcgcattattcaaaacaggaaactgatctgtgtactgcatgaaataaaaaaggtataccgtctggagaatccagacaatagaaagcaaccagaaggccgcttttcccgccttccggttgtgctgtaaaaagtctataaaataaaagagaacggtgaacgcgtacaacacgattgtaacttcgttaagccttgctaacaatgtgtctgtcatgtctgtcactcgctcgcgatagaagtcaaaccctgcggattttgccgcttaaacgcatgaaccggctgacgttcgtcttgtctctcaccgtcaggaaaagccgcttcttcaatatcaaaaatctgcgtgaacagtgcaagcttttcttcggcatcagcttctgacgcaaactccttcacttttaaaatcgggtcgcgcaaaagctggttgataatgcttttcgtatgcttgtttaaaagttttttctcccttgtactcaaatgagggagcttccgttcgatgctctgcatcgtttccgcctggatcgtcaaggctttttccctgagagccgagatgaccggcacgacgccgagcgtattcagccattgtttaaaagaaacgatctcagcttcaataatcagctccacctcttcggcaacggcctggcgttccttcaaattttcttcgacgatcccttcaagatcgtcaatatcgtacaggaagacgccttccacttcgctgagagccgggtcaagatcccgcggcacggcaatgtccaccataaaaagcggacagcctttgcgaagcttattgacatgttcgatcatctcttttgtgacgacatagccgctggcgccggtcgaactgatgagaatatcggcttccatcaaagcgcattgcagctcattcaagcttttcgccgcgcctgaaaaacggccggcaagctccttcgcttttgaaaatgttctgttgatcaccgtaacctgtccgattccgtggccgtgcaggttttgaaccgcaagctcacccattttgcccgccccgagaatcagcacgtgtttatcggaaaggtcgccgaagattttcctggcaagctcgacggcggcatagctgacggatacagcatttgaagcaatgtccgtttcggcatggcagcgctttgcgaccgtgaccgcctgcttaaacaaatagttgaaaacggtaccaattgtcttctcttcctgagccagcttaaaacttgtacgcacttggcccaaaatctgcgtttctccaataaccatcgaatccaatccgcacgatacgcggaacaggtgttcaacggccccgtcgttttcataaaacttcaagtaaggcgaaatgtcctctttgcttaatccgaaccagttcgccaaaaacattttcatataataacgtccggtgtgcagctgatcaacgactgcatacagctctgtccggttgcatgtcgacacgatgatgttctcaagtatgcttttttcttctttcaattgcgccatcgcctgccccagctcatccggctgaaaggttaacttttcacgtatatcaacagggggtgatttgtaatccaatcccacgacaagtatatgcataactcttgcttgcacccccaacatctatctaaattagaatgattataatatagaatttattatttaaaacgattataacatatattcactattttctcttcccaaaatgtgaacagattttaaaaaattgatgtgatatagtagaaaatgtgtttctatttctttcactacatcaagaaggtgatactttgaaaaagaaatctgttttgcttccattgctgttgatagccgttgctgtctacgcctttttgcggtcgggccggatcagcctgtttgacggccaggaagaatggtctgtacttgcaggtctcgtcggactggctcttttttatcagggacagaaggaagccgattccgcccattcctttgcagggctcttaatgacagcgatcggcgtttatttcacatttaaagaggactatttcagccgcgcggatgattttgcggtcatcgtgctgatcttcggtgcggcgctgcttgtcaaatcgtttaagacaaaagaatatcaatatgaaagtctgctgatgatcgcggtcgccctctatctttactttttccggcaaattgccgcctggctgaagtcggtgaatatcgagacggcatatgtagaagcttattggccggccgcttttatcgcggttagtctgctcttattattcttaaaaagaaaatagtttattcaagaaaaagcacttgcatcaatcccgcaagtgctttttcttttatctcgcgatcatttgctcgatcgccgaccatgcttcttgtttaccctttttcgtttcggaggaaaacaatatgagccggtcttctttttctatattaagcgtctctttgacgactttggcatgcttttcccatttgcctttagggattttatccgcttttgtcgcaatcacgatcacaggaatttcataatgctttaaaaagtcgtacatcatcacatcatcctgtgaaggagcatgcctgaggtcgacgatttgaacgaccgctttcagttcttcgcgggatgtcaaatacgtctctatcatacggccccaagcctcgcgctccgttttggagacttttgcaaatccgtagccgggcacatcgacaaagtgaaggacatcgttaatgatataaaagtttaatgtctgtgttttgcccggttttgaagatgtcctcgctaagtttttacggttgatcattgtattgatgaatgacgattttccgacattagatctccctgcaagggcgatttccggcagtcccccttcagggtactgctcgggtttcaccgcactgatgacaatctctgatttcgttactttcatttctcttctcctactagcgcatgctttagaacttcgtccaggtgagcgacgggaatgaaggtcaagccttcccgcacgctgtttggaatgtcctcaatgtctttttcattatctttcggcataatgacagtctttaagccggcacggtgtgcgccgagcgccttttccttcaagccgccgatcggaagaacgcggcctcttaacgtgatttcgccggtcatgccgacatttcgcgaaacaggtcggcccgtcagcgccgagacaagagccgtcgccattgtgatccccgcggatgggccgtccttcggaacggctccttccggcacgtgaatgtgaatatcgtgtttttcgtgaaaatcagggctgatgttcaactcttccgcctttgaacggacatagctgaatgcggcctgcgccgactctctcatgacatcgccgagctttccggtcaaaatgagcttgcctttcccgggggaaagagacacttcgatggacagcgtatcaccgccgaccgtcgtgtaggcaagacctgtgacaacgccgatctgatcgtcgagctcagcctgtccgtacctgaacattctttttcctaaatagtcttcaaggtttttgtctgtgaccgtaattctttttctttcccctgatacgatcagcttcgccgcttttctgcatatcgctgcgatttggcgttcaagatttctgacgccggcttccctcgtataatagcgaatgacgtccaggacagcctgctcccgtatttgcagattggattttttcaaaccgtgttctttcagctgttttggaagcagatggtctttgacgatttcgaccttttccacttccgtatagccggcgatcgtgatgatctccatgcggtctctgagcgggccggggattgtggccaggttgttcgcggttgcgataaacaaaacctttgataagtcaaatgtctcttcaatataatggtcgctgaacgtatggttttgttcaggatcgagcacttccagcatcgctgaagcgggatctcccctgaaatccgacgccattttgtcaatctcgtccaaaaggaatacgggattgttcttgcctgcttttttcatcccctgaatgatacggcccggcatggcgcctacatatgtgcggcggtgaccgcggatttcagattcatccctcacgccgccaagggaaatgcggacgaatttgcgtccgagcgatttggcgatcgatttcgccagagaggtttttccaacacccggagggccggccaagcataagatcggtccttttaacgagcgggtcagcttctggacagccaaatattcgagaacccgctccttcactttttcaaggccgtggtgttcttcatcgagaatttgactggcgagctttaaatccagcctgtcttctgttgcatcgttccatgggagagaaataagccattcgatataattgcggatgacagagctttcagctgagctggacggaattttttcgtaccggttcagctctttaagcgcggtttctttcacattgtcaggcattccggcctgctcgattttttcagtcagcttttggacctcacccgtttttccttctttatcgccaagttctttttggatggctttcatctgctcgcgcaggtaatactccttttgtgttctttccattgaacgcttgacgcgctgcccgatcttcttttcaatctcaaggacttctttttcattgtgaatcaggtcgattactttgttcaatctggctttgacatcgatcgtttccagcacttcctgcttgtctttcagcttgagcgggaggtgggaggcgacaatatcggccattcttcccggctcttcaatatctgtcacagcggcaaatgtttccgccgatatttttttcgaaatctttatgtattgatcgaagtggtcaagcaatgtgcgcatgagtgcttcatcttcaacatctttttcagtctcttcatcgattcgctcgatttttacagacgtatattcatctaagtcatggtactcaagaatgcgggcgcgctgcaacccctccaccaaaacgcggattgttccgttcggcagcttgagcatctgcttgattttcgtataggttccgaatgtaaaaatctcgtcttcatccggttcgtctatggatatgtccttttgcgttgccaaaaagatcatatggtcattcatcatcgcctgttcaagtgcctgaaccgacttttcacgcccgacgtcaaggtgcaaaaccatcgtcggatagacgagtaaacctcttaaagggaggagcgggatgtttcgtttcgtttcatctgccattttgactgacacctccgtaactttagtatgaaccattataatatactttttttattcctgtacaattgtaagcccggcgaaataaaaagggtctcctgtagtataccctttctttcagttctgaaaaaggaaaagatgtcctccgctaagaaaacatgccggctcccggcttcggagaaaccgccccgaaaaaaatccccatctgaaacgatggggatttaaacggattctcttttcatttgaacgccgtcgggcatttctgaaggagggttgaccaatacgaggtcgagtacttcctgcaaggttttgacgggaacgatatgtatgccttctatccgctttaaaatcgactgaacattttcgtgcggaataatgactgtttttgcccccgcatgcttggccgctttgattttcggaatcacgccgccgatcggctttacccggccgttcaggctgatttcacccgtcatggcgacagtatggtctatcggaatcttatgaatagcggagaatatgcccgccgccattgcaatccctgcagatggtccgtcaaccgggataccgccggggaaattcacgtgaatatcataatccgaagctttgactcccattgtccgcaatacagtcatgacgttttcgaccgatcctttcgccatgcttttccggcggatcgattttgactggttgccgatattctcttcttctgcaatgcctgtgatattaatcgatcctttatcagccgcctgattgactgtgacctcaatttcgagcagcgaaccgctgttaggcccgtggacggcaagtccgttgacgatgccgacctgcggtttagaggcgattttttgttcgtatttcggtgtcagctggctcgaatggatcacccattcgatatcttcaaccgtcacctcgtcgcgctcttcagtcaaagccattccggcggcgatttgcatcatattgacgacttcgcggccgtttctcgcataccgcgtcaacaggtcgagtccttcctctgcgactttcttttgaatcttatctgccgcttttttggcgaccgtttttaattcgtgcttttcaaggtcgcggaagaacacttccaaacatctcgaccgaatggcaggcgggatttcatcaggcatccttgtcgtcgcgccgatcagtctgaaatccgccggcagcccgttttgaaaaatgtcgtgaatatgcttggggatttgcgtgttttcttcactgtaataggcgctttccaaaaaaactttccgatcttcgagcaccttcagcattttattcatttgaatcggatgaagctctccgatttcatcgatgaataatactccaccgtgtgcatgcgtgacggctccctgctttggctggggaattccggcctgccccatcgctccggcgccctgataaatcggatcgtggaccgaaccgatcaacgggtcggcgattccccgctcgtcgaaacgggccgttgtcgcgtcaagctcgacaaaggcggaatgttcctggaacggtgagcgcttgttctttttcgcttcttcaaggacaagccttgcagctgccgtttttcccacacctggagggccgtaaataatgacatgctgcggattcggtccgcaaagggcggctttcagcgctttaatgccgtcctcctggccgacgatgtctttaaaagccgtcggcctcaccttttccgataaaggttctgataaatggattgatctcattttccggagctgttccatctcttttttggactctctgtctatcgtaaccttttgggttctttgatttttgagcaaattccaaaaatataatccgatgatgatcccgaaaaatagttgtacaaaaagtgcaatgctcgtccagctcaactgatggtccctcctgaaatggtttcgtatctttagtatgtcagatagtatttcctgatcagggagggaataaacgtacagaaagggattattttgcttttgaagccgtcactctgctccgggatgccgacggtttccggatgcaaaaaaagaacctcctttaggccaggaggttctctgcattatgctgaagtttttttgtctttattgacgaccgtgccgtctttcataatgagacgcggcggttcgccgtcagtgacggttttgcctgtgatcacgcatttttcaatatcctcgcgagacggcagatcaaacatcacgtcgagcatgattccttcgataatggaacgaagtccgcgtgctcctgttttacgttcaattgcttttttagcgatttctgtgagcgcttcgtcttcaaacacaagctccacatcatccaattcaagcatttttctatattgtttaacaagcgcgtttttcggttttgttaaaatttcaaccagcgctttttcatccagcggctcaaggcttgcgatgatcgggagacggccgatgaattcagggatcagcccgaagcgaagcaagtcttccggaagcactttggaaagaagcgcttctttttcaaggtcttcatgcttgttgtcagagccgaagccgatgaccttctggccgagacggcgcttgatgatctgctcgattccgtcaaaagctccgccgcaaatgaacaggatgttggttgtgtcaatttggatgaactcttgatgaggatgctttcttccgccttgtggaggaacgctggcaaccgtaccttcaagaattttaagcaatgcctgctgaacgccttcgcctgatacatcgcgtgtaatcgaagggttctcggactttctggccactttatcgatttcatcgatgtagataatgcctttttccgctttttcaacatcgtagtcagctgcctggatcagcttaagcaaaatgttctccacatcttcaccgacatagcctgcttcagtaagcgacgtggcatccgcaatggcgaacggcacattcaggatgcgggcaagcgtttgagcaagaagcgtttttccgcttccagtcggtccgatcatggaaatgttactttttgacagctcgacgtcgtcgactttgctgttcgaattgatccgcttgtaatgattgtagacggccacggcaagggatttttttgcctggtcctggccgatgacgtattcatcaagaatctcgcggatttcctttggcttcggaacatctttgaactccacttcttcttcagagccgagttcctcttctacaatttcagtgcaaagttcgatgcactcgtcacatatatatacgcctggtccggcgacaagcttgcgtacctgatcttgtgttttaccgcaaaacgagcatttcaattgtcctttttcctcgttgaatttaaacattctttcaccccttatatccttgtcattcctgtttcttcgttaaaagaaacatcgcttgaaaacattcgttccattatgtattgcattttaccacactttccaaaaaggcgataacgttgtgtttgccgtccggcatattcaatatgtatgttgatcaaaacgacattatctatcctttcccaaagaaaagatgataagtcaaaattgtataaaacaaggcacgaaacattcgcgccctgttttatataaagtatgattatgaaacatattaacggttttctacaagaaaatcaattgctttgcgaacttttaagtcctctttcattccgtctgtagaaccgattgcttgtttgatgttttcaacaggcatgttgtatgcttcagccattttagaaagctcttcttcgacttcttcgtcagtgacttgaaggttttccgctttggcgatcgcttccagtgtcaggttggatttcacgcgtttttcagcatcctctttcatttgctctttcagcgcgttttcatcctgtcctgagaattggaagtaaagctcaaggttcatgccctgcatttgcagacgctgttcgaattctttcatcatgcggtcaagctctgtgtcgatcatcgcttgaggaatgtcagcctcagcgttttcagctgctttcaagacaagctcttcgcgaagtttagcgtccgcttcgttttcctttgcttcttcgagacgttttttcgttttttcagtcagctcggcaagcgttccaacttcctcgtcgacatctttcgcaaactcgtcatcaagctcaggaagctccttcgctttgatttcgtgaattttcactttgaataccgcaggtttgcccgcaagctcttccgcgtggtattcctctgggaatgtcacttcaacgtctttttcagcaccggcttcaagtccgacaagctgatcttcaaagcccgggatgaaagagcctgaaccgacttcaagggaatagttttccgcttttccgccttcgaatgcttcgccgtctacgaatccttcgaagtcaagaacaacagtgtccccttcttcaactttgccgtcttcttttacaacgagttcagcctggcgctcttggagagacttaagttcgttttgaacgtcctcatccgttacggcagtatcgtctttttcaatgccaaggcctttgtattcgccaagtttcacttcaggcttaaccgttaccttcgcagtgaagatcaggttttcgcctttttcgattttttccacatcgatttccggacggtcaacaggctcaatgcctgcttcctctaccgctttcggatattcgacaggaagcaggatgtccagcgcatcctgataaagcgcctctacgccaaaacgctgttcaaacaaaccgcgcggcactttccctttgcggaatccaggaatggatacttgctttactacttttttaaatgcatcatcaagggctttattaaaggtatcggcatctacctcaaccgttaaaacgccttcgtttccttcttgcttttcccattttactgacatgtgtttccctccaaaatctattcaggttgtgtcggttttccattttaaaacaagcaaacggctacgtccatcgcaagctgcgactgtgtgcagctcatgtgtttctgacagccatcattatgtatacaaagataaataatgaatctttagcggcaaacggatcaacttccgtttttcacaaatgcaaccactatattataacacaatgcctgctgctttcaacatttacaaataagaaatttcttctatgtctttgatcagcgcgcaggcttcgtcaagctgtctgtcattgaattcatagagaatatgaagctcctctttatcgatgtcgatcccgtgcatctcatatccgactttatgcagtgcagcagcccagagctcgcggtttgagtatttcggctgaaacggatagaggacgtaaatatgccttctccacagctcttcgaccgcctggtacagcgtgggattttcattccccagcgtatcatcgagcacgctcagaacatgctttaatatcggcatgtcatcaggcttgaccgtctctgtcggattaattgtcatcgaatcgccaaattttgcgacaagcgtcggcttttcatggtctgactcggctaaaagctgaagaatcatcgtttttacgacaggatgtgcgctcggattttgcagaatcgttttcaacaagccgatatagcttgtcagattgcggtccttcagcccgtgaagaagcttaacctgctcttccgtgtcattcaaaagcctttcctgatcaacctcctccgtctcgggaaggtcttcggtgatgtcctcaggccccgggtcttccgtcatcttgcggctgaaatcaagcagtttataaaactgttccgcgctttcaggaggaagcttgttttcttcgagtacagcttcgatcgtttctttaactttttcgtattgtctgagctggattaaaatcgtcatatagacttgcaaaacggtaaaatagtggccgtggccttccttcagcattttttcgcagatgcctttcgcttcttcaagctcgccgatttcaagcaggcagatggccattcccagataaatatcagattcctcatcatcatagcgcttcgcttcagaaaacagcctgagcgcttcatggtaattcttttctttgagcgcacccatccctttgtgcactaaacgctcctttacgttcgggaacgggatgatcttcgagttcttcttgtcatgcttcatttctaagttcctttcaggcacttattttttaacaagtgtatcaacccggcccgctaaacacaagaaagaaccggcggcagtatgctgccgccagcaaaaaaagcctccgatctacatcggacagcttttttatgcttgcagccaagaacttctctgtttctcaaattgttcgatttcttcttcaaggagcaatgttaaagaaatttcgtcgtaaccgttcagcagcatctctttccaatgcggatcgacctcaaaggcaatctgctgcccggcatgatctgttatcgtctgtttttcgagatcgaccgtcatcgtcaaagattgatactcatactgttcagcaagctctttccacgcctcataaggaaggcggatcggcagcatgccgtttttaaaacagttttggtgaaagatatcggcaaaagacggcgcgataatgattttaaatccgtagtcgtcaagcgcccatggcgcgtgttcccttgaagagccgcagccgaagttttcgccagcgattaaaatcgaagcgcctttgtattccggccggttcagttcaaaatcaggattgggatcgccgttatccagatagcgccagtcaaagaaagcaaaacggccgtatcccgttctttcgatcctttttaaaaattgcttcggaatgatctggtccgtgtctacgttgattctgtttagcaccgccgctattccgttatgggtctttaatggctccatcttgtcactcctctatacagctgttgtctcttggtaatattttctgacatcgacaaagcggccgtgaatcgcggccatcgcagccatcgccgggctgacgagatgcgttctggctcctttgccctgcctgccttcaaaattgcggttggaagtcgaagcgcagcgctctccttcagggacaacatcattgttcatgctcaaacacatgctgcatcccgattctctccattcaaagcccgcttcgatgaaaatcttgtgaagcccttctttttccgcttggattttgacgctttgcgagccgggtacgacgatcgctctgacgccgtcggcgactttttgacctttaatcatttcggccgcctggcgaagatctgtcatacgcgagttggtgcatgaaccgataaagacatgctcaattgtaatgtcctcgatttttttatatggttcaagacccatatattcatatgcgcgctgcgcttcttttttatcgtcttcctgcaagaaagcctcaggccccggaatcgtttcatcaaccggcagcaccatgccagggttgatgccccacgtcaccatcggagaaatggcgcttccgtccatcacgatcgtccggtcgtagaccgcccccggatcggttttcaggttcttccattcttctacagctttctcaaaatcctcgccttttggcgcatatttttttgttttgacatattcaaacgtcgtctcatccggtgcaatcaatccagctcttgccccagcttcgattgacatgttgcaaaccgtcatccgttcgtccatcgacatgtttcggaacacttcgccggtatattcaatgacatagcccgcaccgaatttaaccccgtattttccgatgatcgccagaatgacgtctttagccgtcactcctttttgcagtttgccgtcaacgcggatttccagcgtcttcggtttttgctgccaaagcgtctgcgttgacaagacgtgttcgacttcgctcgttccgattccgaaagcgagcgcgccaaacgctccgtgtgtggatgtatggctgtctccgcaaacgatcgttttgcccgggagcgtcaatcccagttcaggcccgatgacatggacgatcccctggtctacgcttgacaagtctgcaaggcggatgccgaattcttcgcaattccgttcgagcgcactgacctgccgtttagcgacatcatctttaatctcaaaccgattgacagtcggaatgttgtggtccatcgtggcaaacgtattttgaggccgtctgacttttctgttcttttgcctcaggccttcaaaggcctgaggcgacgttacctcatgtatcagatgcagatcgatatagagaaggtcaggcttcccttcaccttttttaatcacgtgttgatcccaaattttttcgatgatcgttcgaggcatcatctttcttcctccctctaccaatatccattttccttaaacgtaagcggtcatgatgtttgaaatggcattgtcgtctgccagcgcggcttttacttcccctgtaatcgattgagttgtgcaatgttccgagccttttgccaggtctttcgtccgttttcctgcccggagaacttgatcgactgcatgttcaacagcttgcgcttcagcttcaagaccgaatgacgtcctgagcatcatagccgcggacaagatcgccgcaagcggattggcaatgttctgtcccgcgatatcaggagccgagccgtgcacaggttcgtataaatgaagtccagagcttgataagctggccgacggcagcatgccgagcgatccggtcagcatcgatgcttcatcgcttaaaatatcgccgaacatgttttctgtcacgataatatcaaactgtccaggcgcatagatgagctgcatggctgcattgtcgacgagcatgtgctcaagcttgacgtcaggaaactctttcgccacttcttccgccgtcttgcgccatagtttgcttgactcaagaacgttggctttatcaacggaggtcactttgccttttcgactctgcgccatttggaaggcttccctgatgaccctttccatttccgactttttataaaacagcgtgtcaaccgcttcttcctcgccgttctgattgacgtactgctcgctcggctttccaaaatacaagccgcccgtcagctcgcgaacgatgacaaagtcaacaccttcgatatattcggtttttaacggagaagctcccgcaaggctttcaaatactttaacaggccgcagattggcaaaaagatcgagctgcttgcggatggcgagcagccctttttcaggccgcagctcagaaggattttgatcccatttcggcccgcctacagctccgagcaaaatggcgtccgcagctttgcaggcggcgacagtttcctcaggaagcggcgctcctgcctcatcaattgccgccccgccgatcaggccgtattcaaattcgaattcatgctgataatgttcagcaacgcttttcagcacatcaacagccgcgtccaatacttcgggaccaattccgtcaccgggcaaaagtgcgattcgttttttcaaattcaacaaactccttccttcttactgttatgatcctacagccgcctgttttgacaatccttccgtattcgtcttcaatacgagatagcggttcacagcattcaagtaggctttggcagatgcttcgagaacatcctgggcaaccccgcgtcctcccgattcttttccatcgatcatcaccctgacgtatacttgcgcgaatgcatcctgtcccttgcggttggattgaatccggtaatcaaggagctggacttctttatccatacagcgcttcagcgtgttgtacaccgcttcaacgcttcccgctccggtcgccgcttcctggatgacctgatccgtttcctgatctttaagggagactgttgctgtcggaacctgggaggtgccgtaatgaacctgcagtgaaataaaatcatagccgattttgcggtctgccgttttctcttcgagtatcagcgagatgagatcttcatccgtaaattcctttttctttccggtaagctctttaaaaatgttgaagaatttattgatttcttcttctccaagctggaatccgaggttttgcagcttatctttaaatgcgtggcgccctgaatgctttccgagcacaagcgcatccgttttcacgccgacaagttccggagaaataatttcatatgttgttttttcttttaagaagccgtcctggtgaatgcctgattcgtgggcaaaggcattatcgccgacaaccgctttgttccgcggcacggccatgccggtcagcttgctcactaaatcacttgtccgtttaatctcattcagctgaatcgttgattccgcctggtagaaatcttttcggatatggagggcgacggcgatttcttcaagcgaggcgttccccgctctttcgcctatgccgttgatgaccgattcgacttgatccgctccgttttcaatcgcagccaaagagttggcgacagccatgcccaagtcatcgtggcaatgggctgaaagctggactttgtcggcattgcgggcattttctttaatatggcggaagatatttccatactcggcaggcgctaaataaccgaccgtatccggcagattgacgacatccgctcccgcggcgatcacttcgcttacaatctcggctaaaaacggaagatcagtccggcacgcatcttcggcagaccactggacgatcgggaagcgttctttggcgtatttcaccattgcgaccgcctgttccagaacctgttcgcgcgtttttttcagcttatattttaagtggatgtcagaagtggcgataaaaatgtgaagccttggttcagctccgtctttgagcgcttcccacgccgagtcgatatctcctttgacagagcgggcaagccctgttaccgaacagtttttaatcgtccttgcgatttcttttactgcattgaaatccccgggggatgaagcgggaaagcccgcttccataatgttgaccccgagtttttcaagctgctgggcgatcgccagcttctcctgcgtgtttaaattaacgcccggcgactgttcaccgtcacggagtgtcgtatcaaaaaagttaatttttcgcaccggctaccaccgcttcctttttcttgccctgcttgacaaacggcatcatttcgcgaagctttctgccgaccacttcgatttggtgttcgttttcgcttgcattgatggcgttgaaacgcggacggttgacttggttttcgacgatccactcttttgcgaatgtaccgttttggatgtctttcaatacttctttcattgattcttttaccttctcatcgacaacgcgcggacctgatacgaagtctccccactgcgctgtgtcggaaatcgaatatctcatccctgccaaaccttcttcatacatcaagtcgacgatgagcttcagctcgtgcagacactcgaagtatgcgagttcaggctgatagcccgcttctgtcagcgtttcgaacccggctttgacaagggaagtcaatcctccgcacagcaccgcctgttctccgaaaagatcggtttcagtttcttctttaaatgttgtttcaagaacaccggctcttgcgccgccgatcgctttagcataagcaagggctttgtctttcgcttcccctgtcacatcctgatagatcgcaaacagcgccggaacccccgcaccttgttcaaacgttcttctgacaagatgtcccggtcctttaggagcgacaaggaatacgtcaacatccgccggaggcacgatctgatggaaatgaacgttgaatccgtgggcgaatacaagtgaattgccagcttgaagtccgtctttaatttccgcttcatacactttttgctgctgttcatccggaagaagcaccatgacgatgtcggcctgttctgccgcttctcttaccgtgaaaacttgatggccgtcttcctctgcttttgcaaaggatttcccttttctgacgccgacaatgacgtccactccgctttctttcaggttcagtgcgtgcgcatggccttgtgagccgtatccgatcaccgctacttttttgcctgctaatacgttttctttgatatcaccgttataatatacttttaccatttcaatctctccctttttatgatttatacaatagatattgttttaatagaggccggcttttgctgagttcccctcgcaaaggccgtggtgcctgttctggctacctctttaatcccgtatggtttcaatagttcgatcagggcttcgatcttgctcgattcccctgtcacttgaatcacgacgctgtcttttgcgacatcgacgacagacgcccgaaacggttcgatgacgccgtttatttccgtcctgctcgacggaggggaaaccaccctgattaacgccagctctctttggacgatcgattgattcgtaatgtccgtgactttcagtacatcaatctgcttgtttaattgttttgtcagctgttccgtttctttttcatctgccacatgaacaacaaacgtgattctggaaattcccgcggtttcggtgtggccgaccgtaatgctttcaatgttgtaatgccgttttgtaaacaaccctgtgattctgtttaagacgccgctttggttcaaaaccgtcagcgtgatgattcttttcaaggtttcacccccaccatttcgtgcagcccttttccaggcgcaaccattggaaatactttttcagcttgtgcaacttgaacatcaatgaccatcggttcattcgacgttagcgccgcttccagcttttcttccgcttcttcttcggatgtgattcggacgcctttgatgccgtaagcttcagacagcttgatgaaatcaggctgtgatgtgaacttggagtgcgaatagcgctcatcgtaaaagatttcctgccattgccggaccattccgaggcagcggttgtttaagaccacgaccttgatcggaaggttcagatcgtgaataacagacagctcctgcagcgtcatctggaatcctccgtcgccgagtatcgatacaaccgtcgcatccttatccgcaagctgtgctccgattgccgccggaagtccgaagcccattgtgccgagcccgccggaagtgacccatctgtcggctttttggaactgataaaattgcgcggcccacatttggtgctgtccgacgtctgttgttacaatagcttcgccctttgtatagcggtggatatattcgatcagcttctgcggtttgaatccttctgtttcattttcttcataccagagcggatattcggttttccatgccgcaagctgctttttccactcatcagaagcgctcggcttgccgttttgcttgatcagctccgtcagtacaagcttgctgtcgccgacaaccggaatgtgcgtatgaacgtttttgccgatttcagccggatcgatgtcaatgtgagcgactttcgcatattttgcaaaatgcttcaagttccctgtgacccggtcatcaaacctggcaccgatgctgattaacagatcgctttcatacagagccatgttggccgcatacgttccgtgcattccggccatcccgaggaaaagcggatgatcggccggaaatcctcccaagcctaacagcgtatgtgccaccggaatctgctgctgttcgacataattttttaattcttctgacgctttcccgtgcaagacgcccgcacccgctaaaataaccggctttttcgctgcactgaccgcttccacaagctttctgatctgcagataattcggttccttcgtcggctgatagcccggaaggtgaatgtcgtggtcatagcggaattctccttctacaacggcgatgtctttaggaatatcgattaaaacggggcccggtcttcctgttgttgcgatatggaatgcttctttaataattctcggcaaatcttcggcattgcgtacctggtagctgtgctttgtaatcggcatcgtaattccgatgacgtccgcttcttggaatgcgtcagatccgataaccgatgtcgcaacctgaccggtgaatacgacgagaggcaatgaatcgatcatcgcgtcggccagacccgttacaaggttggtcgctcccggtccggatgtagcgatgacgacacccggtttcccggaaatccttgcatatccttcggctgcgtggatggcgccttgttcatggcgcgtcagcacatgaaacattcccgatccgtagagtttgtcataaatcggcaggaccgcaccgcccggatacccgtagatcacttcaacattttcctgttttaaagcctcgatcagcattgacgcccctgccattgtttgtgtacattgggcattttcagcatccaactgtacattcgtccccattttcttcctccttatcaagtgatcatcatcactgttcattcacaattgtttttcaaaaaataatcaatatatatgtgccgcaaagcatgtatccaatctgcttttgcagctaaaaaaagccttcccgcccactgttgacgctgcacaccttgcaggccaaaggggcgaaaaggcttttctttccgcggtaccacccttgttcgcggcttttgaaagccgccttatggataatcgcttatccggtttaataacgagtgaaccttcgtaatgttcacccggccagccctactaaacatggaaatcgttcagactgacactcagaggggagttcacaagcggaggccgtcaccggttcccagcaatcccggctctctgcaggcggcgtttccgctgctacttatcctcttcaacgtttatctttattcagctgacacttaagctttgatctttgaggctgacttttaacccttcacggacgacgcgctcgcggaacttttcaagcatccggtttgtgtggactcccggtttgccgtccccgatcttgcggccgtcaacttttacgaccgcgatgacttctgcagccgttccggttaaaaacacttcctcggctgtgtatacgtcatggcgggtaaacggctcttctttcacttcatagccgagctctcgcgctatttcgatgatggcattccgggtgattccttcaagcgctccgatatagcccggaggcgtcaagagctttccgtttttataaataaatacgttatccgcagacccttcggcgacatagccttgatcattgagcatgagcgcttccgtcacacccgccatatgcgcctcgatccggacaagaatattgtttaagtagttcagcgattttactttagggctcagcacatcgggtctgttccttcttgtcggaaccgtaacaatgtcaatccccgtttcatataaatgtttcgggaatattgccaatggttcgacaattatgatgacactcgggtttgaacaattgtttggatcgagtccgaggtcacctgctcctcttgaaacgaccaagcggatgtaagcgtctttcagcccgtttttttcgactgttttgagtacgtgctgtgtcagttcttcctgtggatatggaatctccagcatgatcgatctcgcagaatcgtagaggcggtccatgtgctcttgcattctgaagatgttgccgtcgtataccctgatcccttcaaacacgccgtccccgtataaaaatccgtgatcatagactgatattttagcgtcttcttttttaacgagtttgtcgtttaggaagatccactggtctttctggtcccccatccctctagcacacctttctgttgtaaatgaacgctttaaacgattaaaaattcatgatgcgggaacccgttttcccgctgtcattcccgggaaagatgaaaagttttcaagtgatttgttcttttgtttgaactcatattacgcccctttacatgcagtgtcaaccgtattttttaaaattattagacaattttgattaatcaatctacttgtatacgcttacatgattgatataaaaggaaatgtaaaattgaaaaacaatttaaaattttttatgtaatctataaagattacataaaaaaactggcgttttatacagttttgttagattttatcccgacaattttttataatttcatccccgccggttagattttttgccacatatatgtacagactccattttacgattttttacataaactggtgttaatcaaaaagaaacaggtgaatatgatgtaccgcacatttcctgcgcactctgttccccgcgtgcgccaatacccgggatacttcggctacccggttacttatgtctataatccttcagcacacgggccatatacctattatccgtacggcggggtgttcaccactccgacgctcggattcggcatcggctacccgggaatttccgttccggctgtacacgcctttaccggtggattcagagacaatgaataaagcacaaaaaaagagagggcatcatgctctctctttttaccgttaaacgactccctgagcgatcatcgcatccgccactttgataaatccggctatattgcagccgtcgagcagatttccgggccgtccgtattctgaagccgcttcaacgcttctcttgtaaatatcagccatgatcgctctgagcttcgcatccgtttcttccgccgtccagtgaagccgtgcgctgttctgcgccatttcgagcgctgaaacggctacaccgccggcatttgcagccttagccggtccgaatagaactcccgcatccaaaaagcgtttgacggcgccctcttcagacggcatatttgctccttctccgacagctttgaccccatttgaaatgagcacttcggccgcctcttcgtcaatttcgttctgggtcgcgcacggaagcgcgatatcgcatggaatagaccaaatgccggtacatccctcgaaatagtgtgcttccggatgctcgctgacatactcgcgaatccttccgttcccgtcatctttgagccgcttcaccgtctcaagacagatgcctttttcgtcatagacatagccgtcagaatcgctgcaggccaccactttcgcaccgaattgagcggctttttccatcgcgtacagcgccacattccctgaaccggagacgacaacggtgctgttttcaaagcgcagcccctgatccttcagcatttcttccacgaaataaaccagaccgtaccctgtcgcttctttcctcgttaaactgcccccgtattcaaggcctttgcctgttaacacgcctgcatcatagcggccccgaatctttttatactgtccgaacataaacccgacttcccttgctccgacaccaatatcgccggcagggatatccgtgtccggtccgatatgtctgtacagttcattcatgaagctctgcgtaaaactcataatctccctgtccgatttgcccttcggatcaaaatcagccccgccttttccgcctccgatcggcagtccggtcaaagaatttttaaaaatctgctcaaaacccaaaaatttaataatgctcgcgttcacagaagggtgaaagcggatgccgcctttatacggaccgattgcactgttaaattgaacccggaaccctcggttaacccggatattgccttcatcatcgacccacggcaccctgaaggtgatcatccgttccggctctgcgatcctctcaagaatgcggtgttcgatatactttggatgccttgccaatacagggacaagggaatcaaatatttcctttacagcttgaagaaattcgctttcgtaaaaatttcgcttctgtactgtctcgtatgcttgtgtcacataatctctcgccgtctggaaatttgtttgctccattttttctagcgtatgcaccttttttcagctccctttctaaaataaaagcagaacgaacattgtaagattttctctcatggtaaattttacaaccaatgccccatttacatcaatctggaaaacagataaaaccattgctgaattgagatgtataacaaaaagcgagaatagacgggtcataagatagaaggacagctcttaaaagctgaggagaaaaggaccaataaaccataaaataccactttatctgacaggttctttctgtacaaaatgtctattttctttgtgatcggcgcatttccccccttgtactcccggcagagaatgagcatcttatcccgtttttaaaatgaaacctactgcatacaaaacgaaatcacatagctcccctttttcatggcaacaataaaactaaaacaggggtgatctgatggacgacaaaaaagaaatgtcgaacgttgaaacgcaaagaaactttttaacagctgaagaatttcctgaaggtgcgtatggagctgcacagggcaaagacgagcccgttgagaacaaaagcacgccatggaaggaaggccagcaatactacagcaatttcgcatacgaattccgcaatcttcatcaaggaacgccgcgtcaatatcccggagcgcatccaacccatgacgaagaggatcaaaacgaggaatgaccgatataaaaaagagccgtgctaaacggctctttacagctttttattgtagaggctgttgaaaattttgattttgctgctggttttgttgattttgctgaccctgttgtccttgttgcccttgctggttaaatgactgctgcgcctgctgaagcgcctggctcatttggttcatggcctggtttgtctggatcccttgaagagcctgattcagctgctggacagcctgctgaatgctttgctgaatttgctgatccgtctgctgcatttgctgctgagattgggagctgaactgctgaatttgctgtttcagctgattgattccctggctcaattgagagctctgctggccgctttggccctgctgctgtgaccccatttgattaacagtttgctccagctgggcaagctgctgctggatgtttccgaattcctgagcaagttcggtatctgtgatgttggccccgagcagctgctcatgcttttgtttttgttgcttctgcttttgctgctgattttgctgttgttttgtcattacaacatcctccttaaaattgatcacaccctttagctttttcattttgtttgaaatgatgaaagggaatttttaggatgttgttgttttgcaacaccaaaagcctcaaacccttgtatgccaagaagtttgaggcttttttcagtgacgtcccaggggagattcgaactccagaccgatggcttagaaggccgatgacccttatggacagcatgtgacaccacttaaccgaaagcccatgatatcaaggttctttgctcttttttgttttctggaggaacgaaaaatacctgattgggagcgaatccgctccccgctcgctcccaattttccaattaattcgtaagtttaaaaagtggacattcgttcccctgttgccaaaagcaaaatccaggttttacatcatctccgttaatatcaaaggtgtactctacatcaaaaccaaaaaccgagaatatttggtcttataggcatggatgcactgctgcaggatcgttgaatactctgcggtgcttttcaattccttcaaactataaggcggctcgatgatgtcatttcctttatagtcgaattgatcttcgtaaatctgtttggtcgtttcacttggggcatttgccttgaacacggtggctttcacagattgttgagccatgctttacctcctctctctatttggccgctgccggattttcggtttctccttcagatcggtgacctcgtaatcatcgagggcataccagatggccgaaagagtgtggggatcgatcttgaattcatcttcaatgatgctacccagcttgtcctttttataggtcagcggcttgagttcaaaaatggtgttcctgcattggccggaacaaatgatctttttaaaccgcttgatctttttcgtatactgcaggcgcgaaccctggtacttatgagctcccaccatattgaaaccctgctgccggaaatactgaatcgttttaggctccgctgaatcagctttgatcaactcctgggttttcttgaattcttggagctcctctgctgtccggtcatccgtcattcctcttttgtaatattcccaatagatatagaggtactttttcttatgatctaccgcaagccggacaacggcgttataggattcctcaaaaccaaagtccatgcctacccgcttgatgggacggtcaatgttcgagatggcctgcataacttcatcatgtggccactcttcaaactgaggaaaaacccgaaccccattcacgccaaaatgacctttcctggcgatgcggtaaaggtctggatcgtattctttcagttcatccagctgccttacatagctttctggcagaaacaaattatcttccgccgtggaatgatgatagtatgtgtcatttaagacgatcgttcgcttttcgtacagctccttatcatctaggacaaatcgattgttcagatcgtctttaaagaaatgcttgtatgtccagttgtcttccccgaccgggttcgtggaaaaaatcatatgaagcggcagtgtaggatgccgcagacggccgagaagctctttaaagccttcatatttgacctctgaacattcctcaatccatattattgagatgttgttgatcgatttcagtttggccggtttgtccagccccttgaagatgatccggctgccatttgggaacctgacttgcatcggagatgtcatacacctcacaatatgatcaatctctaagtcattgatgatcccttcaaaatgagagaatgtagaatcccgatgagtgtcgtacacttcacgaatgactaagactgtccgtttttcttcaagaagcttcaaaatgagcttgagagcaatgtgatagcttttggatgatccgtaaccgccaacgagcagctgaaatttttggttccagtcaaagagaaaatcttcaaaatgcggattgacttcttttaccgtcatttgccgtcacccttacgagtaattgtgatattcacagaattgtccacagggcgggcggtaaggcgttcaagctctgcctgtttcgtctcgtttgaaagatagatgccgcggagcttcaattcttgctcatccattaagcggatcatatcgtatttctggcgaatggctttcaaccgtttatccgttacacgagtgagcgcctcctcgatattcaaaatatcatcaatagcccgcatctcggtttcttcaatttcagtcacaacaagacgctcattcataaccggaacaggtttgactagtccattcttatccggggtttgaacgatgtccttgaccttgcgcatttgttgcagcacgcggcgctgtttttcagataggccgttttctatccgactgatccgctgcatcattctccgctcccgaaggctcaattccctgatcgttaagtcaatttgaaagagtgggtccgtttagatttctccgaacagctgtctctcatcctcgtttaaaaaatcccacatgatcgtttcatattcgccggtacgggcggaatttttatttccttttggtgcggcattccctttcgcattttcgtttccaggcggtgcattcccgcccttgtttcctttggcgtttttattgcctattggagcgctgggacgaaaaggagcgctcccattcgatttaggagcgctccctttgattttatcttcccatttatctattgctttccacttgcggacggtactgcttgagacgcccaattcatccgcgatgtcttttaatttcttggttccgctgctttctttccataaacggaacgcttcgtcacgtcttggatcacgcggtctggccattacatttcacccacctccgcaacctgaattgagtttgagtttgtttttaaatttcttcatctttctgaagctgtatatcgagctcgatgagcttttttaaatcttcaacagtgttcaccttaatatgaccgctttgaaaatctttgacccattgggtgatacctgcctgaataatttttcgatatttctctttagattgactgatgttttcaagcaattcagcgctatgcaggagaagcagtttctctttttctttatcatcgcaggaacgtatgtttgtattttctgttgccatctgcctggtcctccaatagaatagagatgagagcgtgattttcccacgaaacgcggccgcgtcttcatcacgctcttaccagggtgatggccttgggtaagggagggtgttgtcagcaccctctttataaaaataagccctaactagggcttggtgaatttgttattttaatatgaggtaattcataaatattaaatagtattaaatctaatgtttctagatataacaataaatctctccgtttcggtcgaaatatttcatgtactgtctgatttcctacatctttaatttccaagagtatccttcgttgttcctcatcaattatattcttttctttaagttcatttatcttttgaaccaaatttaaattgaccattaccgggtttttatgaccatctaacactggttctcccttcttaatcttcggtcttttatcaattccatttaccatacatattgattcaataagcattctaattcccgtattgcataataaattcatacgttggcgataagcattaattgtttcatttctaattccatttattaagttaggtaagtgatcgaattcatatttttctttgaattgtaataactgttctaccggatcctccttttttggctcttctggaaagacagtgtattcgacaaagtattctctatcagtatgataatttgaaccgactatatgaaacatatcttcatcgccgtatatttttagaaaagcaatagcgtcacaacctctacattgaactattgcataatcctcattaaattgaaaatcaatttcttcatcataatctaaattacttattgaatactttagttcattgtcatgctcatttttaactatctgatggtttgtttttctcttacaagctctacagtacaatttctccggcacaacggtcatatattccaccctttttagaaaaataataacatttttctaaatgtagtgagaattattaaaaccactgattgtaaatctgttccgatatttttttcatcatgaccggaggaacactcatcccacaaacatattgaacagatgcgtccataaaatcataatcgagtgggaaagattgcattaaaatgatatcccgttcagagatatagtagggctcatcataacggacaaataccgaaccactcccgagagtaggcgggacaaggctatttttcactaatatcgtattgaaattagattctttcccttcaatccttttcgtgatgtctcccattattatccgacggccgtcgcttcacccatcttttataaagctttgatgtttctttaagccttgcaccatggccgcttctgaattctttatatacaatcggtggctcattgaaggacaatttaagcggtagtaaattcaagtccttccttcggcaaataaaaaagacccgctctctacgttgcggggctcccattgtggcagcattcaacaagaacagttgaacatcatatccaatttccttggtccgttcaatcaccagcttcacataaccttttgcatttccgctgaccattcctttgacattctcggccacaaagatttttggccgcagcctttcaacagcatcaaggtaatgaaaaaatagatcatcaagtgactgttttgcctgtcctttacgaaaggctttttcttttccccaagccttttcccgatcccccgcaatagaaaacacgctgcagggcggggaaccatcaaaaatatctaaatcgaacaattcatcaggcagattttccattttgttaaagtctctgatgtccataagaaaaggatatatcggattatgattcttcctgtaaatcttcatcatttgcggatcgatctcacagttccccaaaagatcgtaaccggcgagcttatagcccatagaggaacccccgccccaagagaatgtactgaatactttaaggccatttttcttgatgttttttaaatcgcccaacttccaacggtactctttcttttccatgtaatcatctattcattaaatgaaaatccgcatttggggcaggtatgttggaaatgatcatcttcataatcatccaggtctaattcctggctgtcattgatttttccttcgttgccttcatgctcagccagctctcccaagatttcatctatttcactttctgagaagcctgtaagggatagatcaaaattattgtgctgcaggtcttccaaaacctgttcaagtttgtaatcatcccagtcaccgctgatcttatttaaagccaggttgagcgctttttcctcagcctcatcaaaatttacaactgaaaccaggagagtctttggattttcttccatgaggacgcaaagattataggaagccatataaaaatgacttcctgtgcaaacgggatctcaccgcttgcgttccccgcgactatcgcgcgcaatcctgcatagactccagccgctcctcctttgaagctgacgatcttcatcatcattcgatacatccgagttcacccttgataagggaaaggtgcgtctcccattctggccaataaaaaagcggccaccaatcagctgcacaacatccgtgtgcaaaagatcagtgtccgcaggctctccgtcttggactcgatattcacgttcgtttttcttgtctctatcgtatgacaaaatggaatagaaaaagtcccccattttatccccctttttgtcggatttttctcggctttgaacataaaaaaagcactcaatcagagattaagcgctaaaacaagtaattgtcagttctgtagttccgttttatctttaaacatatgaaacggatcctataaatttaaaagtatacccatcgttaacaatttcatttcttttcccttcataatcaaagttatatagtaaaatagcagagtttatattgttcggaagttttttaccctgaatagcttcaaaacgaggtaaaatgatttcatcatatgaacagccacctattaattcgtgcaacagttctttattctgatcatgaactaccttttcgataaagtcttcatctaaatcatcaatatctatgttaaagtcttttaaaaacgcagaagggaggaagtcaccttcttcttcatcatacggtaattcaacgtattcatttaatttatcatcagtttgaatactaccaatccataatgagacataattttctcgttccattttaaatcctcctatttttttatccttagcccctcaggtaaagcttcaactccaccttttagtctgtaattggcccaattgtttaaccttcgtacaaacatattataatctttggatgaatctataatctttattagctcgttgtgagcagcagtagagcctagtccaccgtgctttccagtcgggttaacaaattccacttcatttattgccgttcgtagctctctaatttgttcagccgttactccccagtgtttaaaagttggggctcgtgaaaccagatgccactcatgcattcctcccggagctcggagctgcctttctatggctcttctaatttttttgtcactccagagttcatctaattgtttagttgataatgaattaaaccatttattgaattccccacttttaacagttggtacaatggttttccgtactttttttacagtctgacccgaagtccctttattactgttgaaaagcacactcttcttcttatcctcaaccagctctctcagcaaaggcgtatttttcacattaggggcctctcccgctctttggagcatcccttctaatgcaggagtatagcggtttttaggcggattgaaatgctgtttaacagagttaatatttttctttgctgtttgggctgcagccttgccagctttgccaagactttttgagcctgatacgacagtaggaccggcctctgccaacccccatatcgtcccaatcgcataagcaatatagtgtccgcgagaatatgaatccccatgtaccatcttttcatcccaagaatctgcgattgattgcaacatactttcgaaagcggctttgtaatcatactcaagtactgaatttacagttgcttttgggtttttaataaagtcgtctgcttgtccaataagagctttacctgtttcaatcgttccttggatcgtatcttttgcaaattcatatcctccaaccacaaagcctttcatactttctaagacatgttttccatcttccagagttcctttaattggatctgctctgaactcataagcttcttcaatggcagtaacataattcatctgttcagatgtaagattatcatatccaatctctctagcaactttgagaaactcatccggatcatcatacaacttttcaagttttttcttcaacgtatcagtatgactcataggttctattttgctggcctctttttcaagctttgatctcttatccagcttatccaacatgacgcccatcgctgtgtcttgtccaccacgcaaagcatccatctcatctggctttaaaatcgagcctttttggtaaccggtaatttcaattttagggcctgtgtacattttttcaagccggcttatgtatctctgcatcgtttccaggtcgttttcagcggttttaagagcgcttgtctgttcgcggtcgaaggcgtgcagcttttcaattgtctgattgatttcctttaaagctttctgattctgttcgtgaaaaccgctgtcattcaaatcaggcaaatcgacaatgtggctgacttttgcgatcgtggcatttgttttagaaaccaaacgcttcgtagtgcggtcggccgcattcaatccttgttccagctcgtgctcaagaaagctttgcgaaataaacccgttgtggtttggttccagcgaattcagcgcgcttttcattttcttcagcgtggaactgtattcctctatgaaagtatcatagaactgtagaaaaggggtgtggcattcctcgtaaaaggcgcggatcgcgtcgccgccttttccttttaaagcatcatcaagtgatgtaatgccctctacggcttttttgactttggataattcgtctgactgctgttttaattgttccagcgtttgatcaattgcatggtgcaacgcatggacatcaagagtcttcatggcattcccctctaatactaaagttacaatcagtatagattttaccactttacggaaagaaattggtgaataaatcctgtctatccatgaaaatgaatcttattgatcaggtcttaaaacccaacacagtcgacaggctttttttgaattccaaaaaaggaaaatcattgtaaaaaaatgatcctttctgtaaaatgaaaggtatgcagaaaaaggaaatggatacttatttttttgaatatttcaaatcaattatacgaaaggaatggtgggaattggttgttaaaatacgatccgaaaaggtcgggaatatgttgaatcaatggtatgcaacaattaagttacagcaagttcataaagcaactcaaatgaagaaagaaattcagaaggctattgataatatggagaagaatcaagatgttttgctttatttcaatatgatagattctcggtataaattattgatcgaaaaatataacgaatccggaagcatcttaaaaagtcttaagtatagagctgaagaaaagaagacggacgacatgcttcagtattacttttactttttcagcgggctgtatcagttttacataaagaactttacgaaagccattaatttttatcgcattgctgaaaattggataaataaaataccagacgaagcagaacgagcagaattcaattatcaaattgctattgcatattatgaaattcaccaaaattttttctcgttaacacacgcagaaaaagcgctcgaaagctttttagcccttggaaattatgaaaatagggcagcaaccactcaattgataattgcggcaaacagactggatctacatcaatacgaattaactgagtccgtatataaaaaagcaataaaaatggctgctgatacccgacaaaattacgttgagggactcggacatcacaatctcggtcttgcttacgaacgacaagaaaaactcgatttagcgcgtgaatccttcgaaatagctctcgacatttttgaaaatctacattccaaaatcgcaatcatcagaacttcttatatgctggcaagggttttattcaagaaaggtttattcgaagaagggacacattggtatcaaaaagccctcaatctcgcaaaagaaataaacgaaaaaacgtacgaagccaagttattagtcatacactcaatatataaagagttggataagaccttattagataaaggattgaatatgctaagagacaaaaagctttggtcagacgtagcagatttagctatcattgcagcaagacacttcaaaaagaaggaatatcatgaattagcggcgaaatacttcgatgaaggagtagtcgctcgcgacaaaattcaaacatggacggaggaacttgtctcatgaaaaaattacttttaggtgcagtaataacaggtgtatttttaactggtattttaaactttactactcaaggaaaagctgaattcggtactggagactttaaagttgctgaaaatgcgttttttggttaaatcataacgtgattcagttcggcccttaagattaaaaaagtacactttgataaagcggactcctgggagtctgcttttttgttcacaacagccctcagattatcccgagagctgtcgcaagattgtaaatggcccgccgtttgacctgatagcatttgtcctttttcaaccccatctccatataaatctcaatgtcctttattttttggggagagagatacttggcctttatgatctttaattcatcaccatcaaggctttgtttaagcgccctgtccatctgacaaactttcaattcatttaaagagtgctgatccctgagctgcaggaaaaggttattcatcccggccgcttcccgttctttccggttttcaagctgaacctttaaagccttatatctttttagctcccttataatcgtatttctgacttctttttcgtctataggcggcagaaaaagtcagttgtgtagctgacatgctaaatccctcctaaaaacaaattagacaccaataaacgtatatacaacgtcaatttggtgtccgcaggctctccgtcttggaccaatataaattcctgaatccatcagacttaattgttgtttctctcaaataatttcatttcgatggtaattcgatccctcactcgctttttcggcgtatttaccggaggcttctgcgccgtagtcaaatcggaaaaatcttcgtcgattgtgaaaatcggtttctttttcgtcaacaaaaaacgcctcctacttcgttaaattgaacggttcaaaattgcgtcggttttttaattgaccgttacatttaacgagtagaaagcgtatgatgacgggctttatcgccccattacgtgacgtcccaggagagattcgaactcccgaccgacggcttagaaggccgttgctctatccagctgagctactgggacatgatgttgttttgtttcgctttaactatcagcgacaagatttattatatgcggatcgggacataaagtcaacaactttttagaatttttttcttcacgaggaagaaaaaaattcttcctcatgaatgtgctggcaattgtacatggttcgtcaggctttcgacttcccggccgtccaagtcataatagcgaaccgttgcattgtctttgtcaatgtttagtatagcataagttttttctttccgcacccgcggaaggcggatgctgccggggttgatcagcagttttccgtccatcagctcgcttcccgcgatgtgggaatggccgaaacagatgatatcggcgccgagctcttcagcccggtagtacacatttaaaagcgactgtttaatgccgtataaatgcccgtgtgtgaaaaaaagctttctcgatccggcgggaacgacgatttcgtctttgaactccccgtaaaaatcgcagtttccttttaccgttaagtaagaggaaagcgcgggatgggaagggtccaattcagaatccccgcaatggatgatgagatctgtttccttcccgtgccgctcagcgatcatttccagttcgtcttcaaggccgtggctgtcgctgacaatcagaaccttcatgatcggccctcctcctttacgcttgatccaataaagcggacagctttttcagcgcttccgctctgtggctgattttgttcttttcgccgcttgagagctcggccatcgtttgatctttgtctttgacgagaaaaaccgggtcgtagccgaagccgtttgtgccgcgcggctcttcggtaatgtacccttccacagaaccttcgaccgttttcgtttcctgtccgggaatgcatattgcgagcgcgcatctgaacctcgcggaacggtcttctttttccaccccttcgagctctttcaatagctttttcagattggcgagatcgtttttctcttctcctgcatagcgggccgagtatacgccggggctgccgccgagatagtcgacagacaggccggagtcgtcggcaatcacgatttttccggtttctttcgaaattgtttccgctttaatcacagcgttttcttcaaaagtctgcccggtttcttcgatttcgggtgtatagccgatgtccagtaaagatttgacatcgtagcccctcggttcaagcatcgctttgaattccctgactttcccttcgtttttcgtggcaatgatgacttccttcatcgtgtatcagcctttctcatgttattgttgaatagataatgcaacgtcgccgagcacttctttctgcttttcgatgagttcggcgatccctttttcagccagctctaaaagcccgtccagttcacttcttgagaatgtcgcttcctctcctgttccctgaagttcgacaaagcggccttcgcctgtgatgacgacgttcatatcaacctcagctgcagaatcttcctggtagttcaaatcaaggatcaatcctttttccttatcgatgcccactgaagtggcagccaaaaagtcggtgatcggcatctccttcagcgcgcctttttcgacgagtcttccgacggcaagcgccatggcggtgaatgctccggtaatcgacgcagttctcgtacctccgtccgcctgaatgacgtcgcagtcgatccagatcgtccgctcaccgagcttttccaaatcaacaaccgcccgaagagctcttccgatcagccgttggatttccatcgtccgcccggagattttcccttttgacgattccctgatcgtcctttggttcgtggcccgcggcagcatgctgtattccgcggtgatccagcccttcccttctcctctcaaaaagggcggtacgcggtcttccacagacgcgttgcatatcacctttgtcccgccgactgtaatcaggaccgatccttccggatgcgtaataaagtcgaggtccattgtgacagggcgcagttcattgttttttcttccatcgtatctcattttttacctccgattgtatgtacataaacctttcacaatcattccgctcttccaaaaagctgaataaagaaagaggcagctttgatcgctcacctctttttctatagtatatcaaaaatttcggcttaaaaactacctgtgttcaccttgctcggtcttgaaaccggcttggaaagcttttctcctttttcattcacgagctcggattttccgttcacggtaaccgacacacttttcacatcaggcagttcggttaatgtcaacacgatactgtttaacacttcatccgatatcacttttttctggccgtcggcacttccgtagatcgcttcgttaaagtcgagggttacatggccgtcttcaatcttcggcttgttttcaagcttgacgtcgccctggaaatcggagagcaggccgcttttattgtccggtccttcagtcagctctttaatcgccgccgtcacctgatctttttcttttgcagacgtccgctttgtcaccggaacgtaatatgtgcctttatctgattcagccaaataatagacggtgaccggctgtgtcgccgttatatctgtcacacccgccgtgtcgaggttaatgccgtcctcgcggctgagttcttctgaaatcggcgtgccgttaacaggcatttctttcaaatcatggccgttcatgcggagcttcactttatcaatcgagttaaactgcgttaacgtccatgtaatcgcctgtacgattttttgctcatcttcagctttatagtttttaaattcatttgagaaatcagcgatcgctgttccgtcttctttaatatcaacattgaccgttgtatccgccggcagcacggctctgaatccgtttggcaggatgtttgaaacagggccgccttcaacgaggtattcaagcgcttgtttagccgtcccttcctgctttggcagcggcagcgtctgcgctgtcacatagccgttcttatcaatgagataaagctctctcatgaccgtatcgcccgtttgagcggctttatcgtcgcttgtcgttttgctgcctttgtcttctgttttatctttggttttgtctgttttgtcttgctccttctcctcttttacatatgtgatgtcctgcggcggatctatctcctctgaggcttgatctgactgaaatattccgcacccggaaagaagcagcgcggaggccgtaaccgtaaccgcgattcctttcattccttttttcagcatacttttccctcctaaggcagtttgtactattatgtatacgagcccgtttttgaattagaccgctttttaaaaaaatccctctgaatacaaaaaaccttttctttaaaagaaaaggcctgaaaaaagcatgccgtttgcatgtgcggcagctttattttacagcggtctcctgaagagaaatgctttccacatttttcacttcgtatccaaaccaatcgtttgcaatttttgtgaagcgggcgcgctccccagttgttaaaaacaagtgttccggcggttccgccgttttgcttaataaaccgttgtatgacaagatcgtactgacttccctggccgtttcatctccggaggaaatgatgttgacgcgctctcccatatagcgctgaatcggctcttttaaaatcggataatgcgtacatccgagaatcagcgtatcgattgatgaatctctgagcgggtgcagtgacgtcctgacgatttcatcagccgtctcatccaaaaatttgccgctttccacaaacgggacaaacattgggcaagccagattttccaccgttaaatctccgttcagcgaaagaagcgcttcttcgtatgcgccgcttttgatcgtgttttccgttccgattacgccgattcgctggttttccgtcactttaatcgcggttctggctccgggctgcaccacgccgatgacgggtatcgcaacttccctgctgatttcctctagcgcgatggccgttgctgtattgcaggcgatcacgagcattttaatatggtggcgggataacagataatttgtcatttcccatgtatatgacaggacttcttttctgtccctcggtccgtatggacaccttttcgtgtctccaagatatataattttttctttcggcagctgcctcatgatttcttttgcaacggttaaaccgccgactcccgaatcaatgactcctatcggttgatccaacaaaatcgcctcattttctgttcatttcctgctgaagtttaattaataatttttcaaacgcggctgtttcttcctcggaaaacgcctctaacatgtcttctaaatagtcctgccttttttgaatgacctcctggatgatccgctctccttccgatagaagatgaatgcggactacgcgcctgtcggacggatctttaacccgttcaacgaggttgtttttctccattcggtcaattaaatccgttgtggtgctgcacgccaggtacatcttttgtgataactcgccgatcgtcatatccccgtattcatacagccattgaagaccgacaaactggggaggggtaatcgtatattgggtgagaatttctcttcctttttgtttaatgatgcccgcaatatggcggagtgatttttcaatgtccgctatgtgattcaaagaagcattcgaattcattttctctacctcgctcgactcgttgttttgttttcaaaacacttgagtctattttccttcttttctacacaaattgcaagacttcaacatgaatatacaaattgctcttgaaaaaacaaataaccggttcccttcttgatacaagaaggaacaccggctcaatttagagctctagctcacccattcgaagaagttcaacaacagcttgcgaacggcctttcactcccaatttttgcattgcattggaaatgtgattacgtacagtcttttcacttataaagagctcgcttgcgatttcctttgttgtcttgtcttgaacgagcaattcgaacacttctctttctctttttgttagcagcggctttgattgaaactctttctccttcaagtattgtaaccctccttgctaaggtgagagctgatctgaaacgaatgggtttcgatatagtcgtgatatcatatgaaacatacgcaaggtcggtgacgtttctgacggagaaaaggattccctcaaacacctatttttcaaatcatgacacaggcatcgtttcagggctgaacttctaaggaagacattttaaaatccaggagatcagccgccatctcttcgtaatatatgcgtgcgtcttcttcttctgcacagcgctgatgatttgtgcagccgctttttcgggcgaagccgtccaaaacagatgatcaccttttgcaagagccgtgtccacgaagccgggctgaatttcggtgaccgcaatttcatcgcaaccgagttttttcactttttgacaaagtccttttaaataatttgaaacgaatgcttttgaagcggcgtaggtgacggcccctccgtttcctctcagcgcggcgatggatgaaatgccgactaaatgccctctcccgtttttgataaaatgctccatcaacacgttcgagcaggacacaaatcccgtcacattgacatcgatcgtttccttttctttgctccaatccatttcgctttccaaatatccaacacctgaacagatgaagactgcgtctgccccattcatctcatcaagcagttctttcaacagtataggcgagtgttcgctgtcggctgtatcgatctttttaatgtatgaaggtccagggaggtcgtcgcgcaatttggctagcagctcataccgtcttgcagcaagaccgacctccactcctccggctgacagctgcttggcaagcgcattgccaattccggaactcgcgccgatgattatcgcttttttcattttcctctccctgtcaattatttctcaggaaatgagttattgccaagcagttttgctttttgttcgtctgtccatttcacgggtttacccgtatctttcgcaatttgcaccataaccgccagtcctgtaaagcaaaggccgccttccccatttttcgctgcgtaatggagggtgagcgaggcgttgccgacagatgctgttttgacgccgatttttaaacgttcatgaagcatgacctgctgaaaatagtcgcattgctggctcgccacgacgggaatggccgcgctcttcccgtctgaaaggcggtccatgacgcccaggtgcttgaaataggaaatcctcgcttcttcgaagtagacaaacggtgtgacattgttcatatgaccgaacatgtccgtttctgaaaaacggacggaaacttcatcaaaaaaagaaaatgactgacaccatgtgtcaaacggttcttcgatatatcccggcaatttcaatgttttcatcccctttgatcatgaaaacacctcttcggtttgaagaggtgcgttttttcgtgttattccgtgttgtcgcttccgaagaagtttttaaacgcctgaacggtcgtatccctgtttaatgcagcgattgaggttgtgagcgggatgcctttcggacacgactgcacgcagttttgcgagttgccgcattcggccagtccgccgtctcccataatcgcttcaagccgttcagatttgttcatcgctcccgtcggatgggtgttgaataagcgaacttgcgagagcggtgcaggtcccataaagtttgttttatcgttcacgttcggacaagcttcaagacacacgccgcaagtcatgcattttgacagctcataagcccactgacgtcttctttcaggcattctcggtcccggtccgagatcatatgtgccgtcgatcggcacccatgctttgactttctttaacgaatcaaacatgcggctccgatccacttgaaggtcgcggacaaccgggaatgttttcatcggttcaaggcggatcggctgctcaagctggtcgatcagcgctgtacaggactgtctcggcttgccgttgatcaccatggagcaagcgccgcacacttcctcgagacagttcatatcccaagcaatcggcgacgttttttctccctttgcattcaccgggttccttctgatttccatcaaagcggaaatcacgttcatattcggacggtatggaatttcaaactcttcctggtaaggattagaatccgatgtatcctgacgagtgatgataaacttgattgtcttattttcactcatgatttcgccacctttttcttcgagtaatcccgtttacgcggtgcgattaatgaaacatcgacatcctcataatggaatttcggggcttcaaaatcgcctgcatgtttcgccattgttgttttcagccattcctcgtcattacgttcagggaaatccggtttataatgggcgccgcggctctcattccggttgtatgcaccgagcgtgatcacccgtgccaattgcagcatgttgtgcagctggcgcgtgaatacggcgccctggttgctccattttgccgtatcgttgatattgatgtttcggtagcgctcggcaagctcttggattttttcatccgttttcagcagcttgtcattgtagcgcacgaccgtcacgttgtctgtcatccattcgccgagctctttatgaaggacataagcattttcattgccgtccattttcattatgtcagcccacttttcttcttcctttttgacgtatgcatcgaaaacggaagaagacagatcttctgcggatgtttcgagaccttgaatgtattcaacggctttcggacctgccaccatgccgccgtaaatggctgacaagagcgagttcgctcccaggcggtttccgccgtgcatcgaatagtcgcattctcccgcggcaaacagtccaggaatgttggtcatctgatcgtagtcgacccaaagtccgcccattgagtagtgaaccgcagggaagattttcatcggcagcttgcgcggatcgtcacccatgaatttttcatagatttcaatgattccgcccagcttgatgtccaattccttcggatctttgtgggaaagatcgagataaaccatgttttcgccgttgatgccgagcttttgtctgacgcacacatcaaatatttcacgcgtcgcaatatcacgcggcacaaggtttccatatgccggatatttctcttcgaggaaataccaaggcttgccgtctttatacgtccagactcgtccgccttcaccgcgcgccgattcgctcatcagccgcagcttgtcgtctccaggaatggcggtcggatggatctggatgaactctccgttcgcatagtaagcaccctgctggtaaacgatcgaagcggctgatccggtattgatcatcgagttcgtcgattttccgaagatgatgcccggccccccggtcgccatgatgactgcgtccgaacggaacgactcgatttccatcgtcgttaagttttgggcgacgatgcccctgcacgtattgtcatcatcaagaacggctccgagaaactcccagccttcatatttcgaaacgagcccttcaacttcgaagcggcgaacctgctcatccagcgcgtacaagagctgctgtccggtcgtcgcccccgcatatgccgttctgtgatgctgggttcctccgaagcgccggaagtcaagcagcccttcaggcgttctgttaaacatgacgcccatgcggtcaagcaaatgaatgatcgacggcgccgcttcacacatcgctttgaccggcggctggttcgccagaaagtcgcctccgtacaccgtgtcgtcaaaatgctcccatggggagtctccttcaccttttgtattgaccgctccgttgattccgccctgcgcacatacggaatgtgagcgcttaacgggaacgatcgaaaatagttttacatttgttcctgcttccgcagctttaatggtcgccatcagacccgctagtcctccgccgacaacgatgatgcttgaattgctcatgcctgccccactccctctagtaatctagttcttttacacaaatgccaaaatcgctctcagccctacataggacagcacaacaaagactcccattgtcacaaacgtggcgattcgctgtgagcgaggagaaacagtgattccccaagtgacagcaaacgaccataaaccgtttgaaaagtggaagattgttgagaggacacctacaatgtaaaagccgagcatgatcggggagctcaaaatatcagccatcatgtcaaagttcacctctgcccccatttgggcggcaatccgtgtttcccacacgtgccagctgacaaaaatcaaggtaatgattcctgtaatccgctgcagaacgaacatccagtttctaaaaaagccgaatctgttcgcattgtttttcgctgtaaaagctatgtatactccataaacagcatgataaatcagcggaaggaaaatcacgaagatttccaaagcgtacctgaacggcaggttttccataaagtgagcggcgttattaaacgcctcttctccgcttgccgcaaaatggttgacaaccaaatgctggattaaaaatatgcccaccggtatgacgccaagcaaagaatgcagtcttcgataaacaaactctctgttcccggccattgctttaccccctagttgaaaagtgcagtaaaaatgaaaggtctcctatcccccgtcctgtttcaaatatcgcactttgttaagtttttatgacaatttcattttactcctatgagaaataggcgtcaagaaaacgcgtacataaattgaaattttctaaaatttaatcatatttttgaaaattttattttatcaaaatataaatatatcagatttttttcttcctaaatgcatgtctccgctgtaatctttcaccccatttaagctataataaacggagaaaagaggggagacattggatatgaataaatatgaagcaaacttagcgcaattaaaagagctggaagtctccgcatatggctatgagttgatcagggaagtgctgcttcccgatatgctgggacaagactacgcagatatgatgtactgggcgggaaaaaagctcgcccgcaagttcccgcttgaatcccgggaggatcttcccgctttctttcaggatgcaggctggggaacgcttgcgatcgtccattcaaaaaaacaggagcttgagtttgaactcgaaggcccgctggtttcaaaccgcctcaagtatcaaaaggagccctgctttcagcttgaagccgggtttatcgccgagcaaatccagctgatgaacgaacaaattgccgaatcttatgaacaggtgaaaaaaagagccggaaaagtggttttaacggtgaaatgggatttgaaagacccggcataactatgcaaaaaggcggagactgcaaaagtcccgcctttttctttttaaatgactgctgtctgcttcgacagttcaaaagcatcatgcagcgcttcaacggctttcaccatatcgccttcgttgacgacagtcgaaactttgatttcggatgtgctgaccattttgacctggatgtttttttccgccagcacagcgaacatttccgctgctactcccgggttggagatcatgccagaaccgacgatcgacactttggcaagcctgttttccgtttcaatctgttcatagtcgagcgcgtctttgtattcttcgagaacttcaaccgtccgttttaagtcttccgttttcactgagaaagaaatcgacgttttgcttgtgcctgtcaccgattgaatgatgatgtcaacgttgatgttctgtttggcgagcgttgtaaaaatcgttgacagcgtcgtcaggccgctcgccaggccgcatacggtcacgcgtgtgatctgatcttcaaatgcaatgcctcttacgattaaattctgttccattgatgattcctcctcgattaatgtgccggcttctttttcggtgcttgaacggacttccaaaggcacctggtagtttttcgcaaattcaacagctctcggatgaaggacgcctgctccaagattggcaagctccagcatttcatcgtaggagattccggccagcttccgcgctgttttcacatagcggggatccgtcgtgaaaacccccggcacatcggtgtaaatgtcgcatttatcagctttcagggctgctgcgaaatcaacggctgtcgtatctgatccccctctgccgagcgttgtgatttcgccttccgctgtgacgccctggaatccggcgacaacggcgattttcccttcattcaggcgctctttcagcttggctgtatcaatgttcgtaattcttgcgttgccgtgaatattttcggtttcgatgccggcctgccagcctgtataggaaaccgcatcataccccttgttctgcaaagccattgtcaacagcgaaatcgtcacctgctctcctgttgtcagcagcatgtccatttccctgctgctcggctgctcggtgatttccttggcaagcgcgacgagggagtccgtcgatttgcccatcgccgaaacgacgacgacaacatcatgaccgcgctgtttttcttcgatgacgcggtatgcgacattcaatattttttccactgaccctacggaagttccgccaaatttttggacgatgagacccatcaaataccaccctttttgttttcgttcgtgtttgtttatgtatgaagaggaaagcttgaccggcggcctgtacggttttttttgcacaaaaaaagcaacgagagaattccctcattgctttaaccaacaaaaatgccgatgatcttaaacaacgagatagctctccaagaaatgatttcttgacagcctcacatttattcaatgtaaagccagcaggaaaaacgagtggatttttccccgcttcggcgacgctcccctttcggctttcttcatcggaatccatcttcctcatcaagcctactcttgaagttcgcacctctatcttcaccatatcacacgatcttattatgaaattagtacaaattctatcagattctttttaaaagttcaacattattttttcaatgcctcttcgatcagctgcgccgttttcagaggtatgccgagcttgcggatatcttcggcgctcgcttccttcattttcttaacggaaccgaaatgttttaacagcagttttttccgctgttcgccgacgcccggtatgccgtccagcaccgattgaaatgcgctttttcccctgagctgcctgtggaagctgatcgcaaacctgtgcacttcgtcctgaatgcgctgaagcaggtaaaattcctggctgttccgctcaagctggacgatctcaaggggatcgccgatcaaaaggttggatgttctgtgcttatcgtctttcaccagaccggcaacagggacatcgagacccagttcattttccagaacgtcaagggcggcagacacctgcccctttccgccgtcgatcaaaattaaatcaggcagcggcagattctctttcagcacccttgtatatcttcttctgatgacttcgcgcattgatccgtagtcgtcaggaccttcaaccgtcttgatcttatatttgcggtactcttttttatgcggttttccatcgagaaatacaaccatggccgaaacagggtccgttccttgaatatttgagttatcaaacgcttcaattctgtatggcgtgtagatgtccagcgcttttccgagcttttcaatcgcgccgatcgtccgctcttcatcccgttcaatgagcgaaaacttctccttcaaagcgagctttgcatttttatgggcaaggagcagcaggtcttttttcgctcctcttttcggctggcgcacgttcacgtccaaaagctcctcaatcatgtccttgtcgacgctgtcaggcaccaaaatttccttcggaagaaaatggttgtttttggagtaaaattgcccgatgaatgtcagaaattcctcgtctgcttccctgtataaaggaaacatgctgacatctctttcaatcaatttgccctgcctgatgaagaatacctggacgcacatccagcccttgtcatacgaataggcaaatacatcgcggtcaaccatgtcattcagcatcattttctgtttttccatcgttgactcgatatgggcaatttgatcgcggaattctttcgcccgttcaaactgcaggttttccgaggcttcgagcatttttgcttcaagctctttcttcacttcattgtagccgccttttaaaaagcgggtaatttcttctgtgagctgtctgtttgtctcctcagacacatcatatacgcatggcgccagacattgtccgagatgatagtacaaacagacgcggtcaggcagcttggcgcactttctgagcggatagaggcggtccagcagcttttttgtttccctcgcagcctggacattggggtacggcccgaaatagcggcctttgtcttttttgaccttccttgtgacaaccagcttcggatgccgctcgttcgtgattttaatgaacgggtagcttttatcatctttaagcatcacgttatatttcgggtcgtactttttgattaaattcatttcaagaatgagcgcttcgatgttcgaggatgtgacaatgtattcgaagtcttcaatttcactgacaagacgctgtgttttggcatcatgggacccgctgaaataggagcggaccctgttttttaagattttcgctttcccgacgtagatgacggtatcctgcctgtctttcatcaagtagcagccaggctgatccggaagaagggccagcttttctttgatttttttgttcatcaaaaatccttccttatttcggcgtttttccttcatttaagtttaccatgaccgaccgtacgttcgccacaaatggagaaagaagatgacttgtaagaaaaaagcgatccctttggaatcgcctttttcacaggtttctattttacaaatgtttgttgaccagttcttcaagcgcttctttcggtttaaagccgacagatgtttcgaccacttcgccgtcttttagtacgaggagagtcgggatgctcatcacgccgtatttgccggcagtttcttggttttcgtcaacatcgatttttacgattttcagtttgtctcccatttcttgatcaagctcttcaagtaccggcgcgatcattttacaaggtccgcaccaaggagcccaaaagtcggcaagaactacgccttcgcttgtttcagatgagaatgtttgatcagttgcttttacgatagccattctttcattcctccaattgtgaaattatgctttttagtatagcatctccctttggttcacgctaacataatgcttgattatacgtttccctatctgcacagttttacacatcgggattttagcctttctgaaaatgtccatatcccatgttattttgcagaaggcggaaatgtgcctatgtcaaaagccggccatttcaggccggcttttgatcatgtgctgacgctcagctttttaaattcctccgtgagcagcggaacgatttcaaataagtcgccgacgatcccgtagtcggcaattttaaatatatcagcttccggatctttgttgatggcaacgatgattttgctgtttgacatccctgcgaggtgctgaatcgctcctgaaatgccgcaggcaatatataagtcaggtgtcacaactttgccggtctggccgatttgaagcgaatagtcgcagtagtctgcgtcacaggctccccttgaagcgccgaccgccccgcccaatacatcggcgagctcctgcagcggtttaaagccttcctcgcttttgacgccgcgaccgccggctacgataattttcgcttcagacaaatcgacgccttcggacgtttttttgacaatgtccttgatgaccgttctgatgtcccgaatatctgcttcgatgctttcgaccgctcctgtccgcgtctcatctttgtcaagcggggcgatattattcggtctgatcgttgcaaaaatcgtttcatcttcggaaatgatccgttcaaacgctttgcccgagtaaatcggccttgtaaacacgatgttgccgccggccacttcgacatcgacggcatccgatatcagccctgttcccatacgggctgaaagcttcggcgacaagtcttttcccattgacgtatgtccgaaaatgatgacgtccggattctcgcgttctatgatcggcaacaaggcttgaacatagccgtcagacgtatagtttttcaagagcgggttttcggctgtaagcactctgtcagcgccgtaatggatcagttctgccgcatgacttgaaacgctttcaccgaacagtacgccgatcacctctcccccttcggcaaccgtttttcctgcggctatcgcttcgaaagtcacattcctcaacgaaccgtctctgaactctcccaatacgataacttttttgctcatgtccatttccccctgtattttaatgaccgtgttatttctcccttcggcttcatacgacctttgcttcgcttctcagcagtgatacaagttctgccgcctgctgctccggctccccttcaaggattttcccggcttcttttttcggaggcaggaaccgttcgatcgtttttgttttcgcagccacgtcttcttcgtcgatgtcgagatcatcaagctcaagctcctcgagaggctttttctttgccttcatgattcccggaagagacggataacgcggctcgttcaacccctgctgtgcagtcgctacgattggaagcgatgtttggatcacttcaagatcgccctcggcgtcgcgttccgcttcaacatctccgccgtttaccgtcagctttgtaatcgtcgtaatacaaggaatgcccagcagttcggccaaacgaggcgcaacctgtcccgatcccccgtcgatcgccacattcccgccgagtataatgtcgtactcgcggtctttcaaatagttgtaaaggatggctgaagccgtatattggtccgcttcttccacgtcgtcttcaatgttgatcagaacggctttgtcgcaccccatcgccagagccgtcctgagttctttttcagcttcttcctcgccgactgtcacgaccgtaatttcaccgccgtgcttctctttcaactggagcgcttcttcaatggcgtactcatcgtacggattgatgatgaattccgctccgtccgtgttgatttccccttgttcgatctgaattttctcctctgtatcaaacgtgcgcttcattaagacataaatgttcatgttctgttcatcccctttgttttcacgtttgttatttccctttaaaatgcggcttccgcttttcaagaaatgcctgaatcccttccttcgcatcctcggattggaacacttcgccgaagtatttcccttctagcttgaggcctccttcatacgaatacactttgctcgaattcaggagttcaatgacataagccatcgtctgcggacttttttcagcgaatttttgtgcgagctcttttgccttttgcagcacttcttcttcattcgccgccaaaatcgtgacaagaccgtattcaaaagcttccttgccggatatcggctctgatgtcccgatcatttcaagcgctttggcggtgcccacatacttgggaaggcgctgcgttcccgcaaagccgggaatgattccgagattcagttcgggaaggccgagctttgcgctttcctcggcaatccggatgtggcatgccatcgctagctcaagaccgcctccaagagcggccccgtgaatcgcggcgatcaccggttttggaaaagattctactttttcgaaaatctgctggcccttatcagccaaatttgcataatcagacccgtccatcaatgatgtaaactctttaatatcagcgcctgccgagaaaaatcttccttccccgtgaataacgacgcttctgacatcctgacgttctgaaagttcatcaaggcatgcagaaagatcttcaagcacttgcgtcgatagcgcatttgccggcgggtgctgaatcgtaatcgtcgcaacatggccgtctacggcgtatgataatgctgccatttttattcctcctccttcgtcttttggctgctgaacccgtggatcagcaattcatgaatgctgtctgccaggtttgggagatcgtatttttgatcattcatcacccaggttgtaaccgtctcatccaccgtaccgaaaatcatctgcttcgcaaggcggacgtcaagcgtgcttttaaattctccagcttcttttccttcggtgatgatgtcttccaggatcgttaagtaccctttgagaatctcattgattttcagcctcagctcaagattcgactgcctcagctcaagctgggtgacaatcgcgaggtggcgatcgctgctgagcagttcaaagtgctttttgatgaacagcgaaagcttttctgtcgccgaatttttcgctgtcatttcttcgctcatctgctcgataaactgtcccattttctctttgaataatgagatgagaatgtcttctttgtttttaaaataaagataaatggtgccgtccgccaccccggcctgcttggcgatttttgaaacctgcgcctgatggtatccgttttctgcaatcacaatgacagctgcgtcgataatctgcatatactttggtctcttttgtttcaattggcttcgttcctttcaaattaatgaatgaatactcattcatgagttaatcgtaaataaaaatggacgctttgtcaagaagctaaaagtaaatcgcatcacaaaagcatgccgtcaaaatcgacggcagactttgctttttcagacgccggtcttttcctcttgaacgagcgctcttcttaaaatctttccgaccgccgttttcggaagttcgtccctgaactcgtatacttttggcactttataaggagcgagacgcgatctggcatattcgtccaattccttctccgttattgtaacatgatctttcagcacaacaaaagccttaaccgtttcccccctgtattcatcagggatgccggcaacgaccgcctcctgaacggcttcatgctcgtagagcacttcttcgatttcgcgcgggtagatgttgtatcccccggcaatgatcacgtcttttttgcggtcgacgatataaaagaagccgtctttatccatgtagccgatgtctccggtaaaaaaccagccgtcccttagactctgagcggtttcttcatcattgttccagtagcctttcatcacctgcggtcctttgacagcgatttctccatgctcataaggcccgagaaaaccgccggtttcttccgaatagatagcagcgtctgtaccaggccaaggacacccgatactgcccgctttattcaaatcccaaataaaattggcgtgagtgaccggcgacgtttcagacattccataaccttcgacaagccttccgcccgtcaccttttcaaactgctgtttgacttcaacaggaagcgccgcagatccgctcaaacagctcttaatcgatgacagatcgtattggtgaaggtcgggatggttcaacagggcgatataaatcgtcggcgcccccggaaatatcgtcggcttttctttatcgatcgttttcagcgctgcgcgcgcgtcaaatctcggcagcaggatcatttcatacccctgcctgatcgtgaaattcaagacggccgtcattccgtagacgtgaaaaaacggaacgatccccagcaccttctcctcccctttattcaattgataaaaccaggcggcgcacatctccatgttggctagtatgttgcggtggctgagcatgacgccttttggcgtgcctgtcgttcctccggtatactgcaggacggcaatgtcgtgggccggatcaatttcaataccgggcggtccgcttggaacggggcgtttcatgatggtgcggaaaaggtgggtcgtctcattttcattgatctcaacggacatttgattctcttttttttgaacgatcgggtacagcagatttttagggaaaggcaggtaatcttttatgcttgtcgcaatgatgtgcctaatgcttgttagcgctttcattttatatgccgccgggtacagcatgtcgagcgtaatgatgatggttgccccgctgtcatgaagcagatgttcaagctccctttccgtatacagcggatttgtctggacgacgatgccgccggagaaaagaacgccgtaatacgcgataaccgcctgcgggcagttcggcagcatgatcgatactctgtctcctttttgaatgccgagcgacagcaggtaatctgccatttttaaagcatcctcgtaaacttcccggtacgaacgtttttttcctagaaaatgaatcgctgttttttctgaaaactgctgggcggattgttgcaggatggaatggagtgtttgatcttcaaattgcagctcgtgaggaatttgttcgggataatgacgcagccacggtttttcagtcggcataagctccccccttttaaacaatatattcttgatttgagtatatcaaaacaatattcagaaagtaatgatattttttcatttttaaaaaggcgccccttttttaggacacctttttcaagcataaaagatcatataaatcaggccgataaccacaaataccccagctgtaaaaaacaggactttcgctaatttctccatgttgatcccctttagatacccgaagccacgacaaatgacaggcctactgaaatgacgaatgaaatgaagccgactgcgcggttgtcgttttcaatctccttgtcaattttaaagcgcggcgtcagaaattcaaaaatgaagtagccgatcaaaagcaggataaaaccgaacagcccccaccccatcatttgcagcagggaattatgctggctgatcgatttttgcagcacgttggcgatgcctaaaatttttccgcctgttgccatcgcaaccgccatgtttcctttttgaatctcctcccaatttttatacgtggtgacgagttcaaacacagataaaaatatcacaagacacaaaacggaaacactgtagtacgcggcgatttccacaaggttgttctcccaaaactctttcatccttttagactccctttattattttaattcgacaatggtgactcctgatcctccctctcccgcttcgccgaaccgggagtttttcacattgcggtgggatttcaataggtcctggacgccttttcggagggcgccggttccttttccgtgaatgatcgagactctcggatagcccgcaagcaccgcatcatccaagtatttttcaacccggtgaagcgcattttcaaaccgctcccccctaaggtcgagttcgagcgagacgtgataatctttccctttgacggcggcgatcgttttttgtttctcgggttcgggtgccgatttcaggaattccagatccttttccttgaccttcattttcaggatgccgatttgcacattccattcggccgcacccgttttttcgagcagcgtccctttttggccaaaggttaaaactttgacttcatcgcccggttttaattcgcgcttgtccgtttttttctgagccggctttttcgctttttcaaacgaaggcacggcttcttcaaggcgctttttcgcctcgatcagctcatggtctttaaatgctttatggtcttctttgatcatgcggagcgactggatgatgtcgtctgcttctttcatcgctgctttgactttttcagccgctttttgctccgcttcttcgtagagcttgtcttttttctcctgccattcgctgatctgctgctgcaggtcgcggtgaagggcttcagcttccgcgcggatggcttcggtctccttgagctccgcttctgcgcgctttttgctgtcttccagcgatgcgatcatcgtatcaacttcattatgttcggccgtcatctccgcttttgcgcggccgatcaggtaatcaggcagcccgaggcgcttcgagatttcgaacgcattgcttcggccgggcactccaattaaaagcttgtatgtcggtgatagtgtatcgatatcaaattcgacgcttgcattaatgacattttcgcgattgtagccgtatgccttcagctccgggtaatgggtcgtggcaatgacgcgtgcgcctgtctggcacacctcatcaaggatgctgatcgcaagggccgcgccttcctgcgggtctgttccggcaccgagctcgtcaaaaagcacaaggctgttttccgtcatgtctttcaaaatatcgacgatgttgaccatatgcgacgagaacgtacttaagctttgttcgattgactgttcatcgccgatatcggcaaatacttgatcaaatacggcggtctctgatccttcttccgccggtacgtgcaatcccgactgcgccatcatggtcaaaagcccgagcgttttgagcgtcaccgttttcccccccgtgttcgggcccgtgatgacaattgtcgtatactctccgccgagctcaatatcattcggaacgacctcatccaggggcaaaagcgggtggcgggcttgaatcaggcggacatagccgtcagcgttgacagccggtttaaccgcttttgtcgcttttgcatattttgcttttgcaaaaataaagtccagcgtctgaagcactttgacatcgtgaaagagctcatttgtgtgctctgccgtcttttctgtcaggacgcgcaaaatccgttcaatctcctgtttttcgtttacttttgcctggcgaagcgcattgttcatatcgacaatcgcctgaggctcgataaacaatgtcgcaccggaagaagactgatcgtgcacgattcctccgtagcttgatctgtactcctgtttgacagggatgacgaagcggtcgttgcgaatcgtgatgatcgtatccgacagcattttttgcgcagatgaagaacgcagcatcgattccagccggtccctgattcttgattcaagcgtccgcagctgggtcctgattccccttaacgtctctgatgcatgatcaagcacttccccatgatcatcgatgcacgaattgatgtccctttccaattcggaaagcggtatgagcttttctgcatattgatgaagataaggaatctcaaccccgtcttcgaacaggccttcaagaaagtgcttcatctgttttgctgcgtatagcagacccgatatttcagtcaattccgccgggcttaaaatgctgccgatttctgcccttcttaacgcttttctaatgtccgtaaggccgccgaaaggggcgcttccttttaaacgcaggacggttcctgcttcatcgacttcttcctgcagctttttaacttcttcgagcgaacgggaaggtttgagttccaaaagcatttccttccccaaagaagatgccgcatgctctgtgagctgttcttttactttatgaaattcaagtgctgatagcgctttttgctgcaacgtccattaaacctccttaagatcgatggcgcgacaaaaatgcctggacttcttcaaaggagcgggtgtttaatacattggcctttggcgtccatccttttctcgctgccgtaacgcccgttttcatatcatcaagcatcgctgtgttgtgggcatccgtattaataacgagtgtcactccggcagcattcgctttgatcaagtgctccattctgagatcgagccgcgctggatttgcgttcagctccaatgctgtattcgtttttttcgcaagttcgatcagctggtcaatatcgacttcataccccgcccttcttccgatcagacggccggtcggatgagcgataatgtcaacgtgctgattcagcagcgcggtttcaagccgcttcatgatgacatgctgcggctgtgaaaagcttgaatggatggaagcaatgacaagatccatttccgccagcagctcgtcgtcataatccagtgttccgtcaggcaggatgtccatttccacgcctttaaaaatatgaaaatcggtaaattccttattcagttcatcaatttccttcgcctgcatgcgaaggcgctcaggcgtcaaaccgcctgcgacttttaaatattgggaatggtctgtgatcgccatatagcggtacccttttgccatgcatgcttccgccatttccctgatcgaaaaagcaccgtcgctccaagccgagtgcatgtgaaggtctccttgaatatcctcggcggaaacgagtccgatgtcaacgctgtagtcctcgacttctcttcctgtctcccgcagttcgggcggaataaacggaagcccgaaatgggcgaaaaactctttttcgcttgagaaagttttaatttctccagtttcaacggtttcgacgccgtattcactgattctttcgcctttttctttggcaagctggcgcattttgatattgtggtcttttgatccggtaaaatgatgaagcgtcgttgggaactgttcctctgtcaccagccggaaatccgcactgatttcgtattcaaacgcaaatgtgagagacactttcgtatctcctgcggcaatgacctccttgatgttcgaaagctttaagagcccttcccggacaagttccggatcagtgacagccataatgtaatcgaggtctttcaccgtttctttggcgcggcgcaggcttccggcccgtgaaaacttaatgaggcccgggagcccttcaagctgctcttcgatgatgtcagcgacggccaaagcgaccgcgatcgggtaccgttcagggcgttttcccgcttcacccaaagcctgcaggattttttcctccgtctttttgccgaatccggcaagcccctgaaccttttgctgttcgcaggcctcttttaaagatgccgcatcacagacgccgagctcctgatacagcttggcgatttttttgccgccgagacccggaagcttcaaaagcgggacaagtccttccggaacctcttcctttaatcgttccagcgttccggatgctcccgtgtccatatattccttgatgacagcgtatgtgcctttgccgatcccggacagggacgtcatatcatcgatttccgagaggctccggtcgtcttgttcaagagctgccgcagcctttctgaaagcggagattttaaacgggttgtccccttttagttccatatatatcgcaatcgtttcaagcaatttgatgatatcttttttatgcatgttgttcacctcttgtttcccctcgttcatcctgcttcaatcatacaaatttttggctgatcctacaacaaacaggcatatccgacagcttccggggttctcaagagccccgaaaaaaaacttccctacaaacagagaagtttttacaaagatccgtactgatgcagcagattgtttaacatgtttgataaaaacggtgttttatgaatgatcaaatcagccatgactgaaccggccatcatgctttgcaggacatcaatcggcagaagcgttccgatgaacagaacgacaaacacgaacagatagatttccgcaaaaccgagcacggctccgagtatttggttgatctgtttgagaaccggtatgcttgcgacggcatccaaaaacgatgcggcaactctcaaaaggataatcgtcaggataaagagaatcaaaaacgcaatcatattgtaataagcgccttcaaggcttccgtttacaaacgccagcgcagcctggccgcccgtaaagtcgggagacggaatccagccgagcttaggcgcaaggtcgccgtaataggttgcggccacagcgatcgctgcgataaacgtaaccaaacggataaactggcggataaaccctcttttgagtccaataaacaaaccggacaaaagcaaaatgataatgatgatatctaacatcgtgatgttcaatccttttcttttatttgtccttttaatctctcaagctcttccttaagcttcaaataatcgtgaaccacatttacagccgtcaaaacggccagtttatttatatcaagatacggatttttttcgtttgatttctctcattttatcatccacaatcgaggcaacgtgcctcatatggctcttgctctcatcgccgacaattgtgaattgctgaccgtagatgtcaactgttgttttcgttttttgaccatcagacaacgtttctcctccattccaattatgcgagaatcctagtctatatcataacatgtttacagattgaatggaaagacgagccctccgctgttatgatacacttatgaaaacaatgatttagcgtatttaaagctaataaaggagattagaacgtgtcacattctgttttaaaagttcccccgtctgttattgaacggatgcaaagccactacgggcctgacattacttcactttccgtacagggcgcagttttccaagccaaaccccaagggtgcaccattacagcataccggtcggggaaggtgctgttccaaggaaaaaacgcggaaaaggaagcggagcgctggacggcggatgctgaaacaccggctcccaaaaagcccgcatcgaaaaaaagcatcccgtccgtctatcagccgcctgaaggcatcggttccatgtctgtgatcggctccgatgaagtcgggacaggcgattatttcggcccgatcaccgtcgcgtgcgtatacgctgacaaggcgaagcttccgctgttaaaagaactcggtgttaaagactcgaaaaacttaaaagatccgcaaatcgttcagatcgcgcgcgacttaatcaagacagtcccttacagcctgctcgttttaagaaacgaaaagtataatgaaatgcaggaaaaagggatgagccaaggaaaaatgaaagctcttctccacaaccaggcgatcggcaaccttctcaaaaaattggacggaacccggcctgaagcgattttaatcgaccagttcgccgaaccggccgtatacttcaagcatctggcaggcaaaaccgccgtcaaagaacgtacatatttcagcacaaaagcggaaggcatccatctttcagttgcagcagcctcgatcattgcacgctattcatttttaatggaaatggataagctgtcaaaacaagccggcattacgcttccgaaaggagcgggcccgctcgtcgatgaagccggcgccaagctgatcaagaaacacggcgaagacgcattgcgggtattcacaaagctgcattttgccaatacgcagaaggcgaagcggattgcgtcgaaacggtaagcggtgcggactaggctggataagcgggtccgttgcaactagacccgcatatttcactaaaacattaacaataaatgaaaaataaggattgaaaattcaaattaattgtagtatattgaacaaacttagaattgaagccccatatacaggggctttaattgttccaacagaggcaaagcgatatcaagcgctaggctgaattgcttcatgatattgtcttttaatatggcccatattcaattatctcaattttcagcttactgcacaccagatggcttttgaatgtgtactcctttgtttctggatacttctaagatataaggcggggatttggatgaagaaatcaggttcatttggcattcttttaattatttcagctctcataatatcaatgtattttatgttaaatacaaaggctttgatcttcaggatatgacttagccattcatggaatctcgtgatttcaagaactttaatgattgtgttcactttgtacttactttctaaattgggatattttcttctaaataaaaaagattagcttaatcgagctaatctttaatatatttgctacaccttttttcaagcaaactgaaattcagacaccctgctgaattttgaccggctgtgaaatgtttgaaccttctcttctttatatggcgaaatcattggacctctatggatgattattgcgaatatctccgcattccttctcatacaaatcgacagactcagaaaggaatcaccatgtcaaaaataaaatggatcatcacgctcaccatatgcacagctctggcattttctctctttattttcttcaacaaggcgaactttacagaggccagcgaaaataaagaaaccgggcttttctttgcccgaaactacatcagccatatgatggaaaacgagacgatgtcgtttaacattttcggcctgcaaaaagcaaacgccggcgttcctctaagcggtgagacggttacgtcgctcgcttttgataacaatcatatacaaatcagcgattacaaggttgaaacagggattcgccataaaggctatacgctcgtcaacatcatcgtagatgtccgggtctcaagcgataaaccggaaaaagcggatcagctgctgatatcttttaacggacgtgataaagaagcatttcaaatcggaaagatcacccttcaaaaccatcacaatgttcgaagcggcgatctgtcgcctgccggtcaatatactgcaggatatccaaaaccgtccttggacgttcggctgaaaaacaatctcgcaaaagatatttcccttgaaaagatcaccgatctaaacggcgtcatggcgtatacatttgacaaggggaccgccattcaagcgaaacaaagcaaacacatcgtcgtcccgtcttttcatatgacaggcgaatatgatttttatacggtcacccctgttttacgttatactgcagcagggaagcggaatcaatacagcatgcccggtgtactgtacggagctttagactccgatgaagagaaaatcgaacggatgctgaagcgtcaatagcttatgaccatgttgaagataaaaaaccggttcccgaatgatcggggaccggtttttctttatcctctcaatacagcctgatacgtatcctcaagtgccttcagcacttggtcgtgaacttttgtcacttcttccttggctaggattttaatatgcgggctataaatgcctttttccagaattcttgagaattgagtcatgaatttcgttctatacagaggagatatcgccccccctaacaagactatattaaactactaacattctatctaaacacagtatattcgatatattcaaccaataaaaataagaaaatgagattgtaattcctttctaaaaagaaacttttgatttatatatcaataaaaatagaatagataatccgttctatttactaaaataaccataagtgtaataatagccctacaagagacaaagggggtgaaaatatgacaatttctaaaaaacaacgcatcaacgcttctttagccttaggtctactttttacacttacatttttcacaatgttatacgcaacaacagcaccagttttaccgattgcagacctagcagcaacctatcctcagattccgggatgggctcttacttcaattagtgccatcttaaatgctgctggcactgttggagcaattgcagcggttctagggacttttggactcggagcgattgcatccctagttttttcctatgcaaaaaaatacggaattagatatgctatcgcttactaataagttttaatttaggaaagggtattatttaaaatgccctttcctccacatttaagtcaggatggttttcaatgaataataaatacttaatttattcaaaaattcttttaaccaacgacattcgaaaatttaatactaaaagcaaatggcttgcattattcgtattgatattgtcattcgttgttttccctttaataattggcagctttgctgggtacatcattaaaaatctagtcatcattcatctttctttttttctgtttatccttactgtaaatattgataaaagtattttcagagttatgttttcctctgacaaaaaacaaatggccattctgggaatcaaattagatcaatttatattaggaaaagatattagtaaattttatagttcatttttatctttaatatctttttatgttggttcatcgattgtatattatctcattcatcagtctttggaagaagtcttcgcgattgctgtgattggtttattgtccgctatactaggatatttgcttagacttcattttataaggctattagtattgcctaaattcataaatgtctcaagcattattggctttttcacaaatggaattttaattctttggatcttttttatactcaaatataatttgttatttctaaacatcaataatatgcgaattttttcaatatctataccaataatggtatctttaacaatcctgttaattatagtgtggtataaaagtttaagaaacctttccatttttaatgatcatttaaatagcaagactgatacaaatttgaagaagtctagagagagcagaagccttctatattacgagctgatccttctatataggaacccgcctgtaaggtggtcggttttattatttattttaagtttatcagcaggtttactaacaatcattttgtatggttttaacactgatcgatttgcagacactggaatttccaacgaattcagctttatgttcagcgtgctgttcccgttagtctttatctctatcatgattcaatcattggtttcttttgatattgatggtcttattatacctttgaatcagcacaagccaaactttattaaaaacaaaataaaagcaaaaaccaaaatctctgtcttagcacatgtgttatttgttttaatctatgctgcgatttcaaatttttatataaaaccggatcattttattgcattatccattatcttattgatgatagctgttactttggggttaagctgtctcacttcaactatattgtttccatattttaaatgggattacatttatcaagttcccagtactttaagcaaaatctttcttaatttagtatttggattactaatagggttagccattgtttcaacttacaacaaagttttgtatgttgttatttttatcactttgttatgtatcataacgctactgcactccataaacaagcaaatatggaaatcaacaatcaacaaaaattacatatcaataaaatctttattcgagtgagtgattatatgcttaaactgcaaaatatatcaaaagaatatcctcaatccaattttagcatgaagaatttagaattcgcttgcgggcgaaatcagattattggattgctcggtaaaaacggagcaggaaaaacgaccctattagaaattattgcaggcctcattcctccggatagcggtgaggtagtcgttgatggacatcttaccaattatttagagaaaatcggatacctagaagacgatccaaaattatttgagaatttaacgtgttatgaattaatcaagtaccaatctttattaattgaaaaaccattatcccaagaacaaatcattgaaaccttagacatgttcagtctaaaagaacaaaaagaccaaatggcatcttcgctatcaagaggaatgcgtcaaagaatgtcttttattctttccactttgcatcaacctgatgttatcttgcttgatgagccttttacaggacttgatccaaaaaacatggcggatatgaaaaagattttaattaatattagaaatcaaaatagaattattattttatccacgcatatcttacagtttgcagcagatctttgtgatgagatattatttattaataacggaaatattatccacactgaaaaaaaattagccggggagacatttaatgaagccagccttgaaaaaaaattccttgaatacctatgctaaatactctattttgttcattattatttttggtttcggtttttctcttagcttttttgtatttcaagaaatacacgagacttactatgatagctttaaaatatccaacgctttagagatttttacaaataacttaattgtaggactaactattttctttcttggattaatcagtgttggtttcctatctagtgtagtagtgtttttaaacggttatttctcaggggcaattttcttttcatatgagaagtctttaggtttttggaaatcactacaatatctcttatttcacggcccctttgaaatccttgcccttcttgctttttatgtaatatcttctgatatttcttcccgttttttaagatttctaaaaaagtctgaaataaacctaatgattaagccgaaagtaaaagagtcacaatatatgatagtgcagtaggccttctaatcttagcatctattgtcgatactacgtaatattactaaaataaggagttcaatatgaagaagactaaattcaacttaatatgtatttgtctattatctggagctgcagccttatgtgtttccattttaaaaatgaatgagatcgatgctagcttacatgaattaaacgaagatgaatatggaaatcttattactatcagtaaatggattggcattacaatagcagtaattggcgaagcgataaaaccccttcttgagcttttatttttcactttaatcatttggctcgctattatgatttttggagcaaaggattcctttaaaaacattttttcaaaaggtgttctttcctactatttcaatcttgtaggcagtgtcttagttattgtcttttatctatttggcttaaaagatgctgaaagtcttttttctattccttttttaagaaatttaaacattttttctttaatttcgttatttttttggtgctatttatgtctagaaaagaaagaaaactcactaaaaattaaatactctttttcttttttcatattgtttttattttctattgccatatctattttctccgatattcttgcatagattaccttcgtatagactcattaaataacatatgagaattcgatacaacttaattcaaaatattttacataaatattcttgccatcctaaaataattaaaacttacaataggccgacaatttttccaatgcaaaaaaaccggttcccgaatgatcggggaccggttttcctttatcctctcaatacagcctgatatttatcttccagcgctttcagcacttggtcgtggacttttgtcacttcttcttctgtcaatgtctgttcaggattcaaatattgcaggctgaaggcgacggacttcttgccttcttccatgtgctcgccttcatagacgtcaaagacatggacttctttcagccatttgccgcctgctgttttgatgacgtcctcaagctggccggccgttgtttgtttgtctacaacaagcgcgatgtcccttgtaacagaaggatacttcggaattggtgtatacgtgatctccggtacatccaatcggaggagctcgtgcaggtccagttcaaacacatacgtgtcgctcaggtccagctctttttcaactgacggatgcagctggccgatgaagccgactaatgagccgttgtgcaaaatattggctgtccgcccaggatgaagctcttttctttcagattgagcgaattcgatgccttcggtgattccgagcttttccaacagaccttcgacgatgccttttacgacgaagaaatcaaccggctttttctcgccctgccagaggtttttgtgccacaggcctgtcacggctccggcgacgtgttctttttcgaccggtttcgtatgttcttcggctttcaagaaaacagaaccgatttcataaaaagcagctgaatcggcctgccttgccaagttgtatgcaaccgaatcgagcagattagggagcaggctgtgcctcagcacgcttctttcctcgctcatcggcagtgaaaggatcgttttaaacgatttttccaatgcataagccgtcgcttttttatcgtttgttaatgagtatgtgatcgcctgggaaagccctgctccttccaggaagcgtcttacttttctgcgcttgtcctgataaggcgtcagtccgcccgcaaagcctgttacttccggcagtgtcgacggaatgttgtcatatccgtacagtcttgcgacctcttcgatcaaatcttcttcaatcgcaatatcgcctcttcttgacggaaccgtcacgaccagttcacgttcagcgtcttcaactgcaaagccgagcctttcaaaaatgttgaccatttcttctttgctgatggacatgccgagaaccttcgtcactttatcaacggaaaggcggatgacattctctttgatgtcaagatggttttcttcgaccgtaccttccaagacggttcctccggcataccggctgatcaaatctgccgcgcgttctgcagcgaggcgcacccgtgcaggatcgatgcctttttcaaagcggacgcttgattcgctgcgaagaccgaggtcctttgatgctttgcgaacggtctggccgttgaaatacgccgcttccagcagcactgtcgcagtatcttcgcggacttctgattccgctccgcccattacgcctgcgactgcctgcggaagagagccgtttgtgatgacaaggtgctcagtggtcagcgttctttcttgttcgtcgagcgtcgttatcgtttcgttctcgtacgctttgcggatgacgacctcttttgagccgaagcggtcataatcaaacgcgtggagcggctggccgtattcgagcagcacaaagttcgtaacgtcgacgacattgttgtgcggtctgatgccggcgttgatcagcttcgtctgcatccaaagcggcgacgggccgattttgacgtctttaatgattttcgccgcgtataaaggattggcttcaggatcttcaattttgacggaaatatagtccgccgctttttcggcgcctgcctgataagccgtctcagggagcttgacttcgcggccgagaatcgcagccacttcataggcaacgccgagcatgttcatggcgtcggcgcggtttggcgtcagtcccagttcgagaaccgcatcgtcgagcgccaggctttgaagggcgtccgccccggtttcagcatcgcccgggaaaacgaagatgccttccgcatattctttcggcacaagcttgccttgaatgccaagctcctgcaaagagcagatcatgccgttagacgcttccccgcggagcttcgcctttttgattttaaaattgccgggcaataccgcgccaaccgtggcgacggcaactttttgccctttgtccacattcggagccccgcagatgatctggacaggctcttcttcgccgatatcgacgaggcatttgtttaatttgtcggcgttcggatgctgttcgcgctccagcacatgtccaatgacaacacctttaattccttctcccttatattcgatgccttccacttcaattccgcttcttgtaatcttttcagcgagaatctcgggagtcatcccgtctaaattcacgtattcttgcagccatttatatgaaacaaacatcacgcgtcctcctctttaagcttgtttaaattgagataaaaatctgacatcgttcgtatagaaatgacgaatgtcgtcaatgccgtacttcagcattgcgatccgttcaacgcccatcccaaaagcaaatccctgatattgtttggaatcgaatccggccatttcgagcacgttcggatgcaccattccggcgccgagaatttcgatccagcccgtttgtttacaaacggagcagcctttgcctccgcatttaaagcaggaaacatcgacttcgacagacggctctgtaaacgggaagaagcttggacgcagtctgatttcgcgctcttcgccgaacatctttttcgcgaccgtttccagggttccttttaagtcgctcatgctgatatcacggtcaacgcagagcccttcaatctgcataaactgatgggaatgtgtcgcatcatcgttgtcgcggcggtacactttgccggggcagatgattttgacagggcctttgcctttatgtttttccatcgtgcgcgtctgaacaggagatgtctgtgttctcatcagcgtatcttccgtaatataaaagctgtcttgcatatcccgggccgggtgctctttcggaaggttgagcgcttcgaagttataatagtcggtttccacttcaggcccctcttccaccgaatatcccatgctgataaacaagtcttcgatttcttcaataacgatcgtcagcggatgccgcgctcctgttttcacagggcttcccggaagcgtcacgtcaatcgtctgctctttcagcttccttttcacctcttcttcctcaaggcgggcatttttttcggcgatcgccgcggcgattttctctcttacttcgttcgccaaggcccccattttcggcctttcttcagcggacagctttcccattccccgaagcacttctgtgatcggtcccttttttcccagatacgcaacgcggacatcgttgacttcttttaatgaaccagcggcttccactttttcaaccgcttctttttcaagccgtttcagctcttcctgcatcttaaaaactcctccttttatgtagcaacctgttttttaggcaataaaaaaagccccttttataatgaaagggacgaatcgtggccgtggtaccacccttttttaaaacaaagcaaaaaagctttgctgcttacttcattggcataacggaataaatccggttcacctttacacatccctcgagggacgtggtcccggtgacaactcaagaggtgaagcgttttccggcctgccataaaaatgcttgcagtctcaggcattttctccctgaatggcggcatgtgaaaaaacggagcctctatcactgtttttaaacatattaaattcattatagtgaattacatgatcctgtgcaaccggttatccgcggagatgataaagaaggaccgcggctgcggccgccacattgagcgactccgcttttccgtagatcggaacgtacagattttggtcggtctgtgcgaggagggccggatcgaccccagatccttcgtttccgatcaatagcgcaaacgactgcgacggctccgcttctctaaatggcacggcaccctgcagcgctgtgccgtaaaccgggacgctttttcccttcagctcttcaatcagctctgaaagctcgcgttttaaaatcgggatgtgaaaatgcgagccttgagccgacctgagcgttttggcattgtaagggtcgacagtcccttgtccgataacaacggcatcgatccccgccgcgtctgccgtccggatgatcgtccctaaattgcccgggtcctgcacagcatcagctagcagcagcttttcgtattgaaaaggtccgctttcgggcattcggcatacagcggcgaccgcctgaggcgtctccgtttcggcaatcgctgaaaaagcatcggcgctcaaaacatagcgggcaacagactcatcaatcatagccgggaagtccgcttcgtctgcgaccatgatttctttcacaacacccggtgtcttcagcgcttcctcaacgagatgctcgccttctattaagaaagtattcgtttttgtccgctctttttttgcatgaagttttttccagtccttcactttttgatttttggctgattcaattcgtttcaaatcgttttgactccttttgtctcgcaatagtcacattatatctcatcaatgatacataataaacccgaaagcgaggcagaatatagaaaaacagatgatgaaatggagtgaaaaatgatggatttgaatttgcgccatgccgttattgccaatgtatcagggaactcgcaagaagagcttgaacatacgatcgtcgatgcgatccaaagcggtgaagaaaaaatgcttccgggattgggtgtgttgttcgaggtcatctggcagcacgcaactgaatcagacaaaaccgaaatgctcgagacattggaacaaggattaaaagcgaaataaaccggcggccaaacggccccggtttatttgatcatccaggtatagaaggctccatccgcaatgccggatcgcgccaaatctccgtccattttttaatggctgcagccatgatcacaagtcccaacacaagcataatgatcgataaaatgccgtttaaaacgctgaaaccggcagcttccgcattaaaataaacgtttttgatcatccagtatcccgcatagttgaccgtcacatacaaataagcgagcggaatgagacatgtcagcatataacgccgtttgtccgcaatttttaaaatgaccgtcgctccgataattaaaccgacggatgccatcagctggttggatacgccaaacagcgcccaaatcgagctgatatcgcctgagtacagcaaatatccccacatgaaacaggcaagggcgctcgctgcgaccgaacccggaagccagtccgtttttttcagcggtttgtacacttccccgaaaaagtcttgaatcaaataacgcgccacccttgtaccggcatcgatcgccgttaaaataaagacagcttcaaacatgatgacaaattggaaaaagtaagaggccaaatggctgaaaaacggaatatccgtgaaaatataagccatgccgacggcaagggtaacagctccgcctgttcttccttcaagatcgagaccgatttcgcggctgagttcaggcagatggacgacattcatgccaagcgtccgaaagacttctggcgaactgttgatggcaaaataatcgcccggctgcaacgccgttgccgcgattaaagccatgatgccgacaagacactcaacgagcatcgctccgaagccgacgaatttcatgtcgctccacttgtcaagcatcttcggcgtcgtgcctgaaccgacaaacgcatggaaaccggaaatcgcaccgcaggcgatcgtaattgaaatgaacggccagaccggaccaggcgaaacaggtccccctccgcccgtaaactcggtaaacgccggaaacggaatcgccggattgacaacgaaaaccccggcaatcaaagcgataaacaccccgattttcataaagctgctcaaataatcgcgcggtgcgagcagcagccatacaggcagcgccgctgcaaaaaatgcatagacaggaagtgcgacagcaagcgttttcgtatcgagcgtcaaggcgtctccaagcggcgtctctgcaatggagggcccgatgaagacaccggccatcagcaaaataaatccgccggtagacgctaattttaagttgcctgtctttttataaaataagccgacccccatcgcgatcggaattgtaatcgcaacggcgaacatcccccacggattgcgttcaagcgcatgaagcacaaccatcgacagccccgccatcgtgattgtaataataaacagcatcgcaagccccgtgcaaaatcccgcaacaggcccgagctcttctttcgccacttctgaaagcgactttcccttcctccgcatcgacgcaaataaaacaacaatatcatgcacggcgcccccgatgaccgctccgatcaggagccacaacagccccggcaagtagccgaactgcgccgccaagatcggcccgacaagcggccccgcggctgcgatggccgcaaagtggtggccgaaagacacccatttgttcgtcggcacataatctttgccgtctttctgaagatgggcaggagtcggcttgtcgtcatcaaccttcaacactttcaccatcataaatgttccgtacaaacgataggcgatcgccaaaatacagatggaagcgatcacaattgttattgcattcatccaattcctcccccctttgtctcttttttaacatagctcatattttttgtaagcgcaatcatcttttgcgcgttttttcagtcccgataattaaaacatagttgactaataggaataataagaataaaatagacacaagcttcatctgctgccttttttaaggcgtaattggcgggtatcatcggatatccgccttttttctgtcagcataacggaacgataaaaaaatgaacggccatcactagacaaaaagcggcggtccccgcgattcgattgacatttgttttgacaaggcgaagctgagaaatggtgggacagcgaaaaaaacaaaatggtgccgatcaagatgacgcccgcctctaaaagtgagtgattaagaaaccggggccggtcaaggatcgccgtgataaacagaagccaaaggtatgctaaaaatgcgtacatcaaaaaacagtacgcagccgaaaaaaacgtcttcataaatcctcctcccgttttaacttattcttcggcatatttgctgaagcctttttttcatctgaaaaaaccggcctcttcgggccggtttttcaatcattgtttcttcattctgatcacattccaggaaagcttcggaaggtgagccgtcagcctgccgtcacatactttggcgtctccgccgctgtgcggaacgacgttgttgcggtctttttcattcgtcgctttatgatcttcgtgttccagaacgatgtgctcagagacactgtacccttcaaagcttctcatatcggcttccatttcaaggccggcgtctgttgcgcggttgacggcaaaaacggttaattcctcggcttcttcattgaaaacagacacggactccaagtacggcacatccgtaaagtctttcgcatcatactttggagacgataccgccgtctgcagtaccgttcctctgccgtagacggaagcgtgcataaacggatagaaaatggtctgacgccatgcttctccccctttgtctgtcataatcggcgcgatgacattgacaagctgagccagacaggcgattttcacgcggtcggcatgcttgagcatcgtaatcagcatacagccgacgagaagcgcatcctcaaagttgtagatgtcttcaagaaggtgcggcgctttcgcccagcgttcagcttctttgtctttttcattcgagtgataccagacattccactcatcatatgaaaggtgaatcgttttcttgcttttctttttcgctttcatatagtcgcagactgagatgaccgttttgataaagtgatccatgtctagcgatctcgccaaatagtttggaagatcattgtcgcggttgccgtaatacgagtgaagcgagatgtactcgacgtgttcgtacgtatggtcaagcacggtcgtttcccagtcgatgaatgtcggcattccgcttcccgaacttccgcaggcgacaagctcgatcgacgggtccgtccatttcatcaccttcgcggcttcagcagcaagtcttccgtattcggccgctgttttatggccgatttgccatggaccgtccatttcattgccgaggcaccatgttttaattttatgcggttccttatatccgtgggattttctcaagtcgctgtagtacgatcctgacggatggttgcaatattctactaggttgcgtgcggcatcaattcctctcgttccgaggttgacggccatattcacctctgccccgacaagctttgcccaatccataaattcgttcgtaccgattaagttcggctcggttgtcgcccacgccaaatcaagtcttgtcggccgctgttcgacaggtccgactccatcctcccagttatatccagatacaaagtttccgccgggatacctgataaacggcacctttagttctctgactagtttaatgacatctttccgaaagcctgattcgtcagcttcaggatgatcaggctcataaatgccttcataaacggctctgccgagatgctcgataaaggagccgtaaattcgcttatcaatctctgccaccttatattccttgtcaatcgtcatcttcgctttgtgtacagtcatgttaaatcattcctttcaagatgatatatagtggatcagcctttgattccgcccgccgtcaaacctgatataaagtacttctggaagaacaggaagatgagaatcacgggcagaatcgccagcacagaacccgaaatcaacatgtcataattgttcccgtacggactgagcaaagcggacagtccgattgggagcgtaaacatttctttcgatcgcaaaacgatcagcggccataagaagttgttccagctgtttaaggattgaagaatgatcatcgctccaaatgccggcttcatcaagggcgccatgatcctgaagtaaatgccgaactctgtgcagccgtccattctcgcggaatcaagcaaatctctcggcaggccgagcgcatactgtctgaagaaaaacacggctacaggcgagacgataaacggcaggatcacaccggcgtatgtgtcgacaatatgaagagaaaccgtcattttaaataaaggcagcatgagaatttcgatcggcaccatcatgatcaggagcacggctacgaacaagagattttttcctttaaagtcgtagacggcaagcccgtatccgaccattgaagaaaacaagagcgtcagcacggtggatatcaccacgagaatcaagctgttcgaaaaccattgaaaataaatgctgcctccgttaaacaagtaagtgtaattgtcaaggctcaggatttcagggctcagctttaaattcaggccgaagcgcagcaattccgaagatggcttgagcgagccgagtacaaggcagaagagcggaaacacaaacaaaaagcttaatatcgcaaacagcagaaacagagctactttcgcaatgttgaggcctccggcaggacgcattaatagccctcctttttaaaagatccagacagctttaatgaaatgaggctgcagatgaaaatgatgatcaagagcacgatgccgagcgccgatccgtagcccatgttgttgtaggcaagcccctgctgataaatgtatccgaccatcgtcaggccgatgttgcccggagagttgttctgccacagcacgtagctttcttcaaacatccggaagccgccgatgatgctgatcgtcagcacgtagacgctgacgggctttaaaaacggaagcgtaatatggtaaaacttcttgaacgtgcctgccccgtcgatttcggcagcttcatacaattctttcggaacgttctgcaagcccgccaaaaagtacaggacattgatccccatccatctccaagatgcgagcatcaccattaaaaacatgccggtatgttcattgttcagccagttgtacggcgaacctccgagcttagccaatatcgaattcgccagggatgtatccatttctccaaaaatcagcctgaaaataatccccgccacaatggttgaagtcagagccgggatgaataaagccgatttgaacacgtttttaaactttacgagtttagaatctaaaaagactgccagaataagaggaacaggtattaaaatcagcaatgtccaaaaggtgtattttacggtgttgaatagtgcggtataaaatgtaggattgtttaatgctttatagttctccgtcccgatgaagcggacttccccggggagaatgctttgaaaactcatgatgacgacgctgataagcggataaagaaaaaatatgcaaaaggagagtacaaaaggtgctgtaaaaatgtagggtgcggcttttgctgaatataataaacgtctgatctttctttttctgctcaccggcggaaacgaatgcactgtatctgttttaacagtcttcaagttatcgcctcgctttacagtaatgaaagactattgccctttcacttcagctgctgctttgtccaatgcttctttcggtgttttgctcttcgttttgagcgcttcgtacagtatgtttctgttgacgagatcggaagtcttcgcataatcctcagtaaggtaaagcggattgatctcatcctttatgtcaagaagcacggaaaagatgtgttgtccgttttgaaagtattctgtatattgatttgtttttttcaattcgtccgagtcccacacatcccatctgagcggatcgaacccgagcacggtccacagcttggtgttgccttcttttgacgctttggcaaatttcaagaaatccttggccagatcgacctgtttcgcctgttttggaatcacggtggccgttccgcccattcccgctgagcggtctcccccttcttcccatgccggcagcggtctgatcgcgattttccctttcaagtcaggcatataatccaaaaaacggcccatataccagatcggcattaagacagacgccgcgccgccttggttcataaatccgtaatactcttcactgtgatgattgcctccgggcgttgtgacggcaattttgtctttctcaattaaagtctttaaaaattcgagcgttttcacgtttgtctcattgtttaatgtcaaccgcccctgctcatcaaagtaaccggatccctgctgggaaaccagcggcagaaatgaattcgggtcggtcgtttcaatcgtcgtcatcggctttccgagagctttgacgacctttttgcccgcttccctgtaatcttcccatgttttgatgtcgtccggatcaacgcctgctttattcatcatttccatgttgtaatacatcacggtagttccgacatgtgtgtcaagtccgtaaagcttgccgttcttgctgtagagcgtcagcctcgcttcaacaaacttgtcgcgttcgtcctccacaagcggcgttaaatcggtaagaggaatgtcagagcccttcaaaaagttcgaatagcgccccagctcaacatcggcaatatctggaacccctttcccggctaaaagcgagatagataaattgtcatgcatctgtccatacggatacaccactgtatttaatttgatttttcgctcgggatactttttgttccattctttcaccatctcagcataaaactgttcatgaaggccgttgaatgtccaaaatgtcagttcggtgccgtccgcttgatcggaggcaggactcgccttgcaccccgataaaagcaaacatacagcgaccgtgaccataaagatagatgaaaggaaccttttcacattttaacccctttcacgcctggtcctttgcctaaaagccccggcaaaaggccgtattgattgatgattttcagtcccgtataccggtctctgagctgatgggcgtatgcgagcgcttctctcaccagctcttcttcaacatcgagttctttgaatgatacaggcccgccgatacgcctcatccactctgccattttcttaccgtcagggagcttttcataaacggagcgaatcgcttgctcagcgtgttgatcacccaggcttgcaccgataagagatcggtaaatgtcagtcagcataatcgcgctgcagccgactttagcaccgtggagcacttgccgcttattgttctccagcgctttcatttcaaggtagtgggaaagatggtgctcgccgccggaagccggccttgaatggtcgagaaccagcatgactaggccagaaaggatcagcgattccatcaatttctcaatcccatcccgcatcttggcggcgatgtcatcttttcggtcaagacattgatcaagcgcttccctcgtgagccggctggcggccggacaatacggctcgccggcaagcaagcgggaaatctcccaatccgcaagcgacgtcaccttgccgagcatatcgccaaaacctgcggctaccatgttctgcggcgcttgacacaagagctccaaatcggcaaaaagcgcgatcggcgctgtcgtttgaaccgtctgtttctttccttttaaaatcagcggtgcgccggctgaagtaaaaccgtcaaccgacggagccgtaggaactgaaataaacggaatgccgcgctgataggcgcaaaacctgacgatgtcgtgaatcgtgcccgctccggccgcaattagtacatccgcatcaatcggtacaccgatcaatgcactcaccaatgtttgctcatccgccgtcacatcgcccgcttcattagcttccagcagcaccggaaccgtttcagccgtttcctcaagaagagaggcaatccgcttgccggctaaccgtccggtcgtttcatcataaatgacagcggcttttttataggaagccgatttcacgaaagcgggcagctcttgctcaacagcattgtcgccgatcgcgattttttcgactgtaagcgggtggtggacggttccgcattcgcatgcgcccaaagtttttttcacataagagatcaagtcattcattggcagcttccctcctctattggccgtaataggcgtctgccccgtgctttcgaaaataatgcttatcctgcaaagcgctcttaatccgcttaagagacggattcagcatcagggagcggtacgccatcttggcgacttcttccaggacgacggcattgtgtacggcagttaaggcgtcttttccccagcaaaacggcccgtgattgttcacgagaacggcgggcaccgccagggggtcaagatgccggaacgtctctacaatcacttttcctgtattcagctcgtattgactcctgatttcatcgggatccatttcccgtgtacacggaatgtcgccgtggtagtagtcggcatgagtcgttccgagcgacggaatgtccttccctgactgagcccagcttgtcgcccacggggaatgcgtatggacgatcccgccgatcgattgaaactgccggtaaagatagaggtgtgtcggcgtatcggaagatggcttcagatccccttccacaatctcgccgtccatattcagaaccactaaatcttcggctttcaaatcgctgtatttgacaccgctcggcttgatgacgaccagcttattctcccggtcaataccgctgacatttccccatgtaaaggtgacaagccggtattcttcaagctgcaaattcgcttttaatacttgttctttcaaagattccagcacagttttctcctccctctaagccatcgctttaccggggtcagaactaagggactggatgtttttcaattttttaaggcgtttcatcacattgttttgctttccgaagtacgtgtaaagctccttatattccgcataaagctgatcgtataaggaaacgttttcaggaattggtttgtacgttttatccttgatcttgcccatatgtgcgactgcttcttcgatatggtcgtaaccgccgttcatgcttccggccgcgagcgctccgaatatcgctgaacctaaagccggcgcctgcggagatccggaaattttgatttccatgttggtgacatccgcgtaaacctgcatgataaacggatttttttcggcgattcctcctgcggcatacagctcctcgatcggcacgccgctttgtctgaacgtttcaataatgatcctcgtcccgcaggcagtcgcttcaaccaatgcacggtatatctcttcaggcttagtggcaagggtcataccgagcagcattcccgtcagatcggcatcaacgagtgttgaacggtttccgttccaccaatccaatgcaagcaaaccgctttcaccgatttggagactgccggccttttgagacagcagttcgtaaatggaaatcccttcggcttcagcttctttcaaatacgcttctggaacaaagtgttgaatcagccaatgaaaatggtcgccaacgcacgattggcccgcttcatagccgacatagcccggcagaatcccgtcttcaacgacgccgcacattcccggcaccatcctgacatcctcgccgagcagcatgtgacaggtagacgttcccatgatcatcagcatcttgcccggctctgtgatgccgaccgccggaaccgacacatgagcatcaacatttgcgacagcgaccgccgtacctgccagaagccctgtcttcccggccatttcttcagtcagtccgcccgctttttcgcctacagaataaatatcctccgttagtttttcccgaacgatatttttcagcttcggatgcaggcttgcgaagaaatcgtcggaaggatagccgctcttattgttccaaatcgctttataacccgctgtgcaattgttgcgctttctggttccgcacagcatatagacgatccagtcggccgcttccatgatctcggctgcggcatcataaatgtcaggcgcttcttccgcgatttgcatcacttttggaacgagccactcggaagaaattttcccgccgtatgtttgaagaaaaggttcatttctttcttccgcgatttgatttaagcgattcgcctgctcctgtgcagcatggtgcttccaaagcttcacatagctgtgcggttctgacgcatactcttccctcatacaaagaggagtcccgttctcgtcaacgggcaaaatcgtgcaagccgtgaaatcgattccgattccgatgatttctttcggatccgcttttgactgtttcaaaaggctcggaatcgtttcctccagcacttcaatgtaatcggccggatgctggagcgcccagtctctcggaagctttcgctttgagaccggaagctcccggtctatcaccccgtgcgtgtactctttgacagctgtcgcgatttcctcacctgtccggacatcgacgagaactgcacgccctgacaatgttccaaagtcaactccgattgtgtaagggataagtcctcacccccttaaaacttgcgaagccgatatgcagcttcactccatttgagttcattgcgaagatttaaaatcgttgtatcacgattgatcaacaccgcttcaatgcccgacatttcggcccaatcgagcatctgctcggctgtcagctggtacgaaaggcatgtatggtgagcaccgccagccaaaatccacgcttcagccgatgttctcagagacggctgaggcttccaaagtacgcgcgccaccggaagattcggcatatcatgcggaaccttcacagctcccacttcattgatgacaagcctgaaacgtccgcccaaatcaataagggagacattgaccgcaggacctgcaattccgtcaaacacgagccgcgccggatcatcctttgcacccattgacagcggatggacttcaattctcggtttgtgttcggcaatcgaagggcacacttcaagcatgtgggagccgaggatcatttcattgcccggttcaaaatggtacgtgtaatcctccataaatgacgtttcttttccgccggccatcattttcatcatcctgacaagcgcagccgttttccaatctccttctcctccgaagccatagccttcagccatcagccgctgaacagccaaacccggaagctgcttcatgccgtggaggtcttcaaaggttgtcgtaaaggccgtatagcctccgctcgaaagaaagcgctttaatccaagctcaatccgcgcctgctccttgacggattcccttgccgcttcgccttccggccactcataaagctcctcatattcggagatgagctcgcttagactctgttctgatacagcattgatctccgtgacgagatcgccgattccatatccgtcgacagaccagccaagctgaatctgcgcttcaatcttatctccttctgttaccgccacattccgcatgttgtccccaaatcgggcgactttgatatggcggctttcaatatatgcgaccgctgcgctcatccatttgtcgatcgagcgctttacttctctgtcttcccaatatccggcgattacttttcgaggaatgcccaatctcgctccgataaaaccgtattcgcggtcgccgtgggcagactgattaatattcatgaaatccatgtcgattttatcccacggaatgtcccggttaaactgggtatgaaaatggagcagcggcttattcagctcggaaaggccgggaatccacattttggccggtgaaaacgtatgcatccaggtgatgatgcctgcgcactcatcgtcccggttcgcctcttcaaacagttttctgacgccgtccagcgaagtggccaccgctttgtactcgacttgaaaccttaaatctccgtcatttaatccgttgcagatcattttggaatgctcttctacctcttgtaccgcctcttcgccatataaatgctggctgcctgtcacaaaccaaaacacatgcgtctttgcctgaatcaaatagcttcctcctcctcgtctttatggtgtctgtgtagaatagcaaactattaaaacgcttacaaaaaaacataaatcataccttgatctcaaactgtatcgcgattatatgtacgtacaactaacataaaaaacatatttgtacgaacaacttcattatatcattatgaaaaaaactgtcaatttaatttccggtatgttttttatttttttttgacagatttcagaacaaaaaaaaccgggcggaaaccgcccgtcatctgctgttaataagtcggccatccttgggaatcccagtacaagtcattgatgagcagctttgatacaccattgtccagcgcgtcgtaagcatgcctgacaaggatcgagttgttcagaacatcctgatgtcccggccctttccagcggtcattgccggagtccaggatcgtccctccgccgttcatcatatttttgccgcttttatcataatagggtcccgtaatgctcgttgaacggccataggctattttatatgtgctgtccacccctttgcagcagctgtcaaacgagacaaataagtaatagtagccgtctttgtaggtaatgttcggggcttcaaccgctcctccgttattcggccttgaggcgatcgaatacaggcttcccgtcggtttcatcgtgtttttatcaagccttgtcagcttaatgccgctccagaaggaaccgaatgagagccagggctttccgtctttgtcaatgaccagatcagggtcaatggcattaaactgatcgccggatgtcgacctgatgaccagcccgtcatcccgccattggccggatgaaatccggtctgtcgatgcgagccctatcgctgatgtgtttgaaccgaaagacgaaaccgagtagtacagccaataccggccgttatagtagctgatatccggtgcccattgatgcggttcatgatttggtacgtacatcttccaccatgacaatggagttggaaaaatactcggggcagcactccagtttctcccgtctgttgacttaatgacacgcagccctgtgccgagccctgttccaaatgtataccatgtatttccctctttaatgatagaagggtcatggatgaaattgtccccttttgtgtcccaaaacgccgctttgcctgattcaggcatcgaaaaagacagcagcagtccgaatatcaaggccgccaaagacattttccgcaacacatttttcattcagctcacactcctgttcttgtaatgaaaaaaacaatgcctccctttctttgtcaatttttcgaacaatgtttatatatgtaagcgctgtctttaacattccaaaaaacaaaaaaagctgacagcttgtaagataagctgtcagcctgctctttcatcagtcaaacgtaatgttttgaaccgtctctttatccagtcgtttaatgacttcggtaattaattttaccgcatgttcatagtcatcccggtgaagcatggccgcgtgcgtatggatatacctcgtcgcgatcgtgatcgacagggcaggcactccgttcgcggtaaggtggattgatcctgaatctgttcctccgcctgagagggcgtcaaattgatacggaatgccggcttcatctgccacattcgttacaaagtcgcgaagccctttatgggacaccattgatgcatcataaagtatgatctgcgggccttttcccattttgcttgtcgactctttttcggtaataccaggcgtatcacccgcaattcccacgtcgacaccgaaagcgatatcaggcttgatcgtatgcgcggctgttttcgcgcctctcagccctacttcctcttgtacggttccgacgccgtagacgacattcggatgatcggctcctttcaggtttttcagcacgtcgattgcgatcgcgcagccgatacggttgtcccatgctttggcaagcagcattttttcattattcatcaccgtaaattcaaagtaagggacgacctggtctcccggaagaacgccccattccatcgcttcctccctgctcgacgccccgatgtcgataaacatatctttaatatcgaccgatttttttctcgcctcctgagacaggacatgaggaggctttgaaccgatgataccggtgatgtcgcctttctttgtcacgaccgtcacacgctgcgccagcatgacctggctccaccagcctccgaccgtctgaaagcggagatagcccctgtcatcgatccgcgtaaccataaaaccgacctcatcaagatggccggcaatcataatcttcggtccgtcagcctgtccggtcttttttgcgattaagcttcccagtctgtctgtcgtaacctcgtcggcaaacggttctatgtacgatttcatgacttgtctgggttctttttcattcgccggaattccttttgcatcagttaattcctttagcatcgtcaatgtttcatcaagctttgccatctctatacagcctccttaattaaccctcatttactattatacagaaacatcccttttcaatacgaccaatatcgtttacagcttttttggttaaaaaatgaaaccttgcgggaactggttcgtatatattgggatatactcaaaattactttcaagggaggttctgttttaacatgattgtcatcatattgagactggctttgctggcgcttttggtctacgtcgtgtacagggccgttcaatttttggggagcccggacagaaggctgaaatcagcacaggcaaaaaagcacttttattttttggacgaacaaaagaatacacgcaaaaatctcaagctgacatttaaaggcgtgcttttcgaaggagaaaaacacattccttcaaaagaccatccgctgttcatccatacgatttttgtatggacggaagcgcctgaagaaaagctcagctcttttacggatgaagacttcgcggaacttgaagaaaatattaaagagcactatcccgattgcaaaatcgactgggattcgaacatccaaaagtggagaaacaaaaaagcagaagagcaataaagcctcgtctgcttttttaattcatcatataaaagccggtcaaaacagcttgcacgccgaggaaaaaaggaatgccgagcctgaaggaaaggtgttttgtcttatgtctgaaccgcatcatcccgaaccagacgcctgcggagccaaaagcagccgcaacgagccagatgcggcgctcagacaccctccatttacctctgaccgctttttgcttatcggctttcattaagaaaaaaccgtatccgtttatgaggatcatgtatatccatatgagagtcaattgttcatttcccgttgtttttcggtttgggcgcctgctgcggccggcctccccgaatcgttttacatcctgctcgaagaacaaaagaaaaaggccggagcccggccttttttcaattatttattcaattgcgctttagcagcgtctgcaagctgattgaatgcgttcagatcgtttacagcaaggtcagcaagcattttgcggtttacttcgataccggaaagcttaagaccgtgcattaaacggctgtaagaaagaccgttcatgcgcgctgcagcattgatacgagtgatccaaagtttgcggaaatcgcgctttttctgacgacggtcgcggaaagcgtagtttcctgatttcataacctgctggttagctactttatataatgtatgttttgaaccaaaataaccttttgctaatttgagaacctttttacgacgtttgcgtgtaacagttccgccttttactcttggcattagatttccctcctaattataccttttccgaaattacttaatgttggcaagctgctgcttgatgcgtttgaaatcgccggcgcttacgactgcacttttgcgaagcttgcgcttttgtttttgagatttatttgcgaacaagtgacttgtatatgcatgagaacgtttcagtttcccggaacctgtctttttaaaacgtttcgcagatccgcggtgagttttcatttttggcatggatgtttcctccttaattacttttcagttttaggcgcgagcaccaggaacatgctgcggccgtccattttcggcttcgtttcaacagtcgccacttccgcgcaggcttctgaaaaacggtccagcacgcgctgcccgatttctttatgcgtgatcgcacggcctttaaagcggatggacgctttcactttgtcccctttttgcaggaacttgatggcgttgcgaagctttgtattgaagtcgtgttcttcaataccagggctcagccgaacttcttttaagttaatgattttttgatttttgcgtgcttccttttccttcttctgctgctcgaatctgtactttccatagtccatgatccggcagacaggcggttttgcattcgctgcaaccaacacaaggtcaagatttgcgcgacccgcaatttccagtgcttcctggcgggatttgatcccaagctgatcgccattttgtccgatcaaacgaacttcacgcgcacggataccctcattaaccaattgatctttgctaataatgagccacctccatagaatctttgaattgatttcacaactcattttgaccgtttctttgcattccacaggcaaacaaaaagtgcgggcatcgaaacacccacactgcgaacattgcatagaaaaataagaaatgtacgtttaacctgccaactacaagaatgtgtcaatcaggtgagaagcgggtgcttctgcttgttgatatatattcaattcattatccatcttacataaacaaatcctgcaagtcaagatataaaatttatcacaacatttgctattatatcaggacacatttcaaatagcaatgctatttttttattttttctttcagccgctctatccgccgatcatttgaacacataacggaacgacaaacacggtcacgacgccgacgacgacaactgcaatactcgccattgccgcttcgacttcccccatttcaattccgacggcgacgccgagggcatgtcctgatgttccgagcgccaaccctttggcgatcggatgctgcactttgaagattttcaaaaaaagcgcgccgagcgcatagacgatcactgcgttaaagatgacggcgaaggccgtaatatcttgaatcccgccgatcccttttgataaaggaagagcaatcgccgttgtggcggcctggggcagcatgcttttcatgacggctccgtcaagatggagcgcgtttgcgatcagatagacgacggcaaccgagcagacggagcctgcaataatggcaccaaggatttgcagccaatactttttcaacttgtccgcctgtttatataaaggaatggcgaacgcaattgtggcgggctccaaaaagaacttaatgatgtctccgccgctcttgtagtcctcatatgaaaaaccgccgatttttaaaaacgcgatcccaagaatcatcgcgacaaacagaggcgtgaataagaaaaaaccatttgattttttaaataaaaaagtgccggtgccaaatgcggccagtgaaacgacgataccgaaataaggtgtcatagcgtaaagaacctcctattgattcaagatgctgtttttttggctggttcaactcgtgtgtcttgacggtcctttttgccgacagacagaatgaactgtgaaaacaatcctgtcgctgcaagcagaatgacggtggccaggaaaatcacgaggacgatcggcaatccgtatttctccatgacgccgagcgaattcatcactgatattcccgacggaacgaacaaaaagccgatcagcgaagtgagcgccgtgccgagcgattcaacttgttcaagcttcagcactttcgtacacagcaatgcaaacaacagcaccaaaccgatgacagatggaggaatcgggatgggcagaaccgcggcgattccgtttgaaataaacatcataacagcaaaaataaatgcctgagttaaaaagccgtattcttttttacccttcatttcgttcacctctttggctgtgttgggttcattatataaaaagagcctccccaaaaaagcgttttcaaaataacgtgccggatacggcccctcaattgcagaaatgggaagctgaaatgcaaatcactcttccggctttgcaaattcttcacaattatttaaattccagaatgtgctaatgaagctaagctgatcgtatagtggttaatgagaaattgatgaggaggccctgacccatggaccattcaagaggaggccgctttgttccgtctggcgaatttgcatctttggcaaggcgcggcttgatgcctgaagacgcttcaatcgccgcaggcgcgccccgatttgcagattatccattcaagcttggagtggcttcaggagacccgcatcccgacgggtttgtcatctggacgaggcttgcccccgatccgcttgccgaagacggattagggggaatgcctgacaaagctgtccctgttcagtgggaagtagctgaagatgaacattttcacaaagtggtgaagcgcgggacgtcctctgcgctcgctgagcttgcccactccgttcatgttgaagtgcacggtttaaagccgggaagctattattggtacaggtttaaagcgggcagggaaatcagccggacaggccgtacaaaaaccgcgcctgccccgcacgccgacatcaaggggatgtcgttcgccctcgcctcgtgccaagcttggtaccacgggtattttacggcttaccggcatatggccgaagaccatccggacgttgtttttttcctcggagactatatttacgaatatgccattaatgctaaaaatcttttccgcgatgtgactttatccgctgcccacaacgcaaaaaccgtcaccctcagccaatacagactcagatattctctttttaagacagatccggaccttcaggccattcatgcgctggctccctgggttgtgacgatggatgaccatgaggttgaaaacaattatgccggcatccattcgcaatacaacacttttccggacgattttctccggcagcgcgcagcggcgtatcaagctttctatgaaaatatcccgatccgcagcacatcgattccaaaggggcctgacatgctgatgtacaggcggttccgctatggaaacctggctgaattcaatgttttggacacccggcagtaccgcaataattttccggcaaatgaggctgaacggcttgagccatcccgctccatactcggatttgaccaggagcgctggctttttcacggcttgagccggtctgacacgatttggaactttttagtccagcaagtcgtgctggctcaaatcgaccgcgacacaggtcctggagttgagtacagcacagaccagtgggacggctttcccgcttgccgcgataggcttttttccgcatacaaggcatacggcatccaaaaccccgttgtactgacaggggatattcacagacatgccgccgccgacttaaaagcggacttcgatgatgcggggtcagcgacaatcggaaccgagctgatcacaacttcgatatcttcggacgctgacggcagcgagaccgattctttggcgccgatctggctcggaaacccgcatgtcaaactgtacaatgcacagcgcggctatgttcgctgccgcttgacgccccggcagctcgaagccgactttcaggttcttccttatatcacacgtcccggcgctccagcctcaacttatgccaagttcgccgttgaagcaggacgccccgggctccagcgcatgttttagctaaaaaacggcggtgaaagacgaattaagcccttcaccgccgctgatcattttttcacaccatatgcagccgttttttcagctctttcgcgtatgtacggctgacagggatcgtggagccgtctttcatcaggaggttgtatgtcgaattgaaccagggtttgacctgtttaatatgatccatatttgcgagaaaacttctgtgcaccctgatcaatgccgtctgcgaaagcttttgttcgagtacaaccaatgtatcgtgaaccgtgtatgcctgatcaaaagtcttcactgtgacgtgtccgccttctaacccggcgtatacgatttcatcgggatcgagcacgacgatcgattcgtcaatgctgagagccagcctgtggtggcctgcaagctgccgctcctcctgtttgccggggcgcatccttttatatttgtggattgtctgtctgattcgctcctcatcaaacggctttgtcaaataatcaatcgcatccacttcaaatgctttcagcgcatattcatcataagcggtcgcaaaaacgacagccggaggcgccgacatttttttcagccgctgcgcaatgtcaaaaccgttctcccctgacagatcgatgtccaggaagaggatatcgggtttgcgatccgccattttgtcaaacgcttcttcgatatgttcagcttcgtcaatcgcatccacttcttcagtctgctctagtaaatatctcagctcgtcccgcgcaaacatttcatcatccacgattaataccttgagcatctctgttcccctctctttcggtttgaaaaggaatcttgaaggatatctctgttcctttatcaagttcgctggcaatctgcagagcagcctggtgcccgaacaaaccggtgagccgctggttcacattgtaaagcgccgtcccatttccttcctttgaaggggcgggcgcctgccccagctgtccaagcatctccggattaattcccctgccgttgtctgacaccttcatcaaaacgccgtcccgctctctcacagcggatacttttaccgtgcataccttttgttttctcggaaatgcatggcgaagcgcgttttcaacgagcagctgcaagataaaaggagggatttccatattttcaaggccgtcctcgatatgaaaatcaatatgatacttgcccggaaatcgggcctgctccaatgataaataggcttccagatggttcagctcttttgaaagcggaatcatcagctgcctggctccctgcagattggaacgaaaataaacgctcagctgcaagagaagttttcgcgttttttccggatctgtcctgcacagagcagaaatcgtatggatggcattaaataaaaagtgcggattgacctgcgcttgaagcgccttgatttcggcatctttcaaaagcttgctttgcagctcagcctcaccgagttctagctgagtggaaaaaagcatggcaagcccttcggccagctcttccgtcacacggttaagaccggacgggtgcttgaagtacagcttcagcgtgccgattgtttcgcggttggagaagagcggcagtacgatcgccgcctgcagcggacaggaacggtgcgcacactcgatttcatcgcgcgacttcactttcatgacctttccggtttgaatgacttttttcgataaaccggtgatcagatttttcgaaggaatatgatgatctgctccatctccgacatgagcgagaatgttctctctatccgtaatcgatacggcatccgtccctgtcatgcggtgtataatgagagcggcgcttttgcaggaatcctcattcagtccccggcggaaaaaaggaagcgtctgatccgctatcgaaaataccttatgggtctgaacggcccgcgcctgttcctctttgcggataatagactgaatgatcgatagaaaaataaagctgcccgtcccgttgacaatcatcattggaatgccgatcatctgaacaagcgcaagtgcctcagcctgcggttttgcaagcacgagaatcataagcatctgcaggccctccatacaaatgcccgcaagagcggctacccgcggtgtcaccatctggtgccgattcctgaaaaagctgccgatataacccgcaatgacacctgccagcagtgaagaaaccgcgcagctcaaagccgtcgtccctcccagtgaaaaacggtgaatgcctgagagcagtccgacacccgctccgacaaacggccctccgatcaagccgccgatttcgacgccgagaattctcgtattggcaatcgagcttgacgggtcgattgcgaaaatccagtcattgttcaaaatctcgcgctcccggatttcaatgcctgtatagttgctgatgatgctgaacaaggaaaaaataaagatgagaactcccttgcccttatacccttccggatgctgtaggtgctgacggaacaccttcatatgggccaacataaagcccagaatgacgatgatccccactctctccagcatcataatcatgagttggaccatgtacttccccttgctttctttctgaatcggaatctgctcttattctatcatacctctctttattcactctttgagacggcatggctttaaaaccttttaacggccaaaaccgcttcatgagcaaaataaaaaaggcagcaattgtctgccgccgtttacttatttgctgcttcccactttgaaattaacaatcagccacacaacttgaatgatgaatggaaatataaatgcaattaacaaaacgataaatgctattaatttaagttcaggtgtttgagcaacaccagcgccatcaacatctctcagccaaacaacagctgctccgattacaaaaacggccgtccacaatatgttgcaaatccaccaaaatacccagcgttttttcacaataccattccttccatctcctcaactataaaacgattcttcctcccgcgcatgggccagcatcaccatcataaaatagatcttagaaacgttttccaaacaatagatttcgtttcattttatcatattcaagaagctttcacactttgatactgcattacatcacattcttaaatcatttctttcacatccctttgatctattgtaaaataaatgagagaattctataaattaatggcagaggagaagatgatgaaagccgtattttttgatttagacgatacattgctctgggatgaaaaaagcgtcagcacagcattttccaaaacgtgccttaaagctgaagaaaaatacggaatccatgcggaagaatttgaagcagccgtgcgcgaagcagcgcgaaagctttacatgtcttatgaaacatatccatacaccgtcatgatcggcatcaacccatttgaaggactgtggtcaaacttcagcgagccgatcagcgaagggtttcaaaaactgaacaaaattgttcccgaatacagaagaaacgcatggacaaacggattgaaggcgtttggcatcgacgatcccgccttcggggaagaactcggcgaatattttgcggcagtgcgccgaaagagcccttttgtttatgaagaaacatttgccgttttagatgagctgaaaggaaaagtagagcttcttttgctgacaaacggcgatccgagcctgcagaaagaaaagttggcaggcgtaccggaacttgctccttattttaatgaaatcgtgatttccggtgaatttggaaaaggaaagcctgatccaagcatatttgaacactgcctcaccctcctcggcatgacaaaatatgatgccgtgatggtcggagacaacttgaacaccgacattctcggggcttccagagcaggcatccaaaccgtctgggtcaaccgcaaaggcaaaaagaatgaaactgatgttgcacctgatcacgaaatcagccatttaagcgaactgttcgatatcctccgcggacaagcagcggacaagctaagcaaaaaagcatgactcccgggcgggaatcatgcttttttcttgtttatttctttgcttcagcaacggcttttttgataaagtctgcaattgcaaccgtttctgatttttgctctccgtatttgcggacgttgacggcttcgttttcaacttcctggtcgccgacgacaagcatgtaagggattttttgcatctgcgcttcacggattttatagccgattttctcgtcgcgggtatcgacttcaacgcgaagcccttcacgctgcaggcgctcttgaacttttttggcgtagtcaagatgcacagacggcgatacagggatgacctggaactgaacaggggcaagccatgtcggcaatgcgcctttatgctcctcaattaagaaagcgacaaagcgttccattgtcgatacgacacctctgtgaatgacgaccggacgatgaggttttccgtcttccccgacatatgtcagatcgaatttttcaggaagaaggaagtccagctgaacagttgacagagtttcctctttgccgattgctgttttgacctgaacgtcaagcttcggtccgtagaaggccgcttccccttcagcttcgtaataatcatggccgatctcgtccatcgcctccttcagcatcgattgcgctttgttccacatttcatcgtcatcgtagtatttctctgtatcttcagggtcgcggtaagacaagcggaatgaatactcttccagtccgaagtcttcgtatacatcctgaatcaggcggacagttcgaatgaactcgtctttgatttgatctggacggacgaaaatgtgggcgtcattcagcgtcattccgcggacgcgctgcagccctgaaagagcccctgacatttcatagcggtgcatcgttccgagctcggcgatccggatcggaagctcacggtagctgtgaatgtcgtttttataaatcatcatatggtgcggacagttcatcggacgaagcacaagtgtttcattgtccatctccatcggcgggaacatgccgtcttgataatgatcccagtggcctgatgtttcatacaggtctttgctgccgaggacaggggtgtacacgtgctcatagccgagcgcgagctctttgtcaacgatatagcgctcgatgacgcgtctgatggtcgcaccctttggcagccaaagcggcagaccctggccgactttttgcgaattggcgaacagcttcagttcttttccgagttttctgtggtcgcgttctttcgcttcctcaaggaggcgaagatgctcttcaagctcggcttttttgaagaaagccgtcccatagatgcgctggagcatcttgttgttgctgtctccgcgccagtatgcccccgcaaggctcagcagcttgaactccttgattttgcccgtcgaaggaacgtgaacaccgcggcacagatcgaagaattcgccctgctcatagatcgataccgtctcgccttccggaatcgcatcaagcagttccaatttcagatcatcgccgatttcggcaaacagggctctggcttcctctcggctgacttcttttcttacgatcggcagattttccccgacgatttttttcatttccttctcaatcttcggaaggtcttccggagtcagcgcttcttccaaatccacgtcgtagtagaagccgttttcgataaccgggccgaccccgagtttcacttttttatacaggcgcttgatcgcctgggccattaagtgtgcagtactgtggcgcatgatttcaagcgcttcttcgctgccttctgtaatgatttcgatggcgccgtcctcaaggatcggtgcgcgcagatcgatttctttgccgtttaatttccccgctatcgcttttttctttaagccgggactgattaatgccgcgatatcttctgttgtcgtcgcttttgcaaactccttaaccgctccgtcaggaaatttgatttttaccatatctgacatcctagtcactccttttttttacaaaataaaaaatccccgtccccctaagaaagggacgaggattaataaacggaattcgtggttccaccctttttcccgaaaacgcaaaaaacccggcgcgctctcggctttcggttctgtaacgggaagtcccgtcagtcattactagacaaattgccgttcacaactgatgttcaaaggcggtaaaaaaatgatccttggcataagagactttcagccatggtctccctctctgtcaaaccggtgttcatcttttcatgtccttatcaatacatgatatctttaagtttataccgtattataaattgtttttcacgcaaaatcaagaatgctcttccaaaatgttttcccgcggatgaaaggcgccaagcggaagaatccgcaccctctcctgaaaaatattttgaatggtctgaaccatggcgtgttcccggtcttctgtatagaggtctattttttccggcgcaatcgatacgagcggagccaggagatgggaatcaatatacattgggtgttctcttacgaaccgcctgtctatgtattttttttgttcccgttcagaaatatactttaattcccacaatacaaagtaaccgtcgtgcacaatgtggacatggtcaagcatcggctctttcgacatgacgtagtctctcagcgattgaatgaatgtctgatattcctgctccattttatactcgtcgatcgccgcctccacataagatctgaggcgttcataatacttcgcaaggcgaaacgtcataaatgaccgaatcgaaaagacgttttcctcaagacagatcgcttggagctcctgaatgatgtaatgttcgcgaggggtgtcgtccttgttgagaggaagcccttcaagttcgccctccataatgctgtgggccaattgaagaatctgctgctgttcatcccggtccaaaaagtaataatcgccttcaatgaccgaaagcatgtattcatcttctttgcattctgtaaaaaatctcgtcagaaccggctcaatataggcctgaatactgacagaggaatgggtcttttcaattccgatcttccctggcgcttcgtgaatcctgatatgccgattcgcatccgcattgcgaaggagatgcaaaaacgcggctgtatcataatcatcttcaaatgtaatttcaagcatgtttgtcccccctaacaacatctgttacatgtatatgggggtgacaaataaaatagacgtaaaaaaaggatgagcccttaatcgaggagcgcctgcactttttttctgaacaaaagcggcactgtaatgaatatcaggtaaattgcggctgtaaccgcaatcgctatgatgtcgccggtcaagaggcttgacccgagcacgtttaaaataatggtgcccggtatgatacccgcggccgtcgccagggcaaacgacagaggcttcactttggaaacgcctgccgcatagctgaccgcgtcaaaatgaatcggcgccagcctcaagagcaaaatgcagaaaaagccgtttttccgcaaaagcgtccgcaggctgtcgagcttcagcggcatgtgctgaaagtatccgccgagcctgtatgcaagagcgaatgataaaaatgcaccgcctgccgcaccgataaaagaatacaaagagccaaacagcggaccgaatgcgaggccgccgctgacggcgaaaacggaagcaggaagcagcaaaaacggccggatcatcaatagtccgatatagatcaacggggcgaaaatcccaaaggataagacgccttctcttatatgagcagggctcagattcaggtatttcgcattcagccatagtccggccgccgcgattacggcgattaccgtccatttggccaaggttctttttcgcatcttcttcatctccgtgattgaagctcggtgtcaaatgattactgacgccggtttttcccgtccagccggacaggcgtcgctaaatacagcaccctttccatcagccttgccgcttttacttcttctttttctcccctttgcgaataggtgaaatggtgtttcagttcatcaggatcaaagtttgaagagaaaaacgtcggcagctgctgggacattctgtgctgaaggatggcgccgagcacctcatccctcacccagcttgacatggactccgcaccgatgtcatcgagcatcagaatcggcgtagacttgaccatatcaagcttttcctcaagcgactgatcatgtatcgcatttttcagctccctgacaaattcagggacatagacgagaatggacggatgatcctttgcggcaagctcatttgcaatggcggccagcataaaggtctttccgaccccgaacttcccgtagacgtaaatgccttttccctttcccgtttcgttatagtcatgcaagaatcccgtcacaagctgaaggaccttcaatctgctcgggtcatctccgtcaatatcggcaaacgtagcattcagaagatcctgttgaatatagatgcttttaatcagcgacctctgtctttccctctcgtccgctttctttttttccggacacctatcgtattgaacatcgattgtttttccgttcagcacaagctttggatgataaccctgtatcaggtttttgcattctttcagacccgggcagtcttggcatgctttgctttgctgtgtatattcataaagcttgttaaggctcctgtcgatcattccttgatccacttctgactggcggctgtttaaaaacgcctgaacatccttgtcagagagcactttttctttcatatcttcaaggcgttttttaaaatcgggtctcgtcgtcacgccttgcaaagcgcgtttaatcggctccatcatcttgtcacctcacattaaagagcggaatggtttttcagtttttttacttcttcgagcagcttctgtttctgctggtcaaagccttctctggttgcaggatcagcctgctctgtttccagcggtttgctgtcagcatcgtcactttcccgaagccaatcaggcagcttttcttctctgatgactttcttgttccgggaagtctttttcttcccttccgcccattcaagatattggcggttttcttctttcgcaagcttcatggcctctctaaccgtacgaactttttttctggcccagtgggaagcgattttttgggtgtaatttttcgaaagcttcatatcggttttcagcatgacataataaatcagaacattgatgacgccgggctctaatttttggtcaagcataatttcttctataattttcagatcggctttggatggttccgctccgccgccaatatcctgcagcagctttcttggcgatacttgctcaagcaaagcgatcaaattgtcttccttggcgtttgtggacgactgttgattcggctgttcgcggagattcatcggctgcactttgtcgacgagttccggaagcgggccgccgcgctcgatctgataccagtcgctcgccgcttttctgagcgcctctgtcgtgatcatatcgtgttcgtcaacggctgacatgacgacgttttgcatctgaagcggttcgataccgtagagaaaggccagctttttaatcgtttccttcacttggtctgtcagcgcttttctcgggataagcgtgtcagataaaccggcgagaaacagttgaaagtcaaaggcgtcgtctgtgactgctgccggttggctattcccttctttcatccattcatgatcttcgcgaagctccatcgcttcgatcatatcgtcggacatcttccattcgctcggctggacagatgcaaaaacttcattgaaagaacgggtgatgtcccgtgcttcttcaggaacagacgggtgggaaaaatattctttcagctgctgaaacctcgcctttccgacgcggttgtacaagaagacattcagcatgccgtcctgaaagaactcgtccggtctgagcggcggaatcaattcatatataaacaaacgttcgtgttccgtttcttttatataagttttcaacagtccgatcccctcaagcttttccttttctgagtggatcgtcttcaggctggtctgcatcgccgccatcagctgtctgtgagtcgagctttttccccagactctgttttgctccagctctccccacagcgtgagaaacaagctgaacgaaaaagagccgattaaaggctgatacaatagcgtgacaatttgccggtccaagtcctgcagcaatccgctgcttttgacaacatacggatcgacaggaagcaaatctttccaataattactcatatcttttgtcaaccttccactttgtttcttgtcctcattttacacctttttcaggctttcatgtcacacgactgtgtttttgtcatgagaaaagagctggatcaatttacagctctttaccgttctttctttattaaatctttcagctcgtcgataaatacgttaatatctttaaattggcggtatactgaagcaaaccgtacatatgcgacttcgtcgattttcgcaagcctgtccatcaccatttctccgatcatgtcgcttttcacttcagaaacgccttgatttctaagctctttatcaatttcaaagcaaatatcctcaagctgcttcaaggcgacagggcgcttttcgcacgctttgatcaaaccgcggagcattttctcgcggctgaattcttcccggattccttctttttttacgacgatgagcggaatttcttccactttttcaaatgtagtaaatcgatagttgcacgattcgcattcgcgtcttctgcgaatcgatctgccttcgtcaaccggacgggagtccaaaaccctcgtcccattatgctgacatgctggacatttcattttttcagctcctattcaattgtttgaatgtacagattcctgcagctttccgtccagttcgctgtatagcgtcgagacaagcccgcggctgtagccaaaatcggtcggcaaaaacgtttcagttgacacattaaagtccaccgctgtatcaaaaggccgaatcgaaacgactgtcgccaccacaaaagcttttctcgtttttttaacttcggcgctgatttctcctctttcctccgacactgacgtcaccttgcagccgtcaaggccttccagcacttcctttacagcattgagcgcttcttttgacgccgctttataatagcggctcttcagctcttccgaaggatggcggtcagacgtttcggcgtgtgtagaaaaaaaccgttgaatgttttgaaaaagactcatatcccctgtcccctttgtctttcttctctatattttattaaaaaaatggttgatttccaagggaaaacaaaacagcaagagaatgccggggaatatggtttggggattttcgggagaggaaagaaaaaggagcggattttaaaagcggtgtccgctttttcatccagctcctctatcggcattaaagtgcctgtgctttggctttggcctgtttcacctgaacaggtcccatgcctctcggtatttcaatgttctctcttgtttccgctcttaactcttctgcgatataatcggcagctacgttcggatctaaatctccgcaagtataaacatcaatgctggcatatccgtgttcaggaaaactgtgaatggtcaagtgagattctgaaataatcacgactccgcttacaccttgaggtgcaaacttatgaaaggctacctcacgtacctcagcacctgacttcagtgccgcatttacaaacgttttttcaataaaatccatgtcattcagcttatcaaaatcgcatccccacagttcggagataacgtgacgccccattgtttccatagcatggaccccccttaacaagaattaaaaaagtgaatttccaagcaactgaaccggtcaattaccacggggaagttagtccggagaggtcctaaccctttaagtaatgccgaagcgctcacgaactagaagttcacgaaaaatagtatactttgtttgaatattttttgcaaggcggttttatcatttgatggttaaggggtatttatttttttatccgtccatgctcttattttatacagctgaggggtgtttcattcttgaagccgcgtatctgatcaaatcgacaaccctgcacgaatatccccattcattgtcataccatgcgagcactttcacctttctgttttcaagcaccattgtcgaaagactgtcgatcaccgccgagtatggattcgtattaaaatcggatgaaacgagcggttcatcgcatacatcgatgatcccggacatggagcctgccgccgccatgcggaacgcctcattaatatcctccgacgtcacatcgcttttcaaatcagccacaaggtcaacgagcgacacatttgagacgggaacgcgcagggccaggccgtgcattctaccctttaaatggggcatgacaagtgacagcgctttcgcggcgcctgtcgttgtcggaatgatcgaagatccgcaggcgcgtgccctcctcaagtctttgtgcggattatcaatatttttttgatcatttgtaaaagcgtgtacggttgtcaccaggccgttttcaatgccgaatgcatcatcaagcacttttgcgactggagcgagacaattcgtcgtacaggaagcgtttgaaataatcgtatgacgctccgcatcaaaatcgcgttcgttgacgcccatcacgattgtgatgtcttcatttttgcccggcgccgtcaaaataacttttttcgcgccggtttcaatatgtgcttccgctttttcctttgagttgaatttccccgtcgcttccacggcgatgtcgattccgtattgtgcccacggaagaagcttagggtccctctgattggtcagcatgaccttttttaccgttaacgaacaggcagtcttctccagcctttacatcaagttcataacggccgtgatttgtgtcatactttattaaatgagcgagcgtttccggagggtagctcgcattgatcgccgcaatgtcaatctgttcatcaagcatcgcttttctaaacaccattctgccgatccggccgaatccgtttatcgcaactttcactttcatcaaatatgcaccccttattttatgtcattccacatcatgatttattcaaaataagtataacacattatttttaattagccataccatttgttgctttcacagcaaatttacgcacttttgtgaaatcgtgaacaaaagactaaaaaaaatcggccctaaagcatatatttcaaatacacctttggtgctacaatttgcaacagcgctaaattttcaccgacagaaggcagtgtcttcaaggaaggacaaccatgaaactgatcaaaaacgcatcttttatcatttcttttttggctgcggccggcatttattttttattaggtacagtcgctgcttctgcggcaaacaaagattatccgaaacagatgatcaggctggaaagctcctcaggcttaaacattacgcctgccgggaatcaagacaacgcaccgctaacaacaaaacagacgagcggaaaaaaacagaaagatggaggctggatacgtctgacggcaaacagttcaaaatcagaaatatggatagcggcaaaattatcatccctgcccattacgcactgtcagacaataatcccgctgtgctctactatgacaattcacggaaggaagagttgtggaatattatcggggctgacaaagacggaaacggagactttatcacgtataaaatcgtcagtgcacaaaacaacagccttgcactgacactggacggcagcggagtgaagcttgccaaatatacaggcagctccgtccaaaagtggaagcttccaagcgacgggctcgaaggtttcgcaggctatgcaaaggaaacgaacggcaagcagaaaacaggcacaaccggcggcctgcttggaaaagtcgtctatgtcaataatctgggcgaactgaaagccaatattgaagattcaacgccccgcacaattgtcgtctccagcaatatcggcgcttcagccaaaacggtattaacggtgggcgccaataaaacaatcatcggctcgtatgaaaaacataagctgaataacatttactttaaaacaaaagcggactctggcaacgttattttcaaaaatctggtcattgcacatgatgcatccataaatgaaaacaatgacatccctgtttacattaccgattcgagaaactactggattgaccatgtcacattccaaggccacagctatacggcaaacggccacgatctcgacaagctcttatacgtcggcgctaaagccgattacgtcacactgtcgcacagcacattcacagaccacaggtacggcctgattctcggctggcctcaagatgacaagcaataccacagtatatataatggctatccgcggatgacaatcagccacagccgctttgagaatctctatgtcagggcgcccgggttgatgcgttacggctattatcacgtgaaaaacaattatatcaacaattaccaccttggcttcacgattacgacattggcgaaaatatattctgaagccaattacttcggcacgggcaatgagaaaggcatactggatgattacggagacggcgcgtttaaagatgtcgggtcatatccggcgataaaggggcagaaatcgcctgagacaagctggacaccttcatccaactacagctatcggacgatgaaggccggcaatgccaaagcttttgccaaacggtacgcaggtgcgcagcgcaccgctctgtactatgcgaattacagccagtttaaaaaagactaatcaaaaaagtgagcgcgacattgcgctcacttttcaatatttgaccatgtatcaagcagctgatgaagctgcgcttctgtatctttcagactgccgctgttatcgatcaccgcgtctgcccttttctttttttcgtcaagagattgctgggcgtgaattctgttcagcgcctcgtctttattaagccggtttcttttcatcagccgctcaagctgaagctccatcggaacccagacaacgatcactttatctgtcaaatgttcgagcccgctttcatataaaagcggaatatcgagaacaacaaaccgttcaccggcccggatggcttcgtcgcgctgcttgatcatcatttttctcacttcgggatggacgattgcatttaactgcagccttttttcttcattagcaaaaacaatttctccaagttttctccggtcgatatcgcctgtttcaagcagcacgccttcaccaaatgtctcagcgattttctgataagcgggcatcccctgttcaacggcctctttcgcgatcacgtccgcatcgacgaccgtgatgccgcactgctggaacatttgcgcgacagtgcttttgccgctggcaatccccccggttaatccgatgaccaatgtcaaaggcctgcacctccttcttacagtttccagatgccgatcataatcagcaatataccgggaagaaaggtcagtttatccatccagttccatttcgataaaaatcggcctgcctgtattccgcaaaatacgaacaatgagctcatgatgcctaccgtaatgctcatcggtacaggggaaaagcccagcgcggccgcgccgatccctgcgccgaacgcgtcaatagagagggcgaaaccgagaaggaaagcttctataccggtaatgattcctgatttatcaatgtcggcgcttgtcggttttcttaaaatgtgtatcacgattccgagcgatttcaattcaaggttaataagcgttttttcagagaagacgagatcctgttctttctccggccggaaaaactgatacagcacccatgcgccgattcccattaagatgacggctccgagcctttctgttacgacaacgggcaggaatttcgccaaaagggttccgatcatcatggcaatatacatcacggcaccagagcaaaaagcaataatcaaaatcgctttaaatgggattttcatctttcgcaatccgtaagtaaatccgactgaaaaactgtccaagctgacggcaaatgccagcagcaagaaagatgcaaacatcatatcaggctcttcctttctgttgatgcgagcagtgtaagtcatgcagcctaaaggcagctttctaggcttcttatatatatgaaagaagaaaaccatccgtgtgttgttcacccgaaaaagaaacatcacactttaaagcttgcttttaacagctatatggagcgtatgcaccgacagcttgaaccatgatacggcttgcttttgtccttctatgcgattgtcattttttctggcactttatgcaaaaatgcgtgccccttccgccaacgactgttttttcaattggagatccgcattttttacaaggttcgtctttcctgccgtaaacgaaaagtttgagctggaacatgccgatctcaccttgtgaattgatgtaagatctgactgtgcttccccctgcttcaacagcttcctttaacgtttgaatgatctctttatggagaagaaccgtctgtttttttgtgagcttgttcgctgttgcctcgggatggataccggctctgaacaaagcctcgtcgacataaatattgcccagtccgacgactgtccgctgatcgagcagcgcggttttcaccgagcggtttgttttcttcaggcgctctcttaagtaatcggctgtaaattcgctgctgaagggctcggggccgagctgcctgagaggcagctctgtcagttcctctcccggcttaaacaaatgcatggtgccgaactttctgacatcccggtagcgcagctcgcttccgtccgtgaacctgaaaatgacgtgcacatgtttatcaaggggttcatcgttttgatgaagcccgtactttccttccattctcaaatgggaaaccatgacacagtcatcaagatgaaacaacaggaattttccccttcttccgatcgactgaatcgtctggccggccaggagtcttgcgaattcctcaggctcctccggacgttttatgatttttgtccatctgacatcaaccgcatcgatcgttttccctcttacaagcccggcaagagtgcgccggaccgtttcgacttctggtaattccggcacatcatcacttccttttctctattttgcatcgtaccatgaaggccctgaagcgcagtccacttttagtggaacatcgagctccaatgcatgttccatgacttccggaaccagtttttcaagcactttgatttcatcttcaggcgcttcaaaaatcaattcgtcatgaacctgcagcagcagtttggcctggagatttttttctttcagcttgtccgccatgtcgatcatcgcttttttaataatatctgcggcgcttccctggatcggtgtgttcatcgccgtccgttcggcaaagctgcgcagattgaaattccggctcgtcaattccggtatataccgcctccggcttaaaagagtcgttacatagcctcgctgcttcgcttcctgaacggtctcttccatgtattctttgactccctggaagctgtggaaatagcgttcaataaacgctgccgcttcctttcttgtaattcccaggttttgcgacaagccgtagtcgctgattccgtagacgattccgaaattgactgctttcgcctgccttctcatcgcaggggtgacttcttcttctgatacatgaaaaacgtccatcgccgtttttgtgtgaacgtccatatcgttcgtgaacgcttcaatcaaatttttatcctttgaaatgtgggcgagaaccctcagctcgatctgtgagtaatccgccgcaaatatgagccagcctttttgcgaagggacaaacgcctgccggattttgcggccctcctcaaggcggatcggtatattttgcagattcggatcggttgagctgagccttcccgtctgtgttaaagcttgattaaagcgggtatgcactttatggctgtcttttttgatcactttcaaaagcccttctacgtatgtggactggagcttgccaatctgcctgtagtgcaggatatcttcgataatgacatgtttatcgcgcagcttttcaagcacatcggctgaagttgaatagcccgtttttgtttttttgacgacaggcagcccgagtttttcaaacaaaatcacaccgagctgctttggtgaattaatgttgaaggtttcacctgctgactcgtggatttttttctcgtattccgctaatttagcggacagttcttcacccatttttttcagtctgtcgacatcgacttggacaccgatcgattccatctcaccgagaatgtgggcgaggggcatttcgagcgcttcaaacagttcgagctgctcgttttcttccagttcatcaaggagcttttcgcgcagcagcgatatcgccttcgcctttctggctaaatggtcggcaagctccttctcatccggaaccgcctgtttcgctccttttccgtagaccgcttcatctgctgaaacgatgtgtaattgatgttctttcgcaacgcttgccacatcatcgtaggagtgccccgggttgatgatataggccgcaagaagaacgtcaaactcagcgcctttcagttcaatgccccgccagcgcaaagcgaccgccgcacgttttgcatcaaacacccatttctttttcgactcatcttcggcccattctttaaaacggtccgactgaacggccgtctcttccggaatgaagaaagcgccatgttcgttgacgatcgaaaaaccgaggatcggcgcctcgtgataattgtcgccgagctgttcgactacgagtgaagccggtgacgcaaacaagtcatccgtgatgtctgttttgatcatgacatcgatctcttccaactgttcttcttctttctctcccgcctcttcgccaatcctttcgagcaaagaatgaaagccgagatctttaaaaatcttgacgaccgcttccctgtcaaaaccttcatatccgagggaatcgaggctgacttcaagcggcgcttctgtcgtaatcgtcgcaagctctttgctcatcaaagcctgttctttaaattcttcaagcttttctttcagtttttttccgctgacttcgtctattgacgacagcagctcctctactgtatggaactgtttcaaaagcttgatcgccgtcttttcgccgactcccggcacgcctggaatattgtctgacgagtctcccatcagccctttcatatcaatgatctgttcaggggtaagtccgtacttttcccggacatgttcaggcgtatagtattcgacatctgtaatgcccttttttgtgatggcgaccgtcgttccttctgtagccagctgtgtcaggtccttgtcgccggaaaaaatcttcacttcaaatccgtctttttccgctgatttggcaagggtgccgataatatcatcggcctcgtagttttcaagctcataccttgagattctatatgcgtcgagcagctcgcggataaacggcaattgctctgacagctccggcggcgttttttgtctgccgcctttatattctttaaacgttttatgtctgaatgtcgttttccccgcatcaaaagcgacgagcatgtgggtcggtttttcctcttcaagcatcttcattaagatcgtggtaaaaccgtacaccgcgtttgtatgtatccctttttcattgctgagaagaggcagggcgaaaaacgcacggtaagccaggctgtttccgtcaaccaatactaatttttttctttcagtcatctttatcctcctaaggagccgattcgtcagcttccattcaacttcgtgatcatatttgcttattttattttagcaaagttcattttgaaaggaaaatgagagtgatttcgcagaaaaataaaaaaagggacgcgctgttgatcgcgtccgtccatatggctccttggatgaaggggttcactaatgatcctatcagccaagttttaaccatatatataaaagttgttaagcctttgtaaagtttgctaaatgaagctactcggatgcgcgttttaagcggaccgtgaattcggtgccttttccccgctcgctttcgacgtcgatttcgccttggtgggcttcgactaaatgcttgacgatcgcaagaccgagaccggttcctcctgaatttctgctcctgtctttatcgatcctgtagaaccgttcaaatatcctcgggatttcggactgcttgatcccgatgcccgtatccctcactttgacttgcactgcatcttccagaacatcagccgaaatcgtcacgcttccatcttcaggcgtatatgtgagcgcattgttcaccaaattcaaaaagatctgctttagtctgtgcgggtctccggaagcaacggccggcttatccggcttttccagtgtcaaggtgattcctttttcctccgctttattcttcaaaagcatctcaatttcggcgaggatttcaccgatattgcaattttgaatattcagggtgaagttttgctgttcgattttcgacagatccaacaggtcctggatcaaggtttgcagacggctgctctcttttaagatgatcgatagaaactgcaacagcgtctcccgttcgttcatcgctccgtccagaagcgtttcggtgaaccctttgattgatgtaatcggcgttttcagctcatgggagacattggcgacaaagtccttcctcatttcttcaagctgctttctttccgtcatgtcatggaaaacgagaacgatgcctttccactcatcattgatgccgataatcggaaccccgtcgacttcaaaataccttctttcaattttgatcggcagtttaaacattttgcggacctttgtttccgtcataaaaatttcttcaatgagattaatgatctcttcgtgttcgagcacttcgtgatagaaatggtaaagaagctgatcggcttctacgtgaaattgcttttgataagcgcggttcacaaggtgaatataaccctttccgtcgattaagatcagaccggaatcgatattttcgatgacggtttgcagacggtcgcgctgcatttcctgggctcttgtcatgtcctgcaggttctgcgccagcatattgatggactggctcagcatcgtttcatcttcgttgaatgttcttgctttatagtttcctttggcaagctcaatcgccacttgtgtcgcagactcaatcggattcgtatattgagaggttattctcgccccaagcccggcgatgattaaaaaggccgttccaaggctcacgccgaggagaatccagatcttttgattgatgtcttgcaatgaatcgacaggagtgctgatcagaatatatccattcacattcccgtcatctttgagcggctgcacgtaacggtaaacggactcgtcatcagggttgatcctgaagcctcctccttcaccgtttaaatccgactcaagcgcttccttgataacggattgctcttcggcgcggcccccaaaatgaaaaagaacctgaccttttgtatcaataagcgatacacgactgtccagttcacggcttgccttctctaaaatagctccttgctccgaagacttcatgttttcaccatttgccaatgaagcgaccaaagcggcctctttttcaatatggctgctcagtttggcatcgtaagaggagtgaaacaagtgaacgagcagaaaaccgagtgaagcaaatacgagaatcaaaagcgtcagcagggcagctaaaagccgggtccggaatttaatcattcagtttcggctcctccattttgtagccaagacctctgattgttttaatgtattccggtttttttgtatttttttcgatcttatcgcgaaggtggctgatgtggacatcgacgatgcgcgtatcgcccgcgaagtcgtagttccagacagcgttgaggagaaggtctctcgtcagcaccctccctttatgccttcccaaatataagagaagttcgaattccttcggcgtcagctcgaggcgttcgttttgaaaataaacctcataatgttcaggcagtattttcagttcgcctatgatcagctcgcctgcatccggttcttccgtctcctccggctgaacggacagcgtctgtgttcttcttaaaatcgctttgacccttgccgtcacctctctcgggctgaacggctttgtcatatagtcatcggcacccagctcgagaccgagcactttatcaaattcatcatcctttgcggtcagcatcaaaatcggatacatcagcttcttctgtctgagttccttgcatacttcaatgccgtccattttaggaagcatcagatcgagcacgatcagatccggcttctcttcaatcgcctttaataagccggcctctccgtccatggcggtcaccacatgatagcccgaccgttcaaggttatattttagaagggtaacaatcgattcctcatcatctacaactaatatctttttgctcatgacatgcctccaggcttcagatttccccgacatctctttctctatcttttgttaaataaacgttttcactcctattttaacgaaagcctatccgttcgacaatttgatttttcagtgttttgcttaaaatctctctttttcggccataagccgctgttttaagtgatggaatccccatgcagccagcggcctccatcaaaaagaatgaaaatgtccgggcagatgattatgattaggtatatgctgacagcccgtgtttatgtcttgtttcataccgtcttatgtaaaaggttcgcattcaaaaacaggaaggcttgtataaagccttcctgccgtgtttattatgataatactttcatgacgtttttgactgattcaatggatttatcgagctgacttttttcggtttcagtcagttcaagttcaatgatctgttcaagaccgtttccgccgataatcgtcggaacgccgagataaatgccttcatagccgtattcgccttcaaggtaggcaatggtcggcagcacgcggcgctggtcttttaagattgcttcaaccatttctgtcagggaagcggccggcgcatagtacgcgcttccgtttcctaacaggttgacaatttctcccccgccttttctcgttctttcaacaatcgcatcgatccggtctttcggaagaagcgtttcaagcggaatgccgcctgcataagagtagcgaacgagcggaaccatatcgtccccgtgtccgcccagtacaaaacctgtaatgtctttgacggaaaggttgagctcctgagcgacaaacgttctgaatcttgccgtatccaaaattcccgactggccgatgacccgctctttcgggaagcccgattctttatagacggcgtatgtcatcgcatctacagggtttgtcagaacgatgatgatacaatcaggtgagtatttaacaacttccttcgttacgctcctcatgatcttttcatttgtagccacgaggtcgtcccggctcattcccggctttcttgcgatccccgccgtgatgacgacgatatctgaaccagccgtatcttcatagtttgccgttcctgtaatattcgcgtcaaatccttggacagggctcgcttccagcatatcgagcgctttcccttttgtagggttttcaagctgcggaatgtcgactagcacgacatcagccaattctttttgagccgttaaaaacgcagttgttgcacctgtaaaacccgctccgatgacagatactttatttcgcttctttcccattttttctaccccttttaattgttgtttgttttaccccaaaacagccgtttaagacatgtttttgataagctcatcaccgaattcagagcatttgacttcagtcgcgccgtccatcaaacgagcgaaatcgtatgtgacgactttggatgcgattgttttctccattgatttaatgacaaggtcggccgcctcattccagcccaaatgctcaagaagcagcacgccggataggatgactgaagacgggtttactttgtcgaggccggcgtatttaggcgctgtaccatgtgtcgcctcaaagatggcatgtcctgtctcatagttgatgtttgctccaggtgcgatgccgattccgccgacttgggcagccagcgcatctgaaatgtagtccccgttcaggttcattgtcgccacaacgtcaaactcggcaggacgtgtcagaatctgctgcaggaagatgtcggcgatgctgtctttgatgatgattttgccggcagcttcagcttcgctttgcgctttgtttgcagcgtctttgccgtctttttcagcgatgcggtcgtattcggcccaagtgaatactttatcgccgaattctttttcagccacttcatagccccagtttttaaaggcgccttccgtgaatttcatgatgtttcctttatggacgagcgtcacagatttgcggtcgtgctcgatcgcatactcgatcgcagctctgacaagccttgatgttccttcttcagaaaccggcttgatgccgatgcctgatgtttcagggaagcggattttgttaacgccaagctcgtttttcaggaatgaaatcagcttttgcacttcttcagagcctttcgcgtactcgatgccggcgtagatatcttcagtattctcacggaagatgaccatgtccgtatcttcagggcgcttaaccggtgaaggaacgcctgtgaaatagcggacaggacgcaggcatgtaaacaagtcaagctcttgtctgagcgctacgtttaatgagcggattcccccgcctacaggagttgttaaaggacctttaatcgcgatcaggtattcgcggatcgtatcaagcgtttcttccggaagccattcgccggttttgttgtacgctttttccccggcgtagacttctttccaagtgattttcttttcgccgttatacgctttctccacagccgcttcaagaaccctggaagccgctctccaaatatcaggacctgttccgtccccttcaataaacgggatgaccgggttgtttggaacgtttaatactccgccggagactgtaattttttcgccttgtgccacaataaaacctcccataatatgtaattcttcaatatagaaaaacatttgtttcccccgtttggcgggggacaaacatgttttttcatagattcattaattcattgcttccatagaaaagccgttgagaggccggccgaacgaagctcgagcagcctcttttcaaacggtcagcttctttcttcaatcggaatgaacgtctgcatgtcagggccggtgtagtcagcccgcggacgaatcaggcggttattttcatactgttcaagaatgtgagcgagccagcctgataccctgctgatcgcaaaaatcggcgtaaacagatcatggtcgattcctaagctatgataaaccgacgcagaataaaagtctacgtttggcggcagctttttctgagacgtgacgatttcctcagtccgctctgaaatctcataccatttgctttcacccgttaaattcgtcaaacgcctgctcatttccttcaaatgttttgcgcggggatcgccctggcggtatacgcggtggccgaaccccatgatcttttctttcttttcaagcttggcgtgaatatatgaatctacgttttcaacctcgccaatctctgaaagcattttcataactgcttcgtttgctccgccgtgaagcggacctttcaaggctccgattgcggccgttatccctgagtaaacgtctgaaagcgtcgcgacgcatactctggctgtgaacgtagatgcgttcagctcatgatccgcatgaaggatcaaagctttgtcaaacgcttccacttcgacaggtgaaggttcttttccattcagcatgtagagaaagttggctgcaaagccgagttccggattcggctcaatcggctcaagccctttgcggattcttgaaaaagcagcgacaagcgcaggcatcttcgcttggagacgcaccgcttttctgtagtttgcttccgcatccatttgatctgcttcttcgtcaaacagcccgagtaaagaaacggctgtccgaagagctgccatcgggtggacttttccattcgggtaggatttgaaatggtcaatgacttctttggggataccggcattttcagaaagctgttttttaagctcggcaagctcctctttgttcggcagctttaaatgccaaagcagataaacaacttcttcaaagctagctttttctgtcaaatcatcgatgttataccctacatatgtaagagtatcatcaataattgaacttactgatgatgtagtggcgactaccccttcaaggccgcgtgttgctgtcatactcatctctccctttttttaaaatttccccttttaaaattaaaccaaaacccaggagcaaaaacaacgcatgatgtatacatcttctttaatccaaaaagaaaatgcttacattaaatcgtttttcaaataaaacaatcgtgcgtttctatataccgttcgatactccgatatgcttaataaagattaagcatatttatattataaacaattatcagacatttgttaaatgtttaactattagtttttttttctttattttttggcccagcttacttctatttacagattcttagtagttttaactgtattatttatattcaattatgttttttaaaaaaatacggggccgaaatttttttagtagcgaaagtttttttcaaactaaaaaaccccctgaaacagggggaccgcgcacatttctaagatgtgaaatgctggacggcctgcatgacaagataggcaatcccggcaccgatcagcgggccgacggcaacgcctttgaataaagcgaccgctaaaatcgttccaaatacaagagcggtcgtgatatgcgggtcttctgcaagcaatgtgatcccgtttttggcgatcaatgctacgagaatgcccgctccgagtgcaatccatgcgtaatatgacttcatcgcttcgccaagctgtttaaagccgatctctcctgttgcgatcggcacaagaaccgcaattgtaataacggtaacgccccagttgatccctttggattggatggctggaaacagcttttgatcgaggccgatcagcttgatcaaaagcaggacggatacagcgatgatcaacgactgatttttcgcgattaaagcgatggccaaaagcaggatcaaaaataaattagcttgagtaaacatgctgtattcaactccatttttttatgacctttctcataataacaggactcaagaataaaatgaaataaggacatgctttctaatatcaggaggatgcagaattgaaccaatcctatctcacagctgcgcttcgggcagtgtatgtgctgtttttgaccgctgtttgcggagcggtcggctactactcttttccgttaacctatccttttgtgattgcgcttattctcgccatcatgatcaatccttttgtggaatggctcgataagctgaccgggttcccgagaggcgtcaatgtcggaatcgttctgttcggctttttgaccgccggagccggctttttgacactggtcgttgccgagatcgtctctggaacggcctatttggctaaaatacttcccctccagtttaataaagccgctctttatatcgaatcgttttttacgaatcaaatcatgccgctgtataatgagctggccgctttttttgacggccttgaagccgcccagcaggaatcgatcattacacaggtccaaaatttgggcagtgaactcgcttcaggcacggctttattgctttcaaaaattcttgagacggtgcccctttttttcgcctttctgccgaatatggcggccgtgctgatcttttcgctcctggccactttttttatcagcaaagatctgcataaaatacaaaacaaggcacggtctgttcttcctgatcgtctgatctcgggtgcagcggctgtctatgcagaattgaaaagagcactggcaggctttgtgaaggcccagcttacccttgtggcgatgacgatggtgctcgtgttgatcgggctttccgtgttgaaggtcaatcatgctgtggcgatcgcttttctgatcgggctggtcgacctgctgccgtatttgggaacagggtctgtatttgtgccgtggattgtctatttagcagcggccaaacagctgccgctggcgatcggccttggaattctgtacatcgtcgtacttgtcttcaggcagcttgccgaaccgaagattttaagccggtcaatcggacttcaccctttgggaacattaatcgcgctgtttgccggtttcaaattgtttggctttctcggattgatcatgggccccgcccttctcgttcttattcaggctctctttacaacaggtatttttagagacatatggctgtttattaaaggaaatgaaaaataagcggcagcctgcttttccatgcgggctgccgcttatcgggttatttgataatgttgatccgcctgccttcagacattctcttcagcttgcgggagataaatggtttgaaacggccgcgcgttgccggcagcagcagcagtaaaccgatgatatccgataaaaaaccgggcaacaaaagcagcatgccccctatgaaaatacaaagcccgtccaaaatcgcggccccaggcatctttccgtactgaagatcgcgctggactttgtagtagacttcgattccttgttttttggcgagagcggccccgagaaagcccgtcaaaatgatcagcaaaacggtcggcagcacaccgatccaattagcggacaagaggaacagaccgatttcactcgctggaaaaatgacgagaaataataagaaaaacttcatttttttcacctcataattctaaattggaagcgaacggccgccctattttcttgtgccgcctgcaaaaaaagaagggaaagcttcccttcttccagcgtgttgtcaaaccctcgcattcgttgtcaggcctgcgcgtcagtgctcacgaattccaacattcgctccgctccgatgctcggccttcctagactgcaagggttttcaatcacgctgaattgaaggatgacaaaatcctaaaactgaaaaacattttaggattttgtcataaatctaaaagaagggaaaagcttcccttcttcttcaataagcgattaaagcacgcttgcacgtcctttgtaaacagctccgcgggcggagtcgaccgtgatgtcttctccctctttcagaatggaagtcgcattttccattccgacgatgacagggatgccaaggcttaagcctacgactgccgcgtggcttgttaagccgccttcttccgtaatcagcgcagccgctttttcaagggatgccatcatgtcacgatccgtgctttttgtaactaaaacggcgccatctttcatttttttggccgcttcttgtgcgttttgagcgatgaccacttcaccaaacgcggatttgcgtccgatgccctggccttttgcgaccacgtctccgacaacatacactttcatcaagtttgttgtaccggcttcaccgacagctccggccgtgataacgatcaagtcgccgtggcgtacgatgcctgtatcgagtgatttttgcaccgctttttcaagcatttcgtcagtggagctgtggttttgtccgcttgttgcgaaaacgccaaacacaagtgacagctttcttgacaccgcatcgtttaccgtaactgcaacaatcggcgcctgcgggcgatatttggaaatcattctcgccgtatggccgctttccgtcggtgtgacgatggcattcacatcaaggttgattgccgtatgcgccacagattggccgatcgcatccgtaattgacatgctgacttgcttgcttcgtgcggaaaggatttttttatggttgagcgcttcttctgaacgggaagcgatattgtgcatcgtctgaacggcttcaacaggataatttcccgctgccgtttcacctgaaagcatgattgcgtcagttccgtcaaagatcgcattggcaacgtcgctcgcttccgcgcgtgtcggacgcggattgcgctgcatgctgtcgagcatttgggtagccgtgatgacaggcttgccaagcgcattgcattttttgatcagttctttttgaacgagcggcacttcttcggcagggatttctacacccaggtctccacgcgcaaccatcagaccgtctgatacttcaagaatggcatcgatgttgtcaacgccttcctggttttcgatttttggaatgatttgaatatctgccgcattgtgctcttcaagaagttcgcggatttcaaggacatccgacggacggcgcacaaaggatgccgcgatgaaatcaacgccctgctcgatgccgaatacgatgtcgtttgcatctttttccgtaattcccggaagattgacgctgacgcccggcacattcacgccttttttgtttttcaacgttccgctgttcatcactttcgtgacgatttcacgcttgtccttgtttatgtcagtgacttcaagtccgatcaatccatcgtcaagcaaaatcgttgaaccgactgacacatcgtgaatcaacccatcatatgtaactgagattttatcaggcgtaccgatggcttcgtccattgaaacgatcagctgagaacccgctgccagttcgatcgaaccgttttccattgtgtgcgtgcggatttcaggccctttcgtgtcaagaaggatgccgatatcttttcccagcttgccggctgcttcacgaatgtttttaattcttgcgccgtgctcttcgaaatctccatgggaaaagttcaggcgcgccacgttcattccggcttccatcagctgggtgagcttttcaacactttcgctggccggtccaattgtacaaactattttagtctttctcatattgcttcctcctcgggttttacactagattgacagttcttgagacaagcggtacatgctttgatcaattgtatgtttttgctcgagtatttcaatgatatcatgatgcacaagctggttattttgaattcctacacaacgtccgccttttccttcaagaagcagttcaaccgcaaatgcccctagacggcttgccaatacgcggtctgctgcagtcggggaaccgccgcgctggatatgtccaagcaccgatactctagtttcgagatttgtggcttcttcaattctttttccgaattcaacgccgctgccgacgccttccgccacaatgatgatgctgtgtttcttgccgcgctcatgccctcttttcagccttgcaataatttcttccatatcgtagtcggcttcaggaatcaaaatggattccgcgcctccggccaaacctgaccataaagcaatgtccccggcatggcggcccattacttcaatcacgtatgtacgttcatgggatgtagctgtatccctgattttatcgatggcgtcgataacggtatttagcgccgtatcgaatccgatcgtcagatctgtgcctgggatgtcattgtcgatcgttcccggcactcccacacaaggaaaaccgtgttctgtgagctttttggctcccatataagaaccgtcgccgccaatgacgactaatccttctataccatatttttttaaattcgctattcctttttcccgtccttctaccgttttaaactcaggacaccttgctgtatatagcttcgttcctccgcggtgaatgatatctccgacagaaccgatttcaagcttttctatttttccgctgattaaacctgaatacccgttgtaaattccgtatacttctacgtcatggtagatcgctttcctgacaaccgcgcggaccgccgcgttcattcccggggaatctccgccgcttgtcaatactccgatacgtttcatctttttcacctcgaaaacatatataatttaccttaacacgttcattgccgctaaaacaatgaaaaagggatgaaagttttccgaaaatccctataaaaccttactcattatacaattaaacaaaaagtttttaaaataaattttaagcaaactctttgaaaaatcgcgggcggcagacacaatcctttcacttttcaccttcacccataaaaaataaacgtgagccaaaggcctcacgtttatttattttatcccaacatattggttttcagtcgaaatttttccaattgacttatacttgttatatctttgttggatcagctcgttcttatccagtttcagcagggatttaagctcgcctttcagcgcttcgtcgatgtaggcagcctgctgctccacatcgcggtgtgctccgcctcttacttcttttataacatgatctataatatccaattctttaaggtccggagcggtgattttcattgtttctgccgcttttttcgcgagtcctgaatccttccagaggatagcagcagctccctcgggagagatcaccgaataagttgagttttccagcatcaataagcggtttgcgacgccgagcgcaagcgctcccccgctgccgccttccccgatgacgatcgagatgaccggcacggagagtcccgccatttcaaaaagattcttggcaatcgcttcgctttgcccccgctcttcagctgctttgcccgggtatgctccttttgtatcaataaagcagatgatcggcctgttaaatttgtcggcctgcttcatcagcctgagcgctttgcggtagccttcaggatgcggcattccgaaattgcggcggatgttttcttttgtatccttgccgcgctgctgaccgattactgtcacaggaagaccccggaacttggcaattccgccgacaattgcttcatcatcaccgaaataacgatctccgtggcattcaaaaaaatcggtaaagagatgttcgatataatcgagcgttgtcggacggttcgggtgccttgcaatctggactctgtcccaggctttcagatttgtataaatgtcttcttcaagcctttcaagacgagcttcaagcttcgtaatttcagagctcaaatccatatcggaatcctgtgtgaactttttcaattcggagatcttttcacgcagttcgaccaccggtttttcaaattctaattctccagccactcgagatcacctccagtttggtgcattttcaaaatgctgccgagcgtttttttcatgtcagctctgtgaacgacggaatcaagctggccatgctttaacagaaattccgcagtctgaaaatcctcgggcagttcttcacggatggtttgttcgataattcttcttccggcaaagccgatcagcgcgcccggttcggcaaggttgtaatcgccgagggatgcgaagcttgcggatacgccgcctgttgtcggatgcgtcatcactgaaatgatcaagccctgctcttcgctgaacagcttcaaagcggagcttgttttagccatttgcatcaagctgagaaggccttcctgcattcttgcaccgcctgatgcggtaaaaatgatgaaaggtactttttcttctcttgccttttcgattgcaagcgtaattttttcgccaacgacagatcccatgcttcccattctgaaagatgaatccatcacggccacgaccgccggagatccgtcaatcgtccctttcccggtaacaaccgcttcattcagcgacgttttttcccggtctttttgcaatttttcaaggtatcccgggaactccagcgggttttcagacatcatatcctgattgaattcttcaaaggagccatcgtccagcaggctttttatacgctgcttcgcgttcatttgaagatggtaaccgcaattcatgcagacccttaaatttttatccagctcttttgtgagcatgatttttttacaatccgggcactttgtcatgatcccttccggtacatcttgcttcgctgattccgcgggaacggaagcgtatttttttttctttttgctgaatatatcttttaacaaaagattacctcccttttctgaagggttttcttcatgtatgcctgtcctgtttatagactagaacatcactataccgaaactattgtactttttttgtcaaacggtgtcatcctcaattcgacatttttgaccggcaaacagccgaatcgcactttatgcggttagagactgacaaattgatatatcagccttgagagcggatacaaaagtccggaaaagcgatttgaaaaaaattttcacagcccgaatatttccttacaagtgtccccaataagaggaaaaaccgaacatcatattcgataaacagcgcgtgacggctctttaggccagagcaatcacgcgctgatcaaaaatggacttttatttcccttcaatcactgcaagctttcttgttttttcagcgacttcttctggattgacatcgattcgtgcaacgcctgtttccatcgcggctttggctaccgctttggcaacagctggtgcgacccttggatcgaacggagccggaatgacatattcaggtctcagctcttcgtcggaaacgagtgacgcgatcgcctcaaccgcggcgattttcatctcctcgttgatatgtgtcgcgcggacgtcgagcgccccgcggaagatgccaggaaaagcgagaacgttgttcacttggttagggaagtcagagcgtcccgttccaacgacgcttgctccggcttcatgcgcttcggcaggcatgatctcaggatttggattcgccatggcgaagatgatcggtttgtcagccatgctttcaaccatttcttttgtcagagcgccttcgacggaaaccccgataaagacatcggcgtctttgatcacgtctttgagcgaaccgtctatgcggtttttgttcgtatattttgcgacttcttctttaactgcgttcatgccgttcggacggccttcgtagatcgcgcctttcgtgtcgcacatgatgatgtcgcgcacgccgaaatgataaagaagcttaatgatggcaattcccgctgcgccggcgccgttcgccacaactttgacggaagacatcgttttgccggacagcttaagcgcattgacgagaccggctaccgttacgattgctgtaccgtgctggtcatcgtgaaacaccggaattttcgtttcttttttgaggcgttcttcaatgacaaaacagtttggagctgcaatgtcttcaaggttgacgccgccgaatgtcggctcaagcagcttgaccgtctcaacaattttatcgacatcagatgtatttaaacagattgggaaagcgtccacaccggcaaagcttttgaaaagaaccgcttttccttccatcacagggagggcggcttcagggccgatattgccgaggccgagcacagccgttccgtccgagacgactgctaccatgtttcccttcattgtataatcatatactttgctgttatcatcgtaaatcgctttgcagggttcagccacacccggagaatatgcaaggcttaaatcgtccgcattgcgaacctgcacttttgattttgattccaatttgccctggtttactttgtgcatatgcagtgctttttctttcaatgacatgttaacaaacactccttcaagggaattttgccaaaaactttgcttcgttttctgcttaagattcttgtaagacgaaccccagaatcttaaaaatgataacacaactgaccgcatttttgatcaaaaatgctcaggatacctgctatctgagcacgacatttttctcacctacaacgcttttaagcctgtatagagcagcgtgatcagccttgatattatagctttccggcagctgcatcgtctgcttccgtttttcataatagacgcagaccggcgtttcccctttgtgttcaagcaggatgctgctgatcttcttgaaaatatcgtgggtgtgctggctttcctccactttaatatagacggacggctgctttttcgcatgaagcgattcgacgagcgatgccccggaaataatcagctggcgtttttcattccttgtctcaaggcgtccttctgcaaaaagcgatacgccttcttccaggatcggggaaagctgcctgaactgttcaggaaaaacaaccgcctccatttccccgctttcatcgctcagctccagaaaagccatcgtctgtcccgtttttgtgcggatcgtcttcatcctcgtcaaaagtccgcccagagccgcttttttgcggccggaggcgagcagctgaataatcggcagcgcacctgcacggtccagtttcttgcggtggacgctcagcggatggtcagaaaagtaaatgccaagcgtttccttctcgtgtgccagcaggtcgacgagcggcatttcctccgtctcggcgtacttcggcttgattgtcaagccttcatcgagaaagaagcctagctgatcattgtctcctgcaaacaattcggcatgctccagcgcgacatcgacagaagcgagcaaagtagcccggttttcaccgaattcatccattgctccggcaaaaattaaggcttcaatcgttttccgatttacgcttttcacagaagtcctcacacaaaaatcaaacaaatctgcgaacggcttttcttttctggctctgtagatctcttttacagccgctatcccgacgcctttaacagctcttaaactgtagcgcagcgccccgttttccacgacaaacggatagccgctcttattgatggaaggacctagaacattcagccctttcccttttgcttcatagatgtactgagcaagcttttcctcatttccgatcgcactcgtcaagaggccgcacataaagtagaggggataatgcgcttttaaataagcgagctggtagccgatcatgctgtatgcaacggcatggctccggttaaaaccgtaattggcgaatttcacaatcagatcgtatacttcattagccgcctgtacggaatatccttttttcaaacatccactaataaaatgatttctctctgtatcgagaatttccttgttttttttgccgaccgcccttcgcaaaaggtcggcttctccaagcctgaaacccgccatccgggatgcgatcatcatgatttgttcctgataaacgatcacgccgtacgtatctttcaggatatcggccaaatcctcgtgcggataagacacaggaacccgtccgtgcttcctttcgatatacagcgggatgttttccatcgggcccgggcggtacaaggcattgacggcgacaatatcttcaaggctcgatggcttgagcctttttaaaacgtttctcatgccggctgattcgagctggaaaatacctgtcgtatctccttcagccagcagcttaaacgtctgttcatcatcatagggaatcgccgagaaatcgatagtgacccgctcgcttttttcgatcagcgttttgatcgattcaatgagcgttaaattgcgcaagccgagaaaatccattttcaaaagtcccaagtcttcgagatagcccatcgaatattgcgttaaatatacgccgccatgaccttcctgtaccggtatgatattcgtcagcggctcctcgctcaatacgacgccagccgcatgaatggacgtatgccggggaagcccttcgattttctgcgccgttttaaatatgtcctgaagcttttttgagccgtttaggcgcttgtcaagttcaggtgaaagtgctctcgcctctttcagcgtcactccgggtttggagggaatcagcttcgccagctggtcggcttctttcggactgatgcccatcaccctcccgacgtctcggagcgccgcttttgcggccaatgtaccgaacgtggttatttgtgctacgtgcagtgccccgtacttatttttcacgtactgaataacttcatcccttctcgtatcgggaaaatcgatatcgatatcgggcatgctgatgcgctccggatttaaaaaccgttcaaacagcaatttgtgcttaagcggatcgacatctgtgataaacagcgtataagcgacgagagaaccggccgccgatccgcgccccggccctgtgataatgccgttatcgtgggcgaacttcatgaaatcccagacgatcaaaaaatagtcgctgaaagccatgtcgcgaatcactttcagctcatacttaagccgctcgacatactccttcggagcggcttcgaaccgttttttcagtccgagaaagcaaagctcggccaaataatcgtcggcattcttgccggaaggcgccggatatttcggcaggcgcgtctggccaaggctcaggtccacctggcatcggtccgcgattttgactgtattctccaacgcgtccggacgatctctgtaaatgtccagcatttcagcgggcggcttgagctcaagatgcagatctccttcggccttcatgtcttcgttcagcttctcgcccgctttaatcgcttttaaacacgtgtaagctgccgcgtcctccttttcgatgtagcgtacatcgccggttgcggcaatcggaattcccgtatgttcgcttagctctaaaatgcgttcagaaagaagcgggtctcccttgtacggctgatacgacaaatagaagctgccctctccaaagatcgaaaggcagcggagggcagcgtccttcgcctcttcgatcagcccttctttcaacagcgcttcaacatggcttgtcccgcccgttgtcagcgcgatgaggccttcatgatagcttttgagccatttttccttgatgccggtttttgattttgactgcaacacgctgctgattttcagcaggttttgatagcctttgtttgttttcgccaaaagaacgagcggatatgatagctgctctttttcatctgttaaaacagaagccgtcagcccgataatcggcttgatgccgcgttttttgcatgatttataaaattccaccgccccgtacatgacctcgtcatccgtcagcgccattgcgctgtagcccagctctttggctttggccgtgagatcctctacggaagcggcgctgtttaataagctgtaaccgctatgtacttgcaggtgaacaaaaggcatttctgtcaccccttcctttttcgagccgtctcttttcattatatgatgggatcgaatgagaaacaaatgttctttctttgatcaacaatcatacttgtctttctttatccatatagtgtgataaggtgaggtgatcggaatggatcctgaacagccctttttcccaaactttatcagctgttattttattgcgcttggagtgcttctcggcggttgtttaatcggggggatcggcgcctatctgtcggggcagccgcctttaacgatcattacaagtctcgcaaaccgcctgaaaatctgggcgctggttgcggcaatcggcggcacgtttgatgcggtctacagctttgaaaggggcattatcgaaggcaatacgagagacatcgtaaaacagcttctcctgattctttcggcgatgggaggagcgcagaccggttatctgatcatcaactggctcacacaggagcatatttcctcatgagaatccctccatattataaaaagcctgggtggcagcgtttttttgcgggaatgatgtgcggagccatcatcagctggttcgtgttcctgtttacatacggaacctttcaggagaagcaggtcgtcttgatcagggaacagaaagagcgcatcaatgatttaaatgaccagatcaccatttaccgcgaggatctgcataagctgaatgaagacaataaaagaaaactgctgattcaaagcgtcgacgtcaagctgatcaacggcaagcaatacaagctgtcacagccggacatgatgaactttgaggagcatatccgggataacatttcagatgtcattacaaaggatatcgaaagcgtctaccggacgaaggagcttttaaagcggacgattgaaaataaagagtatacgataaacgataaaaagtacaaggcgaaagtcaccgaactgacgatttatacgcggctttccgttgaaatcaaaatctctttttccgaataaaaattatggatttttttttacgattcacatgcattcgtcgcttttttccatattttaatttaaactgacagtaagcgatatgtaagtttttttaaaaaggaggaaagcagaatgtacatttacagttaccatcagctggcaagagataaagtcaaccggatcaagctgggctactcggcttatgcggaaactgaaagtctcgcgtcccttatcaaaaaagagttaaaggcccaaaacatccatgtttatgaggatgtaacagatatcggatcatggtttatacctgaataaacagcagctgtcgtgcgtaaaatgatccgcttacactttgctgctgtttacttttttgcaagatgtaatgcaaacgtttgcagttaaactgcacaaaaaagagggacttcccctcttatttgttttctttgcatatacgctccaggtcagcgatgacaagatcagcgtctttccagtcatagatggaagcgccggctgcgagcggatggcccccgccgttgtattttttagcgacttcattgacaatcggcccctttgaacgaagccttaccctgatttgatcggcttcctccacaaaaaacacccatgctttgatccccgaaatattgccgagcgtgctgacaagctgtgaagcttcagacggcgtaatattgtattgatgtaaaatatcgcgggtgatgaaaaccgacgcaacaccgttttcggacagagaaacattctggtaaatatagccgttcagcctcacaacatttaatttcgtctcatataattgatcaaaaagcgcctgggaagaaaaaggatactcgatcagctctccggcatatttcaatgtcttttttgtcgtgttcggaaataagaagcgccctgtatcccccacaatgccggcatagatcagttcggcgccctttgttggaagcgcccatcccgcttgttctttacccgctaaatacagttcgtaaatcatctcgctcgtcgagctcgcactcgtatccacccataaaaggtcgccgtaccggtcttcattcggatggtggtcgattttgatcagcttgtcgcccaggttgtagcgcgaatctgaaattctcgcttgatttgccgtgtcgcaaacgatgacaagtgcattttcatacaccgggtcttcaatcacatctggggtatacaaaaaagcgagagaaggttcaggagctccgaccgcgaaaatatttttttcggggtaggttgccctcaggatttccgtaaggccgcattgggatccgtaggcgtcaggatccggtctcacatgtctatgtataatgatcgtgtcatataatgatatggttctgatgatttcttttttcatgacgcgccccttctttactttgtttttaaccattaaatcataatctgttgttggtggaaagtgaaagttatgactttttattgtagaaagcgaacccgattatgtatacaatgggtttgtaaaacttacaatggaggatgtcgattatgccgttttttgttttttttattgtggtttcagcgatagcttatgtgtacttcaaagtaaggtatgtgcgcaccaaaaaaacggttgaacgggaatactattcggccaagtcaagcatgagtctgggcctgtttatcatgttcttcggcgccaatcagctgattttaaaccgcggcacgctggctgtcgtcatcggcgttatttttatgctgaccgggctcgggagcatgtgggccggctacaaggcctataagcactatgtccctttgcttgcgaaagaaaacgaacgggagaacgcataagcgaaaagagggacaccgaccgcgtcccttagcttctttccatcagctgaaccatcatcatcgctttgccgactagagcaccctggtgaaaaacttctatatccattttcccgaactttctcccggcttcgagaatgttcggttttatttcaatgacagactccatttgcacaggctttaaaaaataaatcgtcatgctctctatcacgagctcgccttttttgcgcgaccgcaaaaagcggtttgcagcttcggtcaaaatcgtcgtaaacacgccgtaggaaatcgtccccaagtggtttgtcatttgcggcgttacttcgtattgatagaccggagccggcttgtttttgtcattgtccgattctttgaaaccgccggtcacgatgtcatcgagtttttctccgacctgcggctgtttttggatcatttgaagcgcctttaatacatcctgcctgctgatcatgccgatcagcttttgccgctcgtcaacgacgggaagcacttcgatcccttcccagaccatcatctgcgcggctgaagcaacagacgtttttccgatcactgtaatcgggtttttcgtcatgactttttcaatcaatacactgcggtcatatccggcaacgtccttcgaagttaaaatgccgtggattttcatctgctcgtcaacgatgggaaagcggccgtgcccagtttcaaagtttttctcataccatctttccagcttttcatgaggtgataagcagactgttttttctaaaggagtcaaaatatcctcaacaagcacgacttcttttttgatgagctggtcataaatcgccctgttgatcatcgccgctacagtaaacgtatcatagcttgtagaaatgaccgggagctcgagcctgtcggcaagctcaataatctccggctccgtatcaaaaccgcccgtcaccagtacggcagcacccgcttccaaagcctggcggtgcgcatcgattcggttgccgacaatcagcaggttgcccgctccggtatatctcatcatcgcatcaagcttcatcgctccgatgacgaatttgttgagcgttttatgaagccctgcttttccgccaagcacatggccgtcaatgacattcaccacttcagcatatgtcagtttttcaatattctcttttttcttttgctcgatcctgatcgttccgaccctttcaatcgtgctgacaaaccctttattctcggcttcttttatcgctctgtaagcagttccttcactgactttcatttctttggcaatccgcctgacggagattttttcgccgacagacaaagaatcaatatattttaaaatctgttcgtgttttgtcgccaatcgtttcaccttcatcctctgactgctagatatatttattataaatcgttgtgcgattgaaccgcaatccgccttcacaacatcatgcccgcctaagccttatcatcctccatcaggagaagcgctttttcaagccatgagcaatagcctttttcccgctcaagcgcccgggtcaatacaaggtaatggccgaaatgaggcgagcggaacgttattgaatcacccgcttcgcgcttcaattcatcgagcttggtgtttaaaaaagcagctttttcctgtctcttttgaagctgatcgttaaaaagccttttcgcttcatcaggttccatcgaagagataaaataagctttcagcataaattcatcttttaccgtatctggaaccggcttaaattccgtaagccacccgtgaagttcacgctttccggcttctgtgatggaatacattttcttttctaattttgagccttggatcaccgtttcaaattcgataaatccttcatccgtcagctttttcagctcgggataaatctggctgtgcttggcgctccaaaattggcccaattcggctttaaaccggcttgtcatatcgtagccgcttaaactcccatgatcaaggagccccaaaatcgcgtatttcaataccctcataatcaccctccaagatgaatccgattcctacattatatcatggtggacatgttttgataggcgcataaccggttcaaccgaaaaaaggacccggattcgggccctctaaaacaaatttacttaaattcgattgactcaccgacctcaagcacttttccgacgcctccaggaaggctgtccgcaaatgcatgcggatcctgttcgatgacggggaacgtcgagtagtgaaccgggacaacctgtttcgctctgagccattctgcggccagtttggcgtcctcagggcccatcgtaaaattatcgccgatcggcaagaaggcaaggtcgatatgatttaattcaccgatcagcttcatatctgagaaaagcccggtgtcgccggcatgaaaaatcgtccttccttccacagtcagaaggatccccgccggcatgccggtatagacgatcttttggctgtcttcttccgtataagccgatccgtggaaagcctgcgtcagcttgacttttccaaaatcgaactggtgggagccgccgatgtgcatcggatgtacattcaggcctttccatcctagatagaccgcgagttcattcggagctacaacgagcgaattgtttcgcttggcgatttcgatggtatcgccgacatgatcgttatgtccgtgagtcagcaagatgacgtccgctttgacatcttcgggctttaaatcggttaatgagtttcctgtaataaacggatcgaagatcaactgatgatctcccgtatcaactgttaccactgaatgaccatgatatgccactttcatcatatccacccctgatttttttaatttcgcacgtctagagagaatgacggttaatcacattcaagccgcctgtggcttcaatgactgttcccgtaatgtagtcggaatgttcatcgcatagaaaagtgatgatccttgcgatgtcttcaccggttcccgacctgccgatcggcgtttcctcatcaagtgacgccctcgcttctgaaatcgaggcctctttcatatccccgacaatgttgcctggacagaccatgttggctgtgatgccggagcccgcttcttcaatggcgatcgtctttgttaaagaagccagccctacttttgccgctccaaaagcggaacgatgcagccagccaggcgcatggtcggccccctgaaatccgtaagtgatgattcggccgaaccgctggcgcctcatgatcggaacaaccgctttaaacagatggaagacagagcttaagttgccttcaagcatgtcataccattcatcatcagtataatccgcaagcttttttcgttcaaatatgtatgggccggcattattgatcagaagatcaatttttccaaatcgctcaagagcggcattcaccatccggagcaggtcttctttcctggtgacatcacccttaacaaactgcaaacggtcaagggatgaccgccatttttctttgaggcggcggacagcttcttcgtcttgcctgtaattcaccgtcactgagtagcctttttcaagcagggcttccgtcactttacgccccaaaccttttgaaccggcagtaattaacgcatggcgcacatctttccctcccaggcattggttctcggtattcgcaaatgattgcattaatctacctatactttactacaaaacccttaggatatcacatttggagcatcgggaagtttcaatcgccgctggaatacaatcgacagacggaagaaagctgaagcccgctcttacgggctccagctttctattgtttatctgcgtcagctaacggctgtgcgtcatcgtgcgcgacaaacccgctgaaataagcatcagagatctgctgaacggtttctttatctccgtcggcatcatacatatatccgtgttttgactgatcttgtttcattgccacaccccttttcgattcacaaatttattttgcgtatgaagccgcacagttatgaatcgaatcgggaagtgttaaaaattgttcaaacactgcttcgccttttgaatggcttctgtcacctttttgaatcccgtcccgccttcgctcattcttttttcgacggcatggtgcgggtcgagcacgatgtagacgtcttcttcaaacagcccgcttgcctttttgaactcttcaaacggcaggccgctgagataaatgcccttttcgatgcaggtgaagacaagtcttccgacgacttcgtgcgcttctctgaagggcatgccctttttcgccagatagtcggcaagttcagttgcatttgaaaaatcctgctccgttgcttttttcatcatatttttgttcactgtcatcgttttaatcatgccggcaaaaatctcaaggcttccttcgaccgttttcacagtatcaaacataccttctttgtcttcctgcaaatctttattgtatgctaacgggagccccttcataatcgtgaggagtccgatcagatcaccgtatacgcgtcctgttttcccgcggatgagctccgccatgtccgggtttttcttttgcggcatcatgctgcttcccgtcgcgtaggtgtcatcaagctcaatgaatttaaattcctgcgagcaccaaagaatgatttcttcggagaatcttgacagatgcatcatcagaatgctgctcgcgcttaaaaattcaaggatgaaatccctgtcgctgacgccgtccaggctgttttcatatatcgaatcaaagccgagcaggtctgcggaatattcacggtcgatcggaaacgtcgttccggcgagcgccccgcatccgagaggagacttgttaatccgcttgaatgaatcatgatagcgttctttatcgcgctccagcatccagaagtaagccagcaaatgatgcgcgaacgagatcggctgggcccgctgcaaatgggtgtatcccggcagtatcgtctccacgtgttcttccgctttttcgatcataacgtgttgaaaagccgtaatcagctcgatgatatgctcagtgtgcccttttaaatacaggtgcatatccgtcgccacctggtcgtttcggcttctggccgtatgaagctttccgccgagcggcccgatttcatcaatgagcattttttctaggttgaggtgaatatcttcgcaatcgactgaaaaatcgagttcgtttttttccgctttgtgcaaaagggatgtcaggccttcctttattttgaccgcttctgcttcggttaaaatgccgcatttttcaagcatggaagcatgagcgagagaccctgcgatatcttcttttacaagcgttttgtcaaagtggatcgatgcgccgaactcatcgacccatttttccggtgttttttggaaccggcctccccacagctttttcatgctttaatctgctcctttttttggacgatgctgtttactttcgtcggcagtccccacagctcgataaagccgactgcagcgtgatgatcgaatgcatcgtcttttgtatacgtcgcaagcttttcatcatacagggagtattcggacttacgcccttcaacgatcgcatggcctttaaacagcttgacgcggacgacgcccgtgacatgcttctgcgtttctttcaggaaaccggaaagcgcgtctttaagcggagaaaaccagaggccgttatagatcacttcagccattttttgttcgattataggtttgaaatgcgccacttcttttaccaatgtcaaatcttcaagctccttgtgcgccttaatcaaagtcatcgcgcccgggcattcgtaaacttcgcgcgatttgatgccgacaaggcggttttcaacatggtcgatgcgccccactccatgtgcgcccgccagttcattcagctttaaaatcaagtctgacagcgggtagtgagtcccgtcaatggatacgggaacgccttcttcaaaagcgatttcgatcacatcaggagtatccggtgttttttcaagaggcttcgtcaaatcatacgctccttcaggaggcgcggcccaaggatcttccaggactccgcattcattgcttctgccccacaggttctggtcgattgaatacgggctgtcaagattgatcggaattggaatgccatgcttttctgcatacgcgatctcttcgtcgcgagaccatttccattcgcgcacaggtgccagcacctccaaatccggattgagcgatttaatcgacacctcgaagcgcacttggtcattccctttgcctgtgcagccgtgagccacggcttgcgcgttttctttctcagccacttcgacgagctttttggcgatcagcggtctggacagggctgatacgagcggatactttccttcataaagcgtgtgggcctggagggcggtcagcgcaaactctttcgcaaattcttcttttgcatcgataacataagaattagaggctccgacttgaagcgctttttgctgaacaaaggcgagatcctttccctctccgacgtcaaggcagcaggccactacatcatatccctgttcctgaagccactttatcgcgacagaagtatcaagtcctcctgaatatgctaataccacttttttcttttgcgtcatttcgaaaaactcctctcatctcggtgctcttttgtataaaaataagttttatttaataaaaatacatttaatatgtatacactttaacaaggaagtcttgttttttctaacctttttataaaaaaaacttcattcattttttatgaatgaagttcagtgcatattcagcgttcggccggaaggctttccggccttactttttcatatcttttctcagttctctgatgacatgggcaagctcaggcacaatcagctttgacattgcaagctttacggcaccgcttgaacccggtgttgcaaatacggctttgttttgaataacacctgctgcagcccttgagaggatcgcagccgctccgatatcctctgtataactcagcatgcggaatatctccccgaaccccggaatttctttcgaaaaaagaggaacgatcgactcgattgttacatctcttgaggcaatgccagtccctccgtttaataggacggcatcgatccggtcgtcaagacagcctttcagcacagctttttgaattatttccttttcgtcctttacaatctcataggaaacgatctcatgaccggcttccgctaaaaactctttcatgagccggccgcttttatccgtgtcttccgttcttgtatcgctgacggtaatgactttgcagttgacgcagtccggcgcttcttttttatgctcttcaacactcatggccatacagcctcctttatacagtcttttttcattataaaggggaaaatgtataaaaaaacagccctccttgaaaagagaaggctgtttttttatttttagtgtgccagtctgacgacgtctcttgcaatcattacttcttcattcgtcggaatgacgatgacttttacaggtgaatgcgggtagctgataaacgcttcttttccgcggacgttattcaaggcagggtcccaatagacgcccatgaattccaaaccatgaagaacgcgctctctgacttcaacgctgttttccccgatgccggcagtgaaaataatcgcgtctactccgctcattcgcgctgcataagaaccgatgtatttatgaattctgcttgcgaatacttcgagtgctgtttccgcacgttcattgccttctttagttgcttcaacgatatcgcgcaaatcgcttgagaatccagaaatacctaaaagaccgctcttcttattgagcgtgttcaggacttcgtcggctgtttgacccgttttttccataatgaacgggataagcgcaggatcgatgttacctgaacgcgtacccatcgctacacctgcaagcggtgtgaagcccattgatgtatcgattgatttgccgccttcaacagctgcgatgctcgctccgtttccaaggtggcaggaaatcaggcgaagttcttcaatcggacggccaagcagctctgccgcgcgttcagtcacatatttatgagatgtaccatggaaaccgtatttacggatgccgaatttctcataatattcatatggcagactgtacagataagattgttccggcatcgtttgatggaatgccgtatcaaaaacggccacggcaggaacattcggaagaacttctttaaacgctttaattccgacaatattggccgggttatgaagcggtgcaagctctgaaatctcttcgatctcatggatcatttcatccgtcaataaaacggagtcgctgaacttttcgccgccgtgtacgacgcggtgaccgattccgtcgatttcatttaaatccttgataatgccaaattttgtcagtttatccagcagcatttttacagctacggaatgatccggaatatctgttgtctcagtctttttttcgtcgttgacggaaatcgtgaagatgccgttatccagcccgattcgctcaacaaggccttttgttaatactttttcgctgggcatttcgaacagttgaaatttcagtgatgagcttccagcattgattgcaataattttggacataaaatgacgctcctttttacctatagtccggtgacattatgttcaacccggaacataaaaaatatgtataaaatcgttcttagtaaattcaaaaaatatctgcctttttcatttaaacactcaaaagagtgcatttcaagtcacgatccgacatgttaacgctttcactaagaaattattattttctgaatataaaaatagatcagagaatatatcttctctgatctgcttatcttttttcagcctggaaccagctgtcgagtttggctgtcatgttcagcatcgcatcctgattggcgaatgacgggacttgcgcgagcagaacctgtttaggcgctttcgcctgttccccatgcttttgtaaaaccaaaatgctcttcgcgtgtgcttcatctttgaaaatggacagcggaagctgaagcactgcattaatatacgcattgttctttaaaaaggtacgcagcttttcgctttgaccgctttcaaacaaatggttcggaatcataaaaaataaatagccgcccggtttcgtataggtcaagctttgttcaataaacaaatggtgtgaaaaagagtggccttcatctgcttttaatttgaaagcgcgcgcactttcgtcatcaggataatatccgacaggaagatcgcagatgaccgcatcggcatgttccataaaaatcggctgcaggctgtcctggttaaaaagctcgatttccttttcctgcaggtttgcctggacataggccagcttgatcaggacgtcatcaatctctgagccgaacgcttttcccgcttcctcagccagctggttcaaaacggcaagcagcaggtttccagtgccgaccgccggatcaaacagcgtcaatccttttttccgctccataaatttgttcacaagatatccgataaataatccgatcgtatcgggcgtcatctgcctgttcggatgaggaatatctttctggcctttcagtatggcaagctggaaggctttccgtatcgactcatgactgcactctgaaaagcgcgcacggccgatcagatccttcaccttttgttcggcttcttcggaaagcccgcggtccgcagaacctgtaaagaatgcctctccggcttccgccaatccttctatgtaagggatctgccgatcgcgtgcgatgacttccgctcctttgtcaagccattcataaatcgtttcgactggatagttttgcatgatgatgtctctccttatcaaaaaaatacaaagccatgaaaagagctccggcaagatgatcacctggagccctttttttgagttgaatttacttaacgagtgatttggcagcttcgatggctttgtcgtagtccggatggtttgtcgcttcgctgacgtattcagtgtagacaacttttccgttttcatctaaaacaaatacggcgcgggcaagcaatctcaattctttaatgtaaaccccgaatgcttccccaaaagacatctccctgtgatctgacaatgtttccacattttcaattccgtttgctccgcaccagcgcgcctgtgcaaacggcaggtcagcgctgatcgtatacactttcaccgaaccgaggcctgcggcttcttcgttaaagcggcgggtctgtgcgtcacaaacacctgtatcgatagacggaatcaccgaaataaccgccggtttgcctttgatgtcctgaagtgtgacttcctcaagcgaattggacaaaaccgtgaaatcaggcgcctggtctccgactttcacttctgaacccaccagtgtcaccgggtttcccttaaatgtaattgaagccatcatcattcctccttcatttatgtatgactctactataaaagagtttaggacaaactgcaaagcttaagtccggcagagacaaaaaaagttaactgctgcaggaacagttaacttctgggactctgttgccggaaagccggggcttttaaaaaggaggcgtctggttttgacggttcatattttgcttctgcttatcgtttttcttaaacatatgctgaatccgttcgatcgtttgcggagctgagtctaaaatcttatcgatgacgtgcgtgttttcatccaaatgcagtactttaacgcctgatgatccgacaatcaaaaaagcaatcggcgtaatcgatacgcctcctccgcttcccccgccaaacgggagcttcgattcttttcgttcgcggtctccatcgctcgctttggattcggccggtttattgccgccgaactcgcttccgccagccgcaaagccgaatcccactctggagacggttaggatgacgctgccgtcaggtgtttccacaggatctccgataatggtattgacatcaatcatttcttttaagttttccattgcggttttcatcaaaccttgaattggatgttcagccatattctattcctcctatactgatgaatcattctttgttgaacctgacagattttttggcagcttaaataagccgcgcattttccctttccagttcaccacgattctgaaagctgcggttatagcatgtccaacccgaaaatggaatatacatgtcagatgcgttttggaggaacggctgttaaagcctggaatcacctcgtattccggctggctgtcaaagcaaaaaagctgatgcaagagagccaccgtgccggctttcagggaccagacgccgcctgtgacaatcccggttaaagccgcgtcaggaaagccgaggacagaggtccattcgagcttcgtgacgtgaatccgcttcataaaccggcggatgatcggctgcatattgatgatctgttccaccaattttttgatttgcttcgtactatcgaacacttcccgatagccgatttttctcctctttttatcttttttcagagccgaattcgtctgttctttcacatcaacggtcatatcctcctggttgattttaatcaccggaatctcccttttaatgcgcagaaggccaaaagccgtccgaactttgacggtcagccggtcgtcatcgtctgtatgaagatactcgatcgctacgcggattttcattatcatcaatgctgccaaaagaatgaatactcccgcaatccatatgtaaatcatgatttcacttcctcttatactaagcattataggaagaaaactggaaaaataaacatagccggaattccgccgatacaaaggaataaaaaaacccggcagtcttcagccgggtttaaaactctcagtctttttttcgatacagtttttcatggataaccgcagtgtccgcaaagaaatcgtgaatcccttgtttcttaggcgaaaacgctgctacgagatacgtaatatataaactgttgatatagcggccgataaactccctaaacaggaccacatcccatgtcagccctttttccgggacaagcgacacgaccttcagcccgaataccatcttgcccaacgtctgtccgaaatacttcgtcatcaggacaaagtaagcaaaaaatactgccgccgtcacaaaagaataaagcgaaaaggtgaaaaaccctgattctttagggaggttcagcaggctgaaaacgggtgaaaccgctaagttgttgatgctgccgataacaaccccgtcaagcagaaaagcaaacagcctgatccaaaaaccggcataggcatgctctacatgcggggccgattcttccctggaaacgccgacattaggcgataattcattatgatcctttccatcataagtcacatccattttttcggtcccctcctatttggcatataaatacatgagtctcggtgcaccggattgagaaatcgcttctttaatgtttaagaaatcagcttcgcttttaaacatcttatttgcagtcattgaaaacagcgaggcaaggccggctgattcttcatagctgacaacagatgcgccggcaaggtttttgtggtcctttttcatcgctttgaccgcatcttcataatagccgagctcatcaatgagatggttctgtttcgcctggcggccgtcatagacacgtccgtcggcaatttttttcacgtcattttcggacatgccgcgcccttcggcaataacatctacaaacccttcgtacgcgtcatcgaccattgactgcatgatttctctttcttttttcgtcatatcgcgcgtcggtgacatgatatctttaaactcaccgcttttaatcgtctccgtttttaatccaagcttctctgcaagcttgctgtagttaaggctttccatgatgaccccgagtgaacccgtcagcgtgtcaggcgctgcaaagattttgtcggcaggcgttgaaatgtaatagccgccggacgcagccatcgatcccattgatacgtaaatcggttttttcgtatcttttttgatctcttcaagcttcttatgtatctcagcgctctcgtatactccgccacccggagaattgacgcgcagaacaatgccctttacggcagaatcgtcttttgctttttcaagcatttgcaaaaacgatctgtggttgtagccttcagagctgaacaggcctgaagcgccgccattgtcggaaatcgttccgttcacttcaagaacggcgatttttcttgaggtgtttccttgttcaagcaccgtttcttcctgggtgtcattgaggccaaactgcaactttccgtcattccccatcgtgtcaaatactgcaagcaaaaggctcatcaccgcagataacgcaaaaacgcccagcgcgatgacaagtgcgatccatcttttcgcattcattttgtctgttctcctcctttgaataaaaaagctgcatgtcttagtacgtatatgaagagaaaaagttcattatgatgccgcttcatatacaagaagtttttggacatggtaaactaagggtcacaggtcattttaacatatatgttagatggcagaaaaatctaaacttaacagacaaaggggagaatgattgtgacagaccgccgaaacatttatttcttttacaaaaaaagcgaagaaaccgacgagcagtgcaaaaaactgaaacagcttgccgaagaacacggatttcgcgtcgttcaccatcacaatgaagccaatattatcgcaagcatcggcggcgacgggacatttttgcaggctgttcgaaagacgaacttcagggatgactgcctgtacgtaggcgtggccaaaaaggggaaagctcatttgtatgcggattttaatatatatgataccgataaaatgattgaagcgacaaactcggagcaaatcgaggtcagaaaatatcctctgatcgatgtaaccgttgacgggaccagctttcaatgtctaaatgaagtatccatccgttcaagcattattaaaacatttgtaatggacgtctatatagatgatcttcattttgaaacattccggggggacggaatgatcgtgtccactccgaccggaagcaccgcttataacaaatcggttgatggggcaatcgttgatccgctgattccatgcatacaggtgacagagctcgcttcattgaacaacaacacatacagaaccctcggctcgccgtttattttaagcgcggatcgaaagctgacattaaaaatcgtccaggacgggaacgactatccgatcatcggccttgataacgaagccttcagtacgatgaatgtgaaagaagtcgaagtcagcctctccggcaagatgatcaaaaccattaaattaaaagataattcgttctgggaaaaagtaaggcgcacatttctataattttgaaaaccttttcattaaaaaagagcaagacgatcgtcttgctcttttttgcgaatgcctataacgaaattttcacttccgcattcatgccgggaagcaatttggcggacggattttgaatcgaaatcttgacttgaactttctcggtgactttcgtatagtctccgctttggttcatttccggaagcattgaaaataccgaatctgtcgcatatccgatctcttcgaccttcccttcaaacgttgtatcagggtccccgtcgactttgatgtccactttgtcgtctttttcgatatcgcgtatttccgtttctttaatatgagccgtaatatatatgttatccatatcggcagtttgaccgatgacatcccccgcatttacaattttatgattaacggctgtatttttgaccagtgttccgtcggaaatggctttgacagctaccgactgctgcccgtccgatatttttccgaggttgtcgccgtctgatatatggtcgccttcttttgcatcccagccgcttaattttccggaagcaggcgccgttatttttgtcatatttgcggaaacccttgcttcatccgtcgtgacataatgttcattttgataatagtaatatccgcatacagcgacaagcgctaaagttgcgataataccaatcatattgatgatcatcaaacgtcctttactcatgtttatcctatctccttttgttgacttgctgaagggtctggcaggcgaaggcgcttctgaacgagcgatcttccttttccggtcgctgcctttccaattgaagccgcaagcatgatgatgcttagacagagcagtatcgtaaacaaatcgtgatatgcgccaagggctgaagcttttctggcatttgcaacaatcgtataggccgccatgttcttcgcatcaccaacagaaagcccgctgctgacaaaatcacgaatcatttttgacaattccagctgaatttcaggatcagcttcactgatatgtcctcttatcatctcgtagtgcaccgcattcttcattgaagcaaaccagccgatcaccggtgcagcccaggcaccggcgaaattgcggataaagtgaagcgaaaccgagcgttttgaagcttggtgaatatctccggcaagcgccgtgcccagcgctcccgataccaataccatgctgacgccgctgcccagcaaaacagcatgaagatataacgactccatcgaaacaccgggttgaactgatctccattccataccgacgatgatcatttccaaagcgccgatacagccgagcaatccggcgccaaaatgatcatacaaaagcgtgctgagcacggcagtagctaaaatccctgcgaaaaaacacaaataaaagcgtgtcatgctttcaaaagaagcctctgcaatgttttccaaaaatccgtttatcccggcaagggaaacaatgattgcaatgtgtgaagcaacggccatgactgtcccggaaacagcttttgcggaccacagtgaacgaaacggcacaagaggttcccgggcgcgcaagtctgtaatgacaaacaacgccaaaatgatgaatccggccaaaaagaacggccacacataaaaagaatgaacacccgtcttctgcaaattgataagcggcaccgtcaaaacaaccatgagcaatgagagcataaaaacgcccgtcttatcaatcgaatgatgctcccgctcatccgctgcttgtttcggcaaagaaaagaagccgatcacaaggcaaaggacaggcgaacaaatatttaatataaacacccagcgccatgcatccgcgctgagtgacagggaaccaaaaaccgctccgatggcagaagcgccgaacaatccgctaatgacgaaaaacaaaaacaaattgcggaccttgttcggaaacgaaatcaatttgacaggaagaatcgtcaaaaataacattccggagcataatccttgtatcacccttccgataagaagcgaaaacaagcctgctgaaaatgcgtcgatcagcgagccgcataaaaataaggtgatgagtgtcaggtagctgttccgaatgccgaacctccttgaaaatatacgtccaagcggaacaccgagagaaaaagcaagatttgtcaaaatggacggaatccgcatatcgtccggtgacaaatgaagtccgttttgaatgacgacttgactgagcgtataggaaagattaagaaaatattgcggcccaatggccagtatcgttaaaaccgaaatgatcaaatacttcggaatgccgatttttttagagctcgggatcgccacatcagattgactcataagcgctcctccttagttgtatatttcatattacaagttgtattatgcaagttaaattatacatccttcccgcaataaatcaaccgaaagaaaaagaaaaggctgatgatcgtctgaccaaccagcctttagccgcttatttgctccactttttaaaatcctgattcagtctgatcaaatgggtttccaacgtgttcagttcttctgttgtccagtcttgaagaacctccgtgtatacatgatagcgggccttttgcacttttttcagagcatcaatgccctccgaagtcatctccacaaggctgatccggccgttgttgggatcaggaaaacgtctgatgagctttttccgttccaaggctgaaacttgtctgcttgctgtcgacagattcagcattaaggtttcagccagcgagttgatggcgagaggactttgcttatcaagctcgcttaacagcagatattccgagcggtccagacttccaaagcgcgggctgtaggccgtcgtcagacggaccaaaagcgcgatttctttctctatgtttcggagtgagtcatgacccaacggatattccctcctctttgtgtggttattcagctttcgttttaagtgcgatttcccgttgtcttagttcaaagcgcttgattttcgccgaaggcgttttcggcagttcttcgatgaattctatctcccgggggtatttataaggggccgtcatggcttttacatggtcttgtaattcctttgtcaggtgttcatttctgcgggatgggtcctttaagacaacgtatgctttcacgatcgatcccctgatttcatcagggcttgccacaacagcacattctttgacctcaggatgcttgatcagcgcatcttcaacttcaaacgggccgattgtatatcctgagctgatgatcacatcgtcattgcggctttcaaaccaaaaatagccgtcttcatcctttcgcgccttatcccctgttataaagtaatcccctcttctttgtcggagcgttcgttcttgatctttgtaatattctttaaaaagagccggcgtgcttaagtgaacggcaatatcgcctgtttcgcccgggggacagctctttccattcccgtcaataatatcaaccaagtttccaggcgtcggttttcccatgcttccaggcttgattttcataccttttaaaatccccaccaacagcgtgctctccgtttgtccgtatccgtcccgcacagcaatatgaaaatgctttttaaatgtatcgatgacttccctgttcaacggctctccggccgaaacagcgctgtgcagagaagacaggtcaaatcgggacaaatcattgactttcgccatgaaccggtactctgtcggcgtacagcacagcacattgacttgatggcgctcaatcagccgcaaatacgtttccggcgtgaattttccatgatagataaagccggttgcaccgctaccgagcactgctaaaaacgggctccatacccatttttgccagcccggccctgctgtcgcccagacgagatccccttccgaaatgtcaagccatgcggaagctgtcgttcttaagtgagcataagcccagccgtgtgtatgtacaaccccttttggctgaccggtcgtgccggatgtgtaagataaaaatgcgatgtcatcgcgagaggtatccgccgcttgaaaatccgctgcaatggcctgattcatttcttcgagcagattgatccacccttcgctgctttctccgacggcaaataacgacagtgcctcttttgaacgaacatctagaaaagcatcaagaaatgctgaatatacgacggctcctttgacgcctgcatgcttgatcctgtaatccaagtctttcgcccgaagcatttcggaacatgggatgaccaccattccagcttttaaaatggccatgtacacggcatacgtttccggtatccgcggcatcatcacgataagcttgtcaccttttttcagtccagaacgggtcaatatgctgccgattttgtaagccttttcaatcaatttttcataggaccatgacacttgacgccctgattcatcttcccagatcaatgcggtcttatcgcgggaagatttaaatttttcaatttcatcaaccgcattatacttctccggcgcaatcaaatcttctcttctcaacccttccatctccttgtcttgtgccatctttttattatacataatcctttcatacaattgtattccgaaatgcctattttgcagaacataaaaaagagtggggattaaaccccacccattatccattgctttttaattttaattattgttgtgttccacccatttgctgttgagcgaaagaaactaaacgcttagtgatttctcctccaactgaaccgtttgcacgagaagtagtttctgctccaaggttaacgccaaattcagaagcgatttcgaatttcatttggtcgatagcttgagcagcaccaggaaccaatagttggttagaactgctttgtctgttgttttgagccatgtgttctcacctccttgtgagtatagattgtgtaaaaacacatgacttcatacaaagaatgtttggtaattgtatgcaaaaacagacaaagatgtttgattgaatattcctttagaaaaaatccgcaaattgatctttcgtttccgctttgctgctcaaaacaatcgtttccgtgttttccacagcttcgttgataagcggttcgaaatctgtgtagctttcaaagtgttcgattttctcttttttcggacgcgttttcggcgcagaaggcgtaaagatcgtgcagcagtcttcgtacggacgtatgctgatatcgtacgtatcgatttccttcgctttttcgatgatttccgtcttatccatgccgattaaagggcgcaaaaccggcgtgctcgtgaccgcgttgatggcatacatgctttcaagcgtctggcttgccacctggccgaggctttcccctgtaaagatcgcaagcgcgttatggcgttcgcgcagtttgtcggcgatctggagcatcagccttctggtcgccgtcatggaatagttctcgggaatctgcttttgaatgagctcttgagtttttgtaaacggaacgatatgaagcttgatgtctccgccaaaagccgtaagccgcttagtaagatcgatcactttttgcttggcccgctcgcttgtatatggcgggctgaaaaagtgaacggcttcgatctcaagtccgcgcttcatggcatagaacccggcaacagggctgtcgattccgccggatatcataagcatcgcttttcctccgcttccgaccggcagtccgcccgcacctttttcatcccggaatgtcaaatacgtggcatcttcccgaatttcgatacgcaaatggatgtccggggagtggacgtcaacggtaagatcgtcggtgttgcgcaaaatgtgtcctccgatctcggcattcatctcatttgtatttaattcaaactgcttataagcccttttcgtcgatactttaaaggtatccccgggcttgtattgttcttgaacagaagcgagcgccgtctctttaatgctttccagatctgtccggcacttcacggcaagactgaacgattggatgccgaaaacgtgtttcagacgagccattacagcttcagcgtcttctccgtttaatacgagagtcattctgtcgcgtgttgattcataacggacgttgcggaaatcgcgcaagaccattttgatatttcttttcaggcgatcgacaaaaagctttctattctttccttttgttgaaatttcgccaaatctgattaaaatgtagtcctcattcattgtgcctctacctcataattccttttagtttgtgtaaactttcttttaaggccgtcataaacgggccgacaatctcatgattatcccggtacgtcatgctgattctgatgctgcttgaggccgcatcttcaccttttcccatttctaaaagcaccttgctcggcttatgctgttttgaagagcatgctgatgtcgtcgatacgaaaatatcccgctcctctagcatatgcaaaaggacctcagccttcaatcccggaacggaaaaattgatgatatgcggcgcgctgttttcttccggcgtatttaatataacacctttcagctcttttagctccttgataaaagctgattttgccgcctttatttcttctatataatggttataatcctgttttgacaaattgatcgcttttgcaagtgtaacggcgccggcggtattttcagttccagcacgcctgttgttctgctgttctcctccggaaatcaaaggaaaaagcgagatccgttcgtttagaatgagggctcctgttccctttaagccgtgaaatttgtgacccgagattgtacaaaggtcaatggctgccccggagatgtccagcggaaccttgttgatgccctgaacatgatcaacgtgaaagtatgcccttgtgttttcttttacgattttcccgatttcttccagaggctggatgacgcctgtttcattgttgacgtgcatgatgcttacaagaatcgtgtctttgcggagcgcttgtttcaagtcttcaagagaaacaaagccatggccgtcgacaggaagatatgtaacctcaaagccgaaggccgtcttcagctgctccaaggattccgtcacagacgggtgttcaatggaggaagcaatgatatgctttcctttttgcgcatgtgccaaagcaatgcctttaagcgccatgttattggcttctgaagcgccggacgtaaacacgatatcatgattttttagcgaaagcgccgatttaatctgtttccgcgcttcagaaagcaattgatccgcttcaacgccgtggcggtgcagagacgacgggttgccgaagaagcgctgatttacttgttcataaatttgtaataattcaggatatggttttgttgttgaactattatcaagataaatcatgatctactcctttaaaatgaacgttctttttcatgactgtatatgttatcatatcaacttgtaattgaaaattaaaaataaatgtttgacttctctgatttttaaaatataatagtctttggacttttgtcatattatatcacgaaaataaattgacagaaaatttaaaacaaaatgccaggaggttctttttaatgaaaacttcactatccgctaaggaaacgacggcgattgggcttatgctgttcgccctctttttcggagcgggaaatatgatttttcctccccagcttggtcaagctgccggagagaatatttggccggctatcatcggattcttgctgacgggcgttggtcttcctctgctcggcgtcatcgcggttgctttaaaagggagtgcaaaaggcctagctgacaaagcccacccggtcttcggcacgatattaatcgtcagcatttatttaacgatcggacctttatttgccattccgaggacgggaaacgtttcatacgtcatagcggttgagccgtttttaggaaaacattcgtcaagtctttatctgttcatctttaccctgatctttttcgggatcacttatttcttggcgttaaacccaagcaagcttgttgaccgcatcggtaaaattttaacaccgatattattgactgtaatcgcaatcttagtcatcaaagcgtttatcaccccgatgggcagcatcgggtctgtgacagaggcttaccaatccgcaccgctgtttgtcggatttttagaagggtataaaacgatggatgcgatcgcttcaattgtttttggaattgtcgtcattacggcaattaaagaccgcggagtcacaaatccaaagtcaatcgccgcttcatgcatcaaagcggggatagtcgctgcagtcggtctcggactcgtttacgtttcactcgcttatttaggggcgacaagcgttgaaaccgtcggttcgctcgacaacggcggcgaaatattgtccaaagcttccgcatatttgttcggctcgcttggaaatgccgtgctcggcatcgcgatcttgttcgcctgcctgacgacaagcgtaggacttgtttcttcttgcggagagtatttttcaaatctgattccgaagctctcttacaaagcagttgtcatcattgtgacgcttttcagccttgtgattgccaatttcggactgacagaaatcatctcgttttcagtaccgattctgtctgcgatttatccgcttgcgatcgtcgtcgttttgctctcattcattgataagctgtttaatgaacggcgcgaggtctatatcggcgcccttatcccgacaggaattctgagcatcatcgacggattaaacgcggcgaaaatcccgctggggccggttaacgatatcttaaaagcgaacatcccgctgttcagcatgggtgtcggctgggtcgttccggctgttatcggcgcagtgatcggttacattgtgacattttttatcgctttgccggaggacaaattaaagaacgtcagctgacctttgcaaaaaacagctctgtttaaaacaggctgtttttttatctttcatttctttagacaaaaaacccggcacacatctttacatgacgggtttttgctttattcaggctgcttcgcgtccgcttcaagccgggccactgctccaggcgacgctttttccaccgctctggcggctatgtcgtaagcctcttcatactgatatgcgtaaaaacagttttctgcttctttcagctgttcggaaaggatacggtcctggcttctgaagcggttgccatattgaatgatgcgttcgatcagcaaaaccagttcaaccagttcgtccgtctttgttttcacttccgtgacaagctgttccgcctcttgaagacgttcgttcaccgcatccatgttcagcggcagctcattcaactgttctgtcactttctgcacagtcgtctgcgactgtcggatcttttcggttatggcctccgggatgcctggaacattgcttttctccaggctgcgcgccgtatccttgattgtctgcttcaattgcttgagaagctctcttgcctgaagctcttcttttctcagcatttgcagcatgtccctgtattcgtcatgctcccgttgcgcggcttccatctgcttttcgatatcggcaagctcttcttttaacagcgagtaggcgacatgtttctgatcaagcctttctctcacttgttcgaactgcttttcgatcatttcaaggcgcttttcatatgactgctgcttctccagttcgccggtagtcagtctgtagcctttcttgacgagctcggtttcagcttcggtatcctttttggaggcttcaagcttttccaatgcagcggcaagctcaggcactttgcccaaaatttcctgccctgcttcgacttcatgctcgagctggttatacagcgtctggatcgtttcatcaatgatctgcacgattgcggcggcttcctctaaatcaagctcgtccaaaagcgcatcttcagcgcgcttcaattctttcaaaaggttttcgagctccttctccacttgaatatgatcgagcttataccctttatcgatcatttcctgatagccggctttcaattttgcgatttcctgcggaactgtctgcttgcagctggcaagcagtttcggcacatcgtctatgtatgattgaagctcttcaagcaaacggtcttgggcaagcagcacctttctggcttctatgtaatttccgccttctgtttcctcttcaaactgtttaatgccttcccacacggtatcgaggtcggcttcaattttcgcatagaggtctccgtacaggtggctgtatgccaaaaggtttttccgcacttttgtataacgttcttttacctcttcgatttctttgcggttctgctcttcgcttgagacaagatcggcgatttcctttaagatgtcttcaatgttggactcagccgctgataaaagattctcaatatgcgcgagcacctgtttcgatttttgaaaacggtatttgtcggcgcaatcctcggcttcaaacagaagctcttcgactttgggcatatgcgaggtgacgatttcatcccattcccggcgccatctttcaaagaattcctcagtctgccccgtcattttcagatgcttgatttttgacatctcttccacaatcgaacggttcatgatttcgattttccaagcttctaaacggtcgatctctttatatatattttttctgaataagtagcccgtagcgaataagattaaaaataacgccagtaagccaatgacaaactccataatgagcccccttgctgtttatcttgttctgtcagggtatgatatttgaaattgttatgtaaaaatgaagttaaactatcgttttcattgttcttatgataccatgtaaccaacattttttgagcagaatttttaatttttttacatcaaagtgacaacatctgactatttttttacggggtgacatcatgctgaaacgagacggtcatgttcattctcccttttgtccgcacggatcaaaagacgaattcagatattatatagaagaattgtgcaaaaaaggcttccaatccgtatcctttactgagcacgcgccgcttccgccttcatttattgatccgactccggagaaagacagcgccatgccgatctcccagctgggccgctatattgaacggctgaccgaactgaaggaagaatacagaggacagcttgacattttgatcggtcttgaagtcgattatatccgcgcctttgaacatgaaacgaaagcttttctcgatcagtacggcacacatcttgacgacagcatcctgtccgttcattttttgccggctggatcttcatacatctgtcttgactacgatgaaaaagcgtttcagcagctgatcgactgctacggcagcacagagcaggtttatctcgcctattatgacgaaatctattcttccattgtatcaccgttgggagcatttaagccaaaacgaatcggccacatcacgcttgcgaaaaaatttgtgaagctgtttccgtatacgatgtcggaaagcgttagaaaatcggtctcctcctgtctggatgaagccgcaaaacgcggacttgaacttgactttaatacggccggcctccgcaagccttatgcaggcaacgtctatatggaagaatggatgataaaagaagcggaacaaaaaaacatcccgcttgtctttgggtctgacgcccaccaagcagaggatgccggatttggttacgaacattttgagagccgctttgttaaataacggcggcttgccgacgctctctgtacaacagactgagaagccatgttttgacttccttgtaatacgcctgataaaagtacggctcgtgcggctgtacataaagcacttctgaaatatattgaggctgcagataaggcatcattaaaagcgacttcagctgaatcataaaatgggaaaggggaaaacgggaaaattcgttgtcctcatttcccttttcaatgatcagatggagaatgtacttttctttcgttaaatatgtcgacatcacttcacgattcagtgtggaatcaatcgtgacttcgcgatagacaaaccgagttaattgacgatgttcatgctgatacgatagaatatcaaaaaccaattgaagaaggcaatccgttgcacctgcatcctgaaggcgttcatggcccttttcaaggattcttaaatagccttcataaaaacgggatactaaatgctccattaacccgccttttccattaaaataataggagatgtgggcgacattgacattggctgctcgggcaatttcgcggactgatgttcctgaaaaacctttttggttgaacagttccacggcagattcgatgatcctgtccttcgtggttggagtagcgtttgatcccatcttgtttcaccccttcttacttaaaacaattccacttcaagcggagttgttcctgtaaaaagcgctcgacaaatagcatcacggcaagcgcgtttttgccatttcaaagaaaaagcgagggaaatataatgtttcatgtcgaaaaaacagaaggcagtaaagaaaaaaaatacgagcttctcctcaaacagatcgatgcgctgacagaaggcgaacctgatatgatcgccaatacagcaaacgcttccgctcttttgtatcaatcattggaagacgtcaactgggcgggcttttattttgccaaagacggtgagcttgtgctcgggccgttccagggacttcctgcatgcgtaagaatcccgttcgggaaaggcgtctgcggcaccgcttatacaaacggccgggtcgagcgcgttgaagatgtgaacgcattccccggacacattgcgtgtgatgcagcgtcccaatccgaaatcgtagttccgcttgaagttgacgggagcatcatcggagtgctcgatatcgacagcccgattaaaaaccgcttcgatgaaactgatgagtattatttgaaaaagttcacggagaagcttggagagcgtttaagcgaaaagagccggtaattccggctcttttttaatgtgtcataaacttgtttttcccgttccgctttgcattgtacagcgcgacatccgcttctttaaaaaggtcggataaagatttcggacgatcctgagaccaatgggataccccgcacgaaatcgtcaccgtcggatccgtacattccctgacaagcattatgagcctttcggcaagcatttcaccggcgttcagccttgctttcggcaagtataccgcaagctcttctcctccccaccttgctgcgacatcctgatcgcggatgtttcgctggatcacccgggcgacttgtataagaatatcatcgcctttctgatggccgtacgtatcgttaatctgtttaaaatcatcgatatcgatcaatacgaggacgccgctctcgtccaatttcatactgtacccgattttctcatcgagatggcttctcgagtagagctctgtcaaacggtctgtctgaacaagatacttcagccggtcgcgcagcatcaaattcgatacggcgagcgtggaatgcctgatcagcgtctgaaacagcttaaacatctcaaacgaaaaggagcagacgttttttttcaacacgatgacaaaccctttgttttcattattttccagcatcggaacgcccattaatgaagcatatccttcattcccaaaaagcgaagaaccgtttccgacaaacaccccgttttcctctgatatcttctctttgacatagcggatgtatggaagggcctcatccgtctgaaaaaaactagtgctttccggcagcagggtttccttgcctaagtgatttttataaaaaaagcccacctcttcggcgccgaatgaactgatcagcctttcggacaagctcttcatcatatccggaaggcgtttcgtccggttcagctgatgcgatgtttcattaatcagctccaaatttgaaatcatattctgcgactgttcgtaaagccgtgaattttcaaatgctttccctgccgcattcgaaataatgcatatatccgctgccgtatcggcagcgcctggtccaaaggctttcaaaacgccgtacgttccctgccggcctttaatcggaatgtatacttccgcttcatttttgctcttctcctgtcctgataagtatgcctccaaggcaaaagaatcggtcgattcgctttgcacatccaactctatcgcagggaggttgatgtattgatcctcatcgtatgacaagaaaagacaatacgttaaaaaaggaaacacactccttaagctttcgagcattgtcttcagcacctgctcctgatccatcagctcatgcagcagctccgtcttttcataaatctttgttttcttaagctcatcacgaaataatgcgtcaagctccagacaatgcaccaaaaacagatgaatggattccgcgagacgttctggtaatttatgtttcttttgacatgaaagttctatatatttgctgttttcttctattgttataatggtatgataatcgctcactcggctgatcggatcaccgtcgcctctcgatccctgcagtcttgaagaaggctgcactgttagagatataaacgaaaaaaatgactctgctgccgcttttagccaggcaacagagtcgtcgtacgagacggccggcttttttaaaaaaattgaaacagcttttgatgaaaagtcagatataggtcttcagtttgtttattcatggtcatcaccttaaaaaatccgttttttgtattttattttcctgattatatcacaaaaacaggactatatacttataaacagtccgttcctttcgggacgatccatgaatggttgactttgcccggcggacattatataatcttctttgtgtgaaataatgcagcctttttgttctgcttctatgtttcattttgttccttatttattaaggtgtatcgtgtaactctttgctgctggagcgaggatacatgaaaacaaaatggacatggctgaattgaacagatgggttttattttcacaaaaataaaaccaaaggaggagtcacattatggctcgctatacaggtccaagctggaaattatcccgccgtttaggcatctctttaagcggtacgggtaaagaattagaaaaacgtccttacgcaccaggtcctcacggtccgggacagcgtaaaaaactatcagaatatggtttgcaattgcaagaaaagcaaaagcttcgccatatgtacggtgtgaacgaacgccaattccgcaacctttttgacaaagctgcgaaaatggccggtaaacacggtgaaaacttcatgattcttcttgagtcacgtcttgacaacatcgtttaccgtcttggcctggcgcgcactcgccgccaagcacgccaattggtaaaccacggtcacgttcttgttgacggaagccgcgttgacattccgtcttaccaagttaaacctggccaaacgatttcacttcgtgaaaaatctcaaaacctttctgtcgttaaagaagcggttgaagtgaacaactttgttcctgaatacctgacttttgacgctgaaaagcttgaaggttcactaactcgccttccagagcgttctgagcttcctgctgagattaacgaagcgctgatcgttgagttctactctcgttaatagaaaatgctctttaaagagcatgggcaaaaaccctagaattgttgacatcccaacgattctagggttttttgtttactccccgttgattctggctgctgatagatctgatgattcactttcaaatgatatctgtgatcacattcatcctggttcgaaattcgcccgccggaataaaacagacccgcctcataagagtaaggtaccttctcacaagcaaacatctccttttctcctttaaacatcttcggtaaaattaaatcgttggttagacaattgaaagcggaggagtggccgacaaatgcttttgttttttgctaagtttgtcttgttctacgtattctgttcagttgctttcgcccttttcaaagtcatgtactacaatatcagcaaaaaatgggttacaaagacggcggagggcactaaactgaattgggctttgaatgtctttcttaaacacggcaagaaaatggacagcaacgactgctttgttatgggggttttagcgggatggtgtgcgatttatttataaaaagcttccgaaaaaggaccgagatccgtgtcgcgatgcagccacaactgaacttcagcgactgcttttatttagtctcgccgatttgactgttctccggtatcaccatacgatcctcaatcgctgctgagagtgataccgccaaacactcttcggtattgctggcacattgaacaaagctccgatgatattattgaagggttgctcaataaaaattaaaattcaggtctgcttcagtatataaaaaaaccccaatcgccagatgattttctaacaattgggggccaatttacgatacatttacttttggatttggtccatattgattttcttttgcttcgccagcctgacagtaaaaaataagcagaatgacagcaccgataatcggcaaaaagccaattaaaatccaccagccgcttctcccggtatcatgcagcctgcggacattgacagccaaagaaggcaccaaaacagccaactgataaataaagatgagaatgtatccgaggaaccccccgccatacccaataatatatcctacttgatatctgtcatatccttctgctgtcatgattcctgaaataaataaacttactaccattaatgataagataaataatataaagcatatgatgccgttaaatacatgaaacaaccagtattcctttcgtcttgctctcccttcaaaattcgcataattcttcaagcctctccaataccacttcatacaatttcctccactgccaaatctataaatttgcgaaaaacatatgaattataccataaaatatcattttcgaccatttacttgaagggatgttttgatgcctgttcggaaagaacattttttctatgggctttgagcttacattcatatcataggaaaaacaatataccgtttccatttaaccattgcttctgtataatatgaatcattcatttcgcctccgtagctctagaagggaagagcgccgtaaaacactgtaggaacgggtcgcaaggcaagggtttcagaagcaccgaaaagcaaatagctgagacaggtggaattcctgtcggtgaaagtccgtagggaagcgtgttctcccctagcctatgcttacggaaggagtgcgggttcgaatcccgccggaggcattgattacatctctggtctcgaagaagaattaaaaaacagacagaagttcactgtctgttttttacggctttgacctgtcatatattaaaatgtgtaagattcgccgtcatccggcacaagtacgcgcgaggacattcctttttcctgaatgaagctcttcaattcttttcgtgataaagtccaatggttgacagcctccatatgactggaaatgattgtggccttaggtgcagcttgatagacttcagcaatatcctcttttcccatcacaagagaccctccttcaaagaactgattgtctcctccgttaacgactatgacgtccggctgatgcgcagcgatttcttcccggacaccttcataccaaactgtatcccctgccacatacagcgttttctcctttgagtgtttgaagacaacgccgcacacttctccggcaagctttaatatctctcccctcccatgctcgccttttgttttgattaattgaatcccctcaaacaccgtatcttttgttaagacctctatattttgaaaaccggcttttctcacttcctcagcatctgcttcattttggacaaacagtttgatttctttcggaagcagatctttggcagcatcgtcaaaatgatctaaatgcagatgagtgacgatgactgcgtctgtattcttgacgagctcgtcggttggcacaggcaggctgaccaaagggttgttttgctcttgtcttgctgagttcgggaaaggagggtaagcgcctttttcagccagcatcggatctattaaaaatgttttgcccgcatatttgacggccaatgttgcatttcgaatttgttgaatattcatagttatcatgcctttcctttcatttacgattagtttatactatgaccgatcaacatttaaatagataaaatcaagtctttacagcgtttgacttgatttttgaaaaacgttcatttgagaggatttgatgaaatgctggatcatacagacaagcaaatcatagaggaattatcaaaaaacagccggatgaccatgaaggaattaggagagaaagttcatttgacaggccaggcggcttcagcaagggttgctaaattagaggatcaaggagtgattgaaggttataccatacaagtgaatcaagtgaaactcgggtgttttattcacgcttttatcaatatctatacaaaaagcacttatcataagccttatctttcatttattaaagcacagcagaaatacatcattcataactataaaatcagcggagacggctgttatcttcttgaatgcaagtttccgtcaaatcaacagttggaccaatttttaatagacttaaaccatcatgcaaattataaactgtcgatcgttatcaataaaacgggtgggtaaagagactgccggccgttttattgataaaaaagagggcctctaaagaccctctacttcagccgctttgctgcattttccgtctgattcaattgattgtatccgtcagccgactgctgcacctcttgttttcgttccgtttccagctgcttgtggtaatcttccataaatttctctttggctgcaatgaacaggttcatgctacattcctccctcttcaacgatggaaacgctttacctattacatctatatttttgacatttcctgaatgaacatacatgaaacatgttgacacaaaaaaacccttgccgtttggcaagagtttttttgattacttataagtcagcaggaagtatttctttttaccgcggcgaatgacggtaaactgtccttcgatgcggtcgtcggcggtgaggacgtccgcaacatcggtgcggcgctcgccgttaacgtataccgcgccattcgtgatatcttcgcgcgcctgccgtttagacggagacagctttgattggacgagtatttcaacaagaggaagttcatccgctttctcgacctccagggaaggaacccctttaaagccgacttttacttcttcagctgtcaattgtttgatatctccgctgaacagtgcttttgagatgttgacggcctgctcaaacgcttcacggccgtgtacaagaacggtcacttcttcggcgaggcgcttttgcgcttcgcgtttttcaggcgccgtctctgttttttcagcgagatcttcaattttttcttttgataagaaagtgaagtattttaagtatttcacgacatccctgtcgtcggtattgatccagaactgataaaactcatacgccgacgttttctctttatcaagccagatcgcgccgccttccgtttttccgaacttcgtgccgtctgcttttgtcacaagcggaatcgtcaatccgaaagcttttgcattctcttcggatttgcggatgagttcgagacctgatgtgatgttgccccactggtcgcttccgccgatctgaagcttgcattcctggtttctgtacaaattcaagaaatcgagagactgcaggatcatgtagctgaattcagtataagatatgcctgtctcgattctggagcttaccgtatccttggcaagcatgtaattgattccgaagtttttgccgacatcgcgcaggaaatcaatgacgttcattttgccgatccagtcatagttgttcgccatgatcgccgggttctcttcagcttcaaaatcaaggaaacgcgaaagctggtttttgattttctgcgaccattcgcggacgatttcttcattgttcagcgtgcgctccgctttctttccgctcggatcgccgataaggcccgtcgccccgcctacgagcgcaatcggacgatgtccggccagctggaagcggcgaagcattaaaatcggcagcaggtggccgatatgcagactgtcagctgtcggatcaaatccggagtataagctgattttctctttatcgagcagttctctcaagcctgcttcatcggtttgctgctgaatcagtcccctgaaggacaaatcatcaagtatgtgtgtcatcatcaattagctccttttttccaaaataaaacgccccttcgcaaaaacgaagggacgataaaaatcgcggtaccaccctgcttaaaagaacgcatggccgcgctcttttcactctcgttgataacggaaaagcttccgttcttctgctacagaaagcccggaaggcttttttcgcaaaagcggttcatgagtgtaattcaaaccatccatatgtgctgattttcaccggccatcagctctctaagacagggaaggatgcgttctactgatctcagtcttcaccttttgaatattcgactaaatcttttttaacataatatttttgcattgtcaatgagacatcagtcttccatcgatgagagatcgcctgccggaaggttcagctcccatgctttcaggacgcgtctcatgatctttccgcttcttgtcttcggcagtttatctttaaattcgatttcccttggcgcggcatgtgcggccaagccttgtttcacgaactgcctgatttcttcttttaacgcatctgacggttcataaccgtccctcaaggcgatgaacgctttaataatttcaccccggacgggatccggtttgccgatgacgcctgcttcagcgacggcctgatgctcaacaagcttgctctcgacttcaaacgggccgacgcgttcgcccgatgtcatgatgacatcgtcgatccgtccctggaaccagaagtacccgtcttcatccatgtaggcggaatctcctgacacataccaatcgcccggcataaaataggagctgtatttttcaggattgttccagatcgaatgcatcatcgacggccagccttttttaatggcgagatttcccattctgtaaggaggcagttcatttccctggttgtcgacgattgcagcctctacaccgggaatcggcttgcccattgatcccggtttaatttccatgcacgggtaattgcagatgagctgcgatcctgtttcagtcatccaccaagtatcatgaatccggttgccgaagactttatgcccccacctgatgacttcgggatttaacggctcccctacgcttaaaatatgccgcaaggagcttagattatatttattcacaagatcgtcgcctgcacccatcagcatccggaaagccgttggcgcgctgtaccataccgtcacttccattttttcaatcgtttcgtaccatgcctcaggactgaatctgccgcctactacaacattcgtagctccattcagccacggaccgaaaatcccgtaaaccgttccggtgacccagccgggatcagcggtgcaccaatagatgtcatcgtcatgcagatcaagaacccatttggctgtttgataatgctggatcattgctttatggacgtggagaaccccttttggcgcgccggtcgaacccgacgtatagtgaagcagcatcccgtcttcctgatccacccattcaatctcaagatcagtgcctgcttccgccgctttcgcgtaataatcaatgacaggtccttcttcctttacgccttctccaacgacaatgattgattcaagatccggaagttcatcggccggcacccgttcaagcaattccggcgtcgtcacgatgaccttcgctccgctgtttgcaagcctgtctttgacggcaccttccataaacgcttcaaataacggcccgacgatcgctcccaatttgatggcgccgagaagaataaaataaagctcgggcgatctcggcataaaaacaaacacacggtctccctttcccacatcggcatgctgctttaagacattcccggctttattggtttcatttttcatctctctgaaagtgtacttttcttcgcggaccggatctttgtagtaaaatgccactttgtttttcaaatttgactcagcgtggcggtcgatagcttcataagctgcattgatttttcccgttttgtgccatgaaaaatgcttttcggcatccttccagtcaaatgtccggtatgtttcatcatagtctttcaagttgtaatttcccttttctgctggcagcgctttcaattccatgcccatccccctttgttcgatcatcaaaatatattatagtatagattttttattttctcaatttttaaaaatactcttctctcctatgaaaacgcttaatattttggtatgttatgtataaaagacttcaactaagatgtaaggcggtggatacgtggagcatcacaaaacttatcatgccaaagaattgcagaccgagaaaggctctgtgctgatagagggccctatcagtcccgaaaaactcgcagaatatgaatttcacgacgagcttacagcctttcgcccatcacaaaaacaacatgaagcattaatcgaaatcgcagggcttcccgaaggacgaatcatcatcgcccgtttccggcaaaccattgtcggctatgtgacatatgtttatccagacccgcttgaaagatggtctgaaggaaacatggaaaatttaatcgagcttggagccatcgaagtcattccggcgttcagaggtcactctgtcgggaagacgctgcttgcggtcagcatgatggatccgcagatggaaaaatatattatcatcacgactgaatattactggcattgggatctaaaggggactaacaaagatgtttgggaatacagaaagatgatggagaagatgatgaatgccggaggacttgtctggtttgcgacagacgatccggaaatcagctcccatcccgccaactgtttaatggcacgcatcggaaaagaggtcagtcaggaatcgatcgagcgttttgacagactcagattccacaatcgttttatgtattaagggagcaaaggggacctgaatatgattgttgaaaaaatcatgaaacgggatgttgtgacactatccagaaccgatacgattgaagaagcgatcaaacgcatgcgaacattccacataaagcaccttcccgtcatcaatgaacggggaacggtcataggcattgtcacggacagggacgtcaaaacagcaagtccgagtatctttgcccaaaacagatctaacgaagatttaaaaaagccggtggaactgatcatgtccaaagaagtgatcaccggtcacccgcttgattttgccgaagaaatatcagccgtcttttttgaacacgaaatcggctgcctcccgatcgtaaaaaacggaaagcttgtcggcatcgtgacaaaatccgatttgctgcatacgttcgttcagctgacaggagcccattttccaggctcccaaatcgaaattaaaaccgatcatattgcccgaagcctcgctgatatcagcgccatcttcagcaggcgccaaatcgccatattgagcgtgctcgtatatcccggtgatgaagatgattcgaaaatactcgtgtttcgcgttcaaacgatgaatcccgcctctatcatcaaagacgtaaaatccaaagggtatcaggttctttggccggctgttcaaagggatttgccatgaaggacagcgtatttattttttctccctcatatcaaacctatcaatttcatcaagaccacccgtttaatcagctgcgagtctatgtaacatacgatcttttgaacacggtcggcgcatttgaaccgggagaaacgattgccccgcgcgcagcgacagaaaccgagctcaagcttgttcacacgggcgattatatcagggccgtccagcttgcaggggcgggaaagctcccggcagccgaaagcgaaaactacgggcttggaacggaggatacccctgtttttgccgggatgcatgaagccgcctcccttttggtaggcggaacgctgacggctgcagactatgtcatgacgggcaaagctagacacgccctcaatcttggaggcgggcttcaccacgggttcagaggaagggcttcaggcttttgcgtctataatgacagttcagttgtgatacgttacttgcagaaaaaatatcatgcgaaagttttatatattgatacagacgcccatcacggcgacggggtgcagtttacgttctatgatgatccttccgtctgcaccgtctcgatacatgaaacaggccgctacctattcccgggaacggggcaggttcaggaaagaggtcatggcgaaggctacggctatgcttttaatatcccgctcgatgccttcacagaagatgagtcttttcttgattcctaccggacggctgtttctgaaatagccgagtttttcaaaccggatgtcattttgtcgcaaaacggagctgacgcacattactacgatccgctgacacacttgtgcacgacgatgaagatttacgaagagattccaaagctcgctcacgaacttgcacacacctattgcagcggaagatggatcgctgtcggcggaggcggctacgacatttggcgcgtcgtaccgagggcatgggcaagaatctggcttgaaatgaaagggatggaaccagaggagaaaatgcctgaaaaatggctgaaaaaatgggggaaacaggcatctgtccggcttcctgccaactggtccgacccggaagatttgtatcctccaattccaagaaaaaccgaaataacggaaaaaaacgcacaaaccgttgccaaagccctttatccgattcgctctgcccagcgtaccacttaatatgaaaattgcggcacgcagaaaaggccttgcttttgtgcaagaccttgctttcttctcattattgttttgcgatgacaatctcgacgcgcctgttttccttcatatggctctcagtgcggttgtccctgaccggttttgtatccgcataaccgatggcaagaaaacgcgacgagtcgagcttttccttcgacgtaaagtagccgatcacagtgctcgcccttgctgcagaaagctcccaattggatggaaaacggtaagtcgaaatcgggcggctgtccgtatgcccctccacacgaatcgggttggacaccgatttgagaaggacggcgattttatgcaaaagcgggtgagcttggtctttcagatccgctttccctgaatcaaacaaaaccgcttcctgaaggacgagaatgacgccccgttcgtcacgcttggccgcaatcaaacttgacagttcgtttttttcaatatagtcattgattttctttaataaatcatcttggcttttagccgttttttcagccttctgatcgcttgcgtcttttttcaactctgcggcggatttgccgtcggccctgtcttgaaatgaaccgactgctgctttgaatttgtttaaatcgatttgcgacatcgaaaacagtaaaataaagaacacgaggatgagcgtaatcaaatccgaaaacgtgatgatccagtttggcgatttgcggccctgctcgcgcttccttcgttcatgtctaagcttcatgaggcctgtccttttgtttcatgcggtccgcccgcttttttgtccattcttcttttgaactgaaaacgacaagctgactttcaagatttcgcggatttcttcccgactggatgccgatgatgccttcgatcatgacttgcttcttaaagatttcattctccgtcttttcttcaagcttcgcggcgatcggtataaacagcatgttggctaaaagtgatccgtaaagcgtcgtcaaaagggcgattgccatattcggaccgagcgtttccggcttgttcaggtttttgagcatcatgacgagaccgacaagcgttccgatcattccccatgcaggcgcaaattctcctgctttttcaaagatccttctcccctttctgtgtcgttcttccatcgcggcaatttccgagttcatcacattgcggatcgtctcctcatcccatccgtcgatggcaaggagcaggccttttttcaaaaacgggtctttcatttcattgacattggcgtccaatgataaaattccttgtttgcgcgcctgttcagacaggctgacaaaggttttgaccaattcgcgcacatcatcttcctccgaaataaagacctgcttcagcacagccggcgctctttttaaatctttcggggaaaagctgatgaatacagctgcacacaatccacccgtcacaataaaaaaagacgtcaaatcgataaacgaataaaaaccggaaagccccgctccagagacaacgccgagcactaaaatgaaaatacccagaataaaaccgaccggtgtcagataatcaaatcgtttcattttttcataatctctccagctcaaggaaaagaaagcaagcaattcacgaaaaaagctgtgaacacttgctttctttctcgtttatttaatgatgatcattttgttgattgtctgagttcaatgcgatgcggcagctggacaatatgctcttcgacttcctctttgttcatcagctttgtcagaagcctcatcgccacggcaccgatatcatacgtaggctggacgacagtcgacagctgcggccgaaccattaatgaaagccttgtattgtcaaaaccgatcacttcaaggtcatccggaacagccagtcctttatcctgtgctgcgtgaataaccccgagcgccatttcgtctgtcgctgacaggacggctgtcggtttttcatccagcttcattaaagcctccagcgcttccattcctgaatcgtacgtataatcgccttctacaacatactcttccttaaattgcagccccttatccccaagcgctcttttaaagccttgcagttttttcgcttgattaaccggttcagccataggtcctgagacgaacgcaaggcgcttatggcctttctcaatcagcatggttgccgcatcataaatcgcctgttcataatcgatcgcaaccgacggcgtttcccctttttcttcaacagatgccgcaagcacgatcggaactggcgatcgcttaaattcctccacatgctcttcagtcacatttccgctcataaagacgataccgtcaacttgctttcctagcatcgtattcaaaagatgaagttctttgtccatattctggtcggaattgctcaaaataatattgtacttgtacatcgttgcgatatcttcgattcccctcgccagctctgaataaaagatactggaaatatcgggaatgatcacgccgacagtcgtcgtctttttgcttgccagccctcttgccacggcgtttggacgatagccaagacgctcgatcgcttcaagcaccttctttctcgtcgtcggcttgacattcggattcccgttgacgacccgggaaacggttgccatacttacatttgcttcgcgtgctacatcatatattgtcacattactcatttttaccactccttaactgggtacacttttcttttcctatagcataaacattttcatgtagagaaatgtcaaaatgtaaaactttatgtaaaataaacagaacaccagtttacattatttttcataacctgccaaaacaaaaggggctctctgaaattatacacggttttacctaatatgaaaacgttccctttatttttataattaatttaaataagaataaacagctttttacttaaaaataagaaattttttcgacaatttttgatgacaacgtaaaaaaaggaccgctcgcgagcggtccataaacaaatcttatgcttttacttgaacgagcggcttcagttcatttaaccatttttcaaatgtcgggatatccatttgctgagctgagtcggaaagcgcgacagaaggatcaggatggacctcggccatgacaccgtcagctccgatcgcaagcgctgcttttgctgtcggaagaagcaggtcgcggcgtccggttgaatgagtgacatccacgaatacaggaaggtgagtttcctgcttcaggatcggcacagctgagatatcaagcgtatttctagtcgctgtttcatacgttctgattccgcgttcacaaaggatgatttgatcattgccctgcgacatgatgtactccgctgcattgatgaattccttcagcgttgcggcaagtccgcgcttcagcagaaccggcttcttcactgaaccggccgcttttaagagctcgaagttctgcatgttgcgggcgccgatttggatgacatcgatgtaatcaatggcttcttcaatatgctgcggattcacgatctcactgatgacggccagatcatactcatcagcaacacgctttaagatttgcaggccttccacgccgaggccttggaagtcgtacgggcttgtacgcggtttgaaagctccgccgcgaagcagtttcaagccttgctttttagctgccgctgcgacttccgctacttgttcgtagctttcaaccgcacacggaccgacgataaatctttgttctccgtcgccgattttttcgcctttcagatcaacgattgtattttcaggctttttcttgcgagaaacgagcagcgctttgctgtgatcgtcttcctgcagttcaagcccggctttgaaaatctctttgaagatatgctggatcgtcgagttttcaaacggtccgtcgttattttcaataatttcgttcagcatcgctctttctctgacaggatcgtagcggttgatgccttgtgcttccttcgcttttccaatctcctgaacgattcttcctcgctcgttaatcagctttaatatttgcaagtttaattcattcgcctgctgcctcagcaaatcaagttcagtgttgctcatggtaatccatcctttcttttaacttcaccctctatgaaaataagaatgattcaattgattagggtttattataaacaatgtttcttaaaatgtcacgaaaaaattctttattacccaaacgcttttaagtgataaagcattatatgcagtttatcccttgctgtgcgggtgtttatcggaagaataaaaaaaagaatcatgtttgattctttaacttgataacctgtatattctctgtattgcggtttcgacgctaaaaaccctgtcattcaaggcagccgccttatcatcggcatgttcgacaatgttctccgtaaattgtccgatgttctcgatgatcgttttcgggagcctctcctgccctcttttcagttcatctatatctgtttcaagccgattcagccgcttgtccattgcgtttaagcggttttctactttgtttaagcgcccgtctatttctttgaagcgcttgtcgattgcgttaaagcgcttatctacttcaacgaagcgtgcgtccacttcatcgaagcgcttgtctatctcaacgaagcgtgcgtcgattttgtctaagcgcttgtcgattccatcaaggcgctgattgatcggactcaattcttcttttagaacggattgaagcatgtcctttaattcagtgttcaactgatcacctcccgttttattaattataacgcacaccaatggatcaaacgatacattttcctaaaaaggcatttccatgaggcaaaagcatcataacaacatagaaaacggccaaaacgctatacgtcttggccgtttttagaagcggattatctgctgttttccgcaagtgcttgtgcggtaatttgcgaatgggaggcatgccatttcacattcccgtttgtaaaaatgaaggcttgaggactttcgtgcttaatcccgtattgctcagcgatatagtttgacagcgggcggctttcctgcacttttaaataataagccggtatgtcttcatgctgattggcgaatgattcgaattcttcaaacgcgcgcctgctgatcgggcatgtcacgctgtgtttcaaaaagataaatgtatcattgttttctgcaagccttttaaattcatcctctgtttgaatgagctgtttcgacacggtgatctccctttccacagttatttctgagcggtatctgctgttttccttgcttcatcttctatttcatttttggcttcttcagcctgttcttcgattgcagacgatgcttcttcctttagttcaccagctttttcggcacccttgcttcgcaagtctttgactttatccataatctgtgaagactggtcggcaacaagctgtgaaatcgaagatgtcttctctttggcgatgctgacgtactcagagcctctctccctcgcttcgcttgtgagctttccggtcttatcctttaaaacgacggcctgatttccaaggtcatcgcgaagctctttccccgacttcggcgctaaaaataaagctgcagccgccccgatgattccgcctacaaacgtgccgattaaaaaatccttagtattcattccgtctttactcatttattattcctccctcatcttcttttgtttccatctattccaaatttccaaagctgcattgctccagctgacaacttgagaaattttttcacggttttgctctgcggctgatgtgacggactgtgaaacctgctgaatggagttgttaaactgcctgaccgatgtgccgacttcctgaacggcattcacgaccgtattcagcttcaaagatttttcctgaatatcatcagcgagccgattcgtcttattcaggagctccgttgtttcagcggtgatgcctttcatttgtccttccacaccttccagcgttgatgcaacatgattaagtgtgacttgaagcgattttaatgtttttgataaatagataaccaaaataagaaagctaacagcgatgagtgcagcgcttaaatacagaataataatcatcttatcctccttcagctaagggcttacaattgatgtatacccaattgtttaaatcgtaaacctctatatttactttttctatacgcacgggtgaattcctttaacagaaactcccgcttcatatgtacaaaaaagcagcggattgactcacactgcctttttcttgttatgctaatacattttcatatgctcttaaatacttttgaatgtcacctgcgcccatgaaaattaacaccgcattttcatgctcctttaaaattgatgtgtcattttcatcgatcagcttcgcctgcggaattttctcctgcaaatcaccgatcgtcagctttcctgcgttttcccgggcagatccgaatatatcgcaaagatatacataatcggctttcttgaggctttcggcaaactcattcaggaatgactgcgtgcgcgtaaatgtatgcggttgaaatactgcaacaatgtcccgttccggatacttctgtctggctgcttcaatcgtcaccgtgatttcagtcggatggtgggcataatcgtcaatcagcacttggctgccggcatgtttttcgttaaatctgcgtttaacgccgccaaaggtttgcaatccttctttaatgatgtcgacatcgacctgttcataatggcagagggcgatgacggccaaagcgttcagaacgttatggctgccgtatgccggtatatagaaagtgtcgtagaatgtgttcctgacgaaaacatcgaacgttgtgccctcagtatttttgatgacatttctcgcctgaaaatcgttttcctcggcaaagccgtagtatacgactggaacgttcgcatggattttcatcaaatactcgtcgtcaccgcatgcgataattcccttgttcacctgtaatgccatcgtctgaaatgcatcaaatacatcatcgatattcgcgaaataatcgggatgatcaaaatcaatatttgtcatgattgcataatcgggctgatagctcagaaaatgccttctgtattcacaggcttcaagcacaaagtactcgctgttttcgcagccttttccagttccgtctccaatcagataagaagtcggttttgcttttttgatgacatgtgacaaaaggcccgtcgttgacgttttgccgtgtgcccctgttacggcaatgctcgtaaacttcttcagataatcgccgagaaatttatgataccgcacgactggcaggccttcagcttgcgctttttcaatttcgggatgagtgtcgggaaaagcatttccggcaataacagtcattcccggcttgatattttccggatcaaacggataaatcgggatatttctctcctctaaagcggtttgtgtaaaaatgtacttttcgatatccgatccttggacattatatccattatcatggagaatttgggcaagcggactcatacctgtcccttttattccgacaaaatgataaacagtcataatagtacctccaacaaacgtctatctgcttcccagtatatgacgcttatttcaatttgcaacctaaagcccggccgcatcgttttcttcaaagtcataattatattcagtatcaggcattttcaagagcgaataaacctcctgcggaaaggatttttttgacccctttcacggaagtgctcttaaaaacggattaaaacgccgctggcggcgctttaatatacggcgctctaaaaaaacacgcccatcagctatcataccatgtttagccgaaaagtgaactactttctattaactgttccagatcagcctttgtaatcaggacttctctcggcttgctccctttcgcttcagaaatcatgccttccctttccatcatatcgattaatctggcagctctgttatagccgatgcggaagcgccgctgcaggcttgaagtgctggcgctgttttgttccacggcaaattcgcacgcttcaagaaacagttcatcgtggtcaaatccggccggattttgtctgaccaattgttcctgttcaaataaatagttcggctcctgctgccgtctgacatgtgaaacgacacgatcaatctcccggtcggacacaaagttgccttgcaggcggaccggtttgcctgaaccattctccaagaacagcatatccccttttccaagaagcttttcagctcccgccatatcgataattgttcttgaatcgacagcgcttgaaacagaaaacgctattcttgttgggatattggctttaatcaagccggtaatgacatcaactgaaggccgctgcgtcgcaatcagaagatggatgccgcacgctcttgctttttgtgcgattcggcagatgctctcttccacttcattcggagcgaccatcattaaatcggcaagttcatcaatcacgacaacaagataaggaagtttttcacccatgttctgttcccggactttttcattaaaacgctcaatttcccgaacaccggaatgagcaaataattcatagcgccgttccatttcctcgacaacccattttaatgcggcggttgccgcttttgcatctgtgatgacaggactgacgagatgaggaatattattatacggagcaagctccaccatcttaggatcgataagcagaagctttacatccctaggcgacgctttaaacagcaggcttactaagatcgtgttgatgcatacgctttttcctgatcccgtagcaccggcaatcaaaccgtggggcatttttttcagatcagccacgacgggctttccggatatgtcgagtccgagagctgctgtcagaggagacggattcgttctaaattccgaacttctgatcatttcgcgtaaataaaccattttgctgtgcagattcggcacttcaattccgatcgtattttttcccgggatcggtgcctcgatccgaatatctttcgctgacaggctgagtttaatatcatctgacagatttgtaattttgttgactttcactccgggttcaggatgaacttcaaatcttgtcacagaaggcccttgggtgacatgaacgacatttgctttaacattgaagttctcaagcgtgacgtccaacagctcccgctgctcgtgtatccagtcctgatcatcctgcttttgcgccggcggcacatcaagcaaagacatattcgggaactgatacccttgaggcgctttttctttttgtttatctgaggcaaacatcatgacattaaacggaacagagcctttcttcgatcccggagcggctcctgcttcccgcttccgcggagcttccggccgatcctcgtttatccttgtagtctcccggttctcttgcctgctttcgggttcacccgcgcttggcgctgccgtttccggtgaacatgacgcctgctcttgtctccagccagtctggcggcttccgcttgtttcttcaagagcgtcagccggggtgtttgaatctgtcctatgggaagattcatcgctctggacggttatttcagaggcgcggccatgagtgtgcggctcttccggaactgaagcttccgggtcgggatgcgttttgcccgaaccgtaagtcttcccttgttcttccgtggcggcttctgcgtcctctgccagtaccatctcttctccggtttcctcaatcttatccaaaagcttttcgatttgttccggtgtttgctcagcggggattgcgtcttcctccgttatgttttgtgatgcggaggcggtctcttctacagcttcatttcgcagcgctttttcctctgcgagtcccgcgccttctgtcattcgctctggacggacttccgtttcttccagaatatgcgctgagacaggtgcttctgttcgttcggattcatgccgcagcgctttttcctctgcgagtcccgcgccttctgtcattcgctctggacggatttccgtttcttttggaatctccgtggatgcctgcgggacatcttcgaattcggcgcgcaatgcaggattgcggctctcgcttttgatcagcggacggccgttcttttcagtttgcacggaagcttcttctcgtaccggctgcttatgttctgcagacttctgctctttttcaatttcttcgttaaacagcgtgacacgcgcttcagtttgtttttttgcacgatatgtatgattttccggcttggctcttttctgctcatgaaagccgtaaaccggtgatgggatgacggacggcctaaaaggttttttcgccgccgctttctcttcataatgatatgaattgccgggtttcggctgagaagctgaatatcggctcgccgggcggcgggtcctttgttcgcggctgtcgtccttttcccgcggccgcgtgttttgatcaggtataaccggaaagcggaatttcccttttggatattcatatacgacttttgcgtcggttatttgcggcatctcttcgtcctctgaagatgaatccgcctcaaattcgtctatgtgctttttttgtttttcattatcttcatcatcgcctaaaaacaggctgaacattttattaaaccagctcatgaatcatcactctctaactcccttaaatttttcggggacggttttaagtataccactgcttccccacccagaaaaggacaagtccttctccaagcgtccgccctccgaataaaaaagccgccaagtttgtctacccagcggcttctttttacatctattcgaaagttttgttcattttatgccgttaaaatgtaaaggcttctcctgctttacggccgtcgtcaagaacaagaatgcctttttccttcggcgcgtctgggagattcagctccttggcagaacaaatcatgccgcttgacgccactccgcgaagttccgcatctttaatgatcataccgctaggcatcacggcgccgactttggcaacgacgactttttggccggcttcaacattgggagctccgcagacgatttgcagcgtctcgctccctacattcactttgcaaacacttaatttatcggcattcggatgcttttctttttcttcaacatatccgaccacaaacttcggagaaaggtcgacggtcagctcgtctttcaaaccgttgcggaccagaatttcattcacatcctggacaaaggattcggaaagcgcaatagctccgctttcctcaatgctcaaatatgaggaggcattaaaaatgttatagcctgctgtttcctttgtgtctttatgaaaaattttcacgacgtctccgtaccgctcaaaagcgatctcttcacgtggaatatcgttcaatgagatgagcagcgtatcgcctacgccttctggattataaaatgcgttcatgagaaaaattcctttctatcatttctttttagggcggtttttagccagaataaagatcggttcaagctttccatcctcatacaggaaagaaagcgcagtgatcggcactgtgccgtttgcaaaaaagctcatcgacattcgcccgagtatatcgtatccggcattattgcggatgtcggcaataatcagcacatcctggtgcggaattgacacggcgagggtcccttccgcgtttttctcatactctgcgagaatcgattcgttcaacaccctgctggcgtcatagccgtcattcgctctgaaaaagtagaagtgattgcctgcgacttcgtcttctttgacaacggtctggagcgagcgaaggttaaaggaagctgtttcccgaatcctttcttttgtccagccctctttttcaagcattttttcgtcgatcagacggtatgtgttgccaaggtcgagcgcatagtaaattcgtgtttcagccgtgtggccgtcaaaaaccaagggaacgcctgcgctggacttctcgggaaaggaagttgagcggatgacgggatagatcaggctttcccgtccttccatttcctgcgactggcctttcatggcgttgagcgcttcctcagtataatagacgacttcgtcaatcgcatcatcttttttctgctcccatttcgcgatgatccccgggagctcgagtgtaatgccttttccagtgtttttatcttcgattctcaagctgtccttttccctgtcgaaatgaaaggaccagctgtcattttgcaaacgtttttttaatatatcggaaagtttccttgaggtcattttcatagaggaactctcctttcggctacttattcagtgaatcggtcaaaaattgctcgatttcctctttcgttttccggtctttgctgacaaagcggctgatttcgtttccttctttaaatacgaggaagcttgggattccgaaaatatcccactccgcgcacgtgtctataaatttgtcgcggtcaacataatagaatgtaaattccggatagttcgcttcaagctcgggcaaaaaaggttctacaaaacggcagtccggacaccagtcagccgaaaacatcaacaaggataaatcgtctttcacaactttttgcaattcttcattcgtctcgatcgttttcatcactcaacgcctccaatataagttcttatcatccattcggatcataccagactgccggctctatagccagccttttgctgcctgccggcttttttaaaagatggacgattcttatgtatcttacccgttttaaaaagggaaaatcttaaggatccgaacctctttcatatcataagcataatttttttgtctttatcaagccattctcgtttaacattataagtaatagggtaaaaatatccgttaaggcgcctcgcgccgtgatcccatgacagtcaggaggagcatgtatggaatttatcgtttatcttgccggagaaatacatagcaattggcgcgaagaggtgaaggaaaaagcaaaatcgctcaagctgccgatcacatttgtcggaccgatggaaaatcacgagcgctccgacaacatcggtgaagaaattatgggcaagcaggctgattcaatcgcaaaggatgatgcagcctcggatttgaacaattttagaacttccgttttaatgaacaaggcggatgttgtcatcgctcttttcggggaaaaatacaagcaatggaacacggcaatggatgcatcatacgcgatcgccaaaggcaaaccgctgatcatcatccgacccgaatcactccatcatccgttaaaagaactgtcaaacaaagcgaacattactgtggaaactgtaaatcaggcaattaaatcgttgtcatacgtatttgaaagccggtagttgtttttccaaaaagaaaccctgggcgttaagcagcacagggtttctttgttcactcatttcgcaaaatcgactggacggcagaactgtcgcaagctttgacaagcttgatcagcaattcttttgcagcaaggtagtcatcaacgtggataatggaagcagatgtatggatgtatcttgaacaaatgccaatcacggccgaaggaacgccttcatttgagatgtgaacacggccggcgtcggttcctcccggagaaacaaaatattgatacgggatgtcatttgtctctgccgtatccagcacaaaatttctcatttcgctgtgcatcaccatggtccggtcgaaaatcctcaacagcactcctttgccaagctggccaaattgatttttgtcgccgctcgaatcgtttgccggacttgcatcaagcgcgaaaaacaagtcaggctgtatcatattggccgcagtttgcgcgcctcttgttccgagctcttcctggacggtcgcacctgagtaaagattgttcggaagttctgttccttgcagttctttcagcaattcaatgctgagtccgcagccgtagcggttatcccatgctttcgcaaggatcttcttttcatttgccatcggggtaaacggacagatcggtacgatttgctggcctggtttgacaccgatgcgttcggcatcttccctgtcatccgccccgatatcaatcatcatgtttttgatatccatcggacgtctcctctgctcatctgtcaaaagatgaggaggcgtgctcgcgatgacgccggggatcggtccgttgtccgtgtggatttccacccgctgggccaataaaacctgactccaccagccgcccagcgtttgaaaccgaagcaggccgttatctgtaattgatgtgaccataaaccccacttcatccatatggccggccaccataatttttggactgccttcaggtccatgtttaacgccgaacacgcttccaagtctgtcctggatgatctcatcagcatatttttcaagctcttttttcatgaagcgacggacaagatgttcgtttcccggggcgccggggagctccgtaagcgtttgaaaaagcgttctcgtttcctgattcatctgtttccctcttttcttatgtatctctctacattttacataagtgtgcgatgtgtttccagaagagagcccatccttaacacggacggacatgttctgtataatgaaaaaaacaagctttggaggtgctgaaaggatgaaactgcgccactttcttattggagccggcatcggcattgccgcggccgtcgttgtcaaacaatatgtcatgcagccttacatttcttctgaaaaagcgctgcgcatcgtcaagtccgcttttaaacagagaggcccgatcgacggttcatggatatataccgttccggaagcctataccgtaaacggcgaaaccgtcatggtgtacaaaacaggcattacgcgttccgctttcggagagctcgaacagtacgaagtcatggttgatgcaaaaacaggcatgatcgtagatgtaattgatacagcagcatagcatcaaaaaagatgcggccatcagggccgcatctttttatatggcgcgaatcggccggtagaccggatgccacatcgcatcctgcaccgcctgaatcacatcgtccggctcgttttctgcaactccgtcttctatggctgctttgatgacagccgttgccacggttgcggaaaccgtgcgcaaatcctcaacttccggaagaagcgcggcgccgggccggcccgtatcaaccatacccgcgatcgcagccgcgctggcgtaaaacatgttgtccgtaatcagtcttgcttttgatacgagcgttccgagcccaaggccggggaatacaaaggcattattcgcctggccgatcgcataacgggtgccgctgtattccacaggcgcaaacgggcttcctgtggcgacgagcgcccgcccttccgtccaattgatcaaatcttcaggccttgcttcagataacggcgtcggattggacatcgggaatatagccggccgtttcacatgctttgccatttcttttacaatttcctctgtaaatgcgcccgataccgtcgaggttccaatcaaaatggtaggctgcactcttttaaccacctcgagcagatcaattgcatcccccgggccgttccggctgaagtcttttacctcgtcagcaggccttgcatacggttgttgaatgtcctgcaagtcgttcatatcatctgtcagcaaaccgttccgatcaacacaccaaaaacggcggtatgattcctcttccgacactccctcttgaacgagtgcggcgcgaatttgctcagcattgccgattccggccgtccccgctccaaatatgaccactttctgatccttcagcggcatttttgatattttaacggccgcaagcaccgctgcgagggtaacagctcctgtgccttgaatgtcatcattaaaggtgcaaattttgtctttgtattttttcaaaatctgacgcgcgttctgcgttccgaaatcttcccagtgcagcaaaacgcccggaaacgtctcggttgcgatttgaacgtattgatcaataaacgattcataacgctcgcccctgatcctcgaatgctgattcccgacataaagcggatcgttcagaagcctttcctggttcgtccccgcatcaatgactactggcaggaccctgttaggatcgatgcccgcagctgcagtataaacagcaagctttccgatcgaaatggcgatgccgccgactccccaatccccgattccgagaattccttcagcatcagtggccacgatcaaatcgatccggcttcttttagcggccagattttcaaatgccgttttcatgccttcagggtcattaaccgacaaaaacagcccccgcggctttctgtattcatggctgtattgctgtattgccgttccgacagtcggggtatagacaatcggcagcatttctgtcatatggtcgttcagaagcctgtagaacagcacttcatttcgatcatgaagcgccgttaaatagacgtttttgctcaaatcatcaggctgtgattggaactgtttatacgcccgttttgcctgttcttcaagcgtcagcaccttgggaggaagcaatcctgtcaagccgagagcatccctttcctccggagggaaggcaacccctttgttcaacaggggagtcgcaaggacttcaaatcctcttaaccgcgtctcgatcacttgttcatttaatttattgtggctcacccgtcgtcttcctttcaaaagttagttacccttagaatggataacaacaaagcaaaccattcaccaaaatagctagcggctttctctttttactgactctgcaatatcgccgttttcatcccattttaatgctctgtaaagggcatcgtggtaaaaaatgtaccaggcgtttttctcggcggccttcgcctgccatgcttgcttcgcggcaatcgatgtcatcggataatcgtcgtacgccagcacccagagaggattttgatgggcgtgcgtcggcataatgtcagccatatgaagggccgtttcaccggcatcttcgagaacgatcacggaatggccgtcgctgtggccgcctgtatgatgcatcgtgattccgggcaaaacttcaagcttctcgtcgaaggttctcacttgatgctgaaccgcttcccagttctctttccaatatgtatttttggagcggatattcgggtttctcatctcttcccattcgattgcagacgtgtaaatcgccgcatttggaaacacggaaacaaggctttctccctcatagcgcgtcaatccgcatgcatggtcaaaatggagatgagtcatcaaaacggctttgatatcttccgttgagagcccgagtgcttttaacgagtcatcaattgacgattcttcggtgactccgtaatttcgtttttgcttatccgtcagtttgccgagcccgataccggaatcgatcagcaggttcgtgccgtctttctgaactagtataggatctgttctaagttcgatttgatttttctcattggcgtaatacttttttgaccaaagcggcttgggaacaacgccgaacatggcgcctccgtccatgtgcgtgacgcctccgttcagccatgtcagcttgattcgtccgattgttaaagtttccatgatcatccctccttctcctatcgtagcaaaaaatgcaacctgaatcagcttcatttgaaagcaaaaaaacagactgcaggaagcagtctgtttttttatgttcgccattcagcttcgactctgtagatcggctggcctttagcggcgaacttttcttcgtattcggtcatcacatttccttcaaaatcgctttgatgcaggtcaaggctgacgaatgtcaaaacgagtccgtattcggaaaaactggtgagggagtactcaaacaacccgcggttatcggttttaaaatgaatcgctcccttgcctccgagcacctgctcatactttttcaagaacgcatgattggtcagacggcgcttttcgtggcgctttttcggccacgggtcggaaaaattcaaatagacccggtcgacttccccgtctgcaaaaacatctgaaagcatattggcattgatgttcaagagctttacattcggcgcctctgtctgctttactttatcaacagcggttacgatgacgcttttaaatagttcgattccgatatagtttacatccgggttttgcagggccattcctgaaataaattgcccttttccggttcctacttcgatgtggatcgggttgtcatttccaaaaacggaatgccatttccctttgtattgagacggctcgctgatcacaatatgagagttttcagccaggtagtcatccgcccatggcttgtgacgcattcgcatgtacttacacctctatctgttatatcgtcttacaacataccatgaaacgcaggaatcccgcaaggcctcttccaaagcaaaaaagaccgaagatcggcctccgggtctttcgcgtataaattacagctttctgaacattttaatccatatactccgagaatgaagggaagtgccaatattatgggcttaaatcagcaaaatcagattcatctattaaaagacattctctcagaccatcaagcagactgcaccggaaccgtcgctgaatgcgaacagatggagcggattatcaagtctttaatggcaaacacgaatcttgacgccggcttgaaaggcgttttggaagacatttatttgtacagccagaagggaagatcttccgcttcgatcaacaaccacattcaggagcaccaggattatctcacgcaatgggtggaagatatcgactcattttcatgaggacctggcgagacgctccattaattcatgcagctgttccagcccctggtgaaagccttcctgattgcctttcgctttttgccagagtgtcgtcattgctttttccgccaatacgtaccaggccattctcagcctgagattgtctgtaagagaagagccgtagcgttcgagccagcttccccattcccgctcttcaacgtaatgataaagaagcggccccagatcgatcgcggggtctgcaatcatcgctccatcccaatcgattaaataaagctggttctgatctgtaagaagccaattattatgattgacatcgcagtgacagacgaccttttctccggactgtacatcttcaagatggtgctccagatacaaaagggcctggtccagctgcggtatcggatattgccgggcctggataaactgcttcaattgagtgattacagagcttggctgaaaaggctgtttgccgagtctcttcagcatatccaaaagctctttggagctgtgaattttccgaagcatctcagccaccgcctggctgttcatatccttcggcttcagctctcttcccttgagccagtgctgtgccgtaatcacatccccgttttccattcgttttgtccaaacgagcttaggaacaattccttccgcggacaggacagccaaaaaaggagagctgttgcgctttaaaaaagctgctgtccattatgttctgcataatatgcgtctcctgtagctcctcctgcgggggaaatctcccattcgctacctagtaattgtcccaaccagttcatatcgattttcaacccatcatttcattaaaagattttaaaaagcatctgccccctagagcgggcagcaaactgcttgtattgtcgtctctttatattcaaataaaaagacggctattgagagtcatttgtgctaaacaatagccgtcttttaaattttagcgctagacgccaaacttcgtcaagcaaaactaaaaaatcccttttggttcgtataaaacataggtcccgatgccgttcagccgaagccttttttccgcttgaaccttcccattgaagaacgtaaaaggatcgcagtgcagcaagtactgtttctgatcgggcagcttaagcgtctccttttttgcaaacggacaatgcaccactatgatttcgttccagggatcaattgctgcaatgttcttcagcttgtaggccgttacctctcctgtaccgtccataaaagaaagatgctccttgacttcttcctctttttgcagacgaaaagcgggatggcttcttcgcagccggatcagctggcgcacatattcgacatcctcgcaaagctccgcacgcttttcccaatcaagcttattgatgtcatctccggacctgtagctgttgctgtccccattctttgttcggcaaaattcctgcccggcgtgaagaaatggaacgccttgcgaaagcaggacgatcgacaccgcgagcctttgcctaagccgtttagtgtccgcatcttcttcaaaacataaggccattttatcccaaaatgtatgattgtcatggcattccacataattgattgactgtgccggctgcaagaatccgggtgaaccggcaataccgtgctgaagcgccgctttttttccggtgtcccctaaagcatatccgcggtcgctaagctcgaatgtactccctttgactgcgttcctgaaccgatcattaaaaaagccgaccgccggaacttttccggcattttgcaatgttgctttttgcccgctgtcaagcggggtatttaaatcccagccctctccgaacagaagcacgcccggctttacattctcggcaagcgtactgatttggcggacggtttcaatatcaagaatgcccattaaatcaaaacgaatgccgtcgacatcatattcttccagccaatagcggacagaatcgagaatatattttcgcaccatcagccgctcagaagcaatatcatttccgacgcctgttccgtcggatggaaaaccgtattcattatgtctgaaaaaatacccgggaaccgttttttcaaaaggggacgtttccctcttgtacacatgattatatacggcatccataatcacggagaagccgtgtttgtgcagcgactgaatcatcgttttcagctcggtgattctgcatttggggttctgcggatcgagcgaataacttccttccggggcattaaaatggagggggttatagccccaattataagattgatcaggagacagctcatccactccggcaaaatcgtgaaagggcagaacctcgatgtgggtgacgccgagctctttcaaataggcgattcccgttgagaagccgccggatgtttcagttccgtcctcagtaaaagcaacatatttgcctttatggcgcataccgctgtcttcatgaatcgagaaatcgcggatgtgaacctcatatataaccgcatcgcacggactgtgaagtcttggagcgcggtgtttttccaccttgacttcctctggatctaatacaacgcctttttcaccgtttgccgtaacggcttttgcataaggatcgactgtcaataacggcttcccatttacataaagctcatataaataggaccagccgtttagatcgccttcgaccgttacctcaaaaacgcccttttttctgcgcatcatttgaaaagtatttgtttgaagcgaatcagggtcctccagcttgatcgttgccgcactcgcggtcggcgcccataccttaaataaagtacttccttttgaataaaaagcgccgaggcggccgtcataaaaaaaagccttgtcaaacgccgcgcttctcgtaacagagccgatttgcaggtctgtccagacgctttcttcacagcatactttgtgaactcttccgaatggaacggtgcagctgctttcaagaacatacttgaattgttcctcaagctccacctgcgcttttaccgaaagctctatcctctctccttgatcatcttcaagcagaaaaggaggactgcagcttgacgcacggctcttcggaactaaaacagtgatcgttctcatttcatcgagataagcttcaaaagggcggctgatacccggcatttcagtctctccttcattcgaaagatttatgctcttaatcgaagggattcagtccctgttttaatgaaaacgggcgcccagccgatcacctctccatccgcttgaaagagcacccgctcattcgtatgaaaatagatgtctttcgtcttaaatgccgtaacaccgtttttgccgacgtgtttgccgaatatcatcgcaaacaagaggccggcttttttcaagacgggcaggtcttcaataatgatcacgtctaaaagctcatcccgcggattcgcattcggtgcaatcttcattcctccgccatagtaaggatgatttgaaaccgacgcaaaccagatttttttaaacgtacgcttgtcatccccgttttcatacgaaagaacaaacggtttaaacgtaaacgccgtgacaaagaaaatcagcggatgaatcaaatgattcagcctgagagcagccgtccatttcggcaaagctgacatctttttggcggtgcatgcatcaaatccgaggctgagatgattcgcaaaataaagttcgttttcactgtctttcgtatgaaagcttccgagggcataggtccgggtcagcgattggccttttcgcttcatttctttgatgacattcgattttttcacgccaaagccgcgtttaaaatcattgcttatgcctgacgggatgacgctcagctgaatgtcccgcaagctgactaaaccattgagcacttcatggacggttccatccccgccgatcaccagaagacgcttcagcctgtcatcctgcatcgttgatatttgccttgccaacacctcagcatgcccgggatgctgagtcataaacgagcggtacgatatatttgccttttggaggtctttctgcaatgatttccatgctctgaaggccgtcgagtttcccgcctttggatttatgatgatataccaatcgctcatgattccattctccattttatagtatgaaaaagccgggataacgttctgtcggtcagctcagccattcctgtctccgcaccgagtcggagacgccgtgcgacaaaagaattttcgccgttttcagctgctggcttttaatcggggcgaagtttttttgctgtttctccagccactctttccagtgtctcttgtcgcaaatgccgattccgtagggaggttccggataatcgatgtacgatgtacggctgacgatgactttgcgcacaggcagttcaatccccgatccctttaacaaaccggaaagaaccttgcctgtcctgaggagctcgacagccggatttaacaatgaccgttccttgccccttaccgttttttctttccaaaaacgatctttggaaccgataaatgcgctgtccctctcaccttcaagaaatgacatacagtagatttcaaggggagtgagaatcaagacgctgagctctaccgcagcctgattcacctgcagcaccggccgatacatgatgaaatatgaatccgggagctgctgtgccaaaatgtgcaggattttatcgctttttatttcccgggaaagcctggatatgtcagagattgtcgagcttgcccatttcagctgaaactcgtacacgtattccttaaaaaacggtacgagttcttcccctgccgcaggaattcttgcgatcaagctttcatccgtttctccgtccagtccgttaaaccattcatcggcttcttttcctttattaatatcggatgcttctttttttctctttaatgtaaatgtattctttctttttccaaacgtttcatcaccggcggctcctttatcgtgatgaaagctttctttctttttttcagccatctctttaattgactgccagcgctgctttttcaagcggataaactggttgatataatgataaggatcttgttcataccttgaaatacagtcctgtattttaataatctgtgccatctgcgttcatctccgaatcttgcttttctgcagtcggccgttcgccgaaatggaaaacggcttgatgctcgtatttgggaagcctgtctaaatgggtttgaaagatggtgaaatgccgggccgtaaaagacaccgcgtcttcaagcggctccaggcgtccgttaaaagaggccgatccattccactttctggcgaccgtcacatgtggatgaaaaggccgtttttcaatttcaaagcccgccgcatccgctgcatgcttcacctgttccctcacatgaaagagagcggctgagtattccggttccacatgaagaattctcggctccgacggctttccgaaggttccgaaacgttttatcgcaagctgaaacggagccgtctcatcggagatcagcttgaggctgccagcaagcatcgccagctgctccttttcagcagagccgaggaacacgagggtgatgtggtagtccaaaggatgcacccatctatgaaaagaaaattccggacggctgctgaccgtttgataaagcggatcactaagctccgccggaattggaattccaataaagtaatgcggtttgactgacatatgtatggcttcctcctcattcgtcttctctatattttaacaaaaaatatggacttataacctctctattttcactttccaagggcttatgataggatattgacagaatcatgttttctagaaagggtgcacagttgtgagagccgttcaaaatattgcagaattaatcggggaaacgccccttgtcaaccgcgttcagcccgaaaacgcggcccaagtttatatcaagcttgaatcttttaatccgagcggaagcgtaaaagaccgcgcggcctaccaaatgatcctggatgccgaagaaaaaggcctgctgaaaccgggttcaaccatcattgaaccgacgagcgggaacaccggcatcggccttgcgatgaacgcggcggcaagaggctacaaagccattcttgtcatgcctgatacgatgacgaaggagcggatcaatcttctgaaagcgtacggagccgaagtcgtcctgacgccgggggatgaaagaatgccgggcagcatcaaaacagcgcaggagctcgctcggcaaatcccaggcagctttattccgatgcagtttgataatgaagccaatccggaggctcaccggagatcaaccgctctggaaattgcccgggcaatagaagaaatcggcaaacctctcgctgcatttgttgcaacagcagggacagggggaacgattaccggaacaggcgaaaagctgaaagctttatttccgggaataaccgttcacgtggcagaacctgcagggtcgcctgttttatccggcggcaaacccggaaaacacaagcttgtcgggacaagcccgggatttatcccaaacattttaaacgaaaacgtctatgacgaaatcttaaagatcaaggatgaagaagcctatgagatgacgcgcagattggcgcgggaagaaggaatccttgtcggcccttcttcaggagccgcttgcttcgctgctgttgaaacggccaagaagctccctcccgacaaagtggtcgtctgcatgacggccgatacaggggaacgctatttatcaagcgatttatttcaatttgattaagagagaaaagcctggatttctgttttgaaatcaggctcagattgttgaaaaaatcccaaagctaagagacgttttgggattttttcatcctttcagcgtgaacgcaacccttgcagtctaggaaggccgagcattggagctggttttcacaggatgtgatgacggcagtgttcaggcaggacgacgcccgctccgttagccgccgtttctcttttgttcgtgagcatcgacttagcaggcctggcaacgaatgctatggtttgccgacacggaaagaagcggataaaacgccccgcaaccgaaaaagaacaaaaataaaatgaataaaaccgtttcaattccttttcctgcttcaaaaagcccctctcctcccggacgcctgtacgcaccttcactatattcgttatccctgaaaacagcaatgtttaacagcaaaaaagccgctctctagagcggccgtctatgttgtgctacacatgcattcctgttctggcatcgttgtgatccgttatatattcaatccgcttgaaaccgcagtcctttgcattttgatatagaagctccagttttttttgatctttgcagtatatcgtgacaaaactcgaatcggctgtatgcacaatcagctcgcagctgcttttcatatatgattcatatgtgctgacatcttcgggatggccatccttcggaaaagccttcagatcggcgaagatgagatagtaccttgcgtcttccagcctttttttaaatgcttctcctgtcatcacctgcggatcttgaggaaaaagattttcatctgacaattcaccgttccacgagatagcattcgccatcggcaagcagccaattgaaatcggccggttcaaccggcttcagtatatcgagaagaaagcgcccgtacccgttcgggatttcaaataaaacgcctcgcttatgactcatgccatcactctctttgctacttcgccaattcataaatggcctgtgcataaatcgatacagccttcagcaaatcgtcgatttccatatactcgtctttctgatgggcaacgtcaggacggcctggaaacagcgggccgaatgccacgccggctttcagtgatcgtgcatatgtcgccccgccgatggaaattaattgtgccgtttcccctgtctgctcttcatagacccgctgcagcgttttgatcagttcatggtcttttgctacatgatgtggcttgctgtctttaaagctgatgagccgggcgccctttatttgtgaaagcccggatttcacccggccgctctcttcagtaacaggatagcggatgttaatatgggcctccccgccttttccttgttcatactgcagccggccgacattcagcgtcagctctccgctgatgtcatcgcggcagccgatgccgatctttttccctctcgtatctccggcaaaagccccgctaaccgtttgaacaaaatggagcccggctctgtcaagggattgtgtatgtaaaaactcggccaaaatgagaccggcattgactccgttattaggttccatggcatgagccgatttgccgtgcacggttaatgtcagtctgccgccttcttgaagaatacgcccttctgcgcgtttttcttttacaaaccgggcaaatgactcttcaaattctgacgggacggcccctgccaggacggcttccgcatcatcaggcaccatgttcaggcgccggccggaccggaatgcctccaatactaagtccgcacctgtttccgcctgatcagtttcaatttttaaagctgcgtcaatcaggcctttttctgcatagataatcggaaaatcagcatcaggcgcaaaaccggccgaaggcatttcttcgtgtttaaagtaatgctccacacagcgccagtcgctttcttcatcggttccaataatcattctgatccgttttgataaagggaggcccgagtctttgacaatttttaatgcatgaaacgcggccattgtcggccctttatcatcaagcgctcctcttgcatagattcggccgccccttatttcagctgcaaacgggtcgctcgtccatccatcgccgggaggaacgacatcaatgtggcaaagcacgccgataatctcctcgcctttcccccattcgatatggcctgcataaccgtcaaggttttttaccgtaaacccgctttcctcccctttattcagaagcgctgtcaggcattcttgaatcccttttccaaacggccgtcccggacccgccgtctcttcgtcaaggacgctgttgatttttaaaaaaccttgaatatcctcaacgatctcattccgtctttttaaaacttcctgttcccagttcataatttcgccccttcttttttcagtttagccaaaaacccttgcaaaaacacccgataacgaataatatagatattgttttgctataatgttcgttattggaggaaatgatgtttaacataaaagaaaaccaaaccacagtcaaaaaagaaatcctcgccggtattacaaccttctttacaatggtttatatcgtcgtggtcaacccgagtatcctttccggcacaggcgtcccgtttgatcaagtgttcactgccacaatcatcgctgcagtcgtcggaacgctttggatggcgcttgccgccaactttccgatcgcgattgcacccgggatgggactgaacgtgtattttgcagtgtcagtcgtcggctcatccaacggcgaaatttcttatcagacggcgttcagcacagtcttcgcggccggcattctctttattatcttatcgctaacacctcttagaaaacaactgatcgaagcgattccggctaatttaaaatacggaattaccgccggaatcggattgtttatcgcttttgtcggtctgagaggagccggcatcattaccgcgaacgaagccaatttggtcggactcggcaatctgcactcgcccggagtgatactggcattaatcggcttggctttctctgtcgttttgatggtgatgaatgtgagcggcgctctatttttcggtatgatcttaaccgggctgatcgccttttttaccggccagcttgagtttaccaaagggattatgtcgatgcctcatctgccggaaaaactgatcgtcacaaaccctttcgccgcttttggcgatgtcatccactacggcctttattcggttgtcttttcgtttctgctcgtgacgatttttgatacgacaggaacgatgatcggtgtcgctgagcaagccggactcatgaaaaacaacaaactgccgaatgcaagaaaagccctccttgccgattctacagcgacgacagtcggtgcaatgttcgggacaagtccgacgaccgcctatatcgaatcatccgccggggtggccgcaggcggaagaacggggcttacgtctttaacagtcgctgtgcttttcggcgcggccctgtttttcagcccgcttgtcagtgcggtctccggaatcgcagcgattacgtcgccggcattgatcattgtaggaagcatgatgatcggcgccgtgacgaacatccgctggaaagaacttgacgaagcatttccggcctttctcgtcatcttgacaatgccgctgacatcatctattgcgacaggcatttccctcgggtttatcgcttatccgattgtgaaagccgcgaaaggcaaatggcgcgagattcatccgcttgtcttcgtgtttgctgttctctttttcatacaccttttctttttggaagggcattaatcaactgaaccccgtcttatttaaaaagacggggttttttcaatatgtacttttaacttcatcatcttcaccacctttcttttattacgtatgaagaaagaaaaagtttaaattttttcatcaaaaaaacgtgttcgcactgcatgttctgctcgcgattttcgttttttcaataatttggctccgccttttttctggatatttggcaaagggatcgtgtataatatttattgatcattttcaagaaatggtcgctaaccgtccatgctgcattttggagtcgtaagttgtggtagtcaagtccattcgatcatacgatagggagtggttgtttgaaaccttcaacaaaccgaatgctaaccaggatcaaatcagtctacatgttcattcaagaaaagggactcgttacaacccaggaactggttgatgaatttggcactacaccgagaacaatccagcgtgatctgaatgtgttggcatacaacgatctagtacacagccccagcagaggtaaatgggagactacaagaaaaaaagtgaaaatctcctcatagcaatattctgaaaaattgaactttagcgctgaatatcatataagaaagccatcaaacataaaaagcatcaaacttggttaagttcgatgctccacaaacccatttcaggcactcgatgaatcagagtgtctttttgttttgcaatgcggcaagctcgtgttcagagagctccctgtattcccctggcaatagctcttcatcgagatcgacatcccccattttcagccgctttaaatagatgacgtcatggccgaccgccttcagcattcttttcacctgatgaaattttccttccgttattgtcaaaagcaggcgttctacgccgttttcgcttgccagaagcgatgcttcagcaggtttcgtgacatatccttcaccgatatcgacccctttttcaagctgatcaagtgccgcttgatcaatcggcttattgacatggacttcatacgttttaggtacgtgttttttcggagataaaagctggtgtgccaactgtccgtcattcgtcagaagcagcagtccctcagtatccttgtcaagccttccgacaggaaacggctcaaacctcagcagctccgggtcgagcaaatcgacaaccgtttcctgccggctgtcttctgttgctgacagcactccttgcggcttgttcatcattaagtaaataaattcccggtacatgacgggtgccccgtataccgtgatgtcgtctgattccgggtcaacgtgctttttggcgtctttgactaattgatcattgacgcgcaccgcgccgtttttcagcatttttttgacttcttttctcgaaccatagccgctgtttgacaacagtttatccaatctcatgaagacacccctttttttacataaaaagaaaagccctttttaggaggcctttcttttgaaaaagcgattcaatcgctgaccgaagattttttcgagcagtttcacacggtaagccaagtacagataaactgacccgcccactgcggttgtgatgaaaatgacgacagcagacctgatctgcccgccttcgtatgaaataaaaatacttagaagcgcctggacaagcagcaaaatgatgcccatgaccgccgtcaggatcagcatcagcaaaaaccgtttaaacagtttgcgatacgaatagccggcatggcgtttaatcatgataaatccgtataggagtgaagctgaatagccgagcgccgttgccaaaatcgacccgctgccttgaagcagcttgatgagcggaacgttaagcgcgattttgatcacaatcccgatcatcaagctgacaaccgcaaatttctgcttgttcaccccctgcaaaattgcagcgttgacggtgaagagcgagaataacagcgccacaggcgcgtaccagaacaaaatatctcgtcccatttcagggagcaggctttccgagccgtaaaagaacgtgtaaaccggccccgacaaaagagccataccgactgatgccggaagaacgatgaagagaatgatctgcatcgcctgatcaatctgtttgtttaaagcagggaaatctttgttggtaaagttttcagtcaccgccggaatcaatgtcagcccgaatgccgtcgcgagagataccggaatcatcacaagctttggcacgtacagcgtcacgatcgccatcaaatcctggctgatgttttgatagccggctgcaatcatcgctttattaaacgtattcgtatcaatgtactggtaaagcggtatcgccagcccgacaaagacataaggggcggcatagctgaacagctctttaaacatttgccggtacgtaatatcggctgaaggaacaaggttcggcttcagcgccaggagcgccccttttcttttctgccaggaaaagtaaagagtgaacagtccggcgaacgctccgatcaaagccgcaaaagtcgcatagccgacagcgacgacaagcccgccgtttaatactttgatcaccaagtaagtggccgttaatagaaagacgattctggcaatttgttcaactacctgtgaaacggctgtcggccccatcatctggtgaccttggaaaaagcctctgatcagcgccaagatcggcacaaccagtagcgcgagactgaccatgcgaatgacatacacgacatgttcaagcgtcagcccgttgttttctgttccgccaagggccatctctgcaaaaaacggggcggacaaatatagaatggagaaagcaatgatgcctgtgacgagcatcatcgacattccggcgcgcagcatccttctcgttgtttcataatcacccatcgagttatatttcgaaacaaacttggacacggccgccggaaaccccatggtcgcaatgcttaaaaaaatcgtatattgattataaccgtactggaacagggcaccgccggtggcaccgaccatggctccgaacggaatcaaataaatcattccgaggatccttgaaatataggtaccaagcgttaatacaaatgtgcctcttaacagtttgcttgacatgttcccaatcaccatttttcttcaatagattcaacttttctattttaacatacaggcgctccactcaggtaataataacatggctaaattttaacatggctttgttttatcgttttttcatcatgccgttctttcgttataataagaagatggagcgcggttgttgtctgatgcaatctgccccgcctgcacagaatgcaggctttacaagacaggaaagttgaggatattggtatgaagtattttgatgtcatcgtcatcggcggaggcccctcaggattgatggccgcaatcgcggccggtgaacagggggcggacgttctcttaatcgacaaaggaaacaaactcggacgcaagctggccatttctggaggcggacggtgcaatgtgacgaaccgcttgccggttgatgagatcatccggcatattcccggaaacggacgctttttgtacagcgctttttctgaatttaacaatgaggacatcatcaagttttttgagcgtctgggcgtcaagctgaaagaggaagatcacggaagaatgtttcctgtctccgacaaggcgcaaagcgtagtggatgcacttttaacaaggctcgaacagcttcatgtaagcgtacgtacaaacgaaaaagtgaaaactgtcctatacaatgaagaaaaagcgtgcgggatcgtgacgggcagcggtgaagaaattgcagcgggatctgtcgttattgctgtcggcgggaaaagcgtcccccatacgggatcgaccggagacggctatgaatgggcggaaaaagccggccatacgattacggaactgtttcctacagaggttccggttacgtctgacgagccatttatcaagcagaaaacattgcagggcctatcactgagaaacgtcgccctcagcgtattgaacaaaaaaggaaagccggtcatcacccaccaaatggatatgatttttacccattttggactgtccggacccgcagtcctcagatgcagccaatttgtcgtcaaagagttgaaaaagcaggaaaaagtcaggctgaaaatcgacttgttccctgatattcatgaggaacagctttttcaacgcatgcataaagaattgaaggacgctccgaagaaatcactcaaaaacgtgctgaagccttggatgcaggaaaggtatctgctgtttcttttcgagcgcaacaagattgatccttctgaaaccttctcttccctttccaaagaccgtttcagagctttcgtcaaagactgtaaagagtttactgtcaacgtgaacggcaccctttcgcttgacaaagcctttgtgaccggcggaggggtttccgtaaaagaaatcgatcctaaaaaaatggcgtccaaaaaaaaggaagggctttatttctgcggggaaatcctcgatattcacggctatacgggtgggtataatatcacatccgcgcttgtcacaggcagacttgcaggcttgaatgcaggcgaattttcgctttgccggagaaaaaaataaaaattgctccaaacccttgacaaatgtggaatggcagagtttcagcccagtgctgagacttgtgccttttttgaaaagtatgttacggttaaagagttttgtttcacctgattgtggggtaataggggaagctaggtcaaacttcctgagagagaatgatttttatatgtgcaactcatactaaacataatgatgggagtaaggacgaaaaatgattagagggtgaggatgattttgaaaaatatttcaagcgttttttggattgtgattgttatcacagcagcagctgtattatggggaatcgttgctccggataaccttcaggcgttaacgacttcgattcaaggttatgttacaaacacactcggatggtattacttattggtggtttctctgtttgtcgcattcagcatctttttgatcttcagtccgattggaaagatcagattagggaaacctgaagaaaaacctgaattctctcgattatcttggtttgccatgctttttagcgcaggtatgggcattggtctcgtattttatggcgcggctgaaccgatcagccattatgccattagctctccatcaggtgaaacagaaacagcccaggccttcagagattctctgaggtatacatttttccactggggattgcatgcttgggcgatctatgcgatcgttgccctttgcatcgcatactttcaattcagaaaagacgcgcctggcttgatcagcgcgacgctgtttccggtcttcggcgacagagtcaacggaccgcttggaaaagggattgactgcatcgctgtcttcgcaaccgtcgtcggtgtagcgacaagcctcggaatcggcgccacacagatcaacggcggactccattatctattcggagtgccgaacagctttcaagtgcagctggcaattattgcagtcgtcactgttctgttcttaatttccgcatggagcggaatcggaaaaggcattaagtacttgagcaatacgaacatggtgctggccggcatcctgatgatctttatgctgttcgtcggaccgacagtgttgattatgaactcgtttacggacacgatcggaacgtatatctccaatgtggtgcaaatgagcttccgccttgcgcctaatgatccggacagccgtgaatggatcaattcatggacgattttctactgggcttggtggatctcctggtcgccgtttgtcggtattttcatcgcccgcgtatcaagggggcgcacaatcagggaatttttgattgccgtcttgtttgcgcctactgtgctggcgtttctatggttttcaattttcggggtttcagcgatggatcttcagcaaaaagggattttcaacgttgcaaaactgtctacagacacgatgctgtttggaatgtttgaccactacccgctggctatgattacatctatcgttgccttgttgctcattgccgtattctttatcacttctgcagactcggcaacatttgttctcggaatgcaaacgacttacggttcactgaatcctgagaattcggtcaagatatcatggggcatcatccagtcagcaatggctggggcgctcctgtattcaggcggactatcggcgctgcaaaacaccgccatcctggccgcactgccgttctcagtcgtcgtgattctcatgattgtatcgttatataaatctctgtcacaagaacgaaaagagattaaacaagccgagaaattccagaagccaagaagcccgagggtgaaaaaagcataaatgaaaacagctcttctctctgaagagctgtttttttatgtcctgtataagattaacgctgaaaaacagtaaagctgttcgccttgaggatcgcatgcggctgatacgtcatattttatatcgaccagctggtcttccgacagcttttttaagaattcattgatttcatgctgcaaatctttttcgtgttcttcatcaaatacggccaccttcagcatacgctctctcctttctataatgaaaggtattcgcacacagccgaagttatgcttaaaatccttagcaaaagagccttcaacattggcagcagacgctccgaacgttacctggcatttggtgctccattttaaataaaaaaacttcttacctgtacagataagaagtcaaatccgcttattttgttttcggcttcgtgtttccggtccattcgagcatgccgccgaccatgttggtgacatcaaagcctttatcctgcaaatagaggcagacattttcgcttcgtttgcctgatcggcacacaaaaatataaggctgatccttttgaaagacgtcgagtttttcagggatatcccccattttaatgtggacggcttcagggatcattccttcagccacctcttcatcttctctgacgtcgataatgttcagcgtttctccttttgcaagcctgtctttcagttcatcaggcgaaatctcttttatcgtcatcattactgctcccttcaattgcctttaggtgagactattatagcaaaagtcgggaggccatttctatttcggcatgttttctctatcgtccgctgtcaggaaacaccgactttcccaatggctgaaacgatccgtcctgtgctgcagaatcagctgtgaagcttccccccatcaggcaaacaagcatgacggcgaaaaaacaaatgttttttttcatataatcccctccttcattttatatatttgatttttcgcatgctgcgatttttccaggtaaagcgcgcttttttcatggtcgcctgacttcatgtaatagtcggcaatatcttttgtcagttcagcaacatgcgaccatagccgtttatcactcatatattcaagcgaaaattcaatatcgagcggatggccagcgtcatacagggcgaaaatcagcctgaacttcgctgcgtattcatcctctcctaattcggccgatctggtaaatccctctttgcagagacgtctcgcttcttcgggagaaccgtttttgtacatgaggtgagacagctcgaaaagggtgttaatgccaaaaaccgattgctcatggacaccgattgaaagggcttttctaaagtgctcctccgccaaaagcggcatgccgcatttggcatagttcagtcccatattatgatagatcagcccgatgattcgccggttttgaagggcaacggcctgatcaagcgcccgcccgtagtgctcctcagcttgtttgatgcggaacaattcaaactgcaccgatccgagtatcatttcgcatccgatcgttttgtctatgtattctttatgcttgctgaaaagtgagagcgctttttcggagtagttcaacgatctgaaatgatcgtctatttggtagtaggcggtcgcgattttataataaaattccgctttttcaatttcatcggtcagtttatgcagcttcgcttccgctttcttgtaacagctgatcgcctcaagatagtttttctcataaaactcatacatgcctgaaaaaaagaaaaaatagtactgaatgatgtcatccgcgctcttaaccgtttccttctgccttttaattttccggaaaagctcggctgattctgcaaactgctccatcatcaatttgcagcgatagtccaacagctgaaaataaagctccagatctccgcttttctccattttagaaagcaggttttggatctcgtacctcaaagatacagcctggagcgcttcatggcgcttgatcatggtgtaccactgattcaggagtccggccgctttttcgtatgccgctttcgcttccacttcttcattcatcctttctcctttttaaaagcataaatattacctttattttacataagatgattgttattggcaattatttttatgaataagtgcagggaatggcatcagctccaatatttgagctgactttcgaggtttttggctgaaacaaggcctttttggaattggttcggacaggtgaggttgtattttttaattttttggttgatggcatcaatcagcgtttcgcgctgattcgatttgatcgctttttcaatctcttgtttaatttccttttgcagcttcagccattccggcagatatcgggcgtttttaagggttgacgaaagcgcatccccctcgagcatctctttgctgagcggttttccataaccggggagggacttgaaatcgtctttcttttcgctctccttcacggcttcatcaatccagtgaagatatcgtttttcaaattcttcacccatatgggccagctcctttcacacacctaaaacaaaggattaagtgtgtcttgtcgttatgacggtttccttctgttctgcggcttccgcttttttcaacacttgatatgccagccacataaccgcataactaagcagactggcactgaaaaaaggaacgatcccgggcagaaacgcaaaagcgatataaagcattgcagtgaccgccatcatcgttaatgtatactgcaaatacgatatgcccagaatcagcgaaaacttgaaatacattcgcttcttccaatcgaaatgggcgagcagcgggaacatataaaacagcatgatcaaaaacaaaaatccaaaaaccataatgacgaaccggagaacgtgcaataggagatgatccggataaataaaagcaagatctacataaatgatgatgccggccgccgccagaatgagaccgatggcgttggaacgaaaaaactcgccgcggtacgcctgccagaacgttttgaatatcggaatatcggttttgcccatgatccattttctcgtcactgaaaacaatgcagtcgtcgccggcataaacccgaagacgccaaggccgagcatagtaaaaacaaaccacagcagattggcgtaaaaaaacttcagcacccattcacaaaagctcagcacccttcccatggagacgttttgttccatgaatttctctccccctttatgtatattgccgggtatgcagaagttcactgattcctatcggctttttttctttgatggagcgccacaatgcctcgccggctgcaattgaataggcgcctgcttcggcaccggccagaatgtcgtaattcctcaaagggtctcctccgccaaacagctcctccaaaagcagcgggtctcctccgccatgcccgccgggctgcctgacgacgcgaatcgtttctttcgattcaaacagcggataataatcgatggtctgttcgggaacttcaaatgggactcttgccggagcatgatattcctgtgtttcaagccttccctttgtcccgttgattgcaagccggtagccttcatacggggctgaaaaatgaacggagtaattcagcagcgcccctttgccgtatttcaaaacggctgcatacgtatcctcgatgtcgatttcttcatcgaaaatacacgcgtcaggcctgtaatcggtatagagcagatgctggctttcattggtcttgacatggtcgtcctgcgggtcgcctgcctgccacctcatataatagcggcatttcttcttgacatggcatgttccgcaatagcggttttcccctttttcaggattcatttcgccgccgggtccgtagtagtacagaccgccgtaggcaaaaacctcgctgggcgtttgatcaagccaccaattgacaagatcgaaatgatgggttgacttatggacggaaagaccgcctgagaatgctctcatcctgttccagcgtttaaaatagcttgcgccgtgatacgtatcgatgtaccagttcaaatcaaccgacgtaatcgtgccaagctttccgtcaagtatcagctctttgatcttgcggtggtacggattgtagcgatagttaaacgtaacggtcacttttcctttgctctcggcttcggcttttaacacggctgccgcatcccgtgccgttgtcaccatcggcttttcagtgatcacgtcaatatctgcccgtaaagcgcccaatatatagcggacatgcgtatcatcacggcctgctacaataatggcgtccggcttgattttgtcaagcatttcggtaaacgctttctcttcgaaaaacgggacggggcgaagcgccggaaacctttctttgcagacttcctccctcagcggatcgatgtccaagagcgcagcgatgcggttttctttcccgtattttcccaccagaggctcgataaacatgttaaaagcgcggccgctcagaccgcatatcgcatattttttcatcggctcctccccctttcattcattttgcttgaagcgcttcgatgagttccgtcgcttcaggggttttcttcgcataaaccggtatgaaagctgccatatctgtattcaactgaaccgtatagccgttcaaacgtttttctcctttttcgatgacagccgcatacagctgtacttccccgtttttgcccggagcgctgtacggctctttttcttccgaagcagcattcaatggctgaagtccttcaggatcgtaaaaaggtttaaacatgtcttctggaacgataaacagatctccttctttcgccgcaatttcaacaaggagtttttccggggttgccgggaaaacggtgatgttgagctgttctttcccgacagcgcgctgcacgttttcctttacttcagccggtgcatccgaaaaaatcaatacgtctgttccccggctaccatcctttccgcatgaggtaagaagaagcactgctgctattagaaggacggagaaagcgaagtttttcacttcgcttccccgcaggaaaaacggccggtcttttcaagttctacaagagccataaccaaggcgccgacaccgtgaagatcgttggtgcttttttcccgtccgacataataatcgtatgtccctgcagaagttccgacgcagatatcttttaaaagcaagccttcttttgcgctcatctcgattttttcttcgacgagtcctttgaaagcctttgccgctctatcaatatatgatgaatcaatatagcccatgcgagcccctttggccatcgcgtacatatacaaacacgagcaggagctttcgagccaattgtccggaagtccgcctttatcgacaacctggtgccatagccctgtgctttcatcttgaaaatcagcaatgcttttgaccatctcttgaagcgtccgggtccactcctgtcttgtgctatgcccctgcgggagcagttcgatcatgtcgctcagtgcaagcgcgtaccagccgattgaccttccccaaaattctggagaacagcctgagacggggtcggcccaaggcatctgcctcttttcatcccacgcgtgataatataatcccgtcctgcagtctttcgtatgctttctcattagtttttcctcgaggatgaccttatcgtaaagttcaggctcattgaacgcccttgcatacttgagtgcgaaaagccctcccatgtacaacccgtcaagccacatttggtaagggtatttatctttatgccaaaaaccgccttcttctgtttgattcagcgtttcaaaaaggcccctcagcttttttgcagctttgcggtagcgttcatcgcccgtctcctcgtacaaaggataaaggagaagtccggcttgtatagcgtccagctcatccctcctgaaataaaaattgccgcagtcatcgatgagatcatcggcatattcttttacatatttgaagtatgcttctttccccgtttcttcccaaaggcgaatcaggccgcacagaaatacgccctgatggtagtgccagcgcccggccggtggcagctctttcggtgtatacgctttcattattgttttggccgcttcttcagcaatgtaaagaggcgattttgtgatgagagattgattcatgtcattcaattcctttcatcaaaaaatattaatatatcccttcttctccaaatttcttcgccatcctgtttgcaaatacgacaagaatgagaccgacagctgctttaaataaaccgacggctgtactgtagctgaactgtccctgctttaacccggccgtgtatacatacgtatcaaagatttcggccacttcgcggttcgttgcattcaaaagcagatacacatgctcaaagccgagttcgagcgtatcgccgattttcaagatcagcaaaacgacgatgacgcttctgatcgcgggaagtgtgacatgccacatcctcctcaggcgattggccccgtccattttcgccgcttcgtaaagctgcggatcgacagctgtaatcgccgccaaatagatgatcgtcgaccagccggcttccctccagatgacctgaagaatgtacatcggcctgaaccagctttcattcagcaaaaaattgatcttttctccgccgaagtaggcgataatctcattgatcaatcctccgtcaacagtcaacaggacgaaagaaagcgataccacaatgacccatgacataaaatgcggaatatagatcagcgtctggacaaactttttgaacaatgcgactctgacttcattcaataaaagcgccaaaataatcggtatcggaaagaatacaacaaggttgagaaaaaacaaaatcaatgtattcttcaacagcataaaaaacgtcggttcggtaaacagcctttcaaaatgcttaaagcccacccattcgctccccgttatgccgagaaacggctggtaatcctgaaacgctatgacaatcccccacatcggcacatacttaaaaagcaaaaaataaatcagtcccggcaaaatcatcaaatataaatatttttgctggagaagcttttcccaaaaacgcgtctttcgtttttttccaacaacaagggccggattttttccggtctggacatcggctgctttcataaacggcctcccttcgtgatgtttgctttcactttatcccaccatgaaaaaataaatctacaatcatatcatcacatcggccgcacctcgcccggcagccggcaaaacctaataaaatgaaacgatggttagaaaatgattattgacaaattcacacaaaagtcggattaattatatatgaacaactcaaacgagatttgttgggggggaatttatgaagagaaaacaatataagttttactataaactggtgaccttctttctcattctgagcaccattccggtcatcatcgtcggctttttttcctatcagagatcagcggaaacgattgaacaaaacgttacaaacgaaaagctccaaaccgttagccagacacagctaaatattgaacatattttaaaaacggttgaccattccttcaccaattacgtccgttcctatcctttaattcagacgctcagccgcaccattacaccagaacgctttcagctgtataaccaaatcaacaaggaattaaacgaactccagacattcgataccgatctgtcggatatcacgctgatcagccaagaaaaaaagtggtatatcaacaactccggtttataccctttagatcagggaaaacaagccatcacgctctcgctttacaacgctttaaaaagccgttccagctgggtgcttgaaaaaaacaacggccttgtcgccacaaaagaaggggcttcgggaaactgcctgtacaacgtcaatctggtcaaacagcttcccctgaacagcatggaaaacagaggccttgcgatcgcgagcattccttcttgttcgcttgtcaagcgcatgccggatcattcaaaaacaaacagcatgatggtgcttgatgacaacggacggatcatccttcactcagacccgtcaatgatcgggcaatcgatcaaacaagaaaattacttcaaaacgatccgccggcaccaagaaaaaaacggccagtttgatacaacagtcagcgacaccgcctataacattacataccagaaatcagattataataattggatatacgtttcgttaacgaccattccggaactctatcagcagacggcatcaatcggctggttcacgtttacgatctgcctcattttgttagcgctttcatatttattctcctggtttggttcacgccatttttacaggccgatcaaggttttatacgaatccgtctccggctttcctccaggagccgattccgtccaagagaaaccgaaaaacgaatttgaactgattgaacggaacattaaagaaatgaaaaataaaaaccatgatctgaaggtgcgcgtcgaacagcaggtcacccagctgaagcagtattttttaacaaggctattgctcggcaagctgagcgaagaagaaatcaaagaccgctttactgggctcggcttccctgaagattggagccatctgtcggtattcacactgcaaattgatacattgaaagacacatcatacgaaaaaaaggatcttgatgtcctgctgtttgcgatcaacagccttgtcgaacgatctgtgcccaagaataagcgccttccgccggttgtcattgataaaacgcagaccatcatcatgctgaatcgcggacagccgctggaaaggtttcaggaagacttagagcataccgcatcagccattaaggataaaattcatgaagagcttgggttgttcgtcagcatcggcatcagccagccatttacaagtcttgcaatgtcaaagcgcggttatttggaagggcttgaagcactgacataccgtctgaaatccggaaaacacgcggtgattttctatgaacaccttgaccgcaacaaagcgtttttaacccagtttccgaagcagattcaaaatgaactgtttgaagccattaaaacgtgcaaccgtaaacaagcggccgaacagcttcaccttcttcttgagtcgatttgttctgaaaacatgaatccgcatcactgccagattgcgattgcaaggctgttgaacaacttgattgaatttatgcatttgctcggaatcgagatttttgaaccgaacgaaaatacgatgctgtacgacgacgtctttgagctgacgaccatcgaggaaattgaaagctggctgaacgcgcagattatcgttaaaatgatcgatacactcagcatcagagaagaatcgcaatacaaaaacatctcagaaaaaatcgtccatattatccagcaggaattcgacacggacttgacgctcgaatcgatcgcaggaaggcttcattacaaccccaattatttaagcagcatcttcaggaaggaaatgaaaatatcgttcagcgaatacttgtcatcatacaggcatcatatcgcgaaaaactggctgacggaaacgactatgtccgtaaaagaaatttccgaaaaactgaaatacaaaaatccgcagaatttcatccgttcatttaaaaagctggaaggaatcacacccggcaaataccgcgagctgaaaaaccattcggcataaaaagacaatcccggctcctcgggattgtctacattgttgacaaaatcccaaaacgacttttagttttgggattttgtcatcctttcagcgtgaatgaaaacccttgcagtctaggaaggccgagcatcggagcgcagcgaatgttggaattcgtgagcaccgacgcgcaggcctgacaacgaatgcgagggtttgtcgacacgctgacaatcccggctccccgggattgtcttctatttttctgcttttttaaatgactcctcatattcttctatgacttgatttccgccgttcgtgcgccatttttcaaccgctttctcgaactggctttcattgattttgccgagaatgaattggtatgtggcatcatcaatgatcttttgcagttcatcgcctctttcagatgcggccggtgagtacaggctttcggccgggtttgagacgatgatttcgttattgtcctctgtcagctcttcatattttgtgcggagcggatcgcccgtatttttcaaatattgcttatcaatgccgacgagagaaacgagcggctgaatttccgcctgccagtctttcagtttctcgtcgatccgtttgaattgtttattcccttcttttttatagtgaacgccttcgatcccgtatgtcatcagactgtaaacatcctcttcggcgatccggtcgaaaaaggccagaatcctcttcagctctttttctgttttgacgctagttttcgggaaggcaaagattccgttatgcccgcctgatgcccagacgcgttcctttccgtccggccctttgatccgattgatgatctcaagttccattttatcatcgacagactggtctcttagattgacggcatcaaccatatttccgacataaatgccggccttcccttgtgaaaacatttcttgctgctgcgttttgctcgtcaccggaaagtctttgttgatcagcccttcatcatacagctttttcatatatttcatcgtatccatgtactcttttgtcatgaagtcaggcgtgaacttgccgtctttttcctcccaatcagtcggcatgcccatataggaccccaatgttttaaaggcgccgtagatcaaatcgtttctgtcggcaaagccgatcgtatcgtttttcccgttttgatcaggatctttttctgtaaatgccttcgctgtttcgtaaagttcatcaactgtcttcggcatatcgagtccaaggttgtcaagccagtctttacggatgacgatcccctgtcttgataacgggcgctccctgtagatgccataaagctttccgtcgattgaagcgtttttattgatcagcttgttcatcttgcttaaattcggataatcctttaaataaggtccgacttcccaaaacatccccgatctgaatgcattcatgacagatgaatttttaatgtcctgaatggtgacgactttcggcaggtttccggcggcgagcgctgagtttaaacggtcctcttttaccgcatcaggcacccacattaaatcgagcttagtattggtgagttcctcgatttttttaatcgccgtgtccttcggcggctgctgatggtaaaggatcaccatccagctcaagtccaaaggcgagttcaaatcgactttctcctccttcgaagaagcctggtctgctccgctgttcgaacagccaagcagtccgccggccaaaagcacgaacgcaaaaatcgggatcagccattttttccccatattgtcccctccgtttttatcctttaattgaccctaaaagagcgccttttgcaaagtgtttttgaataaacggatacacgagcagcacaggtatggttgcaacgacaatgaccgccattttgatcgtttgttccggcggcgccgcggctgctcccatttccgtcatatccccttgcataccgcttgatacgatgacaatctggcgaagcaaaacttgtatcggccattttgtcgcatcgctcaagtacagaatcgcctgcatgtacgtattccaataggtgacggcgtaaaacagcgaaatcgtcgcgatcgccggcaaagacaacggaagaatgatgcggaagaagatgccgatgtcattgcagccgtcgattttggcggattcctcgaggcttgacggtatgttttgaaaaaagttctttaaaataatcaagttaaacgcattgatggcggtcggaagaatcagagaccaataggtatcgagcaatccgagcgattttacgacgagaaaggtcgggatcatccctccgctgaacagcatcgtgaacacgaccaagaacatcaggacgcgccttcccatcagctcctttctcgacagcccgtatgccattaaagaggaaagaaacatgctgaccgccgtccctacggctgtgacaagaatagaaacgattaagctcctgtacacaatgtcagttgaaaaaatatacctgtacgcatccagcgaaaaagtcgtcggtattaaaataaactttttcgaaataacctcctcgactgtcgcaaaagaggctgcaataacgtggatgaacggcagcacacaaaccaatccgaaccctgttaaaaatgaataattcaatatgtcaaacacgcggcttccagcagaatgcctgatcgttattccccctccttgtaagcgctgtcaaaatattacgatatcgtgtctaaaatgtagcagacagaaaggagagcgtctataatcattttttaagcaggagcaggaaagcggagaaaaagatcatcaccttagaagatgatacgtcagtcttcatcaaggatgtcagaggcgctgacttgcggcctgtaccccagttcccgaatggcggaatcgatcgaccacggccgccccttattgtcgctgacagcataatatgtaccatatgttttgccggattcgatagcggctttaaagattccgatgaggtcggggtgggataaaagcgtttttttgcttctcggttttgcgtgcagcgtttctagctcattttcagcagctgtcccgatccgcagattgatgacggaaaccttggcgtctaattggtgcgagaaaaggtagccgagattttcggacgccaattttagcaagccgtacaagcttttggactgcgggtagtcatttgtgttgatctgcctccccaacagagaatcgccgcccttttcatatacatctgtcacatggttgctgctggcaaataccactttcggcacgccgagctccgccgccgcccgcaaaatcgtatatgtcgctttaaaaaagatatccgtcattttcgcaaactcctgccggtcaagcaaatcgcccgacggctttacagccaaaagattgatcagcgcattcgtctgtgcaggaatgcttttgacgacttcgttgtaatctgtcgcatccacccggataaaacggacagcctgtttgtcatccggttcttttaaatccagcactgtcacctcatacccttcgcctgccaatccgcccgctaatacgcggccgaccgtgccgttccctccgacgatcgtcacctttttcacggttatcgcctcctgttttacagccatgtttttaagaaaccgaccgctttatgcctcattccggctgtctcgaggtgccctgaatgagaacgaaacacttcatagcgttcacctgcgcctttttctatatacacatcggacagcttttcttcaataatgtcaatcccttgaaccggcgtcagtttatctgcggttccgaccaggcttaaatgaggccttggagcgatcaagctttcgatttgagcggttgaaaagtgtttgaccagccctggaacataagaatagagattgtggcggtccaaattctgcgtcttgattaatgcttcgctgtccacctgagcgcatatatcaacgcatacgctgacccgctcatccaatgcagcggtccaccaggccatcagacctcccatcgacatgccgagtgaagcgatgcggctttcgtctatgtcctccctcattttcagataatcgatggctctgatgctgtcgaaaaccatcattccccacatcacccgccctgtccaaagcatttctttaaatatctcactctccgttttgccccgcctgtctccgaaagcccaatgatcaatcgcaagcacggagaatcccaaagccgtcaattcctcggcgaacggcggcgcttgcaagtactccgctccttcaaccagctcctcctttcccctttcgtagcgccctccgtgtgaatgacagtaaagcacggccggccgcttgccgttcatctgtttcggttttgcaaaataggccggcaccgcttcaattccgtttaaatcaagcaaaagcgtttcgagaataaaagatgacttttcttcgattttaagagtgctcgcatcaatgctttttttccccggcaaatcgccgagcagtttgaaaagttgactgcgcatcgtattcccctttcttttttcgtttgattcattaatacgatttgaaagggcgttttacctttttccaaatgttaagttggcggaagttcacaacaaacaatgcgctggcaagcatgataaacagtaatacccacgatgatgaaaacaaaataagcagcgtgaagccccccatgagaaagaggcatacttttttgtaaatgcggcctgataacagcttgtaagctgcggcaagaccgcacagcgagttgcagatgaaaaaggcgtttgcgatcagaaccagcgtctcaacattaagaaagtgaaacatcaggcagacgaaaacgatcgtatggatgagaaatataagccccagcgctgcagtcggctgatttccccttgatctgtaggcaaacagcccgccggcctgcgaggccaccagcctggctgctccgcctgtcacctgaaaataagcacacatacagaggacagcggtgagcactgcgatcaccggcaatgcaaaagatccgaacaacggcgtcagcatcatcgccagcttcaattgtccgtttgcggagaatccaggatcaatccactgaacagctgccgcggtcgccaaatatatgaccgttaccgtcaggctgctgatcacgacagcccgtggaatcgttttcccgcggtttttcacttccatgctgtagttgccgacgatttcccatccgaccaatgcccagaacaggagcagcaatccgcggccaaaatcggtaaactgaaatgttccgtctacgagaggcccctcacggaagtaaggcacggaagccgcgctgcttccaaacaggataagcgccgcggcagtggaaaaaatgagtgcaaccatgccgacaaatgaaagattaaagcaaaggataaccatacaaaagatgaaaaaaacaaagccgtacagttcagcagggaatgccgtgcctgccgcaagagaatgaatatattcgccggccgtcattaatacggcggcggggccgaagctcgcagccatgataaaataaaagactgccaactttttaacacgcgacccgaacgctttttcagccgcataagcaatcccggcatcattcggatactcgacgcttaatctggcaaaaacccaggcaaataaaaaaccgattcccagcatcaacagccacgcaaaaatcgcgtagtctccagctgtctgatgaatcatcggaggcagcagaatgattccggatcctaaaatgggccccgtcatcagcccgcttaacaataaaggaccaagctttttttctctcatacgaatacaatcctttcacaaagtcgtttaaaatgattgtaatcatgttcgattcatcagtaaaatagatattatcgatctgcaacttcgaatttttcgatataagataaaaaagggagatggacgagatggagatccgacacttgaaaacatttaaaacaatcgtggatatcggcggttttacccgtgctgccgattatttaggatatgcacagtccactgtgacttcgcacgttcaagcaatcgaacaagaattaagaaagccgctgttctaccggctcgggaaaaaaatgatgctgacagaagcgggaaagcaccttctcccttatgccgcagaaatggtcgagctgtatgaaaaagcgaggcacattccggaaaacgaccaggagccgtcgggaaacttgatcatcggcgcctcggaatctttaacggtatacaggctgcccgccattcttcacgaatttacaagcaaatatccgcaggtcacggtcactttaaagtcttccacgtgctggcagctgagagacgaattgaaacagggaaaaatcgatgtcgcttttcttttggacaacgaccggaaagaaaacgaccttcatgttgaaaagctggtcaatgagccgatggtgttcatctttcccaaagaacacccggcaggacaaaaagctcttgatgatttgacttttaacgcaaatgaaacgtttttatataccgagcacggctgcagctaccgtgatttttttgaggaatatttacgtcaaaggggagtcattgccgaccatacgatggagttttggagtgtcgaagcgattaaacaatgcgtaatgtgcggtttgggcgtctcccttcttcctttgatcacaacgcgcactgatatcgaagaaggaaagcttcagggcacgctggtccgcgacgccctgttttccactcaaatggtttatcataaaaacaaatggctttctcctgctatggcggcttttacggatatcgtccgcaggaaggcaagagaatgggaacagacataacatccctatatgccttcggtattcatcagcacgatccgccagccgtccggatcttccaccgttgcccctttttccttccaatacggattttcaggcggcacttcgtcatagcccatgtcagcgagcctatttaatatgctcctgatttcctccggatcaggaatataaaaaacgagcagattgtctttagtcggtgccggacaagggcttccttcgatatgtgaggtgaattcaaggtggtattggacattcggcaggccgaacatgacgccattatacccgtggtggccggaaaaaccgccaagctttttcagccccagccccttttcgtaaaatgcaacgatttcgtcaaaacggtctgtaggccgggcgattctgacctgtacggcggaaaaatcggaaaaatgcatcatgatcatctccttttttcccattttaagcggtcatggatcatttgaaacgaagcgatcgtctgaaatattatcatcctttcggcggaatgacagaaaaagccccttcggattgaaggggctttcgccattaatttgcaacaatatttacaagctttccaggcacagcgatcacttttctgatcgtttttccttctagctgttcttttactttttcattgtttttcgccagctcttcaagctgttctttgtccgcgtcggctggaacgttcagcttcgctttcacctttccgttcagctgaacgacgatttcaatttcatcatccacgagcttcgcttcatcatagacaggccatgcttcatacgcgatcgtttcctcatgaccgaggcggttccagagctcttcagccaaatgaggcgcgacaggagaaagcaatttcacgaagccttccatgtattctttcggaagctgatcagctttatatgcttcattgatgaagaccatcagctgtgaaatgcctgtattaaagcgcagaccttcgaaatggtccgttactttcatgaccgtttcatggtagacgcgctcaagcgtttcgccggctccttcaacgatcttctcgtttaacccgccattgtcatcgataaacaaacgccatacgcggtcaaggaagcggcgggctccgtcaagccctgtcgttgaccaggcgatcgatgcatccaaaggtcccatgaacatttcgtacagccggagcgtgtccgcgccatgcgtctccacaatttcgtccggattgacgacattgcctttggatttgctcattttttcattgttttcgccaagaatcatcccttggttataaagctgtttgaacggctctttcgtcggaacgaccccgatgtcataaaggaatttatgccagaagcgcgcatacaataagtgaagaacggcgtgctccgcccctccgatatacatatcgacaggaagccattcctttaatttttcaggggaagccagctcgttcgggttcttcggatcaatgtagcgcaggaagtaccagcagcttcccgcccattgcggcatcgtattcgtttcgcgtcttccctttttgcctgtttcaggatctgtcacttccacccattctttaatattcgcaagaggggactcacccgttccgctcggtttgatttccgacgttttcggcaagatcagcggcagctcttcttcaggaaccggagtcgatgtgccgtcttcccaatggatgatcgggatcggctcgccccagtagcgctgacggctgaacagccagtcgcggaggcggtatgttacttttttctcgcccttcccgttttcctcaagccactggatcattttttcgatcgcagccgctttatcaagaccgttcagaaaatctgaatggatatgttcgccgtcgcctgtatatgcttctttctcaacatccccgcctttgacgacttctttgatcggcagcccgaatgctgatgcaaattcatggtcccgctcatcatgggcaggaacggccatgaccgccccggtcccgtatgtagccaagacatagtccgcaatccagaccggaattttttctccgtttgccggattaaccgcatatgcacctgtgaagacgcctgtctttgttttggcaaggtctgtccgctccaagtcgctctttgattgaacttcttcaatataggcgttgactgcgtctttctgttcaggcgttgtgattttttgaaccaaatcatgctccggagccagcacggcatatgtcgcaccgaataatgtgtcaggccgcgtggtgaaaaccgtaaacgtttcattggtgccgtcgaccgcaaaatgaacatgcgccccttcagaacggccgatccagttgcgctgcatttctttaatgctttccggccagtcgagttcttccaggtcttcaagcaggcggtcggcataagcggtaattttcagcatccactgcttcattggacggcgttctacaggatgtccgccgcgttcgcttttgccgtcgatgacttcttcattggcaagaacggttccaagcgcaggacaccagtttacagggacctcatctacataagcgagacctttttcgtaaagctttaagaaaatccactgcgtccatttatagtagtccggatctgttgtgttgacttctctgtcccaatcatacgaaaagccgagcgctctgatctggcggcggaagttgtcaatgttctgctcggtgaagacggcaggatcgtttcccgtatctagcgcatattgctcggcaggaagcccgaatgcatcccagcccatcggatggaggacattgtacccttgcatccgtttcatgcgggacaaaatgtcagttgctgtatagccttcagggtgtccgacgtgaaggcctgcgcccgacggatacggaaacatgtccaatgcataaaatttaggtttggatttatcttcacgagtggcaaacgttttatttttcagccaatagtcctgccactttttctcgattgtttgatggtcaaagctcaattgtaaaaacctcctttgaatatgtgtacggcttctttgtcttcaagtatggacgggactggcagcgttatattcagattattctaaaatcaaaaaaactctcccatccctaagaagggacgagagatttcccgcggtaccacccttgttagtgtgcacgcggcacactcacttgatatctgtaacgcagatacgcggcagcagcttatcactgctgcaactctgaggcgagttcggaagctcatttgattgactttcaccagccgtcaactctctgaaacaaaatgggcttcttactgctcctcttcactgttcttgccgtaaccgtaatcttatctgtattttatagaattctgttcataagtgcaagcaggtttgtatacaatgggaatgtgctgaaaaaagggtaagagtgaggatcttaatcgtgtggagatttgttttgccgttcggagttctgtacatttgcctgctgttctctgacaaagtcaaagcttctcaatacagcttcaccgccgtagccggcaatgatcgataacacgacaagctgaattcccgaatcaggttccgcagataaaacaagcaaaatagaagcaaccattcgacaagaatatcttcaaaaaatccaaggtaaatgaatcgtttcgttgttctcggtttctcgagtcgtcctctttttttaacgtgcccgagaacccccataatccctccaatcaaacaagcaaccaaaacttgatgcagcatcttcatcaccttcctaaagcccttagtttagtcaagcgacttcaggccatcgagcagcccccctagaccccttgcgatgatattcgatactaccatacagaaaatgtgttctgtctgagaagaaaaaaagcttgtttcttccattatatgtgaagatttggttgataatcttgattccttcgattcattttcgaataattacaattacctattttttctatattactcatgcatctgactgagcggagagctgcttttccttcctgtcgtataaaaacgccgttcctattgcaatcagcagcaatgcgagcagaaccgcgagcaaaagctgcatactaaaataatcaaccagcattccgccaaaaagcggtccgatcattcttccgccggtcgccatactgttgacaaacccttgataaaacccttctttccctctcggtgcgagacggtttgcaatcgtcggcacagccggccatacaagcatttcgccaatggtcagcacaaccatcgcagcaagaaaagccggaaaccgttcagcgccaaacaaaattccgtatgccatcataaaaatgacaaatccgatcacgatttggtttttcagcgattcggcaaaccgtttcacaaaaaaaccgatcagcggctgaccgaaaacgatgagcgccccgttcactgtccaaagcacgctgtactgcccaagagatatccccagctcctgggtatgtgaagcgatggtcgaggaccattgcgaataagcgatccagccgagcaggtagcccgtacatatgaccaaaagcgcagaaaatttcgatttcccgctgactgaatcggcatgatccaaaacagatgactgcatggctttttcagaccggatgcgtttaaatccgaaaaacgcaatcatgaagaagacggcgtacagcatcgcattcgcgagaaaaacatacgtaaatgaaaaagaagcgacaattccgccgagcgctgagccaactgccacacctgcattttgggccacgtatacagcgttgaacggctttctgccgccttccggccaaactgatccggccattgcatagcatgccggaaaaacgatccctgatccaaaaccggccaacgttaagaaaagaatgtactggaaccaatcgtgaaaaaagacgaggccagaaaggctcgcaaacgtgatcacaattccaagaacaaccgttttaaatccgccgattttatcgaatagatatcccccgaacaggttgcccagcacatttgcccctgagttcagcatcagcacaaatccggccgctgtcagcgactttcccaaatgctgatggatatagatggtattcagcggccataaaaaagatgcccccgtgacattgataaacattccgatgaccaaaagccataatgtgcgcggcatagcgtttccttctttctctttatcattccctctagattctattcgttttgcccatttttttcaattgacacgttttcgattttcaacataaaaaccccctttttaaagggggtaatttttttatgattgcgtcatccatttcggctttccgaaaccggcgaattcccgatcgatcgtctcctcgaaagctttggattttaccgcttctttgagatctttggcgaatggcttgtctttgtttttttcatccactaccacttggttgcggtagcggtcgggcatgttctcaagcgctagggcgtcctgcagcttcatattggcggagagagcgaaatttcccgggacggccgcgatatccaggtcatcgacagctcttggaagattggcggattcaagctgtttaaatgtcagctttttcggattttccgcaatgtcctgcacagaggctttcaatgtgtcgacatcgcttttcagccgaatcagcccctgatcctgaagggttaaaaatgccctggcagcattggccggatcgtttggaacagccacttccgctccgcttttgacatcgttcaagtcgttatatttggcagaatagagccccatcggagcagtcggcacagaaatgagagccgcaagatttttattgttttcttgattgtatgatttcataaaaacctcatgctgaaacaaattcgcgtcgagctcgccttcacttaacgcagtattcggctgtacataatcggtgaattcgatcacctccactttgtagccttttttctcaagctcaggttgaatcgcttttttgaccatatcgtaatacggtcctgcagtggcgcctattttgatcgttttgccgtcgcttgcggcattgtttccgcacgcggccagaagcgccaggctcaaggccagtcccagcgcagaagtccattttaataacttgttcatgttgatctcctccttcaaaataaaaaaactctttcagccgcctgaaagagttgttcaacttatctttcagaatgcgcctgacattctgctggatttagcaccttgcactgctgcaggttgctgagatttcaccgggccagtccctccatctctctttataagctgcatattcggtttttaaatgatttctttattttacgtttgaatatttagatttgcaagaagttttttcggtataaacatttttttctttttaagctaaaatatagttatcaattaagaaaggagacgaatcatggaatctatcatgctgatcgggtttttatccttccttttttccatctgctatcttgtatttcatttgatcagaaggattttttctccaggcaaaaggttttccaggaaactcttttatccttgttttgccggcggacttctcctcctgatcatctctgcaccttattacgatgaggaaacatatgccgccgatgagaaaaaaacggagaatctgacaaccgagcttcaggaactgaaaactgaacacagcgctttgcaaaaggagcaaaccgcattaaagcagcaggttaaacaagcaaacgaaaaattaaaatcagtcaaagcggaaaatgacacattaaaaaaagcaaacgaaaaactgacaaaagaaaaagattcgcttacgaaaaaaacaaaatcgctgacagaaaaactggccaaggctgaagaaaaaagcggcagtgccgaaacctctgtaaaagaaaagagcgccgccgctcaggccgaagcgtcacacagcacgcccgccgccaagaaaagcagcgctgaaagcaaacaggagtgcaaaatcaaaggaagcgtcaaccatatttatcatacaccgggcagtacatattatgaccgcacgaaaaacgtcgctcgctggttctgcacagaacaggaggcgcgtgatgcggggtacagaccgccaaaacgttaaaaagccggcataccgccggcttttttcttaaagctctcttcttaatgctgtcagcacgttcgttcttgtcgctttaatggccggattcaggccggaaagaatggcgacacccgcactgatcaatgtcgcgatgaggacaagactgaccggaatatgcgagaaggtgatactgagctctgccgcactcgcttctccttctgaaaccgatgataaaatgacaggtataatcttgttcactaaaaagctgacaccgtatgaaatgataatacctaaaacagatcctaagatgccgatataggcgctttccagcaggaacatttttcggatcacattcgggcttgcaccgatcgctttcataatgccgatttcctgcgtccgctctgtaaccgccattgtcatcgtgttgaaaatcccgatcgctgaaatcaagacggcaatgactccgacaaagatcagaccgattttaaaagccatgaaaaaaagattgatgctatcgagctttttcgttattgaatcgacgtagtagccttcatcctccaaatctgttgtcagctgtccgacatgttcaaagttatccgcgtaaaccgaaagcgttttttcgatcatgccgctgtctttttccgacttcagaaagccggtgatgtctttttgcatgccgttgctgacatagactgttgaatcgctcgcccattcatacgaaggtttttttgtcactccgacaactttcagatcatatgttttcgcttccccttcttctcctgttttttcatccatttttgagatctttaattcaatcgttttgccgagaatatcttcttcgtatcctttcggctcttttgcttcctcagcattattttccatctgcttttcataatctgcggcttcctttttcgtccagaggttcttcccgaaatggtagccgacgacaatttcattcggtgttttcgctacgcggccgcgatcgagtttgatattggctttttgctcagcggccatgtcggtaattgtaatattcgacatttgattattggtcctgttgcccaattttgcttcagcaggtgcgaacacgtttgtgcgctcgataatcgcggacacatctttgcggttttcaaattctttcaggtctttcttttgaaccttttgatcgctttgcccttcttttccgacaacatttatctcggtcacgatctgctctttcatcagctgttcagtcattgatttttgcagtccgaatccgaccgatgcgagcacgattaaaaacgcgcaggccaccgttgttgcgagaatggtcatgaatacacgcaggcggtttttcttcatatttcttctaatgaacttcaactggtccttaaacttcaacagtctcttcccctttctctaacacgccgtcagataaatgaaatttcgtattggcgatcgatgccacctcgtcatcgtgcgtgatgatgacaaatgtaatgccgcgttccctgttcagctgccgaatgaattcaaggatttcctgctctgtttcggaatccaggcttccggtcggctcgtcggctaaaatgattgaaggattcaaaatcaaagcgcgggcgatgctgacgcgctgctgctgtccgcctgaaagctcattcggatagtggccggcgtggttttcaaggccgacgcggtggagcatctcgttgacgcgctgcttccgctccgacggatgaacaccttttaaagtcaggggaagttcgatattttcgaaagtcgtcaagctcggaatcagctgaaaactttgaaagatgaagccgaaatgttcaagcctgaatgcggcccattctttctcgctgtacttcgtgacatccgtgccgtcaatcatgatcttcccttttgtcggggcgatgtagccggaaatcaagttcagcagtgtcgactttccggagccgctccgtccgacaatacaggcgatttctcctttttcaacggtaagcgagacgtcctttaacaccttaatttcattttcccttccctttttgccgactttaaacgagtggtgaatatgctttacactgatcatttgtaaatctcctctccattaatgattacagctgttttatttttttgaaaatcaagaagtaactgattaaaaatccgactgccgaaccgatcaacataccgaatatatagctgaacagactcgaagcagcggctgtgccgaatccccagatgccgaataaaatcacgagaatctggatcggacgatccatttttctccaaaggaaaaaatgtccgttccgttcaagctgctgtttgataaagcagaaatagccgattatataaaacaagatccccatggcgagcggaataagcgtaaaggccaggctgccgtcttgaatgccgaaactgttgaggtatatgatcggcgttatataatctagtagttctgtttcaccataaaagaaagcagggtcatgcccaaagaaacccaggatgattcgtaagttggccagcggaaggccgatcagcaaatacggcagaatcgacgctgaaaaagcaacgatcatctgggccagcggattgccggtcatcgcgcccgccgccatgacaagcgagtagaccataaagcagaagataaccgccccgataaaatactcatggaaaaagacaacgtcaacgttatacaaaataatcaaagcgtaagataacaagtaagataatagctgggctgttaaaagaattgaaatgccgaagaaatatttagtattgaaaatgacgccgcgcttgtaagggaggccgagtgtaaagtcaagcgttccactgctccgttcaaacccgatctggctgatcgcaagcgcgactccgccaacccagaacattctcatggccccgcttaccccataatctttatataaaacgcactctatatcgggaaattttttctgttctgcaaggcatccctggtactggaaataatcattcaaaatcgcaagcggttcactcagcaacaccgctgcaaaaacaactaaaaaaatccagaaatgctgtttccattctttatataaaagtccgcggtctaccatcttcgcttacctccatacttcgcgatgaatacttcctcaagactgaccggaagctcgttccaaactttcggagacaaacttttaagaaattgtttgctcacattgtcttctttcggaaccaataccgtataaaagacgccggtgtggtccaaaacagggatttccctttccctgatttttaaattgacatcttcttcaaatgccatttgaattttaataaaatcgcctttcagttcatcaagatccatgatgttcgacaatgtattgtcttcgagaaaaccgattcggttgcacattctttcaatgtcctcaagccggtgagatgtgatgagaatcgtcgtgttgttttcagccacttcatcgaccatcagctgaagaacgtcttgtcttgtgacggcatcaatgccgtctgtcggctcatcaagcaggatgaccgccggccggatcgcaaatgacaggatcagcgacatttgctttttcaatcctgtagacaattccctgtacttttttgtttcgggaatatcgtatcggttcattaattcatttgcatatgtaacatcaaagtccggataaatgttacgcaaaatattgacgagctgtttgtaattgtatttttcgaaataggtgttttgaacgggcatatagacgatgttgcgcttgacgagcggatgatccttcaccttgacgctgccgaaaaagatatctccctcatcaggcagcaggatttgctgaatcaggcgaagaagcgtcgtttttcctgagccgtttcttccgagaagtccgaaaatctctccttcctccagcttaaaggagatgtctttaagtatttgttttccgtcaatcgtttttgaaacagatttgagctcaatcattcacttcgcctcctctcacttcttcgtcgatttccgccatccactcctgcagctttttggtgtcgatccccgcgtaatgcgcatcgatgatcagctgctttaactgctctttaatcatcgcaatcttcccttcatcaagcgtaactttcgcgttttctgaaatatacgttcctcttcccctcaacgtttcaataatcccttcccgttcaagttctttataggctttgctgaccgtattcgggtttgcaatgataatggttgcaagctctctgacagaaggaagtttatctccaggcttgattatcccttttaagcacagctctttcatctgctggatgatctgctcatagattggggttgagcttctcggatcgatttgaatcatctatctcccttctttctcgttcaatctcagcgttattcacttttaaaaaaacacatatcccaaattttcttgaatcataaagcccagcttcgcaagtacaaacaagaacgaacaggcaatgataaacgccacgacaaccattggcgttacttttttatgtttatcactcatgagtattgctcctttacatgtgtgtgttaactgtattactcgatgtagtacacttaatacaatatagacatcgtccttttttgtcaatcgcttttttcaaaaaaatgaaccctttcaaaaagggttcatctttcatacgatctctgcagaatcatattgttttgaagggtttgcagctggagccttttgcggtgaatttcctccctttgctgctcattggcaaacagcgaaagcttgtttaattcattgaccgcgttttcaagcatcagctgcgcatcgctgtactctgtctcattgtaatgttcctgcctgcttgcagtttcaaattgagataaagcataatcataagcatcttcgcttctttggatgtgctctccgacggattgtcttgtagccaaagaaaacccctccttaatggaaaaatccatcgtgattagtttggccatcacagctgtgatcattgaagaaaataattgggaatcggtttgttcttatcgtgtttatttgctacaattttaggatgcgtgatactaaaaggaggtccttttgtttgcatcagaacaacccttttccatatacgaacagtgaaaaacgatatcatacatggaattatcatttaagaaatcatttcggtcataaagtgtttaaagtcgcccttgacggaggctttgactgcccgaaccgcgacggtacggtcgcacacggcggatgcacattttgcagcgccgcagggagcggagactttgcgggaaaccgcgccgacgatctgattacccaatttaatgaagtgcgcgacagaatgcatgaaaaatggaaagacggcaaatacatggcgtactttcaagcatttacgaatacgcacgctcccgtcagcgttcttcgcgaaaaatacgagaccgtcctcggccttgacggcgtagtcggcctttcaatcgctacccggccggattgtctacctgacgatgttgtcgaatatcttgccgagcttaatgaacgcacatacctctgggtggagctcggccttcagaccgttcatgaacggacggctgatttgatcaaccgcgcccatgatttcgactgctacgtggaaggcgtgaacaagctgaggaaacacggcatccgggtctgctcccacatcattaacggactgcctctcgaagaccgcggcatgatgatggaaaccgcaaaagccgtcgccgatttggacgtgcaggggattaaaatccatctgctccacctgttaaaagggacaccaatggtgaagcagtatgaaaaaggaaaattaacgttcctttctcaagatgaatatgtccagcttgtttgcgatcagcttgaaattcttccgccggaaatgatcattcaccggattacgggtgacggaccgatcgaattgatggtcggaccgatgtggagcgtcaataaatgggaagtcttaaacgccatcaacggggaattggaaaggcgcggcagccatcaggggaaatggttcaacaaggcgaaagaaggcatggccacatgaagctcaagaaaatcctcccgtatgcgaaagaactgctgaaaacagccgcaggcgaaggagacatcgtcattgatgcgacaatgggaaacggacatgatactcactttttagctgaacttgtcggtgaaagcgggcatgtctatgcctttgacattcaagaagcagctcttatgaatactgccgaaagacttggaaacgagtataaagaccgggtgacattgattcaaaaaagccatgatgagctcaccacttcgcttcctgacgacatctcaggcaaggtggcagcagccgtgtttaacctcggatatcttccgggaggcgacaaatcggtgacgacaaaaagcgattcgaccatcgccagcatcaagcagcttctcaaaatcctgaaaaatgaggggctgatcgtgcttgtcgtctaccatggccatcccgaaggaaagcgggaaaaagacgccctgctcgaattttgtgcatcgctcgaccaggatacggcccgtgtcctctgttaccaatatttaaaccagcgaaacgatccgccgtttatcattgcgatcgaaaagaaagaagcggtccaaaagtgacagcctgaaatcctccgtttggaggatttttttcattcaaacataatgtaagcgatatcaaaataaaatatgaacactttagatttcggaattttctaaaaaacaccaaataatggaggtggtttcactctttgtcgcgaaattattgaaaactcatggaaaatacggagggatttcgctttgaaaaaatttatcgcttatcaaattttgatcgcactcgccattggagcagttatcggacatttcttccctgatttcggaatggcgctgcgccccgtcggagacggatttatccgtctgattaaaatgatcgtcgttccaatcgttttttctacaattgtcatcggagcggccggaagcggaagcatgaaaaaaatgggcagcctcggcatcaagacgattatttggtttgaagtgattacgacgttcgtgctcggactcgggctgcttttggctaatgtgttaaagcccggcgtcggccttgacctttcccatttggccaaaaaggatatcgacgaactctcgggctacacggaaaaagtggtcgatattaaacaaatgatcctcgatatcattcctaccaacatcgttgacgtcatggccagaaatgatttgctcgccgtgatcttctttgcgatattgttcggcgttgcagctgccgggatcggcaaagcctcggaacctgtcatgaagttttttgaatctgttgccaacatcatgttcaagctgacgcagatggtgatggtcacagcgcctatcggcgtgcttgctcttatggccgcatccgtcgggcaatacggcatcgagctcctgcttcctatgttaaaattagtcggcactgtttttctcggactgtttctcgttctttttgttttatttccgatcgtcggtcttgtttttaaaattaaatacttcgaagtcctgaaaatgatttgggatttgtttctgatcgcgttctccacgacgagcacagaaacagtcttgccgcagctgatggaccgcatggagaaatacggctgcccaaaacgggtcgtttccttcgtggttccttcaggcttatctctgaattgcgacggctccagcctatatttatcggtcgcctgtatctttttggcgcaggctttcaatatagacatgagcatttcccagcaattgctcatgatgctcgtgctagtgatgacaagcaaagggatcgccgccgtgccatctggctcgctcgtcgtccttctggctaccgccaacgcagtcggccttcccgctgaaggagtcgcgattatcgcgggagtggaccgcgtgatggacatggcgcgaacaggcgtgaacgtgccgggtcatgctgtcgcctgcatcgttgtttctaaatgggaaaaaagcttccggtataataagcgctttgtgcttgaaaaacaataccggacggaaagtttataaacggcaaaagctcaagccgataaacggtttgagcttttctttacgagcttttcatccacggcattttttgaattttgcggtatgccctgccgttaatatagaaaaagaaagatgttttgccgctcgctttaatcagctttttcgcaagccggccgatttccttctggcccgctactttgtcatccgacaaataaacgcctaacagtcctctgttgatcaaacggtgaaagttttcgtgcggaatcccgcgcaaatgttcatccgccatttcgatgaaatattcgagcctttccatcatatctgaatgtgatgggtaataagtgcagaaattcaaatccccgccgattaaatcttcctcctggtcaattaaataatcgagcaggatgtgcagtccctgtatgtacggaaaatagctgtcgcggatctttccggccatcgattcagtaaaatcgggacggacggaatacgatacgaggcagaagatgccgagcgttgaacccgcacaggccgagaactcataccattccattttcggcagagccgatttataattctcaaaccacgcttcgagccggggaacacgctcatgctccactacgtgtttatgaacttgcaggtcgcaatagtagctgcaaagctcaatcagatgctccttgatcagatcatagttctcaatttccgcaagcacgccttgacatgttttcactaagtcgtgcaaatagccttgatcatcctgatcttccctgaaccggtaatagtttttcaattcagccccgactgtcagcgcgtctttcatcgactggtgaagcatggtgaaatcatccggatcaagcgaggtgctccggtcgcatagattgtcgaggtagtcgcttatcgtctgatacgccgtaataaaccggatcgactgctcgattttgtctcctgaaagaagggccataatgccgccgccttcacagtgaaaggttttatccctgatgctggctttcgcctgcgttttcagttcgggattttgaatcgtttcagcttttcgtttccacttgtccaattcctgatgaacaaggggaaaaacctctctgtatactttagccattaatccaaaaggatgctccggtactgccaaagaatgcacctccattatgttatatactgctccgcaaacgctctggccgctttaaaaacgtcttcccgttcaggctcattgaaaatttcgtggtacaagccatcccattccctgtacgtcttattgtgggaagcaagctggttaaaccacttgacgaccatttttttgtcgacaagccagtcggtgcccgcctgcatgacaaagagcgggatgttgagaaaggcgtccgtcggctccatcgcgcttttcaacgcttttaacatttcttgataccatctgacagaaacttttgtgatatataatgaatcgttgatgtccatttcgatgacttctttgtttctcgtcgctttatcaggcgtgatcccggattcaaaccgcatagacggcgccaaaacgttgagccccttggaaatcaagtccagaaatttgttcggctttaattgcagcccgagacaaggggatgataaaatgagaccggcaatgccgctttgctgctgcttaaaccattcgatcgcaatcaggccgcccatgctgtgcccgagcataaacacaggcagttcaaatgctttcgccctggcgacccatttgtccacttcatcaatatattcttgaaaagagcgtatatgtcctctttctcttgtcgaagttccctggccgggcaaatcccccattacgacattaaagccggatgaacgccacatttcggacagccatttataccgcccgtgatgctcacatgcaccgtgaatgatgacgattgtagcaacaggtctttccgcttccatgcaccacatgctgaccacctcacacaattttataaatgaaaggatgaaacctatgatctacccttataaaaaaacggaacccgttattcatgaaacggcgtttatcgccgacaacgcggtcatcaccggagatgtaacaatcggagagcgatcaagcatctggttctcttctgttatccgcggcgatgtcgccccggtcagaattggaaaaggtgtgaacattcaagacctttcctgtctgcaccaaagccctgaacgccctctcgtgattgaagacggtgtgacggtaggccatcaggttacattgcacagctccgtgattcgaaagcatgcccttatcggaatggggtcgattattcttgacgaagcggagatcggggaaggcgcttttatcggggcgggcagccttgtcccgcctggcaaaaagatcccgtccgggcacctcgcattcggcaggcccgccaaagtcatccgtccgttaaccgacaaagataaacaggaaatggaaagaatacgcaaagaatatattgaaaaaggacaatactacaaatccttgcaaaaaaaagattagctttgctacaactttaccatttttccaccgataatttaagcaaaaaccttttcggccgcacgcgtctgcggcttttttctttttccgaaatctttacaaatacttatcatttgctaaacattcattttttacaataaaaaatgaagcagccatacatgtaaagggggttaggacatttgaataaactgatggttggcatttacaactttgaatgccggattttcctcggtatgaacagattatttcatcaaaaaacactcaaccgttattttcgttcctcaactcatttgggaggggctatgtgcacgatttctgcctgcctgtctctcttgctgttcggctcgggaagtgttcgtacagcggggatggccagcgcccttgcacttttggtcagccaccttcaagtcatgctgatcaaaaagctgtatccgagaaagcggccgtatttaacgctaaaggaaactcaggttttgcaaaatccgctcaaggatcattcttttccatccggacatacgacagctgtattttctgttattacaccgttaatgatattctttccgatactcgcgcttttattaataccggttggcgtcagtgtggggctctccaggatttatctcggtcttcattatccatcggatgttctggcaggcacagccctcgggatttcagtcggaaccttgtcggcgatgatcttctaagccggccgtttcttccaaagcgtcactgatttttcacacacaaacaggaggggaaacgatgaaaattgcgatatttacggacacgttcacaccagatgtgaacggctgcgccagaacgctgaaaaggtatacggattatcttgaaaaaaacgggatgccctataaagtatttgcgccggaaagcacgcatgaaacacaattttcgagccgcatccgccgttttacgagcatgccgttcttcttataccccgagtgcagaatcgctcttcctaatctcatcaaaatgaaatcagaactccgcgaattccatcccgatctcattcacatcgcgactccttttaatatcggcctggcggggctcaagcttgcgaagaaatggaacatccccgtcgtaggctcttaccataccgattttgaccagtacctttcatattatgatcttcaaatgttttccaaactcttatggaaatatatgctctggtttcataaagattttcgaaaagtttttgtgccttcgcgcgaaacatttatgcagcttaaagccaaacaattcaggaacctctccatctggaagcgcggcgtggactgctcgcagttcagtccggcgcatcaaaccgaacacatccgcaagcgatacggcataaaggaaacctatatcctcagctatgtcggaaggcttgcacctgaaaaagacttggagacgctgctcaagatcgcaagtcaccccgctttgaaagatgacgtccactggctgatcgccggagacggcccgttaaaaaaagagcttgagaagcgagctcccctcaacatgacttttgccggctatgtcaaaggagaagagctggcaagcatctatgcgagctcagatttgttcgtctttccttctccgacggaaaccttcggaaattccgcccttgaagcgctcgcctgtgggacgcctgttatcggggcagactccggcggcctgaaagattttatacagaacggaagaaacggttttctttccgaacctagaaatccggaagcattcaccgcaaatatattgcgcgtcctctccaacccatcgttaaaaaaacggatggcatacgaagcgagaagctatgcccttacccagtcgtgggacgtgatctttgacaatctcctctccgaatgtgaaagcgtgcttgcagatttatcagcagaaaaaacggcataaaaaaagaaggttttcggttaatcgaaaaccttctttttttggcttaaacaataatgacctcttttggctgatggttcagctcttccggtacaaagcgtttttcaacgaaaatgctgtgccagatcataaagatgagaaccgtccagattttgcggctgttatccgctttgttggcgcagtggtcttcaagaagctgaagcacgtaatctttatggatatatgcatctgtctcgctctctttaatgatgttcacggcccagtcatgcatttcgtttttcagccagtggcggatcggcacagggaaccctagttttttgcggtttagcacgtgttctggaacgatgccttccgccgcttttctaagaagatattttgtcgtgccgtttttcgttttcagctcttcgggaattttggaagccgcttcaaatacgactttgtccaaaaacggaacgcgaagctccagcgaattggccatcgtcattttgtcggccttcagcaaaatatcgccgcgcagccatgtgtggatatcgacatactgcattttattgatttcgctgtaggacctgctttcttcaaaatatggctttgtcacgtcacagtaagacaggttgctgtcatattggcgaagaagttttgatttcatgccttcttcaaaaatctttgcattgccgatatatctatcttcaagaggagtacagcccctcattaaaaagcttttccctttcattccttccggcatcgctgaagctacgcgcagaagcatctttttcagcggggacgggatccgctcaaacggctttaatgaaagcggctctcggtaaatattgtaaccgccgaacagctcatctgccccttctcctgacaaaacaaccgtaacttgcttcttcgcttccttcgcgacaaaatacaaaggaatcgcagcagggtctgccagaggatcatccagatgccagacgatctttggaagctcgttcatatattcctcaggggaaatgatcgcgctgaagttttccacgccgaccttatcagcggtttctttcgcaacgtcaacttcgctgaagccttcatgttcaaagccgacagagaacgtctttaagttgggatggaattgcttcgccactgacacgataaaggacgagtcaatgcccccggaaaggaaggaacctacaggcacatcgcttcgcatatgaacttttacagaatcaaagatcgcgtctcttacttcctgaacaagcttgtcttcttctgtctgaaccggcttgaattgaactttccagtatgttttaaattgaatatcctcacccgggcggacggtaaactgatggcccgactctactttttgcacctttttgtccagcgtctcaggctccggaacgaattggaacgatgtatactgctgaagcgctttttcattcaattccaagtcagcatcgacagccatcaggctctttctttctgacgcaaaataaacgtggccgtccgttttcgtaaaatagagcggcttaatgccgaacggatcgcgcgctccgtatagaagctgctcttttttatcccagattaaaaaagcaaacataccgcgcagctttgaagcggcttcctgtttgtagtggcggtaagtcgcaagcaaaacttccgtatctgaatcggttttgaactcgtatcctttagaaagaagttcgtctttcagttctatatagttatagatttctccattaaaaataatccaataggagtcgtcttcataagacagaggctgtcctccattttccacatcgatgatgctgagccttctaaatccgaagcctacatgctcatcatgatagtacccatcatcgtccggaccgcggtgtacaatcatttcattcatttgtttaatcagttcttcctgtgctgctgtctcggatgatgggcgatgattgaatacccctacaaatccacacatagtattgcctccgattttttaaatttcgtgcagaaatcaaagtctgcttcttgattagacaagtgtttaaagaaaaacgtttcaagaaacttgaaaaatgttcatattaaaatatttgtatctggcaatatcacatcaatattaaatctggatatttttcaagtttcaacatccgcccgcattttgccatcgaaaaacaaagccgcttattaaagcggctatgcggttgttattctcctaatgcatctttcttcagctgatctgctttgtctgtgcgctcccaaggcagatcgagatcgaggcggccgaaatgtccgtaagctgccgtttttttgtaaatcggacggcgaagatcgagcattttaataatgccggcaggtcttagatcaaagtttttgcgaaccacttcgatcaatgtttcttcactcgctttgcctgtaccgaatgtatcgattgaaatggacaccggctgagcgacaccgatcgcgtaggcaagctgtacttcacaggaatcagcaaggcctgcggcgacgatatttttcgctacatatctcgctgcataagctgcagatctgtcaacctttgtcgcatccttgccggaaaacgctccgcctccgtgacgggcatagccgccataggtgtcaacgatgattttgcgccctgttaaaccggcatccccctgcggtccgccgataacaaaacggcccgtaggattaatgaagtatttcgtgttttcatcgatcagctcttttggaactaccggattgatgacgtgctctttcagattgcgctggatttgttcaagcgaaatctcaggatgatgctgagtcgaaatgacgattgtatcgatgcgaatcggcttgttgttctcatcatactcaacggttacctgtgtctttccgtccggacgcagatacggcagaatttcctctttgcggacttctgtcaaacggcgagacaatttatgggcaagcgaaatcggcagcggcataagttcctttgtttcgttgcaggcaaaaccgaacattaaaccttggtctccggctccgatcgcttcaatttcagcgtcgctcattgctccttcacgcgcttcaagcgcctggtcgactcccattgcaatgtctggagactgttcatctatagacgttaagaccgcgcaagtttcggcatcaaaaccgtattttgcacgtgtgtagccaatttctttaatcgtttcgcggactgttttcggaatatcgacgtatgtggacgtcgtgatttcaccgcttaccagcaccaatccggttgtcacagatgtttcacaggcaacgcgggcattcggatctttctttaaaatttcgtctaatatactatccgaaatctggtcgcaaattttgtccggatgtccctccgtaactgactctgatgtaaataaccgacggtttttgctcatttatgtttcctcctgtatatgaagatcagccgtgatcttaagtatgatacggaactcgtccctcttgattatatgacgatactcgggcttcatacgctctcgttttgaaacaatttccattatgctattcttgacgagattctgagtcgaaattccccttagcagaatttttcctgactggttgcccggctagacctttcacgtcctgtgaaaaacgcccagtaccttcctcctgcttgatactcggctaaaacctttcacgtcctgtgaaaaacgcccagtaccttcctcctgaaggcagtttttttagcaatttttggatctcgatttatgcaataaaaaaaccttttcctattcggtgaggaaagggtctggtattgcgtgcctttcactcttatcgctcaaggtattgaacaccttgcatcaggttagcaccgtagttgtctcagaaactgtttttttccattaataagagaaaccggttgctgggtttcattgggcctgtccctccaccagctcgggataagagtatccgctcaatgaaatatcttatcttaaaatggcttgttatgtcaatatcggccgaaataaatttgaacttgtcctacgagaaaaaacccgaacgaaaaatgaagaaacggtatagactataagagtaaatgtgttatactaattctacattaatgttatacacattaaaaaacacgcaaaggaaggttttttatgaattctgtagatttaacaactgacttacaaacgctattaacgggcgaaaacgttcagatgaacttatccgttccccatttggttgaaaagatccttgagcgcaaagaaggagtcttgacatcttccggagccgtgcgggcaacaaccggtacatacaccggccgctcgccaaaagacaaattcattgtggaagaagcgagcacaaaggacaaaatcgattggggcgcagtaaaccagccgatttcagaagccgcctttgaccggctgtacgcaaaagtgctcggctatttaaaggaacgcgatgaattgtatgtatttgaagggtttgcaggagcagacgaaaaataccggcttccgattactgttgtcaacgagttcgcctggcacaacctgtttgcaagacagttgttcatcagacctgaagaacatgataaaaaacctgaagaacagccgtttacgattctttcagctccgcatttcaaagccgatccgctcgttgacggaaccagatctgaaacgtttatcatcgtgtcgtttgagaagcggacgatcttaatcggaggcaccgaatatgccggagagatgaaaaaatcgattttttctattatgaattttcttctgcctgaacaaaacattctaccgatgcactgttcggcaaacattggcgaggaaggcggaactgctctcttcttcggattgtcaggtacaggcaaaacgacgctttccgccgatccgaagcggaagctgatcggcgacgacgaacacggctggtccagcacaggcgttttcaacattgaaggaggctgctacgccaaatgcattaacttaagcgaagaaaaagaaccgcagatttacaatgcgatccgcttcggttccgttctcgaaaatgtcgtggttgacagcaaaaccggagagccggactattccgactcattctacacggaaaacacgagagcggcttacccgattgacgcgattgacaacatcgtcaagccgagcatcgcagcgcacccgcagaccatcgtatttttgaccgcagatgctttcggcgtgcttcctccgatcagcaagttaacgaaagaacaagccatgtatcatttcctgagcggatatacaagcaagctcgccggcaccgaacgcgggatcaccactcctgaagccacattctcgacctgcttcggttcaccgttcctcccgcttccggcacatgtgtacgctgaaatgctcggaagaaaaatcgatgagcacggggtcggcgtctttctcgtcaatacaggctggaccggcggcggatacggaaccggggaaagaatgagcctcgcatatacgagagcgatggttcaggccgcaatagaaggagaactggataaagccgaaatgaggactgaccgcattttcggacttcattcacctgtccacgttccgggtgtgcctgatcaagtgcttgacccggccaaaacttggacagatgaaaacgaatacgaggaaaaagcgatccacctggcgaaagcattcaaacagaatttcaaaaagttctccaatacggaaaacatcgaaaaagccggaggaccgctcgtttaactcagcctgcttgcatcagcgcagatcttctgcgctgatccagtttatcgaaaacctcttcgcctatcagcggccgatgccatttcctgggcaatgatcaagatgacagtcaagcaccgcctcagataaaacgattccaatttgcaagtattattatttgaaaatacagactttttttatttttaacaaaagaaatctttcatatgttaatattataaaaacatttgtatatttcaggaggacacatctatgaaatttggattactgccaaggatcattacggcaattgttcttggtgttatcgtcggaagctttgctccgctttggttcgtcaaaacggcagctactttcaatgatatttttggaagcttcattaaatttgtcattccttttattattatcgcttttattattcccggcatcggacaaatcggcagcggcgccggaaaaatcctcggcattacggcaggtatcgcctacacgtcaaccatttttgcaggcctcctggcgtaccttgtcggttcaaaccttcttcccgcgatcatttccggccatcagctgcaggagtttaaaaatccggaagaagtactgcaagcaggatttttcaccattgaaatgacgccgtttatgagcgtgatgagcgcactgatttttgctttcatcatggggatcggcatcgcttatctgcccggaaaaacattaaaaaacgcgtttgatgaatttcaaacgatcgttgaaaagctgatatcatatattattattccgttactgcctgttcatattttcggtattttcaccaatatgacgttcggcggtcaggtgcagacgattctatccgtatttgcgaaagttttcgtgatgattatcgtgcttcaccttgtcatactcttgattcagtactccgttgcgggtgctgcaaacggcagaaatccgctgtcgctgttgaaaatcgtagcaccggcatacttcaccgcgctcggcacacaatcgtcagcggcaacgattcccgttacgctgagacaagtcagaaaaacgggggcaagccaaaaagtggctgacttcgccgttccgctcctggccaacattcatttgtcaggaagcacaattacactgacaagctgtgcaatgggcgtgatgattctaaacggtcaaacgccgactttttcggtcatgatgccgttcattttaatgcttggcgtcacaatggtcgcagcgcccggtgcaccaggcggtgccgtcatggccgctgccggattgttgcagtcgatgctcggctttaatgaaactagcgtatcgttgatgatcgctctttaccttgcccaggacagcttgggcacagcaacgaacgtaacaggagacggcgctctcaccatgctgattcacaggctgacttccaaaaaaggaatcggaaaagaggaaaatgtgcctgcataatacagaaaagccaaggacgctatccgcgccttggctttttttaattcgtggaatttaatgatacgagcctgtatgttaaatgagtccgtccgtctgaccattcaaggcgctccgcctgcgcggtgccggtaatgtcgccccgcttggtctttctgacttcaagcggcacatgaagagggtaaacccgataaccttctttctcgagtgtaaacacattttcctcaacccgcgtttcttttccttttgtcacaatcatcgtgttaaattcaactggcattcccacctaaagtccccctccttttctcttttactttagtttaccataacttgtccaaggacggcttttcatccattgggataattctctaacaatccgcctgttttcgcgcggaggaaaatagtgggtatattggctgaaataccacgtatccacagacttgttccttcgcagaagttcacgctcaagacgccgcgcatgctcgatggagacattttcatcgtttgctccgtggatcaaaagcacgggcgcttcaatcttctccagctcgtcaaaaggcgtcctccattcatacgcttcgggaaccttttcaggcgtcccgccgatgacccgcttcatcatccgccgcaaatcttttcgttcgcgataggtcatgaccatgtcgctgacaccgccccaagacacaaacgaagcggccgctgctttcatttcgattgccgttaagatgcccatgattccgccgcgggaaaagccaaaaatgtgaacgcgtccgtcctttaccagttcgtgcttctgaagaagacgaaaagcggcaaaagcatcttcccggtcattacctgcaaaatcctcatcgccttctcctccttgattgcccctgtaaaacggagcaagaacgacaaagccctgtgaagcgaactggacgattcggcccggtctgaccatcccgacgtttttaattccgccgcgcaaatacaaaaacccgtcataatttccgggagcggccggttcggccaaaagccccttaaccttgagtccttgtgaaaggtatgtgacggaaaacagacgcacctctttgttcggcgatggaaaccttcttttttctatccacattcgtcacgtcacctcttttaatccgcagctgtccctcacacctgtttagtatataacataaactattttatgccgaaaataaccgaaatcaaaggagggaaatcggtttgaagcgtttcttttttaccatattatccttcatcatgatgctgtttatcctcgcttcatgcggcggacaaaagaccgaaaagatccgtctggcggaagtgacccgttccgttttctatacgcctttatatatcgccttatctgaaggtttttttaaagaagaaggccttgatgttgaactgaaaacgacctggggcggagataaaacgatgactgcccttctgtcaaacggcgccgatattgcgcttgtcggctcggaaacgtcaatatacgtaaatgcccagggcgcaagcgatccggtgattaattttgcacagcttacccagacggacggaaccttcctcgtctccaggaacgattcggggcatttcagctgggatgatttgaaagacaaaacgttccttggccagcgcaaaggcggaatgccgcagatggcaggcgaatttgtcctcaaacagaaaggcatcgatcctaaaaaggatgtggatctgatccaaacgattgatttcgcgaatatcgcaaacagctttgcatctggtacaggtgattatgttcaattatttgaaccccaggcatccatttttgaaagagaaggcatcggccgcattgtcgcctccttcggaaaagaatcgggccgaatcccatatacaacttttatggccaaacaaagctatttaacgaaaaacaaagaagcggtcgaaaagttcacccgcgcggtttacaaagcgcagcagtgggttgagacgcactctgcaaaagaagcagccgaaagcattcaagattattttaaagataccgagctttcaatcattgcatcttcaatcgaacggtataaacaacaacagtcttttgctcttgatcctgttttggatgaaaaagaatggaaccagcttcaaaccatcatggatgaagccggcgagctgccgaagcgcacccctcatcaaaagctggtcaatacaaagatcgccgaaaaggtcacaaaaaattactaggaggtggccgcagtgtcttttctgcaagttcaggatgtcacacatacttacttttcattgaaggaaaaaacagcggcgctggaaaacgtcagcattgaagtcgaaaaaggcgaatttgtttcgtttctcggcccaagcggatgcggcaaaacaacgcttttatcgatcatcgccggcatcgtttcccccacggaaggacgcgtcttggttgaagggcgcacacctgatggaaaggatcggcacatcggttatatgctccagcaggattatttatttccctggaaaaccattgaggaaaacgtcttaatcggtttgcacatttccaaaaaactaggcccggaaacgaaggaaaccgctctcggcctgctgaaaaaattcgggctttacgaggttgaaaaaaagtatccaaaagagctctcgggcggcatgaggcaaagggcggcgcttgcccgcactctcgctgtcgaccccgatatccttctgcttgatgaacctttttcagcccttgactatcagacaaaattgaacctcgaagatttagtgttcaacacgttaaagacgtatcaaaaaacagcggtgctcgtgacccatgatatcggtgaagcgatagcgatgagcgaccggattctgctattttcaaagcagccgggcactatccataaaacatttgccgttcctgaaccgatcaggaagctgacaccgtttgaagcgaggcaggaaccggaatttcagcccctctttcagaacatatggaaggagctcaatgaccttgaacaacaaacatccgaaaccaaaagttgacttccttcatgaggcttttttaaaggagcagcaggccgaaaaaaggcgggtccgcttttttcaaatcgcgattttcatcgttttcttttcgctgtgggaaaccgcaagccgtctggcatggatcgatccgctgatcttcagctctccttcagccgtctgggcgcttttcctcgaaaaaatgggagacggatcattgccgggacatatcggtgtaaccgtatttgaaaccatcctcggctttctggccggaacattgcttggaacttttctagccgccctcttatggtggttcccgaggctctccaaaatattagatccgtatcttgtcgtcttaaatgcgatgccgaaagtggcgctgggtcccattctcatcgttgcgatcggccccagcttgacgagcattattgcaatgggcgccatcatcagcgttatcattacgactatcgtcgtctatacgtcctttcaagaaattgatgaaaactatttaaaagtgatgaaaacattcggcgctacgaaacgcgagattttcaaagaagtcattttgcccgcttccattccgacgatcatatctacactgaaggtcaatgtcggcttgagctgggtcggtgtcatcgtaggagaatttttagtatcggctcaaggcctcggctatatgatcatctacggctttcaagtctttaatttcaacctcgtcatgctgagcctcctgatcatcgccgtcttcgcaacattgatgtatcaaggtgtcgagctgttggaaagaaagtggatgaaaggcagagtataacatgaaaaaaccctgcaaatgcagggctttttatttgatgatgccggcctttttcagcttttcaagactgatcgtcaggacggaatctttcataataaaactgtaatttttgttttttgcgatatccttcgggaggctcttcagcaaaacaggaccattcgtctcatagtacgtctgctgtttttctatcttttcgatatcggcaaaataaatatttttgacgatcactttctccctgccaagaactttatattgtccgagataggtcagctttcttacgacagcgcccgtttcttccttcacttcccgcaaagccgcttcctcagcgttttcgctcggttcgactttgccgccggggaattcacggcccctgtccttatgatttgtcagcagccattgatcctcgtaacggcagatcacccatacatgctttggttcttttgaaaaaggttccttctcaaaagaaagctgaaccgtattacggtaaaaatctttaaattcgtacatcctaatccctcttatccgtttccttgcttcttccactcatcatatcatatattggttctttcggtagagtttttgtccagttcagttcagtaattttatcgttccctaaagaacttcattgtccattcctgagtgagaaggcggcaaggctggatgactccgcgcctgcgggcgcttttcaaaagcggcattttttaatctgctgaattgagttcggcaaggccgttttcactgataaatgacttggtttcttcattgcccagacggtaaagcatcgagtaaatgtctttgcgcagttcgtccattttatcatttgcactgtcattgtgatattcgaccgcaggcacgtgagctctgaaaaagttgacccagtcttctgaatacagctgatcaaaatattcccttaaaatgatgatgtcatcatctgtcgccgaaatttgaaattcccacggggaagcgtcagagctctgcgaaatcattccatcttgcaccgaaacatagtatgtctttttttccaaagccaatcatcctttttcgtgttagtatgaccagttgttttaaaatgttacggctttccccggagtttttcctttatggtatttaaaatgtccaataacatctgcggcacggggattcctaacgaatgagccgtgctcacgatttgaaacgcttcatataaaatataaaacataatagaaaaatcgcggatcgaactgcctgtttgcagcatttgatcaaaaaggtgggcaacggatatcagaaagagcgtaaccaattttttcgccagccttgtaaacagcctcttaattgtaaatcgatcttccacacattcgttcaagcttttgctgacaaattcaatgcccatcagcgtaattaagatcataaataaatattcgattcggccaaacaaaaatccgatggccgataaaccaattgtaaagagcgaaaagatgcttaagtccttaaacatatgcttcaacatcctttcaaaaaagacttttcatagcttatcctatgaaaaaagactttgaaaggcttggatgaattgtttgacaatttctaaaaaaggctttaaaaagaacgaaaacacaaaaaagctcaggcattgcccgagcttttccttaccctaagtaggctttcagcatccagttgtgtttttcgatcgattgatgaatcgcgagcagcatgtctcccgtcgtttcatcgttgacttcatctgcaagctccattccgcttttcagctcctcagccaccgttaaaaagtcattataaatattttgcaccatttgttcagcagactcgcttccgtccgcttctttaatcgcggacatttccaggcattccttcatcgttccgaccggagagccctgtatggccaataggcgttcagccaaatcatcgatatgctctgccgcttctgtgtaaagctcttcgaatttttcatgcagcgtaaagaaatctttccctttcacataccaatgataattatgtagcttcacatatagaacggtccagttcgcgacttgtttgttgacggttgctttcaatttttcagacattagatcgtcctccttttcgtttacttttgatttacccgtttagcttgtgcaggaaacatttcttttactctttatcatgattttctttgcctgatatggtaaactgttggaaaaagctattcggaggtaagtgatgatcctcttttggattattgtaggaattctgatcaccggcgccgttctggccatatcgcttgtcacaacatcaaaagcttatgacttcaagcatgaagtcgatcccctcccgtcgcgggaagaagaacagccccatcaatgatggtgggcttcttctttttcatcttcatcggtctcatccgtcgctttccctactttaatgtctgcaacaggcattgtatgctgttttttcgccgtgacatggacttggactttgtaatggccgtcttcaggaaacgctttttccatgctgtatacgccttttccctcattcttcgctttgattagctcgctatcttccttgctcccggccttccagcattcaaactccacctcatcggcatctgcaaccggctcttccccgtagaggacggtcgcttttatgacagccttttcatttttggccgccgattcaggcgtcgccagttttgccgtcagcactttgggctcctcatccgatgccgcctgcttgtccccctggctgcaggcggaaagaccgaccgctaaacataagagaatgaaccattttccaaaacgcatcctatcacccttcttctatgatatgtattacaatataaagtgtagcaaagttcagggataaatggcattattttctttgtgaacaaaaaatagaaaaccggctctcttatgagccggtttttttcaatcattttacccaaacaccttgagcaggtcttctttattttgcgaaagccaaaaacgcatcatgcgctttgcgccttcaagatcgtgaagctttgcctggccgcactgtttttcgttagccgccggaatttcagtcacttcaacggcttctttgaacgtatcctcaagcaaatcaacgatttcttccactttcggctcaccgcttaccaccaggtaatagcccgtttggcagcccatcggcgaaatgtcgataatatcaaagtggtcatatttttccgcatatgtgcggattgtaaatgcaagaaggtgctccaaagtatgaatcgtatcaggtttcattgcctgtttattcggctggcaaaaacggatgtcaaacttgttgacgacgccgtccgttcccactttgtggacgccgcagtgtctgacataaggcgcttttaccgcattatggtcaagctcaaaactttcaactgaaggcatggttcctctctcccctctaatcggtctttttgtattatatcatactttaccgataagttttcaggtgaatgcttttcctttttatgcgttttttgcttatattataataagatcaaaacaaaaaaggtgcgaaaaacatgaaaaccgtattcctgctgctcatccgcttttatcaaaaatggatatcaccggctcttccgccgacctgccgtttttatccgacatgctccaattacggtcttgaagcgatcgaaaagcacggcgcatttaaaggcggatggctcaccatcaagcggattctaaaatgccatccgtttcatcccggcggaatagatcccgttccggaaaaaaagcaaaaggattagcgctcttccggatatccgttgacaatgagatccagtctgcctgtttccggatcaatgacaagtccgtgaacaggtacttcctccggcatcagcggatggttccgaataacgcttacactgtccctgacgctgtcctctacagaatcaaagcttttcagccattgttcaaaatcgacgccggagtactcaagcgtttcaatccgttcttttggaatgccgcgcttgacgactttgtccaaaaagctgtcgcagctcagcttgctcatgccgcagtcataatggccgatcacgcatacttcatcagcgttcagttcgtataccgcaacgagaatgctccgcataatacttccgaaaggatgagccacgagtgcgcccgcgctcttaacgatcttcacgtctccgttccgcatattcatggcatgaggaagcagctcgacaagccttgtgtccatgcaagacagaatcaccattcttttatcgggaaacttgcttgtttgatatttttgatagtcctgccgttcaacaaactgttgattgaactgtagaatattatccaaaagtttcatggctcatttcctttctaaacgctttttatatctaaatataacatatttcttgtatttttttcacaagtccagtaagatttcctttgtgcaaatcgaaacaattacgttttaaggaaggtgaaaaacatgaaggaaaacctgattccggtcactgttttaagcggttatctagggtccgggaaaacgacgctgctgcagcatgtcctgcatgaagcgcacggcttgaaaatcgccgtgatcgtcaatgatatgagcgagattaatatcgacggctccctcgtgaaaaaaggtgacctcatccgcacggatgaaaagcttgtcgaaatgcagaacggctgcatttgctgtacgctgagagacgatctgctcatcgaagtcaaaaagctggcggagaacggcggaatcgattatattctcattgaatcttccggtatcagcgagccgattcccgtcgcccaaacctttacgtacaaagatgaggagctgaatattgatttaggcaaatattgcaggcttgatacaatggtcaccgtcgtcgacggcagccgtttttttgaggacttcgcttcgggcgagagcctattggaacggaagcaggcggcagatgaaacggacagccgggaagtggccgaccttttaattgagcaaattgaatttgccgatgtcctcattttgaataaaactgatttactcaatgaagaagagcaggaaaagctgttctggtccctgagaaaactgaatccggactgcagaatcatttctgcggcattcgcaaaagtgccgctttcggccatcatgaatacgaaatcgttcgattttgaaaaagcaagtcaatcagcgggatggatcaaagagctgaatgaagagcacacacctgaaacagaggaattcggaatctcttctttcgtctatcaaaagcaaaggcctttccatcctgaaagactgaagcgctggcttgaaaactggccgccgcaaattatcagagcaaaaggcttcttctggcttgcttctcgaaatgacacagcaggccttctgtcccaggcaggctcttccctgatgatccaaagcgcgggcccctggattgcagcgtctaccgaggaagaacaaaagctcgcgtttgaagaggaccctaatttgaaagcggactgggatgaaacatacggagaccggaaaacggaaatcgtttttatcggcattgacatgaatcaggaagacattatccgctccctggatcagacccttcttacagataaagaaatgaattcagactggtcggccttacttgattcactgcctgagtatatttaactatcatttcctcttttcaaatcgtaattattacgatacaatgatacaggaccattaaatcggaaccatttcagttttacattgagaggagaaataccatgaaaaaaacattcggaatagcatctgcattcattcttgctgccggattaacagcgggttgctcaagcaatggagcttccagtgaacaaaaagaaaataaagacacgctggacatctatacaaccatttatccgcttgaagacttcaccaaaaagatcggcggagaatatgtgaacgttaaaagtgtttacccgccaaacgttgaagcgcacacttacgagccaagctcaaaaacgatggcggaaatttccgactcggatgcctttatatactctggagtcggtgttgaaggattcgcagacaaagctgtaagcacacttaaaaacagcgacgtcaaaatcgtcaaagccggggagggcattgaccttctgtcacgtgaagaagaaggcgaacatgatgagcatgcacatggagaagaacacggtgagcacgatgagcatgcacatgaagaagaacatgaacacggagaagccgaaggccacgatcatcatcacgaccatggagatcatgacccgcacgcatggcttgatcctgtccttgctgaaaaaatggccgaaaacattaaagaccaactcgtaaaattagaacctgaacacgaaaaaacgtttacgaaaaactatgagtcattaaaaaaagacttggagcagcttgacaaagacttcaaacaaacagtcgacaaagctgataaaaaagaaattctcgtctcacatgccgcctacggctactgggaaaaacgctacggcattaagcagataagcgttctcggcctttcgcctactgaggaaccttcacaaaagcagcttgaaaacattgttaaaacagcgaaagaacataatattaaatatatcatttttgaaagcaatgtcagcagcaaaatctccgagatcatcaaaaaagaaatcggagcggaaagtctgacgatgaaaaaccttgaatctgtaacaaaagaagacattgaaagcggcaaagattataccgccatcatgaaagaaaacctggacgtcttgaaaaaagctttatcaagcaaataacagagaacaagcgcatgagatgtcatgcgcttgttttttaaatggacgaaaaaaaaggccggaaacatccggtctttttaatttattaatccatattaaatcttttcttgaactgttcgacccttccgcctctttcattgaatttctgtcttccggtataaaacggatgggtatcagagctcacctcaacttttataacgggatacgtcttgccgtcttcccactcggccgtctcatcggaagttttagttgagcggcttaaaaaacggtacccgctgtttacatcctgaaagatcacttgataagttttcggatgaatatttggtttcatatgccattcctcctatcaaaacgtaataattacgttttattatatacctttcaaatccctgtgtcaaaaatgaatgttcatttgccatacttaatccctttatccattttaacctcctacaggaagaataatctaaaaaaggcggtaaacaataaaaagcaaaatggtgtaaatgaaaggtggttttccggatgaatgacttgatttttgcaagaagccttttcggaacaacgatgggattccatattatttttgcctcgctcggtgtcggaattcctttgatgattttgctggccgagctgatctatcaaagaacgaaagatccccactacgccattatggccaaaagatggacgaaggcgcaggccgtgttgctcggggtcgccataccgaccggaaccattgccggcacgcagctagccctgctctggccgggattcatggaagtgatcggaaaagtcatgtcccttccatttcaaattgaaatctacgccttttttattgaggctttatttatgtccatttatgtttacgcagccgatcggctgactccacttatgagaattacagccgtcatttttatcgttatcggagcagccgcatcggccatcttgattacaaatgtgcacgcttttcagggaacgccagaaggcttcaaaattgtaaacggtgaaattacggatgttcagccgtggacggcgttcttcaacaaaagctttgtggccacagcaggacatgttgtcgtctccgcttttatgacaggtgcgtttattattgcgacgatagccgcctacaaaatgctccgaaaccgcggcgatgatagagtctacgcccttcataggaaagcgctgctgctcgggctgattgtcggaggagcgttttctctggtcacggctctgagcgggcacgaatccgcacagctacttcaccgctaccagcctgaaaaactggcgggcgcagaagggctgtttgaaacccagtcccatgctcctcttgcgatcggcggatttactgatgaaaagacgcaatcggtgaaatgggcgattgagattccgtgggctttaagctttttggccgacaaccgctttgacaccgtcgtaaaagggctgaatgactttccaagggatgagtggcctcccctgttcattcataccttatttaacggcatggtttttatcggcagccttttgattgtttatgccgctgtgggttttatttggagaaaagtcatgaaaaaagaccgctttccccgctggatgctggccgtgttcataaccggcggcccgctcgcattgctcgcaatcgaacttggctgggtattcgcttgcaccggaaggcagccttgggtcatttaccatatgcagaaaacgtcggaagtagtgacctcctccggctcgatcggcatattgtttcttttgttctttatcgtctatatcattttaggagcagcggtggtgttcgtattgcaatattactttaaacgccatcctgtcgaagaggacttaaaaagcagctgaatgcacaaaaaaaacagaagggaagtcatatgatgcaactggatggaacaacagatgccctgctggctatttcgatcgtctggggatttatatttatatacgccgttatggcgtcgatggattttggagcgggattttggtcgatgatttatatgaacaaaaaacagctgaaagcaaccaatattgcaaaccgctacctttctccgacctgggaagtaaccaatgttttcatcgtcggaatcgtcgtagcccttttcagctttttcccgggcggcacttttgtgctggggactgtgcttttgattcccggcagcatcattttattgcttttggcgattcgaagcggatttttggtcttctcccacgctgcaaaagattatgaaagggcgctgacttacgtttcagggatcagcggctttatcattccggctgttttaatccttgtcttgcctgtgacacacggcaatttcgtataccaggtagacggaagccaccaattggactttgtcaatttgtttttaagccctcatgcctattcttttatgggcttcgccattttcagtacgctgtttctgtcttcactgctgctggctgatttttcaaatgtagccggagaaaaagacgcgtatcaggtctaccgccgaaacgctttaattaccgggccgctcgcactgctcatgtcgttcagcatcatgatgaccatgaggacggaagccagctggctttatacaaaaatgatggacgggcttccatggctgattttatcgtttttgctgtttctcgtcgcatttgcggctctgtttctgccaaacagacataacagcgaccggctgggaaagccgcgcctggctgtcatcgccattacgctgcagtattttacggcgagctatgtgtacgggagggcgcaccttccttacatggtctatcctgatgtcacgattcaatcgggcttcaccgcaccggagacattcagggcgctgttcatctcctacatcgtcggttttattattttattccccggcttttattatttctggaaattgttcatgaaggacaagcggtacatcaaacagcatgaataaggttaagctaaatgtgtacaaccttttaaagggggcccaaactaaatggagcaaaaaatactgtgtgaagtcagcaactgcacctattgggaagagggtaacaagtgcacagccgacgccatctatgtcgtcagccatgctgaaggtgaaaaagcttctaatagtgaagaaacggattgcaaaacctttaaacctgaacatcattaaaacggatgaatgaaggagggacagtcgtgaataaagagtcgctgttacaggctttttatcaggaaatccacggggcggatgaaaccgcatttcaaaaagccgcccgctccttcatgaacttatgggattatgaatacggctgtctcgacgggctgccggatcaagcggaccgggtgatcggacagatcgtgcacgaagatttgcttttgggcgattaaaggaaagggctgtcataaaggcagctctttttatgttaaaaaaaccggctagaaagccggtccaaacgagaagggaataatgtacagctttaatatacatgagaggccgcctatttaacaaagcttgaaaatctggaaatcggcgtttaaaacagcctttactgcttaaaaacgtctattttagatgaattctttcttaaaatatgagtatcgacttcaaatcccattcccggtaaggttggaacctgaatatagccgccctcgatccggatttccggttttacgatatcctcttcccaataccttgaggatgaagaaagatccccgggaatcaaaaactgcggaagagaactcagtgcaagattatgggctcttgaaatgccggtttcaaacatgccgccgcaccagacaggcatttgatgttctttgcagatgtcgtggattttcagagcttctgtcaaaccgccgactcgggacggctttatattgataattttgcagctgccgagctcaattgcctttcgcgcatcagcagccgaacggatgctttcgtcaagacaaattgatgttttgatatgtttttgcagatggcggtggtcaacgatatcatcatcagccagcggctgttcgatcatcattaatttaaatgcgtcaagctctttaatccggctgatgtcttttaattcataagaagagttggcatctgccatcagcggcaccttcggaaaatgcctgcgtatttcttttaaaagctctatatcctgcccgggctgaattttgatttttattctttgatatccttcttttacatattgttcaatttcctgaagcatatcatccaatggggcaagaccgacgacgactccggcaggaacttctgtttttactccgcccagcgcctctcttaaagagatcccttttttcctggcgtaaatgtcccaaaaggcggcttcaaggccggcctttgccattcggttgcctttgaatccgcgaagcgcctcgggcacttcggaagggtgtgtgaatgattcgcgcagcacagccggaatcaaaaaatctttgagcatgtggtagcatgtctccgttgtttcttcggtgtaccacggagatgaaaaagcggatacttccccccagcctgtcacaccttcttgatcagcagcttcaacgatgataaacttgcgatcctgaaaggtttccaagcttgatttaaaaggctttttcagccgcatgctgagatggtacaatgtcagctgtttgatttgaatcatggcgctctccctctacaatttatgtctcatcagtttatttgaagcatttctcggcagcctatcgacaaaatgaaatgctttaggcactttatatgaagcaagccgttctttgcaaaattcgctcagctcctcttcatcaacggggctgtcggcgacgagataggcgtggggaacctttccccaagttttgtcatcgactcctttcacccccgcttccgcgacattggggtgtgacagaagaacggcctcgacttcagccggatagatgttttctcctcctgatatgattaagtctgaacgcctgtccagcacatataaaaatccgtcatcgtcaaaatacccgatatcaccggttttaaaccagccgtcattgaatgagtctttatttgccgcctcatttttcaagtagcccttcataacggtcggcccttttacggttatttcaccatgttctccgggttggcattccgttccgttcttttcgattttgatgcttgatgcaaacagcggtttgccggctgaaccgagcttttcaatcgagtattccggggcgagggtcgcaatctgtgagcacgtttcagtcattccgtacgactgtacgacgggcagccgctttcttttgcattcctcaaggagagaaagcggtgctggccctccgcccaataacaggcaccttaatgatccggggcatctgtcgacttttgccgcaagcctcgacagcatcgtctgaacgaccgatgcaatcgttacttgctggtctttgatcgaacgaagaacttcttccgcgtcaaacctttgatgcaaaacgacagtcattccgtaaatgaccgatttaaaaagcgccgataagccgctgatatggaaaagcggcaaggcgatcagccagcggtcgtgttcttggagccccaaattcaaggcggatgaaaccgcgctgaaataatggtttgcaaatgtctgcataacccctttcggccgtccggtcgttccagacgtatacatgattgttgccgcatcgtccaaatgaatgctttcgatttctgtaaccggcgggcaagcggcgttttgaacgtcttcaatgtcaacagcgcgagccggctgtccccctctatgctcttctatgaaaggcttctctgtaagcaatagctttgcttcagaatgttcaatttgatatgatcgttcggccattgacagcttcgtattcagcaaaacgatgcgaacgccgagaagaaagcaggcatggacggcgatgaccatctccatccggtttgtgagaagtaaagccgctgtatccccattcttcagaccaaagctcttcagccggccggccgttttttttgcttcatgaaataattgaataaaagtcagcttgtgatctccctgaatcacagccatcctgtcaggtgtcagttctgctcgctgtttaagccaattcggatggtccatcagcatatcatcatctccaaaaaatgtcttgaatgataaaagaaacagctcagtcgcaccaagctgtttctctcttccgatttttaaggaaaacgcgggaactgtccgaagtctggacggcgtttttctttaaacgcatcgcggccttctttcgcttcatctgttgtgtaataaagcagtgtcgcatctccggcaaactgctggatgccggcaagcccgtccgtatcggcgttaaaggccgctttaaggaatctgagtgctgtcgggcttttctcaagcatttcttcacaccatttaatcgtttcttcttcaagcttttcaagcggtacaaccgtattgacaaggcccatttcttttgcttcctgagcgttgtactgacggcacaggtaccagatttcgcgcgcttttttatgtccgacgatacgcgccagatagcctgatccgtagcccgcatcaaagctgccgactttcggccctgtttgtccgaaaatcgcgttgtccgcagcaatcgtcaaatcgcatacgacgtggagcacatggccgccgccgatcgcatagcctgacaccatcgctacaacaggcttcggaatgacgcggatcagccgctgaagatcaagcacattcaaacgcggaatctcgtcttcaccgacatagcctccgtgtccccttactttctggtctcctccggaacagaacgctttatccccggcacctgcaaggataatgacaccgatattggcatcatcccgcgcatatgcaaacgcatcgatcagttctgaaaccgtttttggacgaaatgcgttatgtacctcagggcgattgatcgtgattttggcgatgccgttatatgtttcatataatacatcttcgtattgacgttcgcttttccattctacagtcattgatgtgtacctcctactttaaaataaactcacttactattctaccaaaaaaatcgggctcttccacatgaaccgcatgaccggtatgttcaacaatctcgaggcgggcggctggaatccgctttgccatgctttcattgatggcgacaaatttctgatccaggcttcccgcgatgagaagcaccggataattgatcccgctcagtttgttccaccaagacggctgtgatccggtccccattccgattaagctgcctcgaagtccgatcggattgttgttcagacgttcttcgcgcactttttttctttttgaagggtccattgaaagctgggatgcaaacagcggaatgccttcccaataatctacgaaagacttgattccttcttcaagtatccgcctgctgagccggctgtcctgctccctgcgcgcttttctttcttcaggcgaatcaagccccggagaactgctctccagcacaagaccggacacccgctcggggtgaatcatcgccaaggataaggcaagccggccgcccattgaataaccgatgaggtaagcctgttttacatttaaacgatcaaaaatttcgatgagatccgctgcctgcttctctgttgtgtagcgccggctgtccgatggcgagtcggttccgccgtgtccgagcagattcagcttgatcagacgcatcccctgaaaatagccgtctatcccgtcccatgtggccgcgcttcctgtaaagccatgcaaaaacaccgccgttttttctgcagacaggccattgtcttcaattttataggaaacgccgtctttcagtgtcaatttcaaaacggccactcttttcttatttcatgcagcgcggaatcaagcatccggcgatgctgctccacacgatcatcgcgcttcgttttcacctcaatgatatccaagccgcggcggttgacggaggataaatacgcatcggcaaaatgtgcggatgattcagggcatatatagcgtcccccatacagcttggcagcatgctcgaattcgagacccgtcggcgttccgaacaagagctcgaagtacctttcttcagcagattggggaagaaatgagaaaatgccgccgccatcattgttgacgagaacgacagtcagcggaatatcgagcgttttgctgacgaggaggccgtttaagtcgtgataaaatgacagatcgccgatgacaagggttaccggttctttcgttgcggcatatatgcccagcgccgttgagacaacaccgtctatcccgttcgcccctctattggcaaaaatccggaaggtccgttcctgattttcaaaaaatgtgtccgcatcgcggatcggcatgctgtttccgacaaacacggagctgttgtccggaatcaaatgctgaaggttccggtagatatttccttcaaaggtaagatcctcagcttcaagatttcttaaaagagcgcggaagcggctgttggcaaaccgccacttctcaagccagttgcctgtcctattttctgaattgacagcggaatccgcaagaacagcaatctcctcttccgtgcaatgcagcatatgtgcgctgagctgagtcggatcgcgccatcctccatctggatcaacgacgatttgcctaatgctcggattttgcttcagcagctgaaaaagcggcttggaaaccggcatcgcaccgaagcggatgacaagctcaggcatgagctcgcgtttcagctgttcttctttcaataatgagtcgtatgcatcgataatggtttcttttgaatgggtgccgtttctcaagtttgagagcgggtcagccaaaatggggtattctgctgcctgtgaaagagctacaatatgttcttttgcatcatcatcttgcagctctccgcagacgattacgcctttttcggtctctttaatcagagcactcagcgctacaagctcatgccgatcagcacggaagcggccgctttcaaccgtcacatgacctgccgcttctcagcctttgaaaaggttcatcctcaaggttcggcatgagcggctctctcagcggaaagttgatatgcacgggcccgcgcggcgcttttttggcttctccggctgcacgtgctgccaaagaccggatgtacgccagcatgtcaggatgactgtcaggcaaagccgagtctgtgaaaaacttaacaaagtttccgaataagaattgctgatcaatcgcctgaggtgctcctacttctctcagttcatgcggccgatcagccgttaagatcataagcggtattctagaataatgagcctcgatcacagccgggtagaaattcgctgcagccgtcccggatgtacagatcaatgcgactggcttccgcattgcctttgccatgcccattgcaaaaaaagcagcggatctttcatccacatggatatgaacattgatgtccggatgactcgcggccaaaatcgcaaggggcgtcgatcttgatcccgggcagatgaccgcttctgtcacgcctgcaagggaaagctcatcaataaaattccctatatattttgtaatcggattttcagtcaacggatatcgcctccaagagcagacagcatcggcttcatcttaatttgtgtttcttcgtattccataagaggatcggaatcagccacaaccccgcagccggcgaaaattctggccgcatttgaatcgataagtcccgacctgatcgccaccgcgaattccccattgccggacatgtcgatccagcccgccggtgccgcataccagccccttgacatcggttccaactccctgataacctcaatcgctttttgctgtggtgctcctccgagcgcaggagttgggtgaagcttctcgattaaatcaaaaatcgaggactccgcattcattttgccgacaatcggcgtatacaaatgctgcacattttttgttttgtaaagtcccggcttggccggctttttgatattgctgcaatttgacaaaagcgcctgatgaatcatattgacgacaatgtcatgttcgattagatttttttcatcgtttaacagctcaagaccgagcatccggtcttcctgctcactttcgcctctcttgattgaaccggcgaggcaggtcgacagaacgttctctccgtcttttttgacaagacgttccggagacgcgcccacaaaacttttgccgttttcttcaatggcgaatatatagctcgttttttgttcagacatcagattgaataatactctgtgaagttcgacaggctgatcgaacgttaaaaggatctctctggcgagcacgactttatcgtacttcccgtttttaatgtcgtctgtcgccctccggaccgcttcaagccattcaggaacatcaagctcttccttggcggtatattgcgtatgacctttttccggataacgggaatcgtccgccttggtcagctgtgaagcagcgccctttatttcttcaagtactttgcgcacgtcttcttcaggagtcttccatctattgaccgttatgaatgtttcctctccgtcctgtgtcagcatagcggcgggaataaaaaaagcgccttcctggtagccgttccaatgctgcttgcgatcttccagcggatcaaatgaaaaaccgccaaacagcaatggccccaccgctgcctgacctctgctttgatcttcatgaaagtgataggttttctcttttaagcgctcccatttttcatgtacagcctgataacgtccggcatccttcagatctgtggaaaccgatatttcctttcccagcccgacaagcgtcagcccgccgtccggatcagaccagaagaaccgttccccggcaaattgttctttcccgtttatgaaaaaggaaagagcatctatgctctcaatttttctggaatagcttattaaaacagcatggttgacttttttgacgatgtttaatgcttcaggcgcttccttgaggaaagtgcgctgcactgttgtcaccatgatacattcctccaaaatccgtaaaatgcttttataaccatacacctgtgaacggtatgtgtcaacaaaacgacactttattaacaactgccaccacctattataaacgtaatcggccgattgaaaaagacaaggtcatttattattttcgaattgcaggacggccgctttttttctaacaatatcacccattatattgacaccttttttaactttttctaaacttagtatggacgtgtacgtattaaaactaaaggagtcatactttatgcagcatcaatcactttcagggagtgtttctgaaataaagccggaaaaatggcgcgtatggtggatgttaacaagaccccatacactgacagccgcctttgtccctgtaacgctcgggaccgtgatgtcccttgaatcggggaaaattgacatctggctgtttttagctatgctggccgcatcaatattgattcaaatcggaacgaacttattcaatgagtattttgattttgtaagaggacttgataatgaaaactcggtcggcatcggaggcgctatcgtccgctatggaatgaaaccgaagacggttttatacctggcatacggactgtttggagcagccgttttactcggcgtgtacatctgcgcttcttcaagctggtggcttgcgctgatcggattggtttgcatggccgtcggctatctttatacgggcgggccgtttccgatctcctatacgccgtttggtgaaattatgtcaggcgtttttatgggaatggtcatcatcctgatttcatactatattcaaaccggcgggctgacttggaacgtctttctgatctcccttccgattacgattttagtcggaggcatcaatctttccaacaatatccgcgatttggtcggagataaagaaaacggaaggaagacgcttccgattttggccggaagaaaaaacgccgtgcagattttaagctgggtttttgctgtttcctatatattgatcggtatatacatcggctttgagatcgtttctctgtggagctgcctcgttcttttaagcctgcctaaaccgattaaagccatccaggagttcaaggcaaaagaaaagccggcagaactgatggtcgccatgaaatcgactgcgcagacgaacacctttttcggccttctgctcgccatcgccctgcttattcagtacgttttttaaaaaaagagcctatacggctcttttttttgcttttatttacaatgaaagttctgtttgaattcgttcatactaaaaacgcgagcactttaaagaaacgaggcgatgcatgtgctaacaaaagaacagttgacaaaactcgaaaatgaactgaaagccggaaaagaacagatcatcagccgctttaaagaaaacggacattttggcatcgatgcgacgcacccgttcaactcgacgggcgatctttcggcttatgacaatcatccaggagatgaaggtacagaactgtacgaacgcgaaaaagaccttgccctttttgaacatgaaagagagcatttacacgatatcgaacatgctttagccatgatcgaaaaaggaacatacggccgctgtgaagtatgcggaaaggacatcccgtatgaaaggctgtccgtacttccaaccgcaacgacgtgcagtgaacattcgtcaaccgtctccgtttcaaaagatcggccgattgaggaagaagtgctgaacccgccgtttggacattttgaacaagacgaggacgatgaaaatgtcgcatacgattcagaggacgcttaccaggatgtcgaacgctacggcaattcggaaacgcctcaagatctggccgttccgcctctgtcatacagccagatgtacatggagtatgaagagccgctcggatatgtggaagattacgaaaactatgccgcaacagacattaccggaaaagaagttaccgtctatccgacgaaagaacacgaaaaatatgaagacctgcttgatgaagaaggcatcatgacctctttcggcgatctcccggcttatgaaaaggatccttatactgaagacgacgactaagcccctgaccagcggggcttagtgtttttaaattcaatgctggtacggcttaatttcccaaatgtcgtccgcatactcccggatggtgcggtcgcttgaaaaatatccggcatgcgcgatgtttgtgacggctttttcagcccaaagacgcttattcaagtagtctttttgaatccgctcctgcgctacaatataagaagcaaaatcttttaaaacaaagtattcatcattataagcgatcagcgagtcataaatcggctcaaattcgccggcttctccttcgaaaaaaccattgatcagctgatcggccgtttgtctgatccttgcatcatgctgagagtattcccttgacagatagccgcctttttccgcgtagtccagcacttcatccgcctttaaaccgaacgtgtagatacactctgtccccaccctctcaagcatttcaatattggcgccgtcatgcgtgccgatcgtcaaagccccattaatcatgaacttcatgttccctgttccggaggcttctttgctggccgcagatatttgctcgctgacatctgacgccggaaaaatacgctcggcggttgatacccggtaattttccagaaagatcacattgatcgaatgtctgacatccggatcatgattgattttatctgcgactgaatggatcagcttgatgacctttttggcataatgataagtcggcgatgccttcgctccgaaaataaaggtttgcggataaatggcaaagcctttgtcttccttcagcctgttgtacaaatacatgatatggagcacatttaaaagctggcgcttataagcgtggagacgcttgacttgaacatcgaagatgctgtcagggttgacggcgaagccgacgctgcctttcatcatgtctgccaaaagctgctttcgttcccttttaatgcgctgaaacgactcgagaaacgcggaatcgttcgcaaatggacgaagatccagaaggctttccggatctttcagccacctgtctcctatcgcttcagttatcaagttcgcaagcggcggatttgcctttaacagccaccttctatgtgagatgccgttcgttttattattgaatttaaaagggaaaacggaataaaagtcgttcatttcccgctcttttaatatggtcgaatgaatgttggcgacaccgttaacactgtagctgccgacaatcgccaagtgggccattttcacttcgccgtgggcgatgacggcaagcttttcgatcctttcccattcacccgggtatttttcccacagccagccgcaaaaccgctcattgatctcctcaatgatcatataaattctcggcagaagcggtttaattaaatcgatcctccatttttccagcgcttcggcaagcgtcgtatgattcgtatatgagatcgtatgtacggtaacatgccacgcttcatcccacgtcattttttcttcgtcaagcaaaattctcatcaattccggcaccgccaaagcgggatgggtgtcattgatatggatcgcgactttttggtgaaaatcatgcagtgacgggtgagtgttcttatagcgtttcacaatgctttgcaggcttgccgatactaaaaaatactgctgcttcaaacggagaatcttgccttcgtcatgcgtgtcatccggatacaggcattcagatacagcttctgtctcgcgcttatacttcaaaatattcggttcatgatggagcgagcaaggctccgcattccacagccgaagggtgttgaccgtcttggtctcatagccgatgattgggatgtcgtgaggcacggctgtcatcacttccgcatcttcctgccaaaagcggaggcgccctccttcctgcgccatcttgacccgcccgccgaaacgaacacaaacagcctgatcggcgttgcggatctcccatacgtaaccatgtttgagccattgttcaggcaattcgacttgatgaccgtcgacgattttttgttcgaaaaacccatgcttgtagcgaatccccattccatgcccgggaaggtcgagcgaagccagtgaatccaaaaagcacgccgcgagcctgcccaatcccccgttgccaaggcctgcatccatttcggcctcttcgatgtcttcaagacaaatgccaagctcggtaagaccttctttgacaatctcacgaaccccgagattgaggaggttttggccgagcagtctgcccaggagaaactcaatcgataagtaataggtctgtttattttggttggagcggctcctttcattggtctcgatccagtttgcgctgatatgttccctgaccatgatgccgagcgtctgatactggtcaagcgttgaagagtcccgaaagctttttccgcacaaccgttcaacacgtttcaaaaagcattgtttaaagctttctttacttgagaacatgcgcttccccctttatctcccggctgtataaccgctgatactgacgggctgacaaagcccagctgacatcatgtgtcatcgctttttgaacgatcctgccccactcttctttcctgtgataaaatgacagtgctcttttgatcgtatgcttcatatcatgggcgttaaaatgggcgaacgtaaaaccgttgccttcactggttgtttcccggtaagcggtcaccgtatcatgaagcccgcctgtttccctgacaaccggcaccgcgccgtacctgagggcaatcagctgtccaagaccgcacggctcgaattttgaaggcatcaggaaaagatcgctcgcggcataaatcttgcggctgagcggttcattaaaaccgatatacgccttgcacctgtccggaaaagcatgctccatatagcggaagtaattttcaaattccgcttctccggttcctaaaacgatcagctgcatgtcttcctcttcaaacagttcatgcaatacccgcttgatcaaatcgaagcctttttgcttcgtcagccttgccaccatgctgatgagcggaatgtcttcattcaccggcagaccgaatgtcttctggatcacggctttatttttccgttttccgtcccggttgacggcatcgtaatgataatcgatgtgcggatcgtttaaagggtcgtacagcacatcgtcaatcccgtttaaaatgcctgtcagtgcatccttcttgtctgacagcaccccttcaagccgctcgccgtagtatggagtcaagatttcatcgcggtacgtcggactgaccgttgtcacctgatcagcggcgataatgccgcctttcatataattaatgttcccataaaactcgagcttttcggtcgtgaaatgggaaatatcaagtccgagcaggtcatgaaccgcttccttcgggaaaatgccctgaaattgaaggttatgaattgtaaatacgcttttcatgtgctgatagaacggcttttttcgatattcttcttttaataaataattgaccatccctgtgtgccaatcgtgggtatggatgacatcagcttcaaaattcagcgcgtatagtgcttccaaaacagcccgcgagaaaaaagcaaaccgctctccatcatcataatggccgtaaagggaatcccgattaaaataatacccatgatcaagaaaataataggaaactccgtcatgttcaaggtgttcaatgccgcaaaactgcctgcgccacccgacgcgaacctcgcattcagccgttttaaccatccgtcttctgacgtcttccgcaatcaaactgtatttcggcatcatgacgaccgtttctatgcctaaaagggcgagctctttcgggagcgccccggcgacatcggcgagcccgcctgatttaacaaacggcacacattcagaaacagcaaataagactttcaagagttcatcagcgctccttgtatggctcctttttttaatatgaaagggaggctcatggtgccggacatttcgatatgatggccgattttgacgtctttgtcgcagatgacgtgctcaagccggcagttttctccgatccttgttttttgcatgacaacgctgtttttgatggttgttccttttcctacgtgaacccctctgaacaagaccgaattctcaacctcaccttcgattacgcacccattagcgataatcgattgctttaccctgctgtttttagcgtattttacaggaggatcgttttttatttttgtgtagacaggctggcccatatgaaagacttgctcccaaaacacaggctgaataaggttcaaactatgaaaaaggtagctttcgggggaatcgatcacggctgtatatcccgagtgctcatagctgttgactgatagagagccgcgctctttccggcagacttcttcaaaagattgggctccttcagggcaatgcccttcaaccatctcccacaatagactcttcttagtgacatacattcctaaaggctttccttcgtgacaaatttcagtcagatcacacccggattcaaggtgttgtttgagcacttcttgaaaaggaatgtgaccgaccgtatagctatttgccacaacagcatattgttgagtgcttctttgaaaataatcgagatgctccgcaaattgccgaaacgatccaagcccaacatgctcatcatggggaagtgaagatggaagaaagaaaaggccctcccttttcctgtttaaatcccactcttttcccgatcctaaatggtccatcaaggagcggtacggggacttggagaatacagcgacactccgaatgcctgcatgaaccatgcctgacaacgcaaaatcgatcagccggtaccttcctgcaaacggaacggctccggtcgagcggccggccgttaagtcctgaagagagtgctggtttacagctgcatcaataattcccaacatttgattattcattgataccatccgcctctccgcgttgtttaaacaaccttatgttttttgacatactcctctgtgatcagcaggacttcgccatcttccggcttcgcgcaaaaaccgtccggaattcgaattcctgccgatacaatggcattttcgatctcaacatactctccaattgaaacgtcatgcatcacgactgaacgtttgatggcggaatgtctgccgatggcaacgcgctgaaatataaccgaacgggtgaccgacccatacacggtgcatccttcgctgacgagcgattctttgatttccgccagatcggcaacaaactgcggcgggagattcggggagactgaataaatccgccagttccgttcgaacaggtcaagcggaggatgatctccaagcagatccatattggcttcccataaacttctgaccgtaccgacatccttccagtatcctttaaacggataagcgttcagcctattattttcttcgagaagagccggaatgacatcttttccgaaatcgtggcttgacgcggaatttttttcatcgcgttccaacgcatcttcaagcacgctccatttaaaaacgtagacacccattgatgccaaattgctctttggatatttcggcttttcctcgaagcttgtaatctccatcttgtcattcgtatgaaggatgccgaaacggccggcttctgcccagctgacttcaatgactgcgatggtggcgtcagcttgtttctccgcgtggtattcgagcatttttccgtagtccattttgtagatatgatctcctgataggatgagtacatgttcaggctgaagctcctttaaaaaatggcggttttcataaatcgcgctagccgtccctttgtaccacttcacttccgacgcttcagcataaggggataaaatggagacccctccgtcattgcggtcaagatcccatggctcgccgattccgatatatgagtttaataaaagaggctggtattgagtcagcacaccgacatgatgaattcccgagttggcgcagttgctgagggcaaaatcgatgattctgtacttgccgccaaatggaacggcgggttttgcgaggtttttggttaaggcattcagcctgcttcccttgccgcctgccaaaagcatagccacacattgttctttcatccctttttcgctcctctctttttgactgctctgaaaaccgcagctcccagcggagggactgtcatgctgatgctgtatggtttgccgtgcagaacgccttttcttgcctgaaggcgttttgggttgatttggtgtgaacctccgtattttgcatcatcgctgttaagcacttcgatatattcggtttgaaaagggacgccgacccgatattcgtgatagacggaaggcgtgaaattgcagacgataatcagcgcttcaccgggctgttttccatagcggataaacgatacaatcgactgttccgcattgttaacgtcaatccactcgaatccttgctgccgatgatcattttcatacaggatacggctttttttgtagaggtgtagagcctcctttgtaaacattcgggctttgcggtgcatgtcaaaatcgtccaaaaaccaatcgagctcttcttcgtctttccattcatcaaattgagcaaactcaccgcccataaaaagaagcttttttcccgggtgcatcataaaataactgatcagcaggcggtactgggcgaatttctgccaataatcgccgggcatcttatgaagcagagactttttgccgtacaccacttcatcgtgggagaacggcaggatgtaattttctgagtaggcatacattaaggagaatgaaacaagatgatgcaggtgttttctttgttctggggaagcttccatataggttaatacatcgttcatccaacccatattccacttataattaaacccgagaccgccttcataggtcgggtgcgtcacaagcggccagtctgtggagtcctctgcaatcatcaaaaagtggggatcttttgcaaaaacctgttcatttaacgtttgaataaattcgatcgcaaagccgttcgcttcaggctgaggacggtttggccaatacaggaggttcgcaaccgcatcgactcgaaatccatctatatgatacatctcgatccaatacaacgcattcgagattaaaaaactgtgaacttctcgttttccgaggtcaaaattggcggtcccccattcccaattttccctgtcatgctcgtgtttatattcatacagaggcataccgtcaaacaaatacaagccgtggtcatctttgcaaaaatggccgggaacccaatccataatgacgccgatctcatgctgatggcactggtcgatgaaatacatcaagtcatacggttcgccatatctgctcgtcggactgtagtaccctgttgtctggtagccccatgaacggtcaaacgggtgctctgtcagcggcatcagctcgatatgtgtgaatccgtgttctttgacgtaaggaatgaccgtttcgctcagttcccggtatgtgaaaaaacgtccatccgctttctttttccacgaaccgatatgaagctcgtagatggaaatcggtttttcatacacggctttttgctgctttttcttttgccacttccggtcgccccattggtatccggccaattgataagtgaccgatgccgttttcggcctcacttcagaaaaaaaagcataaggatcagccttcaatttcgtttcatttgcggctgtaatcatttcatatttatacagctccccttctccaataccggggataaacagttcccatatgccttcctgatgacgcttttccattcggtgcaggacaccggaccagccgttaaacgttccggcgattcgaacctccttcgcatgcggggcccaaacacagaaacggaagccttggcggccgtcctgttccgtctgatgagcgccgaagaacctgtagctttcataaagccgaccttcatgaaagagatgcgctttaatatccgaggcactcacaccagccattgatttcatcctttctgccactatatttaaagattactcttttattcggataatatggcttgatccctttaatgaaagcgcttctttttattgacaaagttcaacaattttccttttaaacattgactgatgtcatatttgaatataaaaaaactccgcatcgaaatgatgcagagtttaacatgatgacccgtacgggattcgaacccgtgttaccgccgtgaaagggcggtgtcttaaccacttgaccaacgggccttattgaaaaaatggcggagaaggagggatttgaaccctcgcgccgcttacgcgacctacacccttagcaggggcgcctcttcagccacttgagtacttctccatggctccgcaggcaggattcgaacctgcgaccgatcggttaacagccgatagctctaccactgagctactgcggaatatcatggtgggcctgaatggactcgaaccatcgacctcacgcttatcaggcgtgcgctctaaccagctgagctacaggcccatgatatgcaaatggagcgggtgatgggaatcgaacccacgacatcagcttggaaggctgaggttttaccactaaactacacccgcatttcgcatggggcggttgatgggaatcgaacccacgaatgccagagccacaatctggtgcgttaaccacttcgccacaaccgccgcaatatatagaattgtaaaatggtggctcgggacggaatcgaaccgccgacacacggattttcagtccgttgctctaccaactgagctaccgagcctttgttaaaatggcggtccggacgggactcgaacccgcgacctcctgcgtgacaggcaggcattctaaccaactgaactaccggaccattttggctgcacctttcgggcaatcctcatttaatgagtgaatttggttgcgggggcaggatttgaacctgcgaccttcgggttatgagcccgacgagctaccgaactgctccaccccgcgatgatcaaaataataaataatatatggcggaggaagagggattcgaacccccgcgggctttgacacccctgtcggttttcaagaccgatcccttcagccagacttgggtattcctccgtaacaatggtggaccttgtaggactcgaacctacgaccggacggttatgagccgtctgctctaaccaactgagctaaaggtcctttaatagcggcggagggaatcgaacccccgacctcacgggtatgaaccgtacgctctagccagctgagctacaccgccatggtgaatattaaagataacaaagtggagcctagcgggatcgaaccgctgacctcctgcgtgcaaagcaggcgctctcccagctgagctaaggccccgaatagtggtcgggaagacaggattcgaacctgcgaccccatggtcccaaaccatgtgctctaccaagctgagctacttcccgttatataatggcgcgcccgagaggagtcgaacccctaaccttttgatccgtagtcaaacgctctatccaattgagctacgggcgctggatgattaagcggaagacgggattcgaacccgcgacccccaccttggcaaggtggtgttctaccactgaactacttccgcaaaatagattggcaatgcggatgaagggacttgaacccccacgtctttaaaagacactagagcctgattctagcgcgtctgccaattccgccacatccgcatgaaatggtgagccatgaaggactcgaaccttcgaccctctgattaaaagtcagatgctctaccaactgagctaatggctccaatactgcaatgaaatctgaagactttttcgaaagctatctgtcttttttcagcaacttttatattgtatcataaaatcgtggtgccggcaagaggacttgaacccccaacctactgattacgattcagttgctctaccaattgagctacaccggcccattccaatatgaatggtggaggatgacgggatcgaaccgccgaccctctgcttgtaaggcagatgctctcccagctgagctaatcctccgcgtcagttgttggagtaactctcgatctgacaaggactattatatacgggaatatacccatttgtaaaggctatattaaaaaaattttattttcagtttattctatcacaacagacgaatatggatacttcgttccgctcaatctgcatgatggcatcaaaagcttaggagcaacatttatccctattgacggcttataataggttctccagacgctccatgaattcctgtctcttccccatggtaaatttgtattcgaattgatttttcaaaacaattttaagtccgtttcgaacgataagcaatatatttcgcttctcgactctctctatcccgactcttaatagcaagcggcgtgttttgaaaatgaacgtcgtactgctcaaaatatacgcattcatttgtcaatcctccagctacctcaatccctcgaaatccatttgccggaacatccagcatccactcttctatttgcatgggttttactccctggcttcactgattttatgcatgccaatgtgcttattggcttcatatttccgctttaaaattcggatttgaacacccagaacacgggccagagaagatgaagacagcttgcctattcttcacaccgtttcgcggggcctgaagggttgaaatcgtctatgcactcctgcccttccggtatatacaatcgaacagccgcaaaaaagaccagcttatataagctggtcttcttaagcgcttggcggcgtcctactctcacagggggaagcccccaactaccatcggcgctgaagagcttaacttccgtgttcggcatgggaacgggtgtgacctcttcgctatcgccaccaaactatttgccttcaggacgaaggtactgggcgttcctcacaggatgtgagggcctttagccgagtttccttgcctttggctttctgagaggtgttctctcaaaactagataacggtcagacaattcacaaacatttaggttaagtcctcgatcgattagtatctgtcagctccatgtgtcgccacacttccacctcagacctatcaacctgatcatctttcagggatcttacttccttataggaatgggaaatctcatcttgaggggggcttcatgcttagatgctttcagcacttatcccgtccgcacatagctacccagcgatgcccttggcagaacaactggtacaccagcggtgcgtccatcccggtcctctcgtactaaggacagctcctctcaaatttcctgcgcccgcgacggatagggaccgaactgtctcacgacgttctgaacccagctcgcgtaccgctttaatgggcgaacagcccaacccttgggaccgactacagccccaggatgcgatgagccgacatcgaggtgccaaacctccccgtcgatgtggactcttgggggagataagcctgttatccccggggtagcttttatccgttgagcgatggcccttccatgcggaaccaccggatcactaagcccgactttcgtccctgctcgacttgtaggtctcgcagtcaagctcccttgtgcctttacactctgcgaatgatttccaaccattctgagggaacctttgggcgcctccgttaccttttaggaggcgaccgccccagtcaaactgcccacctgacactgtctccctgcccgataagggcagcgggttagaaggtcaatacagccagggtagtatcccaccgatgcctccaccgaagctggcgctccggtttccaaggctcctacctatcctgtacaagctgtaccaacattcaatatcaggctgcagtaaagctccacggggtctttccgtcctgtcgcgggtaacctgcatcttcacaggtactataatttcaccgagtctctcgttgagacagtgcccagatcgttgcgcctttcgtgcgggtcggaacttacccgacaaggaatttcgctaccttaggaccgttatagttacggccgccgtttactggggcttcaattcgcaccttcgcttacgctaagcgctcctcttaaccttccagcaccgggcaggcgtcagcccctatacttcgccttgcggcttcgcagagacctgtgtttttgctaaacagtcgcctgggcctattcactgcggctctctcgggcttgcaccctaacagagcaccccttctcccgaagttacggggtcattttgccgagttccttaacgagagttctctcgatcaccttaggattctctcctcgcctacctgtgtcggtttgcggtacgggcacctctcacctcgctagaggcttttcttggcagtgtggaatcaggaacttcgctactatatttcgctcgccatcacagctcagccttacgggaaacggatttgcctatttcccagcctaactgcttggacgcggatatccaataccgcgcttgccctatcctcctgcgtccccccattgctcaaatggtgaggaggtggtacaggaatatcaacctgttgtccatcgcctacgcctttcggcctcggcttaggtcccgactaaccctgagcggacgagccttcctcaggaaaccttaggcattcggtggaggggattctcacccctctttcgctactcataccggcattctcacttctaagcgctccacgagtccttccggtctcgcttcacagcccttagaacgctctcctaccactgttcgcaagaacagtccgcagcttcggtgatacgtttagccccggtacattttcggcgcagagtcactcgaccagtgagctattacgcactctttaaatggtggctgcttctaagccaacatcctggttgtctaagcaactccacatccttttccacttaacgtatactttgggaccttagctggcggtctgggctgtttccctttcgactacggatcttatcactcgcagtctgactcccaaggataagtctttggcattcggagtttgactgaattcggtaacccggtaggggcccctagtccaatcagtgctctacctccaagactcttaccttgaggctagccctaaagctatttcggagagaaccagctatctccaggttcgattggcatttcacccctacccacacctcatccccgcacttttcaacgtgcgtgggttcgggcctccattcagtgttacctgaacttcaccctggacatgggtagatcacctggtttcgggtctacgaccacgtactcatgcgccctattcagactcgctttcgctgcggctccgtcttttcaaacttaaccttgcacgggatcgtaactcgccggttcattctacaaaaggcacgccatcacccgttaacgggctctgactacttgtaggcacacggtttcaggatctctttcactccccttccggggtgcttttcacctttccctcacggtactggttcactatcggtcactagggagtatttaccttgggagatggtcctcccggattccgacggaatttcacgtgttccgccgtactcaggatccactcaggagagaacgaagttttgactacagggctgttacctcctatggcgggcctttccagacctcttcatctacctcgttcttttgaactccgtacagagtgtcctacaaccccaagaggcaagcctcttggtttgggctgttcccgtttcgctcgccgctactcagggaatcgcatttgctttctcttcctccgggtacttagatgtttcagttccccgggtctgccttctcatatcctatgaattcagatatggatactgctccattacgagcagtgggtttccccattcggaaatctccggatcaaagcttgcttacagctccccgaagcatatcggtgttcgtcccgtccttcatcggctcctagtgccaaggcatccaccgtgcgccctttctaacttaaccgttaaaaagaatcactacgtgatatcttgcattacaattgaatgtgaatgtctactttcgttatctagttttcaaagaacacgctttgaaggaatgatccttcaaaactaaacaagatccaaacgcacctgtctataagaccgcaaggtcttatattccgtataatatccttagaaaggaggtgatccagccgcaccttccgatacggctaccttgttacgacttcaccccaatcatctgtcccaccttcggcggctggctccaaaaggttacctcaccgacttcgggtgttacaaactctcgtggtgtgacgggcggtgtgtacaaggcccgggaacgtattcaccgcggcatgctgatccgcgattactagcgattccagcttcacgcagtcgagttgcagactgcgatccgaactgagaacagatttgtgggattggcttagcctcgcggcttcgctgccctttgttctgcccattgtagcacgtgtgtagcccaggtcataaggggcatgatgatttgacgtcatccccaccttcctccggtttgtcaccggcagtcaccttagagtgcccaactgaatgcgggcaactaagatcaagggttgcgctcgttgcgggacttaacccaacatctcacgacacgagctgacgacaaccatgcaccacctgtcactctgcccccgaaggggaagccctatctctagggttgtcagaggatgtcaagacctggtaaggttcttcgcgttgcttcgaattaaaccacatgctccaccgcttgtgcgggcccccgtcaattcctttgagtttcagtcttgcgaccgtactccccaggcggagtgcttaatgcgtttgctgcagcactaaagggcggaaaccctctaacacttagcactcatcgtttacggcgtggactaccagggtatctaatcctgttcgctccccacgctttcgcgcctcagcgtcagttgcagaccagagagtcgccttcgccactggtgttcctccacatctctacgcatttcaccgctacacgtggaattccactctcctcttctgcactcaagttccccagtttccaatgaccctccccggttgagccgggggctttcacatcagacttaagaaaccgcctgcgcgcgctttacgcccaataattccggacaacgcttgccacctacgtattaccgcggctgctggcacgtagttagccgtggctttctggttaggtaccgtcaaggtgccgccctattcgaacggtacttgttcttccctaacaacagagttttacgatccgaaaaccttcatcactcacgcggcgttgctccgtcagactttcgtccattgcggaagattccctactgctgcctcccgtaggagtctgggccgtgtctcagtcccagtgtggccgatcaccctctcaggtcggctacgcatcgtcgccttggtgagccgttacctcaccaactagctaatgcgccgcgggtccatctgtaagtggtagctaaaagccaccttttatgattgaaccatgcggttcaatcaagcatccggtattagccccggtttcccggagttatcccagtcttacaggcaggttacccacgtgttactcacccgtccgccgctgacctaagggagcaagctcccgtcggtccgctcgacttgcatgtattaggcacgccgccagcgttcgtcctgagccaggatcaaactctccatgaagtaatggagcgcagattaagttcgtcacatcctgtgacaacatctgcatgacctgcatcgtgcaggcccctgactacgcacattcgcatgtacgatttatttaatgaattaacaggtacgttttgtcttgtttagttttcaaagatcatttccgcttctgtccgaagcgactttattagtataacattctatcaatgtgaatgtcaacaactttttttaaaagtttttttgaagttgtatttataaagccttctttttagggcggatactaatataacatctattttcgttttgcacaatagcttttttaaaaaaataataatcaaatgaaattcccgatcatcccggaccagccgacaattgacgcaacttattccttcttacttactgttttcttctatataaaagatgtacagcggccaaaaaaatcgagacgctgtaccattgttcccgaagctgcggaaatgcccttaaactctccgctatcagccttcaatttaataaaagctccgaattcggagctttttaaaggatctatctttgtctcatgacattcactctgtcgtgctgttggcaacgaaagcagccgaatactcgaatcgcttgtatgggtaaagctgatcagcctaccttttcggcttggcggtcgaatgtctgacaacaagttcaggtttatagacggtagaatgctcaagcttatccgtgttccgtccctcaactttggcaatcatccattttgccgcctcaatccccatctgcattttcggatgggtgactgatgtcagcttcacttcagacgcctcgctcaagtgtgagtcgtcatatccgacaattgatatgtcgtccggtactttcaaaccgaattcccttacgacatccaacactataagtgctatctcatcattatagcagaatatggcagtcgggcggtctgctgaggaaagccgcttccttgcctcagcaatcgttttttctttttttgttctctgttgtgtaagtcacgaccatctccggataaaacgacaagccgttttccctgaaagcccggataaatcctttcatccggttgacgccctgcatatcgtcctgtttaaaaaaaccgaacactttttcatggcctagcttaatcaaatgctccgtggcgataaaaccgccgtgctcatcatccaaaatgaaatgaggcgggtttaactcctgatataattggttgatcatcaaatatggtatatggtgctgttcaagggtcagatagtaatttaaattcggattaaagctgccggttttcgtcggctccacaatcaacccatcaatttttttgtcaagcatatttacaagacattgtttttctttttcaatgtcattattcgtgctcgcgacgaccaaggtgtaacctgcactcgacaatgaagattcgattcctcttataatagaaggaaaaatgtaatccgaaaggtaagtcgtaatgaccccaatcatcttatttctttcccttcctttttcagaaagctgcaggcggtgagagcaatacgtccctgagccttgctctctgtataaaagcccttcatgaacaaggtcgccaattgcttgccggatcgtatgcctgctcacatcaaatattttcatcaattcgttttccgaatggattttttcgcccggcttcactttgccttcatatatccacgatttaatttcatttttcaccatgctgtattttgtgagttcactcatcagatcaaccctttactgcatcttgtacgtatgaataagttctattataaggaaaagatgtttgcattgctacatattggagggtttcagcaaaagtttttcgaaaaattagcttgtcgtccgtttctttttttagtatagtagaatataactaaataacttgatgaccacaaggggagcctccgggctgagagtgaacgaccgttctgacccttcgaacctgttagttaatgctggcgtaggaatgtggcaaagtcatttctaattgcatccaaagcagtgcgtggaaaactgtcctactccttccccgcattgcttttttttattgggaaagaagtccagtatccctttgttcatcaaaagtgagggttatgatgaatcaatctaaacaacttgtacagctgattgaaattgcgattatgacaggaatagcacttatacttgatatggtgtccggaatgtttttaaaaatgcctcaaggcggttcaatcgccgtcatgatgattccgatcttcctgatctcctttagatgggggctcaaggcagggctggcgaccgggtttttagccggattgcttcaatttgtcactggaggattttacgttgttcatcctctgcagcttcttcttgattactttatcgcgcctacggccgcgggaatcggcggcttttttgccggatcgatccgaaatgcttcatttgagaaacaaaaaggaaagatcatttcctatgttatgctggccgtccttcttggaagcggactgaaatttctcgcacatgtcatcagcggcgctgtcttttttggaaactatgcgcctaaaggcactccggtatggatttattcattggtatataatggaacgtatatgcttccgtctttcattgtctgcacaatcgtcctttgtatactgctgctaaccgcaccaagacttctagaaaacagaacaaacatgagataacataaaaaaacagcggattcgcctgagattccgctgttttttatgttttaatcaaatctgcgaccaatatataccgctccggtgctgaaccgataaagtcaaaaggatagcaggtggaaaccgtcaatgtcgctctcggctttggaactatcaccgtccggtcatccgcatccacgattcggacctttttcactttgtatgtaaaagttccgtaggaagcttcaacaattaactgatcgcctttccccactcggccgagttttcggaaaaccgtatcccggtggcctgataaaaccgagttgtcatcttctccaggcagaacggatcctgcgaaatggcccacgcctttttgcagctcgtcttcatctgttccgtgatatatcggaagccttgcattgattttcggaataacaagatcaccgattttctccccggtttcaaatgtttgatcaattgccgtcttttcttttttcgtcgtctgaatcggaggtttttcaggcttttcctcttctttcatctgctgaaatgaaaatagagcgtagccgtgcatcagcttgaacacattcgttgttgtaaaataagcgccgcacgcaaccatcgcaatggctgcaagccagatgatcttttttcgatgtgccttaatttcctttcactccttataaaaacttcccattctatacagacttagaatgggaagtaaaatgttaagccgcttttcgaagccttctgaccataaacaatccgccaaacatcagaacggcgccaaagatcgaccattctgcgtaatgcccggccgttttcggaagctttgcacctttaaccgtctttttcacatgagatttctttgcgtcgtgtttaacagccgtttgggtttgcttcactttcgaccctgtgtcatgaattaaatcagatccgatcatttcaggcgtcagcaatacatccaaaatgaaattgccctgcagatcgtatacttccactaggaggcttgctcccttcagatcttcagcactgacaagcgtcgtcaaagacacttcttttttctttccgtctttaacaagataatatttcgttttcacttcgagcgtcttctgaagatcgtttaaaatggacagcatttcagcgatatcctgagctgacagctctgatacagactcgaaatcggctaccgcttcaagacgttctccaagagccatcaagtcattttcaaggttcggattgttatcgcgcacttttcggaggtgattcacgagtctttcccactcctgatcatccacacccaattcttgaaacatgtttccgatctgaaaatcgtcttcttcatatgtcacggtgtagagcgcatcgtccaattcgtattcaaacataaacacgtcgagaatgttttggccgctttccatatagccattttcaacaaataggtcagccgcttctttttcgctcaatccgtattctttcaaataggatgccaaaagctttttagtcagtctttgccctaaaaagtctttcaactcttccaccgagtcaaaaccttttaaactctcatcatatgtatcctgcaaataggcttccaattctttttctgtcattcctatttcttcaagataatctttaagctcggcctgtttcggcgcggcaaaagctcctgctgccggcactaaaaccaggatgcagaccaatagtgacatcagcctttttttcattttgtatgaccccctaaatttatctttcattttgattatagtggaaatatttttaaaaacatgtattgtaattgaaaatcttttcgtctataatattttgttctttttcctacttaaacaggcataatctttccctctattgaatgtaatatagtaaagcgaatagaggagggtatacaaatgaatccttactatatgatgctcttatgttatgtcctatcgatcatccactttttaataggctaccgggaagccctgaaaataagcggggctgacgggctggtcaacggaaccgcaatgatctcctgtattccgcttggcgcggttttcgcttttttcgcgcactttttttggaaaatgacgatttaatttcgggaatgaattttttcgccaacaaacatgcatttccgtgttattcacagacggcggcagtttatgctatgattaatagaacttcaatttacaaaaaattcacaaagattggagggaaaagaatggccaaagccgtggcttctcaagaagtcgccaatatgctgaacgactggtacatactgatgaaaaaacgagacatttcaggttcaatcgaaatgaaagatgacatagataaagcaattgaaaagatggaagaagatcatgacgttcttctctattatcaaatgctggattttcgcttaaggcttcttcttgaagatatctcccaatcttccacagaaaaattggaagccatcagttttaaggacaaagatccaaaaagtacggacgataagctgaattattatttttatctgttcaaagggatttatgaagactacaagcaaaaccatacagaagcgcttaattttttcagaatagcggaaaaaaggctgagcgtcattcaaaatgaaattgaaaaagccgaatttcattataaaatcggtgttttgtattacaacttaaaagcgacatggctgtcgattcaccacatcaacattgcctcaggcatcttccaagggtatgacgggtatgccaagcgggtcatcaactgcaaaatgctgatcgggctcaattatattgaccaatttaagtttgccgaaagtgaagtattgttaaaggaagcaattgaaaaaaccgaaaaaatcggcgaccaatatcttttgccttatacctactataatatgggctttttgaagagtaaggaagataaacacgaagaagcgctgaagtattataataaagcttttgcaatcaaagactttgaaacgaaagccaagtatgcttaccttctatgtgtatatgaaaacacaaggtctcttttcaaaaccaacgatcccgaccaagcttttaaatggatcgacacaggctttaaaaaagctcaagaagtgaatagcgaaattttcgaattaaaattcaaaactttatatacattacattccgattgtcagaataaactggaagtaatcaaggactttattcaccaattagaagataaaaaagcatgggttgatctggaggaattgctgatggacgtagcgaattactatagggaaaataagttatacgaagaagccatatatttctacattaaaacagacaaggcaagtaaacttgccggaagaggaggagaataggatgaaaaaagtgttgttagctgtatttgtattaggcactgttttcagcttttcgtttgcaaatcacgctcctgaagcggcttcccaaagcaatgagatacttttggcttctcgtggagcaggcgggtgactacatcctcaaaatacccattcagacatctgctgaatgggtattttgcactttacattcatattcaggagtgatcgatatgggaaagaaagtactgctgacaggatttgacccctttgggggagaaacagtcaatccgtcctgggaagctgtaaaacggctgaacggagaggaagcagaaggcgtctctatcgcagcggagcagattccgaccgtttttcatcattcagcggccgttttgaaaaaagcgatcgaaaagcacaaacccgatgtcgtcatttgcgcagggcaagcaggcggcagggctcatattacgccggaacgcatcgcaatcaacatcgatgatgctcgcattccggataatgaagaccgggaaccgatcgatgaacccatcgcggcagacgggcctgctgcttactggtccgcgcttccgatcaagctcattgtgaaagagttgagaaaaaacggaataccggcctccgtctccaattcagcgggaactttcgtatgcaaccatctcttttaccagttaatgcaccgtatagaccgcacctcggcaaacatccgcggagggttcatccacattccgtttctccccgaacaaacaatcgataaacccgagccgagtctcagccttgaaacgatcgtcgaaggacttagaatagctgcggtcatctccgccctgcacgaaaaagatattcgcgaaacgggcggatcgatcagctgacaccgcagccgcctcaaagcgccctccggcttcaccttccggattcttgtacatcccagtgtgtttttcttaaaaaaagtaaacactataagaaaaacaggtaaaagggtgaatacggatgcagaaatcttacgccgttttcgggctcggccagttcggcggcagccttgtgaaagccttccacgcaaaaggggcggaagtcttaggcatcgacaaatcagaagaaaaagtaaacgaatattctacttatgcaacctacaccatttgcgccaacgccgttgatgaaaagaccttgaaacaaatcgggatacgcaacattgaccacgcatttgtatcatttggcgatgacattgaagcaagcattctgacctcgcttttgctgattgaaatgggcgtccccaaagtatggacgaaagcacaaaatgactatcaccaaaaagttctccataaaatcggcgtccatcgtatcattcatcctgaaaaagatatggccaagcggatagccagccatatcacgtcggaaaagatgatcgattttgtcgagctgtcgccaaactacagcatcgtcgaaattgtggccactaaaaagctggacaaaagaagcctgggggatatcgacgtacgcgccaacttcggctgcaatatcgtcggcataaaaagggacgggcatttcatcatcgcaccgagcgctgatgacatgatatatgaaaacgatattttgattgtgatcgggcaaaataaagatattgagacctttgaaaaaaagggcgattaaccgtgaagtttaaacagatacaattaagcccgtcccaactgctcgtgctagtgtttttatttttcatcatattaggaacccttttattgaagctgccggcagcaacgcccaagcctataggctggattgatacgctttttacatcgacctcggcgatgactgttaccggtctggccgtcgttgatacaggcacggattatacgatgtttggtcagcttattattctcgttctcatccagctcgggggactcggcatcatgtcttttgcggtgctcatttttatcatgctcgggaaaaaaatcggcctgaaagaacggctgttgattcagcagtcgcttaatcagacttctttaggcgggattattaaactgatcaagagtttgtttatttactccttcgcgattgaaatgctggccatgctgatacttgctgtcaaatggattcctgaatacggtctcgcccgcggcatctactacagcctgttccatgcggtttcctcctttaacaatgcgggattttccatatggccggacagtttaatgcggtatgaaggcgatccgctcgtcaacctggtgatcagttttttgttcatcgtcggcgggataggatttactgtattgtccgatttatggcataagcggagctttaaaaagttgagccttcattcgaaattgatgatatacggtacgtttatcgtcaatttggcagccatgatccttatttttctgcttgagtatcaaaatcaaaaaacgctgggaatgcttccgctagctgaaaaactttggggcgcctattttcaggctgtgaccccgagaacagcaggatttaacacgacagacatcggaagcctgcgcgaaagcacgatcacgcttttgctccttcttatgtttgtcggagcggggagcgcatcgaccggcggaggaatcaagctgacgacgtttcttgtcattcttctgtcggttatcacttttttaaagggcaaaaaacatatttcaatagccaaaaaaacgctgaaagaccaattgatcctccggtcgctcgctatttcaacaatcagcgtgctgttgattttaacggccatctttattttaaatatgacagaacctataccgtttttggcgattttgtttgaagtcgtttcagctttcggcacggtcggcctgtcaatggggattacggccgacctgtcccctatcgggaagatgctgattgttttcattatgtttctcggaaaactcgggccgctcacattggcgttttccctggccagacctgaaaaggaaaacatccgctattcaagcgaagatattttgactggataaagcgcggactttaaagcgccttgggcgttttccctttcaccgccgggacgttgtttttccgtatgctttgcgaggccatgaacaggatgatgcctgaaaaaatgaccgctccgccgatcacctgcgtcatcatgacggattcgtctaaaatccaatacgccagcgcaaccgctccgacgggttcaaataaaatcgccacagaaatcatatttgtgctcagccatttcagcacccagttaaagagcgagtggccgagcaaagtcggaatgacggcaagcagaaagaagtaaccccaatctgacgcaggataagaaaaaaaggcggcgcccgaaaacaggcagtatagacataaagtgagggcgctgattccatatacaataaaagtgtaaacggtcaagctgtggcgttttctgacatgctggccaaacagcagatatgccgtcacaagcgcacatgccaaaagcgccaggatatcgccgtagagcgcctggccgcttactttgaaatccccccagctgatgtacacgcttccgccgatcgcgagaagcgcactgatgatcccagcgaacgagactctttctttaaataaaaaatatgtaccgataaaggaaaagatcggctgcagcgtaacaagaacaaccgagctcgccacagacgtgtattcaagcgagcgaaaccataaaataaaatgaaatgctaaaaagaatcccgctgccgcggaaaacagccagtcttttttcgaaaaacccaagacttcttttctttttccccagaaaaaaggaaagatcagcaaagcggaaaaaaagagacgataaaaagcgatgattccagcatcagctgttgacagcctgacgaagatggcggaggaagacacagccaacaccccgaccactaatgctatatacgggtacaatgtggttctcaaaatgaaatccttccttcttttcattttttcttaagcatatccgatggcgatgcgaaaatcgagtgttttttggttattttaccagccttcgatatggtacagttaaaactaggaggggatatgatgagcatttttaatgaagcgagaaaagaactttggagcgagattcaaggcctgtcagacgaaatgctgaataaaaggccggcggaagacgaatggagcattcaagaagtgatcgaccacctgaaaaaaatcgatctgatggcacttcaaatcttgaaggaacaaatcaagcatgcaccggttaaatcaatcgaagataaaccggttcatcagttggaagacagaagctccaaacgaaaggcgcctccatatgcggagccggaaagaaaaacagcggatgctttaaccctcaaagctgagctcgacaatgtcagaacacaattaacttcagtcatcgccgcctttcacaatgaagattttcaaagggtgctgccgcatccgattttcgaagagcttacggtcaggcagtggctcgacttcatcggccatcatgaaagaagacatattaaacagatcaaagaagtcaagcagaaactgttgtaataagcggaaagccccggctcttagagactcggggcttttcatccgcctaggcaaacgacctggcgtctttcatggcagcaggcgaatacgcccacacttctgcttggtcgccttgatggatcaggcccgggcgttcaacgatgcagacgattccccttcttcccatcgcatggcgcacaaagcgcgaagcaagcttcggtttgtcgggaaactgctcctgaatgacttctccgggctgaatgcacggctcattctcgccctcgctcaacaaagaggcgccgcttggaaaaacgattctgcttccttctcttaatgaggttaaatcaggcaggccgcttaatgcgatattggccccgagccattccggaaggaccgccggaatgttcagccgtccggcaatttcaaggcactcttctaccgagacgatagaaatctgcctcctgttgaaaatctccgttcctcttttatacatcggctcccttgccccggcttttttcgtcagtccaaaatgcagatcccccggtatgcccccgtaatcgattacgatctttgcctgtttctctgtcacaaatgacgctgtgtccgctatgtatacgtgctccgccacagccgtgcgcttcttccacattcaacccatcccctttttttcaagatgtgatttattttacattgcctccctttttttctcaaattgaaaaagcccgctgtgtgctgcacacaacgggctttttcaattttttcagacagttttcggggttaaattgaagcagcgtttgtaaatccaattgtacgctttttcgttcaggtctctagggttaccgaccgtttgcggatctttcatcgcttcttttgaaaggcggtcgatcatgtcaggtgatacgccttgctcttcaagactaggaatctctaagtcttccacaagctgatacatccagttcaccgcagctttagccgcttcaactgcagacatgccgcttgtgtcaattccgaacgcttttgcaatgcgggcaaatttttcagggtagcctttccagttgtattccattacagggcccatcatcgccgccacacattggccgtgcgcgacagggatgatccctccgagcgtctggctcatcgcgtgagcagcgcctgcggattcgcttccgtaagaaaggcctgcaagcatggccgcctgcgccatgccgtatctcgcttcaagatcttctccatcggcaaacgctctgcggatgtaatgtgcgccgtattcgatcgcaagaagggccaccgcgtcagtaatcggctgggcaaatttcatcgtatagcactcgatggcatgagccaaagcgtcaacgccggtcatcgctgttacgtgcggaggcattgatacatgcaattcaggatcgataattgtcaaatgagcagcaatcagcgggccgcccgtattgaatttaaattcgcgctcttcatctgtgataaccgcccattgtgtaacttctgagccggttccggcagtcgtcgggatcgttgtaagcggaggaatccggttttcaagcggcttttttccttctgccgcttcatagtcaaggactgagccttcatgagtggcttcaactccgatcgctttcgccgtatccattgagcttccgccgccgaccgcgacaaggccgtcgcagttttcttcagcatacagtttggaaccttcagcgacaagacggacaggcggattcggctcgactttattaaagacggcaacttctacgcctgcttcctgaagggatacaacgaccgggtttgttacaccggctttgtagatgccagggtctgtgacaagcagcgcttttgaaacgccaagctttttcacttcttcccccacatgtttaacggctccgattccgtgcttaatgacggtagggatttcaaacgtgtggaatttgttcatcgcttctactttcatatttaaagtcatgaatagtctcctccttcttatgctttaaaccaattgacagccgccggtttcgtattgcggtagacatgcttcacttctgtgtattcttcaaggcccatgcggccaagctcgcggccgatgcctgactgcttgtaacctccccaaggcgcttgtgcgaaataagggtggaagtcattgatccagacggttcccatgcgcagtttggaagcgacgcgctccgctttttcgatgtcttttgaccaaacggcgccggcaaggccgtaaatcgtatcgttcgcaagtgagacaacctcttcttctgttttaaatgtttcaactgttaataccggaccgaatacttcttccttaacgattctcatatctgatgtacagctcgagaagattgtcggcagatagaagaagccatttgcaagttcagggtcctccggacgttttccgcctgtttccagcttggcgccttcttgcaagccgatttccacatatttttcaactttgctgcggtgttcagctgaaataagcggaccgctctgtgtctcctcgtgaaatccgttgccaagcttgatttttttcgcacgcttgacaagctctgcgacaaactcatcatgaatggactcttcaacgagaagacgagcgcccgcagagcaaacctgtcctgcgtggaaaaataccgcattcagcgcctggtcaaccgctacgtcaaaatctgcgtctttaaacacaatattcggatttttcccgccaagctcaagcgcaatttttttcacattcgtacttgcagcctgcatgattttctttccggtttcaattccgccggtgaaggaaattaagtcgacgtctttatttctggcaagttcatcgccgacagtcgccccggggccgagaacaaggttggccaccccttcaggcacaccggcttcttccatcagcttgaagatcttaatggttgtcagcggtgtgatttcacttggtttgacaacgatcgtgttgcccgccgccaaagccggagcgattttccagcttgcctgcaggagcggatagttccacggtgtgatctgcccgcagacaccgaccggctccctgacaattttgcttttagaatcggggatcggtgaagaaatgacttctccgccgtctttatccgcaagccctgcataatattgaaatacgtttgcaatatcatccatatcggctctgctttcttcaatcgtcttgccggtatcaagcgattcaagttctgccagctcttcgtggtcgcgtctgatcagttcggcgatctttaatacgatgttgcctcgttcaagacccggcgtattcgcccactcgccgtcgtcaaatgcgcggcgcgctgcagcaatcgccctaacagcgtcttctctgtctccttcactgacggtttcaatatgctcttgattgtaaggattgataatttggcgagtctcgccttttttggcgcccacccactttccgtcaatgaaaagtgtttgactcataaaagcagcctcctcattacgcaaagtttgttaaataaaaatttaatgttttgaacactttgaatttatcatgcgccattttttgtgtcaaagcaaatcaggctgattattttttttgaattttatgtgaatgcagagctcacatgggctgagaccgtttgaaaaaaatttttgattttgacatttcaatttctttcgttaagataaagaacatacagaaataacttaacaaacttaacgcggattttagaacaatccccgatttttcggggggcattgaatctgcaatgccgatgttccgctcctgtgaaaggaggcaagttatggacaatccccgtgatgtttcagcaaaagaaacgatcgcacaggcaaaagatcttgtcattgattcaatcgcagaaacaatggatctgtacggcattacccggagtgcgggcattttgtacggaacgatgtacctttcggatgaaatgacgctggacgaaatgcgggaagaactgcaaatgagcaagcccagcatgagcacaagcgtaaaaaagctccaagacttaaacgtcgtcaaaaagacattccacagaggaagaagaaaacacagctttgttgctgaaaaggatttcttcaaatttttcacaagctttttccctaaaaaatgggaaagggaagtcaaagtgaatctcatggctattcaagacgctcaaaaagcattggaggacatcatcgaaagcgaagggcttgacgaaagcataaaagaggaagcgagaactctttatgaccagcttgaacattcaaaaccgtattatgactggctgctgagactcgctaaatctgtccaatccggagagatttttgagtttataccgattgataacaagaaataaaaaggttttatccgctctgaagtcagcaatttgcatacttcccagagtggggcaaaaccttttttcatattttaatttcaagaaaattcaaaaaatattttcggaggcgatgtgcatacatgaattatgctgagaagaaaaaaaactggatcaaattaggtatttttgcgctgtttgcgggaggcatactcgcgtatatcggcatttcgaatgcggacattcattggggcggctttatctccatgatgatattctttgctttcacctattatttaggcgctttttacgcagcaaagaaatcaaattctttttccgatatgatcgtggcaaaaaggagcatgccgtttttcgtcggaatggtgacgatggccgcaacatgggtcggcggcggatatattaacggaacggccgaatcgacttacagcgacggcctcatctgggcccaagcgccttggggctacacattgagcctgattatcggcggtattttcttcgccagaaaaatgcgccgtcatcaatttatgaccattatcgatcctctcgaacagcgcttcggtaagcggatggccggcgttttatatataccggcgctgttaggagaattgttttggagcgccgcgatcttaacggcattgggcacgactttcggaatgattctgaatatcgatttccaaacgtcgattattctttcggcgatgatcgccatcgcttatacggtggccggaggcatgtgggcagttgctttcacagatgtctttcaaatgattgtcattttgctcgggctgtttttagtcgtcccatttgtattgtcgaatgtcggtgctctcgatagcgtatgggcaaattacaggcacgatttcggcagcagcgccaatctgcttccgccgttggacggctggaaaaacccggattggggaaacctgttttggaactggtgggataatgcgctcctcttaattttcggaggtatcgcatggcaggtgtactttcagcgcgttctttcggcaaaatcggaaagcgccgccatgtggcagtcgataattgccggagtgatctgcatcattgccgccattccgtgcgtaatcatcggagctgccggaaacagtaccgattggagcctgttcggagcgagcgctccggataacccggcgatgattttgccgcaaacgcttgcgtatttgacgccaggaatcatcgcaggcctcggcttgggtgcaatcgcagcagccgtcatgtcaagcatggactcatcgattctatcggcatcatcaatggccgcatggaatatttaccgtccgctcatcaagccgaaggccacccaaaaacagctgcaaaaagtcgtcaaacgctcaatcattttgttcggcgcgggagcagcggtcatcgcgctgaatgtcaaaagcgtttatactttatggtatttggcttcggatttagtttattgcattctttttccccagttaacaatggccctcttttataaaagagcaaatctttacgggtcgattgctggatttgcagttgcagtcattctgaggctcggcggtggtgaacccgcattcggcattccgccgcttctgccgtatccgatgattgaagacggcacggtcctctttcctttccggacgctggctgcagtcacagcatttatgacgatcttcgctgtatccgaattgacgcagcgcaaatgccctcctaaacagcttgtactcccccaagaaaaacagaaagacgaccgcgcggcttaaataggaaaaacgcccggccccgggcgtttttctagatttatgtttatttttttacggcatgaatgtaatgaatcgtttcaaaggctgacagatcatcttttcgatttttaaaataacgcccttgaatatctgaaggtgataaatgctcgtaaacgagcagtccggattgctgcagcatgtgctgtattttctgatacgaatagcatgatttcatcggttctcctcctgccgctgccatttttaccatattttccaccctgttgaagaagcctttctctttaaacaagttttcatcagcataatcgaaaacgatcgaactgcctgaagggaggtcagccattaattccccgagcagtttttcggtttcttcctttgttaagtagtaagaaacgcctaaaaagctgaagaacgtttttttgttaaaatgaaaacccttatcagccaattcttgataagaaaacgacttggcaaagtccaaaggaataaaatgaaggtggtccgggatgtgaaaaccggctttgtccagcttttcctttttcaatttctgtgtcgctgggtggtcaatttcaaagatatcaattttgtcctttaactctaggttccgaaaacagaaagtatccagccctgccccaagaatcacgtattgttctgtcccaagccgaatctcatgatgcagcactctttcgcaataagcggcacgggcgagcggcgtcggagagagctgaacttgtgtgatccatcttaatatttcttcatcgtctccctcgtatttttccgctatagctttgttgaagaactgtatgccttgaatgaagctgtttttgatatcagcaaattcttgttgggaaatgagcgatttggccagattatcatcaaagatttttggttcatcatactggctgtgataagctctgccaaaagccgaaataagggacgttatactcgattcatcttttttcatgtcggacactccttcataaacgcaaaaaaataggattctcccggccaggagaatcctattatacacaccaatatttaattattaaattatatcataaataaatttttttgtcaagaaattgctcttttttattttgatcaatgatcgagcaaacggcctgtgagtatgggaaaactacacgtataacagcggggtcgactttttaaaaatctcgccgtctcttatataaaaacgagggacgcgccagcttatggtagataccacttcatagttgatcgtatcaagcatttccgcaatttcatcaacagatatctctgctcccttttgccggccgtaaatcacgacttcctctccttgtttaccttcaccctctcccagactgaccattatcatatccattgttactcttcccgccaccggcactcgtcttcctcgatgaagaataaaaccgcggttggaaagttcacgggaatagccgaccggaattgtggcaatgacttccccgcgctctgcaacatatgtagcaccataactaaccgtccgcggttcagtcaacatggttttcacataagcgattcgcgccttcaagcttagtgcaggcacaagcttaacgagattaagctgcctgatataatcggaaggatataatccatacattccgatgcctaagcgaatcatatcagcgctgaattccggaaaagcgatcgccgcggccgtattgttcatatgcaccgtaggcagcttaaagccttgttctttcagaaagcgaagaaagctgataaacttttcgtgttgaatcatggttagctcagtatccggttcgtcagctgtggaaaaatgcgtaaaaattccttcccattcgaggttttcacttgccgtcagcgcttccacgattgctaaaagcttttcctttgttcgtacacctaaacgccccatgccggtatccacattgatatgaacagccagccggttaggatctgcttcattttccaatatctcgttcgcttctttaatccagtcaacttgaaaagctgataacgatatattccaagctgccgcttctttcacacagctcagcggggtgaaaccaagcacaaggatcggcgctttaatccccgcttttcgtaaaacgaccgcttcctccaccgaggcaacggcgagctcactcgcaccatgttcaagtgcatggcgtgcaacttccaccgatccgtgaccataagcattcgcttttacgacagccataattttgctctttttcggaatatgccgccgaaacgcgcgcaaattttttttgatcgcatcaagatttacctctacccagacttcacggcaaagctttttcatcaacgctcccttctttcttgtcccatagtattcatttcatgtagccgttcgaaaattgcccggatgctttctatctcattcttattcagcttcgggcgaaatcattcagccagtaatcgttagcggtggaaggcaaacagcaggagcccgtgccgtgcagactttaaatcgaaggtttccttctgctgccaaaggaaatgcaaatctgtccatctagttttttaaaagtgtcttaataaggctccgatttgatatattttaagcgtccctgtcataaatttcggtatacacgacctgtgaagggagctttccgcatgaaaagaacagccgggactccagcttggtacaatcacgtgccgcatccaataagaaacgatggtgcgggcgcgaccgattttggcccccgcgacgtgatgcgggatttagagaatcccgacatgttcgttcctccaaaaacagatgccggagcaatccctaatttaaagttttctttttcagacacacatatgcagttaaatcatggcggctggtcccgtgaaataacagcccgggaactgccggtatcaacgacgattgccggcgtcaatatgcggctgacgccaggcggggttcgcgagttgcattggcataagcaatcggaatgggcttacatgattttgggccatgcgcgcattaccgccgtcgatcaggacggccgaaactttatcgccgatgtcggccccggagatttgtggttctttcccgccggaataccgcactcgattcaagggcttgaggatggctgcgaatttctcctcgtttttgatgacgggaacttctccgagttcgataccttcacgattaccgattggttcgcacacacaccgaaagatgttctggccgcgaatttcggtgtacacgaaagcgccttcgcccgcatccccgacaaacagcggtacatcttccaagcaaaagcgccgggaccgctcgaaaaccaaaaagtgccggacccgtatggaaccgtaccaaaaagcttcgcatacaggctgtttgcacaaaagcctattgtaacacccggcggaacggtgcgaattgttgattcttcaaactttccgatttcgacagcgatcgccgccgcgcttgtcgaagtcaagcccggcggaatgagggaaatgcattggcacccgaacaacgatgaatggcagtactatatctcagggaccgggcgaatgacagtattcgccgcaaacgggactgcccggacctttaattaccgggcgggggatgtcggatatgtcccgtttgccatgggacattacattcaaaatacaggcagcgaaagcctgtggtttttagaaatattcaaaagcagccgcttcgcagacatttcattaaatcagtggatggcgctgactccgagagaactggttgaagagcatttgcatgcaggccctgagctgatgaacgctctgcgaaaagaaaaatggccagtcgtcaaataccgtacggacagctaggccataaaatggctcgcgaaaaaaggcaacaaaaaaacccttgaatgatcaagggttttaaagatggagcatagcgggctcgaaccgctgacctctacactgccagtgtagcgctctcccagctgagctaatgccccgtatatttgagacatgatttattatagatggaattttggagaaaagcaagtggtttttgatgtgaaaaagaaaatgctctgtcagccggccattttctttttcacatagacaatctatcgctccgatttttcaaagcagaactgaatgaacctttcagacaaatccagaatgtcttctttccttgccaaggcagcgatccattcttccgggatgcttttcattcaaaagattacatttcacggggcgggaaaaccccacataggtactttaacttcttcaattttttcaacttcactttttcctacccatttttcatattcaaatcgatcaacttgaacaaatccatattttttgataatgtccgggccatgtagcccacttccaattaagagcctattgtcttcctcacgaaaaacaggaaactcaagatcattaataattgcttggtatcttacatcataaactgaagaaatatgttctcttcgaacttgtttacaataatgtccagtttcatctaaaataaaaccaaattgaattgcctcaggatctttggtaaataattcgtagttttcttgatcatgctgaataatctcgtactctttatcattgtatagtgcccaaacgccatttctcatatagttacccccacctattcattaactgaaatgaaccttttttgtttaacactatagatcccaataagtttctcgccttgattagtgatctcataaagttctgcaccttcatgcataggtgttcttgtatcattgcgatattcaggaatagtgtaatctttactctctgtaaatccatttccagtaaacggagattgttgctcagttgcaatataatccattgccaaatcatcgtgggtcattttatttacggcctctgaattcttccctccaaacggaattttataatcgtttggattacctgccttatagcgtaccgctaatgctgatgttccgccactgaaagggttgttttcgtaatctaatctaagtccttcataaatcttatcaaaagtgttcaattccttagtatcagtagctcttgccacatatccacctagctttatttgcccaccatcacttggtgaagaaaatagccaacttttggaatcaggagaaagaaccttctgcataattgtatcttctgaaagactaggaacgtttcgcctaatatctttaataacttccacctctttagatgaaagtttatttatagatttaagcctcaagtcattaaaattattgactgttaatttatgcttttttaatacagttcctaaattatcttcaaaagatttatccaattgttcccacgaaaatttcggattaactggtgaattcctattaacatctacctctttaacaacacttttaacactcttcccagcttcaatctccttctcaacccgctgaatcgaatcctgcatcttcgctttcgaagccttatgggcgtcgttgacgtgggcggagtaattggacccttttcggacgagggtgccgcctgctcctgcttccgcaccgcgggcaatatcgctcaaagcgtcggcgcttttggcgaattgttttttaatggcgaagcctgcgtcgttgagccggtcttgagctttcagcccattcaccttcatgcggttcgcccagatgtttttgctgtctttaagagattgtaccatatgttctgttttgcttgaaatttggccgattgtggctgcgcttttaaatgagcctttcgccgcggcagcgcctgggatgatgtcaagggcgccgaacacgcctctttcaaacctttcgcctgtgtttaactcccgctgcgtcatccagtcttttcctgttgccgcgctcgcgatattggctcctccgtaggcgacggccaccgtgagacctgccggtgcgcaaaagatggtgagcacgataatgcctgctccggccagaagatcccgccataattcctgattcttttggacatcgccgattgattcgtattcaaatccgcgggaagaggcaatcgctttcgtgtattcttcatacgataactcaatgtcggggtggttgatctggaattcttcaaattctttgctcagtacgtgatcaaacgattccgagtctttgaagatatcatttacgctcactttcgctttgtcggtttcaaccgcttgcttggacatgccgtatccgacgtaagtggtttccttggagccgatccggtttacggtggtgtaattatgtatggtcagtccgcgcattttttcggcgaacgcgtctatttttttataaaaagggctgtcaatgtggtctgccaccaaactgccggctttcaggcaaaagtcggccagcttttgataatccttaaacagttcctcgatcttgctttttttgctggtgtgggtaaagctgatcgacctgtcgctgtccttgtctttgattttggattcgatatcttccaagagatcattgagttttataaggccggatttcataccgccgccgtattggccgcccgtcagcgcatcaagaccgtctttcatgccctgccattcttccggtacgtatttcacatccatttagatgatcgcctcatttctatttctgaatcttgtagagtttttggagctctttatctgtttcatacattttctccatcgcataactgacaatgtgggaagctatacagtaattatcaaacagctccatcgtctttccgagaatatccgcgtagctttcaatcgcttttgatgcttgtccggctttataaaaatcggattctgagaggtttttgatttccttctgaaccccttctgtataaatatcgcagatgcttttcagcttattggaaatggtgatcatttcttcaaactcgagatggatgtttgtaccgccgcctcctgctccgccttctgcattcatatcatcgccctccctgctctgaaattgatctgcagtgcatcatagatccggttgttcatgatataaaggctgatccattcatatcgatcatttaaaggatcaaccgagatgaagtcttcgccttttgtaaagtaaagtgttgtcgtctggaagccggggtctgccggtttttgctgtgaggctagcttgaacgtttccacagcaagaacttctttttcatcaagattcattgccctgacttccgctttttcagcggcgctcatcggttttgtcaaaaaggcgcggtcttgatcacgcggctcccttactaaaaatgacacctttgaaatgagcgataaataaacttcgcgcttttccacataatctaatgtgtaccctttgcccgggcttatttcagtcagggcgataacgcgctcctcgtcgtccggcagaaatgcgcacatcacgttattaaagcgcacgtattctccgctttcttggtaatgttgcagcagcttaatcagaaaaaaagcggtcttggtcagcttgccttcctttaaaagaatgcctttttcaatcaggctgtcctttgcttttattgcacaatccggctcgaccaaggccagctgttcgcgttccggaagaccgaatatgtaggaaactccggctgctcctgctaaaacatacagttctgccgccgacagcgtatctgctttcacctgcatgtcattctccttccctgttataagtttttgatttcctgcacttcactgagctgcgaaaaaccgtcgatgtgtttttccagcgcatctaatgcagcggtatgctctttcaaggcgtctttcatatcggcattcaattcaataatcagctcaaggtagcttaaaaatgcgtcgcgggttttcccgctccatttgccgctttcgacgtacgctttcaattcctttgcttttttgagcgaatcgccgacatgtttttcgatcgctttcgcatgggaatgcgcttttattgttccattgtgtgaaattttcacagtctctccgcttactttcggattcgccgcttgatagttgtagtatccatatccgtccatgactcggctgttcctcctctacgcctttttctcttcagcttcagcttttgctttataatactcccacttgcttttcgccttcgtcttggcgctttggatgtcatcgaccatatctttaaaatgcttgaccaattccttcagcttggcatccttttcatggcgggtatcctcaaattcgtgtgaagggattttcaagtccgggagattgctgtggtaagccttcaaacttgcatcaatttctgctaatttcgtcttgacatcgctttctttatcagataaatagtcgtataaatttttatactcatcgcgttttcgttcattttccgtgtaggatatgtgcaaaaagttgcctactgaatcccaaaaaccttcgcccaaagcagcttcccctttcgtttatcctagtcaataaaaactattttcctctagtggatgatattgtaataggtttatcttacaggatggtcccagacgaatgaataggttaaaagaattgttttccgcggcacaaaaataaaattaccagtcgataaggatcttttataagcaaaaagatccagtctgattttccttgttttccggccgatcatttcctgagaaatattttcttttgaagaacattccattataatgaacttggttggattttacatcgcgaaaggagaagcgccatgcgtgaacataaaggatgtatcaagtgcggaagcacagatgcggggcaaaaagaaatcgcgacgaccggcaccggcctgtcaaaattgttcgatgtgcagcataaccgttttctcgtcgtttattgcaaaaactgcgggtattcagagctgtacaataaacaatcttcaaccgccggaaacattctcgacctgttctttggaggatgacggctcgaaaggagaaacggttatgggggaaaaatacggttcattgattgccatatttattttggcattatgtgtgcactccaacattgtcgtagaacatgcgctcttacagacaatcataaaggcagtttcactttttgtgatgatcgcttcggcgcttgcagcatttgtcaaaggcatcagacaaccgtcataatggcggggagggggctttagtcattcccccgctccccgtgatttgactaaatcgaggatccattcttttatatcgacaagacgattgtatgccggcattgtatcggttccggtgatgatcatggagacgagggtgtcctgcttatgcagtgcaccgtggctggctcctccgacgtgcgtcggcgacccttcgccgataaattcgtatccgggctttgcattggcgatcaaataatcgccttcatgagaaaaaaatgaagcgtacagtctggccagcgcatcaggaaattttccgtatgtcaggctgttctgctcaaccgtcaaatcgagaatatgtaaatccccttccagcgtccacgtttgtccaaattcgtccgtgcatttgcctcccggccgaaatgtgagcttcccgtgctgctcccccgaaacggcctcaattgaatccgcttcatttttccagcagatgatgtcgatccgttcgtccttttgcagaatgtccgctatcctcttgagcggaagcttcgctttatcgagcgaatagatgaacgccattctttcgttaactgcaagaacgatgtcgtcatcggccgtcacacctttctttaatttcacaatgcgaaaggcgtccaaaaggcttctcaaatcaatcaatgcttcttttttattgccgctgatccaggcctgtccgttgtcccccatcacgatccaaatgtgatcctttaaagcggcttcccatgacgaaaaactgtctaaaatcctttgaacatgccggtcggctttcgccacccccgctgcgtcgttcctcccgtgtttatgcacgtgctggtcgagatcgggaaaatagacgagcgcaagaggcggtactttgtttgtttgaatcagatagaccaattcattggttgaaaatcggtcgttaaaaccgaattttttgaaaagcgagcggttggccggattcactttggaaaaaccgccgtacgaaaacagctgggatgcgttgattttgactgaccggtttaatccggaaatcattgaaaaaagaaagggaatctgcaaatagccgtcccggctccccctgtgcaagagcgcattgatcgagcacgtttcgattcctttttcgtcaagctcttcgtgaagcgtcttcacctgttggcttaaatgaacctgattcagattgtaaaagacgtctctggaggattgtttgatgcctaatttcagaagctctcgaatgtggctgccataattgataatccgtttttccttcgcgttgtaccacacaaggccaggcactttgtgctggtcgctgtacacccctgtaagcaatgtgctgtcgacattgacagacatcgtcggaaaagggctgatcatatcaggcacataacgcccgttttccagtaaatattgcagtccaggagcctgtccgtttttcacggcttctttgagcggttcatccattaatgaatcgatcagcaacatgacgactgatttcttgctgctctcagacatcgttcttcctcctcccttatacgtgagcattccctaaaccgctccggttatgaatgatcccgtctaaaatatcgctgaaatcacggtccgatttttcgcgcaaatattgatcgacgctcatttgatagcgcctgatgtcttcatccgaacggaaaaaggaaagcagctgctgttcaatcggctgctgtttttgctgattcagttcgatgacaaggtttttctttttcagaatatcgagattcatctcttcctgtccgggcagcgcatgatagatgaaaacagggagctgtttttcaatgcactcgctgatcgtgacgccgccgggcttcgtaataatgcccgacgcctccgcgtataagcggttcatttcagtcttgctttcgatataaggcagcgctttaatatatggattgtttaaatcacgaacataccggtagagctttcggttttttccgcatagtatttggtatgagacattcccgttcggcgacagttcccgcacgagtttaaaaatgccgcccacccccatgcttccgccggttatgaggatgttgcaaaacgcttttttgtccccgtcctgctcaggctttctctccgttttataggaacggtgcacaggtattccggtcagaaaaattttctcttcatcaacgccttctgcgatcagctggtctttgatgtctttgatcggcgcgaaatgataatcaatcttctctcttccccagattcggttgacgaaaaaatcggtatatacattgaccactttcatgtcgggaaattggccttttaagcggttcagcaaataggagggcaatgcatgcgtacagaacacgatatcaggctttttttctgcaataatctgctgcatgcctttcaaaaagatcagctcatacaagaggtggcgctttgccgtttcatggcgcccgcacgccaggagatgatagaccgagctgtagactttcggaaaatactgaatccatgacaaatatgccgcagaggaggccttttccagccgccgataagcatgtgaaaaaatgtcgattttttcacagtgatgggatttgaggagcagttctgtctgcagcgaatcggcaacgtgatgatgaccggtggaaatgcttaaaaaagggaaaatcagaatctttgtcatctccatcctccatttcagaagaaaaatgttttccatttatatttttcaaatatccagccaaaatataagtgtattttttcaggaaaggaaagtgacgacttgagaaactgttttttgtcaatttggagtgtaattgacccgttttattattttttttcaagactgacactcattgaccaaacgaaaacgagcatttttcgcgtccgtctaacaaagtacaaagggatcgatgtggtgttaagcgatgggacggttattaagaaaaacgatgttctgatcaaaattcatctgcacaatattaagctgatcaaggagcttcaaaatattgagagcgctgtcagaagaggcattctcatttatcaaaaagcgtatttttcaatgccgatcttgggcgaatatatcaaaaatcatcaccggtcagaccaaattaaaggcatcatcggcatcactacgctgcataaaggagttgagaggctcggttttgaagcggttgagcctgcgaaccagttttacagagtgttcaagaagctgacgcagataccgatcttatatttaacaacaaagcaattttctcttcgcaaaatccccccttcccaatatttgtttatttcgaaagaaaaattgttcaagtcctatctgcagaaataaataaaaaagagactgatgcaaaaaaatgcaacagcctcttctttttatgaaatgtgatggaacgtcatttccggacggcttccgattcggatgttcgccccagtctgacccaatccctcgctgatataaaacggtttgtcatgatggtagtgaagaccttttatcatattcattcgcacaagctttcccatcttcacgagatgataaggcttcggccaatgaatctgaccgccgtgaaaatgtcctgaaagaagatagtcaaagtgaaattcctgcatatcaagcacaacgttcggatcatgcgtcaatacaaggttgtagccctctttaagccctttatatgaaccggcaatatcgcttcgcttcgtgctgtaatcatcaatcccgataatgttgagtgtctcgccttccacttcaatggagacatgctggttctgtagggtgatgcatccgttatcttccagtacacgtttcagcttccgaaagtgttcgtctttcaataggtagtcatggttgccgaatacagcgtacatcccgtatgccggcttcagttttttcaaagcttttaagtagtttgcaagctttggaatatttctcttcctatcaagaaaatctcctgttaaagcaatgagatccactcgttttttattggcaagttcaagaatccgttcaggtgaaatcgaaatgttttctaaatgaagatcggacagatgaagaatgttcagctttttctttaaagcgggagcctgcacgcgctcgaccgaaatcgtgttgactttcacatcttttgtattgtggttcgctttatataaaaaaggcatgaggcctaagataatcaataaacatgcgataataaacatttcaatatctcctccctcttactagtatagtaagttggcaggcggttttacagtgggaaataatagaatatcattctttttacccataacaaaaccgatttccagccggaaatcggttcgcattttcactcttacagaaacaaaatgaacagaagcagccctaaaacgattcgatagatggcaaacggaaccagcttgatcttgttgatcagccggaggaaaaaacggacgacaaaaagagcgacaataaaagcgctgataaaccctgcgataaagaaaggcaacaggtctgcactcaaatatgcccagtttttgattaaagagagcaggcttgcacccatcatgatcggaatcgccatgatgaaggtgaaatcagcggccgctctgtggctcaagccgagaataaccccgcctgaaatcgtcgaacccgagcgcgagaagcccggccaaagcgccagacattgaaacagccccatgccaagcgcctgcttatacgtcatcctatcaaccgaatctgtcgtatccttgcgccgattgatccagtcggctgcgagcatcagcaccgcaccggcgatgagaccgaccgcaacggtgcggacggaaaacaagtattgatcaatatagtcttcaaataaaaatccaagcacagcggcgggaacaaggcctacagcgatttgggcgatggaaaggcggtttcccgatttctgctcttccgtaatgtttttcttcatgcctaaaagattgagaatccggtctttaaatacgatggcgacggcaaggatggagccgagctgaatcacgactttaaaggtattcgccgcctccggcgtaagcagttctttcgatttcagccagacatcgtcaacaataatcatatgccctgttgacgatacaggggcatattcggttaatccttcaacaattccaagtatgatagcgacaataatatcccaaatgttcatatgtcattcctttcgcttccttaaaacttgtcctctaataaactatttatattaaaagccgattatgcaagcgggattcagacttcttcgtttttttcgtaaaggtgtgaacgctgtttaaaccattcaaataaatgcgtgacaaccactttgatgaccgcgtatccggggatggcgagaatgacgccgatcacgccgaacagcttggctgccgtcagcagcacaaagatgattgttaccggatggatgtgcaggttttttcccataatctgcggcgaaataaattttccttcaaacagctgcaccacagtccaaacgatgatcagcttcacaagcataaacggagaagtgaccaaagcgatgatgattgccggcgtaatcgcaatcgtcggtccgagatacggaacgatgctcgtacacgccgccacaagggccaaaagagaagcataatcaagaccgatgatcatatatccgataaacaacaggcagccgatacagaagctgacgatgatctgccccctgatatacgaactcagccggtgattcatctcggacatcatcacatccgtctgctcccgcaggcggaccggtatgagttttagaataaacagcggcagttttttgccgtctttcaacaagtaaaacaggataaacggcacggtcacaatcgaaatcacgacctctgtcacggcgcctatgaacgttcccacaccggtaaacgtactatttaaaatggtggtagcctgatcggataatttgcttgccaaatcggtcagattgatgttcatcgtctgctggacctgattaaagaactggcttccgatcagctgtttaatttggtcttccacaatgtggacataccttgggaagttatcgacaaggcttgtgatctgttcccttaacagcgggataacagagacgatcgaaatcgtgatcagaccgatgatcacaatgtagagaagaagaatcgaataaattcttttcacgtttttccgctctagaaaatcaacgatcggatttaacaaataataaacgacacctgtcagcacgacaggcagagcgatggtttccacaagaacgatgaaaggcgtgaaaataaacgatgcttttgtaaatacaaggatgttcagtccgatcaaaagcagaataagcagaaacaggacgaatttattgtctaaaaaaaactttttaaacctgccgccccacatatgcaaagagtccatggcgatcctccattaacgttggttttataaattaaattgtacactattactcctcatactaaaaataaaaccattgctattggtctttttttccgcttgaaaacgtttattgattatatagatatacgccggcgtttccgtctttttgtctttcgccggcaaaagaaaacactgtataataaacatatcctacagcgaaaggggaaaatagcatgatacggttcggggtagtcggaacaaattggattaccgaccggtttcttggggcggcccgtttgatcgaagattttcaattaaccgcggtatattcaaggaccggagagcgcggacgtgaattcgcgcagaaatacggagccgaggcggtttttaccgatatcggagaaatggctgagagcgatgttattgatgcggtatatatcgcaagtcccaactctttacataaagatcaggcagttacattcatgaaatgcggaaaacacgtcctgtgcgaaaaaccgcttgcgtcccatgtcaaagaagcggaagaaatggtaaaaacagcgcaggaacaccgcgtaacatttatggaagcgatgaaaacgacgtttcttccgaattttaaaaacatcagtcgcaacctgcacaaaatcggcaaagtccgccgttttacagccagctactgccaatactcttcccgctatgacgcctatcgaaacggaaccgtcttaaacgcatttaatccggctttatcgaacggttccttgatggatatcggcgtctattgcgttcatcccgcgatcgtcctgttcggcaaacccctcgaagtcaaagcgaacgggctgatccttgagtcaggggcggacggtgaaggaacagtgctgttaaaatacaaggagcacgaagccgtactgatgcactcgaaaatctcaaattccttcatcccggctgaaattcaaggagaagaaggctctatcgtcatcgataaaatccaccgccccgaacaagtcgacatccgctatcgggacggtcgggttgaacatcttacgctgcctgatgacaaaccggccatgttttatgaaacagaggaattcatcaatttaattaaacaagggcggatcgagtcttcgcttaacacgtttgaacgttctatagacacattggcggtcatggatgaagcgcgcaaacagatcggtctcgttttccccgctgatcacatgtagcaaatgagccgccccggctcgaatgaacgggcggctcatctgttttaggactgcgccaaaagatcggcaaaggctttgacatagatcggcaggtccggcgggcggcggcttgacacgatatggccgtcgacgaccgctgcttcattcacccatatggctccggcattttccatatcgtctttaatccccggtgtgcttgtaaccttcctgccttccaatattcctgcagaaatcagcacccagccggcatggcagatttgtccgatgggcttcttcctttcgttgaaccaccgaatcatctccaggacctcgggatatcttctgagcttgtcaggcgaccagcctcccggaaccagaacggcgtcgtattcctcaatgttcacgcttttcagctcataatctgagacagcgggcacgccgtatttgcccttgtattcatgatccgctttttcaccaatgaaatgtacgatcgctccttcttccttcaaccttaaaactggataccacagttctaaatcttcgaattcatcgctgacaagcgcgatcactttcttgccttccagtcgcatgattgatcccctcctgtacaaccagtgtacgatagatgacagtctgtttaaacctatttatacccttccccgttcctttaaaaagatgcttttcccgggcaaaaggctgccggatcggcggaagcctgatgtttagtcaatcttaaattttttcgttaaatcgcgcagttcttcagccatttgttcaagcgtagccgcagaagaactgatttcttccattgaagcgagctgttcttcagccgaagcggcgatgtcttgaatgcttcccgagctttcacgcgatacgtctgcaatttcttcaaccgctcccgcaacttgctgcgacccttctgacagctcttcaaccgccgcattcatcgtctgcagcttgcccgcgatttcgtttgtcatgtcataaatctgtttaaagcttgtgtctgtttcatctgtgatggtgagtcccgactgtacttcacggttgacgtcctggaacatgtccagcgattttccgatttcattgacgatttcctgaatgagcgcttcgatttcttttgccgaggacgctgattgctcagccagtttgcgcacttcttcggcaactacagaaaaccctcttccggcttcaccggctcttgcggcttcaattgctgcgtttaatgcgagcaaattcgtctggtctgcgatgccgttgatcacccgcagaatcgccgtaatgtcttttgatttgctttcaagtcctttcacgacggattccgcttgtttaacggaatgatcaatggaattcatctgtccgaccgttttttgaacaagctccccgcctgtaccggcaatgtccgtcgattgaatggatgattctgtaatggatgctgagactttggacatttcatgcaagcggctgttcatgtcggccagctgctgcgcactgatttccactttttcattttggctttcatttccgtttgaaaattgttcgatcgcagatgtaatatgttctgtcgccttgcttgtctgatccgcgctcgcagtcagctgctctgaagaagaagcgacgttttcaaccgatgtctgaataacgctgattaaagagctcagcgattcagccatatcgttgaagcttgtgccgagctgtccgatttcatcttttgaacggacagtgattttttgcgtcaggtcgcctccgctgatgcttttcgcagaggaaacgagttcgcggagcggccctgtgatcgatcttataatgagaatcatgagaagcacgccgatgatgatgctggcgcccaacgtaatcagagcggcattcagcacaggctgtgacgcttcttttaattcagtgatgtacatggttccgccgattttccagccggtcagcttattggtcgcgaaagccatctgtttttcgccgtcaagcgtgtatttgaatgttcctttgtcattggcgtataccttttccacccagccgccttcgacatctgagcccgcatcatgtttcgggtgagcgacaaactttttatcagcgctcgtgataaaggcaaagccttttttcccgatggttacgcgttctgtcgctttaatgagctcttcgattttcatattgacggcgacaacgccggagccgtcctcatgcatcttggcgatggtgataaccaccgttccggttgacgccgttttgtaggggtctgtgataacgacttcgcccttgtgttcagcggcttttttataccagtcccgctctaccggattatatccgctcggcatcttttgatccgggtagcggatgaacttcccgtcctttgatccggtaaagattccttcaacgtcgggatggagcttggcgaactgttcgaatttcactttcaaagagtcgctttccttccctttaaaagagttttcgttaatgaacccgctgaaataggacatggcgtttgttttctggctgatattctgattgatgatttcattcagctgattaacgttttcacgcgcattgtccataatttccccgtcaagcgtactgcttgcagtttgatacgcactataggagaggacgatgattggaacagttaagataagcaagaatgaaagaattaatttctttgcaatggagggacgtttcatccaatttacaatgtttgacatataattgttgactcctcttttctgttatattcctaatatcggattctcttaaaagtttttatatggattttataactttttatagtctaaaataactaaaaaacatccggcggataaccggatgttttaaagctattcaatcttaaatttgcgtgtcaaatcacgcagttcttcagccagctccgccagtgtcgtggaggatgcgctgatctcttccattgaagcaagctgttcctcagctgaagcagcgatgtcctgaatgcttgccgaactttctctcgatacatcagcgatttcttcgaccgcgcccacaacttggcgggagccttgcgtcaattgttcgacagcggcattcatggtctgcagcttgccagcgatatcattggtcatatcgtaaatcgttttgaagcttgtctctgtttcatcggtgattcgaagtcctgactgtacttcatgattgaccgatttgaacatgttcaaagagttgtcgatctccttgacgatttcctgaattaaatgttcaatttccttcgccgagtcggcggattgtgcggcgagcttcctgacttcttcagccactaccgagaagccgcggcccgattccccggcccttgccgcttcgatcgcggcattgagcgccagcagattcgtttgatcggcgattccgttaatcacgcgcaaaatgcttgtgatatctttggatttggcttcaagtcctttgacgaccgcttccgcttgcttgacagaccgatcgatcgagttcatttggccgaccgtcttttgaacaagctcttctcctttgccggcaatctcagtcgatttcagcgacgcatcggtaatcgcagctgatgtttttgacatgtcatataacccgttgttcatttcattcagctgatgcgagctcgcttccactttttctttctggctttcatttccgtcggaaaattgttcaatggccattgtaatatgctcagtcgctttgcttgtctgcgccgcgctggcatgaagctcttcagatgaagaagctacattgtcaactgatgattggatgacgctgattaaagatctcagcgattcggccatttcattaaagcttgtaccgagctgaccgaattcgtcttttgaacggacttcgattttttgcgtcaaatcgcctccgctgatgctctttgcggatgacacgagctcgcttaacggcttgctgattccgcggataataaagtagatgagaatgccgccgagcacgatcgccgctgccaaaatgattatcgccatgtggaagacgggctgggcggcctctgatatctcatctgtgaacatcgttccgccgattttccagccggtcagcttgttcgtcgtaaaagccattttcttttcatttccttcaaatgtatattgaaaatcgcctttctcactgccgtacatttgtccaacccagtcgcctttgccttcggttccggcttcgattgtcggatgggcaacatattttttgtcattgcttgaaataaacgcaaagccgctttttccgatgttgacgcgctctgtcgctttgatgagctcatcgattttcatgttgacggcaacaactcctgagccgtcctccgtctgcttcgcaatcgtaatgaccatcgttccggttgacgctgttttataagggtttgtgatgatcacctttcctttattttcaacggcttgcttataccagtccctgtccgccgggttatagcctttcgccattttctcggcgggatatcggatgaacttgccgtcttttgaacctgtgtagatcgcttccacatcctgattcagcttggcgtactgctcgagtctttctacgagtgatgcgttctctttttcttgataaagcttttcatttaccaagccgctgaaaaaggagacggcctcctctttctctccgatattctggtctatgatctcattcagctgttcgacattatcgcgtgcgcttctcatgatttccgtttcaagagagcttcccgccgtttggtacgcactataggataaggccaaaatcggcaaagttaaaaccaatataaagctgaaaaacagcctttttgagatagacggacgtttaagccagtccaatatctttttcatttagtataactcctttagcttctagattatgaaactaatatcggagctttcatttacttttgcatattaaaaaactttaaaaagtatttctgaaaattcttgaagatagaactgaaaaaagaggctgaccagcagcctcttttcatcaaatcttaaactttttcgttaaatcgcgcagctcttcagccatctgttcgagcgttgcagcggatgagctgatttcttccatggaagccagctgttcttccgctgaagcggcgatgtcctgaatgccggcagagctttcacgcgatacgtcggcgatctcttcgaccgcatcggatatttcgtgagaacctgttgataaatgctctacggcggcattcatcgtttgcagcttgcctgcgatttcgtttgtcatgtcgtaaatgtgtttaaaactagattccgtttcttcggtaatttcgagtcctgactgtacttcctggttgaccgatttgaacatgttgagcgaatgttcgatttccttaacgatatcctgaatcagcgcttcgatttcttttgccgatcccgctgattgagccgcaagctttctgacttcttcagcgacaaccgagaagcctctgcctgattcgccggcccgcgctgcctcgatggcggcgttcagagctaataaattcgtttgatcggcgattccgtttatgacgcgcaggatcgcggtgatatctttcgatttcgcttcaagccctttgacaacctgttcagcctgtttgacagacctgttgatcgagttcatctgcccgacggtttgttggacgagctctccgcctgtttcggcaatttccgtcgatttacccgaggattctgtaatcgattctgacacgcctgcaatttcattcagcttctcattcatttggctgagccgctgtgagctttcttcgactttttcgctttgactttcagcgccgcttgagaaccgctcgatggctaatgtaatgtgctcggtcgctttgcttgtctggtccgcgcttgccgtcagctgctctgaagaagatgccacattgtcgaccgattcttgaatcgtgctgatcagcgagcgcaacgagtcagccatttcgttgaagcttgtgcccagctggccgaattcgtctttggagcggacatcgattttttgtgtcagatctccttcgctgatgctttttgcagaagagacgagttgatttaaaggcttgctgatcgcgcggacgataaagtaaacaaggatgccgccgagaataatcgcgcctgccaatgtcatgactgccatgtgaagcacgggctgggcagcgtctttaatctccgctgtattcatctttccgccgattttccaaccggttagtttgtttgtcgtgaagaccgttttcttttctttgcctttttcattaaaggtgaacaagccgctctctttgctgaacatttgctctgtcagatcagcttctgcttctgtgccggctttaattttcggatgggcgacatacgttttcccctcgccgatgatgaatgcatatccggtttttccgatgctgatgctgtttgccgatttgatcagcttgtcaatgttcaagtcaagggcgacgaccccagaaccgtctttattctgcttggctatcgtgacgaccatatggcctgttgatgcggacttataaggttcagttacgatcgttttccctttttcctggacagcctgtttgtaccagtcgcgttctaccgggtcatacccgtcgggcagtggagcattcggatattgtgcgtaaacactatcttccgatccggtgaagacgagttcgacgtcgggattctgttttgcaaactgctcaaaccgttgtttaattgcagtctggcctttctctttgtacgctttttgatcaatccattcgctgaaatacgcaatggaagtctccttgctgccgatatcttgctgaataatgtcgttcagttcatcgatattgtctttcgcacttctcaaaatctcatcctcgagcgtgctgctggccgtaaaatatgaagtaaccgaaagaaccaaaatcggaattgttaaaatgaatataaaagagaaaattaattttttagaaatagaaggacgtttcatccaatttaaaagctttttcatgtgtgattcccctttctctacttttatcggagacggggtctattttttaaataaaaaaagcggaaaattagaccgttttcctgcccaagcatcaggcatacgctaataaaaaaggaaaagggtgtatcctatgataagtgtttcgggctactggctccgtcctgaggatatcgaaaaactgaatgtcagtcagacgcagagagacatcgccaaccggatgctggccatgccgtccggatatagatacggttcaatctcagaactgttatttgagctgagattcagagagcataccgtcaaatcggccagagagctgatcaacagcggagcgaagtttgccaccttttcaaagacatacgggaatgaacagttttggagggtgacgcctgagggggctttggagttgaagtacagggcatcggcttcaaaggcgattcgaaatatttttgaaagcggcccttcttatgcttttgagtgcgcgactgcgattgtcatcattttttatatggcgcttctcaaaacgatcggcgaccagacatttgaccggaattatcaaaggatcattttatacgattggcactatgagcggctgccgatctatacggataaaggaaacgactaccttccgggagactgcctgtatttcaagaaccctgaattcgatccctcaagaccgcagtggcgcggagaaaatgctattttacttgaaaataatctctatgcggcacacggcctggggatcttaagcggcgaaacaatcattgaaaaactgaacgggctgagaaagcctcatgcacagacgtccgcctatctgctttcccaagtgacgcgggttgatattccggcattaattcaaatgatcagatagcacatcggccggcacaagctgatccatcagctccttcaccgtcgtttgctcgacggtggcccgcacgctctgtccggcccacaatgacatgttatccgtattcccgtcaagcttcgcctgttttctcatcggttgcgtcagcgtgttttgcagaggataaggcagcgcttcagcttcttcctggcgtctgtcttccatccactgattgacgatgcctcttgccggcttccccgagaacaaacgggtcaggcttgtgtcggtttcaaccgcttcgaacaatttttgtttgtaggcagggtgtgttccgctttcttcgcacgtcaaaaaagcggtaccgatttgaacgccctgtgcgccgagggcaaaagctgcagcaacacctcttttgtcaaaaatgccgcccgctgcgataaccggaaccgacacatgatctgccgcttggggaattaaggacatcgagccgacagcaggctctcccttcgttttcaagaaggctcccctgtggccgcccgcttcactaccttgaacaacgatgacatccatccccagttcttcaagcagcacggcttcttcaactgaaaccgcggtgcctattaaacagcagtttcggtctttcagttccttgacggcatcggccggcggagggccaaacgtaaatgaaacggcgctgattccttcctttagaatgatttctattttctcgtaaaaatcgccccaatcttgtctctcatctgtcacgggtgaagccgaatgcgccaaaggtatcttctcctgccacccttcatattcttcccggctgacggtttcccgtttttccggaatgaagaggttgacttgaaacccggctgatgtcagcttttttgtttccagaatctgttgtcgaagaacttccggcgtcaaatagccggaggcaaggccgcctaagccgccgcagtcagatacggctgcggcgagccttggcgttgtcggtccgcccgccatcggcgcctggatcacaggctttgacaaagagaggcgttccatgaactgattcacttttatttcctccttttaatcggataaaattttaaaatagcacgtccggtgcctcgggccgtcgaactcgcagaaatatatgccttgccaagtcccgaggacaagcctgcccccttcaatcaatatatgctgcgatgcgcccaccgtgctcgctttcaaatgcgccgctgtattcccttccatatggcggtcaagctcatcttcccacggatacacttcatcgaaccttctcagcatatcgcgtttgacatcggggtcggcattttcattgatcgtaatgcccgccgtcgtatgcggacagtagacgataacagcgccgctggaaacatcgttttctgagatgaatctttggacgtcatttgtgatatcaagcatttcatcgcgccggtttgtttgaatctgtatttttttcaacatacgaatccgctcctttcttggcaccctttctcaattcgttacaaatcgccgatttcctgtctgatcaaataaacgcgcgcctcatagggtctcatcatgaaagatgtgaggtgcttgtgcgcgttgatatccaagtttgacagcagcagtccgttcgaacataacggatatgcgggatgatggtaaaacgcctggcgtgcgctgaggttcacgatcacgatggcggtttcttcttcaagctttcgcaagtatgcaaaaatctgccgatcctcagccagaagcagtttatatgatccgtcgatgaagacgtcataccgttttctgattgcgactaaccgtttataaaaatgatagaccgaccgggggtcatgctgctgatgaacgacattgatcagcttgtaattttcgttcatgcgcagccacggttcccctttggtaaagccggcatttggccgatcagtccattgcataggcgtgcgcgcgtgatccctgctctttttccataccgccttcatgatgtcttcgtgtgagcggcccttttctttttgaatccggtaataatttttaatcgagacgtcatcataatcgtctatatctaagaaaatcgcgtttgtcattccgatttcctgcccttgataaataaacggggtgcctttcatcaaaaaatacattgcagctaaggccttcgcgctgactgttctgtatttcccgtcatctccccaaactgaaacggcccggggctgatcatgattttcgataaaaagcgcgttccagccttttccttcaagagcagattgccagtttgacaaaatccgcttgagttcggggatatcgggttctccgccttcaatatcccaaagcccgaggtgttcaaattgaaaaatcatgctgaatataccgtttggttctccaacccagtcctccgcttcttcagcgctgacaccgtttgcttcgccgactgtcatgatatgtggatacccggcgaacgtattctcttttacatcctgcaataacgccataatcccttcgacattcatatgataagcaaatgaaggcacgaaagggcgcccttccggattcggcagatccggcagcccttcttttttcttaatgtgcgaaatcgcgtcaaccctgaatccgtcgattcctttttgaagccaccagttgatcatgtcataaagagcgcttcgcatatcactgttttcccaattcagatcaggctgcttttcgtgaaaaaggtgcagataatattgctctgttttttcgtcataagtccaggctgagccgccgaatatgctttcccagttgttcggttcgcttccgtcctttccgtcatgccaaatataccagtcccgtttcccggaattccgctctgctcttgattcgataaaccaaggatgttcatcgctcgtatgattgatgacaagatcgatgatcagtttcattccgagctgatgcgcttcagttaatagttcgtcaaagtcgtccatcgtgccaaattccggcatgatgctttgataatccctgatgtcgtagccgttatctgcattgggagaatcaaagaccggacaaatccaaatggcatctgccccgagctccctgatatacggaagcttctctctgatcccgttgatatctccgacgccatccccgttcgaatccataaaactgcgcggatacacttgataaacgactgcctctttccaccatgcccttgccattcaaacaccccttgttgtgaagacattatgatatatgaataaaatatttttagactccgaacataaacatcctataaactttgatataccaacgattatacgtttctcaatactaaatatgctttgcggactataaatcctttgaagacagcaagggtgacggcaagagtaggtgaaagaagctttaatccttttgaaacggagcatctgttaatacagaatatgtaaagcataaattacagttgcttttttacctatcggtaagtaaaataaatatatagattatgctaaggatgatttcaatgaaaaagaaaatgaacacccaagatgcgattgttgaagcagcatttactcttattgcccgacacggcctaaaaggcacgagcctttcaatgattgcatcggaagtcggcatttctaaaccggctatttactattatttcccttctaaagaagagcttatcgattatctatttcacatcgtatttgatgatcacaatttctctgaatatttttcaatcaatgagtacacgaaggagaactttaaaaaacgattaataacagacggcgtacgctattttgaagagtataaacataactctcctgctttaaaagtggtacacgagtttgttttaagtgcagcacaaaaaccaagatatgagaaaaagcttaaatctatcatggaacaattcttagaaggttttgaagcattgctttcctacggtgtcgaactcggtgtcatctcttctaaaaacaccaaagtgaatgcacactcccttgccctgatcattgataatttgggtaactttatgattttaggaattgagatggattataaaaaagtatgggaaacagcagtcagtaatgtaatgaaaggcagtgaaagattttgaatcaggaaacgattattggattgtctaaaatagagaaaaccttatattggatcattccaccggttttaggagctgttcttggatggtttttgcctgttatagccgattgggtattgaccattccaatcgttccttttaaagggcctttggaatttatcacatcactaaacagtttctgggtttcaattatcgctgcatttatcggaatcgttgccggcctatttttttcacaatatattttcactgaaattcttcaagtgttcatttctgatcaaaacgtgaagctgttgtttaaagagaaagaagaagtgattgagaaaaaagacatttctgcaatttatcttgagaagaaggatcttgttgttcttggtcataagggcactgaattgtaccgtgaacaacttgaatcaaagagagcgctagcagaaagtgcttttaaacatcacggctataaatgggcagacgaagatccctttaagaatgagtatcaacgctgggttgcggatcaccccgattttccctcgcatatcaatacgctacttttagccagagaacgagctttactggataataaacatgaagaggcaaaaattctgcgcaaagacctggcaaagcttggagtggttattcaggatgaagataaacggcaatacgtaaggatggtatcgtaatatttcagttgcgaacgcctaaaaaagaacatttggaataaattaaacaccgctctttttgcgaaagagcggtgtaaatccatcagcggaccgttacgtcccaattggaaatattaatttgtcctgtgcctccgaaaacttcagtaccgaattccacactgctgacatactttgttttggaaagccactgtttggagtcggcaagataattcgtgaaatcccgaatattcaggttcgcactttgggtgtttgctgttctgataaatgaaaacacgttccaccctttgccgcctccagcatcaatatagcctttatatactttccaactgtgcccgccaatcgatacagtttcgacataggaaccggcaggtccggcgtttgtgttattgagccagatcataatctcatcggttggagccgaatcccagctcgccttgtttgtattgtggagccaaatgtcatatgcggcattgtatgtgccgtttgcgctgatcgaatagctgactttcgtgttgatgtttttttgatctgacaatcgcgtcgggaagccgcttccggcagtatagccttcagtccaatgccagccgctgacgatcgacggataagcttttaccgtgcttgtattgctcggccaattccacacccagcccatatctgaatcactattatgataaatggtctgccaccagccgctgacctggtcggctccccatacattgttgaatatgtagtattttttgtttttaaaatacaatttatccgacgggtttgatgacgaagcggcaaatgctgagagcggccctgccagcactatgatgcatacggcaccccatagcagaatggattttagcaaatggttgtttttcacgtattaaaaacctcctcatatttatacatcatattataaaaaagaacgacaaggtgcacattcgtaaaaagtcatgattttccatatatatatcctcttatctttgaataaatatccattttattgaaataaggaacggccatcgaactaaaaaacagccgcggccaaccgcagctgtttttaaaaatccgtttttttcacttcgatgaaacggatatgatgatcttcagcatcaagaattttaaattcgcacccctcagttttaaggatgtccccgtttttcagctccatcttttgcgtcaaaagccagccggcgatcgtatcgacttcttcgttttctatcgcgatatgaaggaggtcattcacttcgtcgattaaagcttttccgtccataatataatgatgttcgcctttttttataatgtgcggcatttcgtcctgatcaaactcatccctgatttctccgacgatttcctctaatatgtcttctaccgtaaccagccctgccgttccgccgtactcatcaacaagaatggccatatggatccgttccttctgcatgcgaatcaagagctcctggatcggtatgttctcaatcaccctgatgacaggcctcattaagtcagttaaaggaatcgtctcgtcgagaaaatacgatttaaacaagtccttgctgttgacaattccgataatatggtctttatcgtccttaataaccggatatctcgtgtagcgttcattaatgacggtttcaatcgcttcttttatggattgatcggccaaaagcgtcgccatctccgttctcggcaccatgatttcccgggccagcctgttgtcaaattcaaaaattttgttgacgtatttatactcagactgattgatttccccttttttatagctttcagacagcataagccgcagctcttcctcactgatcgccacttcatgctctttaacagaatggaacccgaacagcttcgttaacagccgggccgagccattcaacagtttgataaacggaaacatgattttataaaacaaaatgagcggcttcgccgtccataagctgacggcttccgctttttgaatcgcaattgtttttggcgcaagctcgccgaccacaacgtgcaaaaatgtaatgatgataaatgcggcaacaaccgaagccactcttaaaacggactcaggcaggccaaataactcaaaaagcgggtgaatgatctgttcgaatgtcgattctccgagccagccgagccctaatgcggtgatggtaatgccgagctggcaggcagacaaatattcatcaagatttgtcaccactcttttggccgcaatcgcccgcttatccccgctttcaacgagctgatcgatttttgtgccgcggattttgacgatcgcaaattcggcgacaacgaaaaaagccgtagctgcaattaaaagtatgacgagtatgagattcaggatattcaaaaaaagcccttaccaaatatggtaaggggccacctccttaaaacgaatggttagtcattacgaccggacaggaaaattgcgacgaagcgcagcagctcaaacagcgaaacaagcgctgctgcgacgtatgtcagagccgcggcatccagcaccttgctgacgcctctttcctccgtattgcggatcattccttctgaaacgatgatcctttttgcccgggagcttgcgttaaattcaacaggcaatgtcacaagctggaagaatacggccgcagaaaacaatatgatgccgagtccgatcagattcaggcttccgagcagcattccgccgataaacaaaaacggcgccactcccgaagaaaagttcacgaccggaaacatcttatgcctcaaaacaagtgcgccgtatgactcctggtgctgcagggcatgtccgcattcatgggaagcaacggaaaccgctgcgattgaacggccgtagtatacgggttcggacaggcgcacaacgcgtgctgtcgggtcataatggtctgtcaaggttcctcttaccggttcaaccgggacatcgtaaaggccgtttcggtcgagaatctgtctggccacttcggctccagttctcccgcttgacgcctctacttttgaatatttttcaaagttgctctttactttaaattgtgcccaaatcgataaacctaatgcagcaaatgttaacaagtaaaaaatcatgctcatgcaatcatcttccctcttgtgataagttgtttaaaaattgtaattgtaaatatattttagcccgagggatttccttttgtacagaaaagtgcactatttgtttcttcgcggcaaacaaaccccgataaagatcagcaccattcctgaaatcatgaagtataaaggcggcctagtgaacagctccttgaaaaattccctccagaacacctcatcagaggaatgatacacggcgtttaaatcaaaaatgaattgaatggacgacgccgccatcaactggactccgatcagtatgaaaaagagcctcattaaacaggacattccgctcccatccctcattcgtttataaaaagtgtatggaaggacgggaaccgatatgacgccggagcgaaaatcttcagctctaccggttattgtcggttaacgaaggtttattattacctgaaaaatttttgcaaaagagggatatactgattaaaaaggcgaactcgggtggtgacacggtgaaagtaacggatcaggaaaaagaacagttaagcacggcgatcgataaaatgaatgaagggcttgatgcgttcattcttctctataacgaatcggaaaaggacgagcagctgatcgaatttgaagaagaaacggcagagatgatcagacaagcgattgaacagcacgggaaagttagcaccaatcaaaagttaaatgcgatcatcaaagaaattttatcattttccctgcggaaagacggtgaagaagcatgaaatcaaaccgtgtattcatcgcatggctgaggtggcctatatatgtccgcatcgcaatcattatccttttattgatcctccttttcggtcagctgatcaccttcgtcgagccgcagcagttttcaaatgtttttgaaggcatatggtgggccctgatcaccgtgtcctcagtcggatacggcgattttgtccctaaaacagcgctcggcaaaatcgtcggcatgctcctgattttaataggggcagcgtttgtcacggcctattttgcaacgatggcgacggccgctttcagcaagcagcagcgctacgccgaaggcaaggtgaactacagaggcaaggggcatatgatcctgatcggctggaacgagaaatccaacaagctgatgaggacgctccaggccgccgattcaaacaaaacgatcgtcctcattgatgaaacgctaaaggaaggtcccctgatggaaaacattcatttcatcagaggacacgcagcggatgatgccacactgcaaaaagcgaatatcgaagaggctgaaatcgtctttataaccgccgatcagcataaaagcgaaatatctgcagacatgcagtcggtcttaacattgctggccgttaaaggcttgaacccgtcggtgtattgcgttgtagaaatcttgacggaaaagcagaaaaaaaatgccgagcgcgccggagccaaccaaatcatcagtacggcggaccttttaaaaacggcgatgctgcagcattttctcattaaagaccagcttcctgatccgctttttacggaagcggatattcatttcaaagtccatcgggttccgcttccgaagacgatggagggcgcgtcttttcaagaagtgatccgccattttatgaaggaagacattttcatcatcggtgtccaccaaaaagacgggcctgtgctgtctccttctttttcgtacaagctacagccgacggaccagctgctgtccctttaagaaagaagcgcctcttcgagttcttttacatacgattggccaagcttttcatagacgccgggaatatcggcgtctttttctttcggttcggcaaactggtcaaaagatgcgcggaaattcccctgaacgacgtagtcatccagcgcttcctgatagacatggcgaagcaaaaacggcgtgccgagcttgaccgtcgcattttgcgaatcaagctgtccgtcctccgcctcaaacggaatccgcaaaaacaggtatccgtcctcatcatcaatcttatagtcaaaaaagccgcggtcatattcccagccgccgctgatcacatagccgagaggcttcagcgtctgttcgaggtgataaagagaaaacgaccggttttccagttcagaaggtaagcttatcatgaaaaaaactccttttttcgtttttatatgccaggactttagcgcaattgcttatcaggttcgttcagatggccttcggtgatttctttaaacaggttgtcctccggctgctgcaggttgttttgcatgcgcaggaattttttatactctcccatagtgaaaggcttggcatcatccgataactcgtagccgatctggccgtttgattcgagcgttacgtttttcacatccgctaactttgaaatcccctgtgtccggagcctcatttccagctggtcgacggtcaggcggtgcttttttaaattctgctcctggagctccccgttttcgatcaatacaacggctttccccgcaatcaggctttcaaaaaaatcaaatttcattttcaagtactcgatcaacagaaggacgatgataaagatcgatgcagctgccaccgttttaaaaatgctgtcttctataatcggctgaacgatgatcgttccgatggatatcatgacgacggtggtggcaattgtcatctgcgaaattgattttcttcccgaaattctcagcagaacaatgcccgttaagatgagaaacaatgtttccaatacaaatgccatggtgtcactccaaccgttttatttttttagtatggttcagaagcttgcgcggtatgagtatatttgaacaaatagggaaagacaatgttataaggttatttttgggaggaacctctattgaagaaaggaaaaatagtaacggctgtgatagtgtttctcgttatatatgcactgttttcactcgcaggaattttatttcccgtagaccgggaatggtatgagtcattaaacaagccggattggacgccgtcaggccgtttgatcggaaccgtctggagcgtgctgttcgccttcatttcattagcagcggcgctcgtgtatgctgcatatgacatgagaaaagcagctgcgccattttggatcatgctgatcatcaactatgtgtttaaccaggcattcagctattttcaatttacgcaaaaaaacttacttgctgccgcagtcgactcctttttcgtagccattaccgctctttcgctcacctttatcacacggcgaattcacaaaacggcggccattctctttatcccttatgtgctgtggagttttttcgcggcttatctcgcgtttacgatttacgggatgaatcattagcctagagagccccgacggctgtagctgtgttaaaatagggtgaacagcagccttacagggggatcggaatgaaccactttctgcaaactaaacgcatcggcttttctttatggaagaaagagaatttgaatttggcaaagacattgtggggaaatcgagatgtgaccaattatctaacagcagacggaatcatgaccgaaggcgaaataagaaaccgtttgctgctggaaatcgaacaatataaaacacacggggttcaatacttcccgatatttaaaacaagcaacaatgaattcgtcggatgctgcggccttcgcccctatgacccggaaaatgatgtgtacgagcttggttttcatctcgtccgttcagcttggggtaaaggttatgcatctgaagcggctgaagccatgattgagtacgcatttaacaaaatccgggcaaaaaagctgtttgcgggacatcatcctgaaaatacagcttcacgaaaacgattggagaaattaggattcgtctacatacatgacgaattttatccgtccaccggacttcagcatccgtcatacgaattaaaacagcctccgggacaataagtccggaggctgtgttttttcaattattgattcaaacgcttctcaagctctgcttttttctcttcgaagccaggcttgccgaggagagcgaacatattgactttgtatgcttccactccaggctggtcaaacgggttgacgccgagcaagtatccgctcattgcgcaggctttttcaaagaagtacacgagatagccgaacgtgtaagcgttcatttcaggtacgttcacgatcaggttcggcacgttaccgtccgtgtgcgcgagcattgtgccttggaacgcttttttattaacgaagtcgactgttttgccggcaaggtagttcaagccgtcaagatcattgtccgcttcttcgattgtcagctcgtgtcttggcttttcaacgttcagcaccgtttcgaacatatctcttcttccttcttgtacgtattgtccaagagagtgaagatcagtcgagaagttggctgaagaagggtaaatgcctttttcgtcttttccttcactttcaccaaagagctgcttccaccattctgcgaagtactgaaggcccggctcgtagttgatcagcatttcaattgttttgcctttgttataaaggacgtttctgacgaccgcatattgataagccggattgtcttcaagctctgatgtggagaagtctttgctcgcatcgcgggcgcccttcatcatttcatcgatatcggctccgctgactgcgatcggaagcaagccgaccgctgtgagcacagagaagcggcccccgacatcgtcaggaatgatgaatgattcaaaaccttcctcattagcaagcgtttttaatgcgccccgctctttatctgtcgttgcataaatgcggcgtttcgcttcttcttttccatacttttcttcaagaagcttgcggaagatccggaaagcaatcgccggttctgtcgttgtgcctgatttagaaatcacgttgattgaaaaatcagcgtcttcaagaagatccatcacgtctctcatgtaagaagagctgatgttgttgccgatgaaaatcacttgcggcgttttccgcttttctttcggcagcacattgtaaaatgaatgattcagcatttcgatcgctgctcttgcgccgaggtatgaaccgccgattccgacaaccagcaaaacatcggaatcgttttgaattttttcagcgcattttttaatgcgggcgaattcttctttatcatagtcagtcggaagatccacccagcctaaaaagtcgctgcccgcacctgttttttcgtgaatggtatggtgggcgactttaacgaagtcacgcagatatgtaagctcctgttctttaaagaatggcaatgctcttgagtagtcaaaacggacatgcgtcatattattaaacctccagtactagctgttttctttcaaatacccgccagcgctttcatttgcatgagagtgcgggccaaagggttttaaaacatgtcgattttcggcgacagcctcttcccttttcactttatatgaactccttcgttaaatcaagtgacgaaaaaaaggaggatggaggatgcccgccaaaaatgcatgttttttcagcctccacttgcatttttgtcaaaaacataacaataaacaacggctcaaggaatggcggttctccttgagccgtcaagaaatcttataaagaagccttcaaaatagacagaacatcgtctttattcagcgttttaaagcggccgaattcgccgtttgccatcgctttgtcggcaatgagatcaagcttctcatctgtaatgtcataatcggcaagacgatttggcgcgccaaggctggtccagaattcagacagtttctcgattccaacaagcgccacttcgcgatcggtttttcctgtttcatctacgtcaaaaacacggacggcaagctgtttaaagcggccgacgttctcggaaagcgtgtgcttcatccaattcgggaacagaatcgcaagccctcccgcatgcggaatatcgtatacggctgaaacagcgtgctcgatattgtgcgttgcccagtctccgcgtgcgcccattgatagcatgccgttcagcgcaatggtgcctgtatacagaatcgtttcacgcagctcatagttttctaggtcttcaatgagcttaggagctgtttcaattaccgttttaagcagggattcgcacatccggtcctgataaggggtattttcggtatggtgaaaatattgctcaaacacgtgggacatcatgtcgacaatgccgtaaatcgtgtggtctttcgggacggtaaacgtgttgaccggatcaagaattgaaaatttagggaatacgagcgggcttccccagccgtatttttcattggtttcccaatttgtgatcacagatcccgagttcatttcagagcctgttgctgctaacgttaaaactgttccaaacggcagcgcatcagccggaatatgttttttcgtcacaatatcccacgcatcgccgtcgtatttcgctccggcagcaattgctttcgtacaatcaatgacgcttccgccgccgactgccaaaagaaagtcaatatcgttctctttgcagatcgcaactcctttattcacagtggcaacacgcggattcggttcgacgccgggcagttcatggacggtcgcgcccgccttttcaaggattgaaatgacttgatcgtataaaccgtttcgcttaatgctgcctccgccgtatacgagcaggacattgcggccgtattgtttcacctcttctgccagcttttcaacttctccccggccgaatatcagctttgtgggattccaatatataaagttatccatctacatctcctcctttatttactattatgggaaatcgccgaacgctctgtaaagcgatctgctcctcaggcgtataatgtttccaaatcggtcgcaatctataaatgtgaaatatatgatttcaaaataggaggaataacaaatgaatgcacttcaacgtattgcattggttttaacgatcatcggagcaatcaattggggactgataggattttttcaatttgacttggttgcagccatttttggcggccaagggtctgctttagcacggaccgtttacgcgcttgtcggaatcgcaggtctgatcaacctcggacttttatttaaacctgctgaagagaccgccggcgaagacgccaaacagccggaaatgcgttaaaaaaactccggcttttgccggagtttaagattgttgacaaaatcccaaaacggcttttgttttgggattttgtcatcctttcagcgtgattgaaaacccttgcagtctaggaaggccgagcatcggagcggagcgaatgttggaattcgtgagcaccgacgcgcaggcctgacaacgaatgcgagggtttgtcgacacgctgaaactccggcttttgccggagttttttcatttacttcttaataagatcttttctgttggactgctcgatccactcttcaagtttgtctttcaaagtgttgaatccttgtggagcagctgtatcttcggcttgaacagccttttgtcttctaggcttgctttcttttcgttcaggagctgcctgtgtagcgcggatagaaaggctgattttgcctttttcctcatctacggaaagaaccttcacttgcacctcatcaccgaccgccaaatgttcattaatatctttaacgaaaccgtgtgttacttcagaaatatgcacgagtccctgtgtttcttcatctaatgcaacaaacgctccgtacgcctgtaatccagtcactttaccagtgtaaacactgcctacttcaaactttgctgtcataactaacaactcctaaatcttatgaatttaatctctttttatacgcaataaaaaattatatcatacaagtctttattaagcaaaaaaactttttttagcattgtatgtttaaaaccgagttgaaaggggaatactaaagaacaactaaggctttctagtattccccccttatgttgatgcggacctttcaggtgcgcatttttttattttactgcaccgaccttctccacaaagcgcttcattctgacgagtgcttcctgaagctgttcaagcgaggaagcataggaacatctaatatagccctcgccgctcggaccgaaaacattgcccgggacgacggcgactttttcgctgatgagcagctcctctgcaaactgctctgagctcatgcccgtttttttaacggatggaaacgcgtaaaaagcgccccccggctgatggcagtcaagcccgatttcgttcagtgaatccacaaacacgtttcttcggcggcggtagctttttttcatcttttcaacgtcttcgaggccgtttttaagggcttcctccgccgcaaattgagccatgcttggcgcgcacatcatcgagtactggtgaattttcagcatagggtcccttaaatatgcaggagctgcgacatatccgaggcgccagcctgtcatggcaaaccctttagaaaaacccgatatcaatatcgtccgctttttcattccggcgatttccgcaaagcttgtatacgcttcatcgtatgtcagctcggcgtaaatttcatccgctattacaatcaggtcgtgtttttcggcaaaagccgcgatctcttccagttctttttttgaataaacagagcctgtcggattagacggggtgcaaagaatgatggccttcgtacgctcagtcagaacggcttcaaaatctgcagcgctcgctttaaatccgcgctctgcgttcgtatgaatgtggaccgcttttccccccgccaaagagacaagcgcttcataagcgacaaaacaaggctcaggaatcagcacttcttctccgggatcaaggatcgccctgaccgcaatatcaagcgcctggcttgctccgactgtaacaatcagctcgtcatcaggagcataatccagatgaaaacgtttattcagataagcgctgatctctttccgcagagaaagaagacccgcgtttgccgtataagacgtgtagccctgctcaagggaaaggatgctcgcttcccttacattccacgccgtcacaaaatctggctctccgactcccaatgaaatcacgccctccattgtggacgcaagatcaaaaaatttgcggatgcctgacggtttgatctgctgggctgcttttgaaatataagttgtcctcatttaaggagacaccacgattcttttgtcatcatcaccggagtcaaaaactttaccgtcatgcttgtatttctttaaaataaagtgggtggttgtcgacacgaccgattcaagcgtcgataatttttcggacacgaaatgcgaaatatccgacatcgttctgccgcggatgacaacagacaggtcatatacgcctgacatcaagtaaacggattcaacttcctgaaaacgataaatccgctcggccacttcgtcaaatccgacgccgcgcttcggcgttactttcacatcgatcatcgctgtcacgccttcatggccgtcgacttttcgccagtcgatcattgcagaataatcgatgatgaccttttctttttcaagcttttcaataatcgcttttgtttcttcctgtgaaatgttcgccattttagcaatcgtttcaggttcgaggcggctgttttcctctaatatttccaatatttctgtttctttttctgttagcttcatctcgttatcacaccttttatatgtcaagaaatcttctgaatattatagcacgtttttatacgaatgtaaggcggtaaaaaaagcgaaatcgcagcgtgaaaaaatttttttcgggaacgataaataacatactcaggacttaggcgacaacatgcagccagattgtttgaacatgaaagaaaaacattcggagtgatttggatcatgctgttaacaaaaccttctatcgagaccattcaaggggtcaatatatattatgaacattacgagaatccaggcaagacatcgctcgttttaatacacggttttctttcttcctcgttttgctacagaaaaatcattcctcttctgaaggatgagtttaatttagtcgccgttgacctgcctcccttcggccaatcagaaaaatccagcacctttgtgtatacctatcaaaacatggccagggtggtcatcgaactgatcgaaaggctgaagattaaagacgccgtgcttgtcggtcattcgatgggcggccagatttcactttatgcgataaaggaaaggcctgaactgttcaaaaaagtcgtcctgctgtgcagctcaggctatttaaagcgttcgccccgctcgcttattttcgggagccatattccttatttttatttgtacatcaagcgctggctgtcaaaacagggcgtcctgaaaaacctcatgaatgttgtctacgacagctccctgatcgatcaggaaatgatcaacggctacctgaaaccgtttctcgatgatcaaattttcagggcgctcgcacgtcttatcagacaccgggaaggcgatttatcaccggatgatttgaagaaaatcgagacgccttccctcttgatctggggcgaagaggaccgcgtcgtcccggtacagatcggaaaaaggcttcatcaggatctgcccaattccattttctactccctgcaagaaaccggacacctcgtccctgaagaaaatccggattatgtatcagacaagattgccaatttcattttgacatgaacataaaaaaaccgccggttggcggtttttaaattctgttcagcacgaactgctgtctttgatcacaaggagccgttcagccagccgtttgcattccgacagaggcagcgtctgatcaaacgatacttcaaaaacggtctggatcgcttcgcccagccgctctgcatcgtcttccgtatagacggcctgaacgatttcggccgcttccgtttcataaaaatcgggtccggcttgaaacggatcccattcctttatgatgtgtatgatttgtgctgctgcctgactttctttcatcatgatcaccgcttcatattaatgtttcaaaggctattgtatcacaacatgccggcttgtcgataaggaaagccgcaggctaacggccggcttttccccgcttctccctccaggcgatcagcagcagcccgatgccgttgacgagaatcaatccaaagacggtatttccgaggggcgcccagccgttttcccccgtcagcatcactgacagcacgacctttccgatcagcgtcacattcaataccgcaagcccccaccctaaggagcgcttccaaaatgccgtgccaatcaacacgagaaaacccatcatgaaagcgagcgtgaccacggctgaaagcgggttggacaaaagcattagctcgtaatccaaaacggcctgcatctccggattgatccgctcggggacgggaaaccaaaccatgctgctcgtcatcagcaaaaaagtaatgatgacacctttccaagaccgcctataacaaaagtacgcgagcgccaccagaaagagcgggcgtatataccagctcattgggttgagatgacgctgaaaagcccactcaaggatgctgctccattccaccagctgccactccctttattttataaaagctttcatggttaaaacattgcaatctatccttttcacagttaatgtataacatatgaaaaagacatgaggtgagatcatggattttaatacagagcataacagacgcgggacccagtctgtaaagtgggacttaacacaggaattattcggcgtaaatgacgcgcttccaatgtgggtggctgatatggattttcgtgcccctcagcctgttattgacgcccttcagcagcgcctggagcacggggttttcggctatacatctgcaaacgcgggcacggaggaagctgtcaccgattggctcagccgccggcacggatggaatactgaaccggcgtttatcaccttcagcccgggcattgtaacagcgctcgcccaagcggttcaggcgtacacagagcctggcgagcgggtggtcgtacagccgcctgtatatacgccgttctttgatatagttgaaaaaaacgggcgggttgttttacataatccattaatcgaaaaagacggccgctatgaaatggatttttccgaccttgaaaaaaagcttgtggaaccggatgtcaagctgttcattctttgcaatccgcataacccttccggccgttcatggtcgaaagaggaactgacaacgcttggcgaactctgccttaaacacggtgtcacagttgtttccgacgaaatccactcggacctgatgctgaacggactgaaccatacgccgttcgcctctttatctccggaattcgcggatatatccatcacatgcattgcaccgagcaaaacgtttaacttggccgggttgcaggcctcagccatcatcatacccgacaaagcgaagagaaccgcctttgcaaaggtcatgcagcgtcagggactgcattctttaaatacatttgcgattgcagccatcgaggcggcctattcaaaaggcgaaccatggctcgatcagcttatcccatacattgaacgaaatatggaagaagtccgccgctttttggcagaggagctgcccgaggtccgcatgatggagcctgacgcctcttacttggcatggcttgactgccgaaagctcggattgtcggatcaggacatcaaacggcttctccttcataaaggaaagctgattcttgagccgggaccgaagtacggaccgggcggagaaggattcgtcagaatgaatgtcggatgttcgctctctgttgtaaaagacggactccgacgtctgaagaccgctttttcgtaagcgttccggctgaaagccgggcgcttctaagagcgtttatggatggtttcattcaattctctttccagcttttccgctttttcagcttcttttttggaatgcttgataatcagccggaatacagcgatcgcgatgataaagaaaacggccagcgtaataaaagaagggatatattctcttttgtcttcaggaaaatagagcataaactgaatcagaaacggcgccatttttcttcctccctgaaatgatttttttaccatttatttattatgataccattaggaggcagatgcagtgaacaaccaatttcaagtcggagatcgcgtaaagggcttttataaaacaggcgtctacatcggcgaaattacggatgttaaaccgatgcactacctggtcaaaatcctcgccgtgctgacccatccgaagcagggcgaccttcatcatcccaatcgggcagacgtccctttttttcatgaacgaaaagcgctcgcttacggtgaacagacgaatatcccgcaccgcatggtgaagccgttcgatgaagctgtaccggattatgcggattcgctccgctcagctttgagccgcttaaaaacggatctgcaaaacgattcgtccgaatacgcggcaaaatcgcttgagcttattcatgggcttgaaaaagaatatttcctgcacaaataacccaatctgtttgtcagattgggttttttatgtggcgtgcggaaagacttttgagaggtcaacccgttcgccgatcgtcgtcggcttcggattttccaaatacttcttatcccgttctacgagccgaaacaacttatacgttgtcatcgcgtcgtcaagcgctttatgctgttttcccgttcctgaatcgccgtactcttccgctgccttccacaaattcgtcaatgttttgtcgccgaaaaattccttgtactccatggaaaggtccctcatctctcctttaaacggaaacggaacatggttgaacatgcaattttgcttcagcactttcatatccatgtttccccatgtaatgatgacgctgtttcggtcaggatcaagctcccgcagcttttcaatcagcgcgttaaacgtgatgccttggtcaacctgttcctgcgtgatgctgagaaaatttttgcagcgcctcgttaatttagggaacttcttcggcttaatatagcttgaaaacgtctcaaccacctcatcatgaaccgcctttacaatccctgcttctatgatttccgggaaaaaattttgcgggtgatactttccctcaggcattgtaaattcaaaatcaataatcagtaaggtgctcgcttccaactttcacacctgcctttctatctcaatataaaaaacttatggtggtaacgcagcggattgaaattatccaagcctatagtcttctgaatgttttccaaagtacgctcatatttctcttattatatcattatatttctatatttaaggttttattttctgaaaatgttgaaaattccttcaaatgcccatttttcgtcattctatagagcatcaattccatgcagctttcgcatttcatttataatgaaagggaattcaaattttttaagaaggtgattcgcatctctgtttataagaaaaaccttgtgatcatgtggtttgcgaattttttcgtggccgcaagctccacaatggttctgccgtttctttccctctatattgagacgcttggcagctattcggacggatttacggcaaaatggagcggatacgttttcggcgtcacatttttgatggcctttttagtttctcctttttggggaaggttcggcgataaacacggctataaaaaaatcctcttgatcacgggtaccggaatcggcacttccattcttctcatgtcccttgtctcgtccgtatacgagctgttttttttgagaatggcgatggggctcgtaaccgggttcattcccacttcccttgccatgatttcggctcagacgccgaaaaaaacggctggcaaagtgctcggcacgctgcagatgggcacggtctcgggaggattattcggccccttgctcggcggtctgctcgccgatcgcgtcggttttacatatacgtttttcattacgtcatttgcgatttacagcgcggttttcctcgtgtttgccggagtgcgcgaacggcccctgaagcagaagcgcgatgcttccgccgggtacacgagaaagcaggttctgcagacgattctgcatcagcgtccgctgatcacggcgatgatcctcaccgctgtgattcaagtgggaaacttcagtgttcagccgctgctcgctttatacgtcagcgaactgcacggaactcagaatctcgcatttttttcagggctggctttttctgcaaccggccttggaagcctgctcgctgcgagaaaatggggcgctttgggcgaccggttcggccacggaaaaatattgatgattctcgcgctggctgccgcggtttgcgttatcccgcaaggacttacatctcagtatgaaacgcttgtgttcttccgctttctgttcggaatcgcacttggcgggatgattccctgcatcaccgctttaatccgggttgaatcaccggggcctatacaaggagaagtgcttggctataatgtaagtttcagatttttaggcaatgtcatcggcccggtgctcggcggcattctttccagctttttcggtatttcttccgccttttacgcaactgccgtcctctttttcggcggagcatgccttctgatgttccaaaggtcccagcaaaaaaaatcagaggcgaaagcaagctgaaatcggataaaaaaactgccaatctatcaaattatccttctcgatatccaaaaagaatggtacgatatggctagaatttagcgaaaagagagtgacaaagttgcgttcattttttggatggatttttctgttgatgttaatacctatatttgtctttaccttaatggcctccggccgggaagctcagaatatgaagcctctcgatcaggtgctcgatgagaagatcaatataaaggatatcggccttgtacaaaacagctacatgtatgacagggacggcgctctgatttccgaaatcgtttcagatcaccaaaaccgggtattcgtcccctataaagatatccctgaacatgtgaagcagctgtttctgacttcggaggaccgtcatttctttcagcataaaggctttgattttatcgggatggcccgggccgccgcagccaatgtcaaaaaaggcggcattgatcagggggccagcacgattacacagcagctttcgagaaacttgtatttgaaccatgaacgaaccttcgaccgcaagttcactgagctcctgtattcctaccagctggaaaaaaagctttcaaaagaagaaatttttgagaaatacttaaacaccatctattttaatcacggggtctacggaattggatccgcgtcttctttctatttcagcaagcctttgaaatctctcagccttgccgaaacggcgtttatttgcgcgatccctaataaccctacattatatgatcctttgaaacattttgactacacaaaaacccgccaaaagcggctgcttgaagggctgaaaaaagcgggcgtgatcaccgaaaaagaatacagcaaagccgttaagcaaaaaattacgcttaacgtgaaagaaaagaaagacgactatcccgactatacgacctatgtcaacgaggaattcaccaaattggtgtccgctacggaagggtttgacgaacggctgaaaaaggcaaaaacaaaagaagaaaagaaaaaaatcgaaaaagagctgtcaaaccgaatcagctccctcacgacaagcggaatcaaaatttatacggcgctcgataccagcatgcaaaaccgtgtcgtccagcaagtgaagaaccgcctcccttatgaaggcgtacaaggcggagcagtggtgatcaaccaccaaacccatcaaatcgtcgccatgtccggcgggaaaaactataaaaagtacgattataacctggcattccaagcatacaggcagccggggtcatcaattaagccgctccttgactacgggccgtacattgaagaaacgggtgcgacggcaggcagcatgattgacgcaagcaaattttgcagcaaggaatactgtccgaacaacttcaacgaaagaacatacggaaccgtgtcgatcaagacagcctttaaatattcgtataatacaccagccgtacgtatgctgaaccgggtcggcgtgcaaaaaggattcagctatttaaaaccgttcggattcgataaaatcgttcaaaacgactaccgtcttcctgctgcgctgggcggatttacatggggcttctcaccgctggagatggctgatgcctatacgaccttcggcaataacggaagctacacatccagccatgcaatcacaaaggtgacggatttaaaaggaaaaacgctatacaaatggaaagacaagccgcagcaagtattcagcatgcggacaaacagccaaatgcgcgaactcttagcagcggttgtcaaagaaggaaccggaaaaaaagcgaatttcagcggcggatatgtaggaggaaaaaccggaacatccaacgggtacagagacctttggtttgtcggattgacggatacatacacaatgagtgtatgggtcggaaaagaggcaaaaggcactgtcgagtacctgcatcacgcgggacctcaacttttaatctggagaggaacgctgcaatacgcatcttaaattaaaaaaaggggtggatgaaagtggcggatatgcccgatcgaatcgttctgtttgacggcgtgtgcaacttttgcgacggagccgtgcaattcattatcaaacatgatcctgaaggcttattttcattcgcttccctgcaatctgacgccggagggaatctgctcaagcaatatcacctcccttccgatcattttgacagctttattttgatcgaaaacggccgggtatatcaaaagtcaacggccgccttgcacgtggtgaaaagcctcccgggcctttggcgggccgcttccgccctcttgatcattccccggccgcttcgggacgccgtctacagtgtcattgcgaaaaaccgctacaaatggttcgggcaaaaaagcgagtgcaccgttcccggtcctgagatcagaaaacgatttttatcataaaaaaaccggagccgccggacaaacgtccgcgctccggttttttgcatggctcaaacgggcaggctcgccatgacgctgttataaagcttgatgataatatacaccgtcccgatcataaacgtaaaccaaaacagcagctcaaacataataaaaccgattaatgacatgaatgaaagcgtgctgtggatcgtataaacgataaaaataaaatatacgagagttgcgagtaaaaaaagcgctgcaattcccgcggcatattggacaaaaataaaagataaaaggcttgctcctagatacacggcagaaccgatcctgatttttctcagattcgctccttcaggatctttggcgaaaaataaaagggcaagctctgtcactgtattggcaatcagcttcaaagcggaaaataccatgaaaaaaatcagcgtaaacacagcaaacaaagccatccggatgccgctctcagagaaaaattcgagcatccctttgtagatgccgagagaagacagcatctgcatggcatagataacggaagaaatcgcaagagatgaactgaaaagaagaattgcgataaaaggaaaaaagcctgttacatacgtatttttcataaaaaaaagtccctttctgatatgttcctcattcattatgtacgacttatgacctgttgacaagaatattttccatatttttaatttctgctaatgcggcagaaaggtgcaggattcttcacaaattcgccatttacttgtaaagtattatgtgttgactaatcaatagatcgcgaggaatcgccgttgaaaaaaacattaaaactgcagacacggttaacgatatttgtctgcgtcgtcgttttaatttctttattgatcgcgttttttatggtcggctctgagaccgcaaggaacattcgggagcaggagcagcagattgccctgcagacggcggagatggtcgccgaggctccgattacggcacaatcgctggaaagcggcgaatacgaagagctccggaaatacaccgcccgcgttcaaaaaatcacccagactgaattcgtcgttgtcatggatatgaacagcatccgcaaaacccaccccgatccgaataaaatcggaaagaaatttgccggcggggacgaaaaagaagtgctgaagggccgacgccacattagtacggcaaaaggcacgctcggtgaatcactgagggctttcgttcccatctataataaaacgggcacccaggtcggagcggtagcggtcgggatcacccttaacgagattgagcagatcacccagcaaaatctccgccctctatatacggtcatcgtcctcagcatcgtcgccggaatcatcggagctgtcatcgtggcgaggaaagtgaaaacgattatgttcggcatggaaccatatgaaattgcaacgcttttgaacgaacgaagcgcaatgcttgagtcgacaaaagaagggattctcgccgttgatcgaacaggaaaaatcaagctcgccaatgcggaagcgaagcgcctgtttcaaaaaatggggatcgaagagaatccgatcgaccgggatgtactcgacatcttgccaaacagccgactgaaacaagtgatcgaaacacagaagcccgttcaggaccgcgatgtcagaatcaatggccttgaacttgtctttaatgaagttccgattcacttaaaaaagggaaacatcgtcggagcgattgcgacattccgcgacaaaaccgaagtgaagcacttagctgagcagctgtccggtgttaaaatgtacgcaaacgcgctcagggcgcagtcgcacgagtttatgaacaagctccacgtcattctcggtcttgttcaattaaagaactacgacgagcttggaaactatataaaagacattgcgatctatcagcagtctgaagcgagcggaattatcaaccatatcaaaaactcggtactcgccggctttttgctcggcaaacagagctatattcgggaacagggggcctcgttggaggttcattgcagcacgaggattccggatacagccaacacagcggtgattcacgatttgatcaccgttatcgggaaccttctcaacaatgcccttgatgccgtttccgccactgagaagaaaaatatttcgatttcattccgccatcatgacggacagcttgatattgaagtcacggatacgggagtcggcatatccaaggaggaacagcagaaaatgtttgaccaaggcttttcaacaaagggccccaatcgggggttcggtctttatttcgtcgaacaaagccttgaaaatttaaatggacatatcgtcgtgacgagcgaaaagaatgaaggaacgacattcagtctccgcattccgtatgaaccaaaggaggatgaccatgattgatgtattaattgttgaagacgacccgatggtaagagagctgaataaacgttacctcagccaagtagagggatttcagctgaagggcattgccgcttcttttcaagaggctctcaccttcctccgggaagagcatatcgatctgatcctgctcgacatttatatgcctggcaggaacggcgtcgaactgctcactgagatcagacgccaaaatcaagctgtcgacgtgatcgtcatctcagcggccagtgaaatggatgttgttcaaaaaacgctgcggttcggggccgtcgattacttaatcaagccgttcgaatttgagcggtttcaaagcgcgctcactgattacaaacggaagcagcagctctatgctagcaaccggaatatcagccaaaaagagctggattttgaactttttcaaaaaaaacgcgcgcccgaaaaggtacatttgccaaaagggctgaccaaaagcacgctgaagctcatttggtcaagcatcagatcgtttgacagcttgacgttcacaacggaagatttggccaatcacacggaaatctctcaagtttcaatccgcaaatacttaaagtttctggaggaaatcgaagttctcaacgtagaaatggcctacgggacgatcggcaggccggttttccaatataaattaaatacaaatgacttgaatgtgattaaccaatatctataacatgtccccgcccgctgctctctaaagacagcgggcgtttttttgtaacggccacatttgactcgccatcattgccggacaaggatttatcgcgctcgccgcgcttgtgttcggtaaatggcagccgatcggagccctgttcttcagcttcgctcaaagcttaagcatcatcgggttcacgcttcccttcttcaaaagaaataccaaacgtctatatgctgattgcgccttacgtattgacgattctagcgctggccggatttagcggcagagccgaagcgccaaaggctaacggtatcccttatattaaaggaaaacgataaccgaacgatagaataagagagcggcctgctctcttattctttttttgttaccttaacaaaagataaaattttttgacgccgccattgtctttaccacttttatggtatgatgaaaaagtctggttatcaatcattacaggaattttattgcagacaggaagcaaatcgtatacaatttaatattgtttaatttctatataaaacgtttttatttaaaggatgcgaaaacattgaataaatcagtcataccttctttaattacggttggaaactttgtttcgggcatctcttcaatactgcttgcattcagagggtatttattcttagccattatatttgttctgatcggcgctatcttggacagccttgacggcatggccgcgcgcagattaaatgccgtcagcccgtttggaaaagaattagattctttgtctgatattatcactttcggagtcgccccggccatcatcacctattcaatcgttttttatgatgctccgatcttaggccttccttcgacattgttattccctgtttgcggagcgcttcggctggcgcgatttaatattcaatcagagaaccaggattattttacaggccttccgatcaccgcagccggaacgattctggtatgcttaaaccttttctcagaaatcctgggcaaaaagccgttcattttgatcatgctgttcctgtcctttctcatggtcagcaaaatcaaagtcatcagcctgaaggggaaaaaactattgaagaaagtgagctagtttttaatggagttggcaaaagaattgatttcccaatacgggtatttcgcgatattcgggatgcttgtcctcggaattgtaggcctgccgatacccgatgaagtcatgatgacatttgtcgggtatctgtcttctattcatatattaaactatgagatgtgccttttgatcagtttttcaggtgcgatatcagggatgctcatcagttattttctagggaagaaaatcggtaaaccgctgctcgataagttcgggaaatggatcggtctgacgccgaaaagactggacaccgtgcaccgctggtttgaaaaatacggcccgtggacgattcttttcggctattttgtccccggaatccgccatgtgacatgctatctgtccggcatgaacgagatggacatgaaaaggttcctgatttatgccggatcaggagcttttatttggtgtcttgtttttattacgatcggatacacaatcggcgtgatttaaataccgcttgcatcccggatgatcagtaaaggagtgaacagcttgaaaaagcggctttaccggtttttgattgagttgacgaataaaaagggcgtgtcccggatgctgaaaaagtttgctcagtcaaagctaagcaaacctctcatcccctcctatatcaaaacctttcatattaatacagaagagatgctggaagatgtccgctcttttaacagcctgcacgagctgttcatcagaaaattaaagagcggtgcacgcccccttcccgctgatccaaacagcctggtcagccctgtggacggcgtcatcgaagaaatgggcaccatcacgcgcgacaagcaatttaccgtcaaacaaaaactctattctgtagaagaaatgatcggacgatccgagatcgtgaaccgctatgtcggcggaacctatatcattatctatttaagtccgagagactaccacagaattcacagcccggcttacggcacacttgaaacgcagtattcgctgggaagcacgtcttaccctgtgaataaaatcggtttgacatacgggaaatcgccgctgacaaaaaactaccggatgatttccgaatttaagcaccaatatgggtccgcactgcttgtgaaggtgggggcgatgtatattaactcgatcgtgatgctccaggagtcaaaagaatggcgccaaggcgacgaaatcgcatatttctctttcggctcaaccgttattctgctgtttgaaaaggatacctttattcctgatgaacgccttcacccctctcttcaagtcaaaatgggagaggtgttaggatctcttgccaaaagaacatcataatgcaccgccccgaaatgcgcttcgggggttttttaattgctgcttaaaaaagcttttctccatggacaggaaatcccctttttccgcctggatatggatccctaataaaccaaaagacctataaaacgatcaaaatcaaggagattccttctctttttccgccctttttcgttttaatttaattatcaatcgattattttaatttaaaaaacgcacagaattgacacttttcttctacaattgaacacatacaaacatgggggtgttttttatggaagcagcaaaagatttgaaaccgattacaaatcacggtcataaagaaaataaaaatattttccataagctgatcaactggaaaatcggcgtgattccgtttccgctatatattgcgcttgcgctgattgtttttctggcagcttattttaacgaattgccgaatgacatgcttggcggtttcgcggtcattatgattctcggcatttttctcggggatgtcggacagcgcattccgattttaaaagatatcggcggacctgccattctctcgctgtttgttccgtcgtttttagtctttttcaaagtgcttaaccccgcatctatggaagcggttacgactttgatgaaaacgtcgaattttctgtatttctacatcgcatgtttagtcgcgggaagtattttagggatgcatcgcacggttctgattcaaggttttatgagaatattcgttccgttgttggccgggacggtcgcagcggttgccgccggtattctcgtcggtctgttatttggctacagcccttatgaagctttcttctttattattgtaccgattattgccggaggcatcggcgaaggcatcctgccgctgtcactcgcctactcgcaaattttgggacagtccaccgatgtatttgtttcacagctcattccggccgctattatcggaaacgtcgttgccatcatctcagccggactgatgaaaaagcttggggaaaagcgtcctgaactgaacggtaacggcagactcgttaaatcgaaaaaagacgatgaaattttcaaccaaaaagaagaggagccgaaaatcgacttgaaattaatgggtgccggcgttttaatcgcatgttccttcttcattttcggcggtttggtctccaagttcatcgcgattccgggagcgatcctgatgatcatcgcagcggctgccgtaaaatatgcaaagcttctgcctgcaagcatggaaaaaggcgctcaccagctttacaagttcatgtcatcaagcttcacttggccgctgatggtcgggctcggcattctttatatccctcttgatgatgtggcgtctgttatttccctgcgcttcatcgccgtctgcgcttcagtcgtcattgccatggtgacatcaggctactttgtcggaaaattaatgaacatgtaccctgttgaatcagcgatcgtcacaggctgtcacagcggtctcggcggcacgggggacgtggccattctttcggcttcaggccggatgggtctgatgccgtttgcgcaaatctcaacgcgtctcggcggggcatccaccgtcattatggcgaccgttttactgaggttcttcacctcgtaagggccgcataaaaaaacaaaaaggagtctgatctatacgatcggattccttttttgttttcagcgtttctcaactctgatatattctctcggtttaaagggagctctttctgttcccgttaaggactgatcttccgctcccgtctgtagcggcgtgtaatcaccgcggtattgagggccttcgggtgttccgatccccggagtctgttcacgcgtcatttccctgttgatcataaacgctcccgcaaaaagcgaacaaaataaacttaggctgacaaaagctttccttttcatctttcatcacctcaaattcatcttgttcaaaaaaactttccattatacaaatgccgaattttttgttaaaattgttttcaggttcataagaccgcataaaccgcggttaccatgagatcatgcagccgatttaaatttgagttataatttgtctaggtcaccagttctacaaaaagtacataacgtttgaaaattttagtatggaacagaatgtatttatacatgctaccttaagggaggttaatatgacgtctttacatattgctattttatcgccttttgcactcgccttcttgattccgctattggcgaaaaacgtcagaaagattcatacaggctggtttgtcctgtttcttcctgttctattatttatttattttttccgcatgatcaaaatgacggcggatggcggaacattaaaggctgtactggaatggattccgtcctttgggattaactttaccgcgtacgttgacggactcggattgctattcgcccttctgattacagggatcgggtctttggttgtcctttacagcatctattatctgtctaaagaaagagagcagctcggaccattttacgtttatctgctcatgttcatgggggcaatgctcggcgttgttctcgttgataacgtcattgtactttatttgttttgggaattgaccagcatatcgtcttttctgctcatcggctattggtacaagcgggaaaaatcaagatacggcgcgacaaaatcgatgcttatcaccatattcggcggtctttccatgcttggaggcttcattcttctttacacgatcacaggttcattctcgattagagaaatgatcaaccaggttgatttaatttcggggcacggctttttcatcccggctctcgtgctggtgttaatcggagccttcactaaatctgcgcagttccctttttacatctggcttccggacgcaatggaagcaccaacgcctgtaagtgcttacctgcactccgccacgatggtaaaagcgggaatttatatcgttgcaagattcacccctgtgttcgctttttcaggggaatggttttggatcgtgtctctcacggggattgtcacgcttttctggggttcgttcaacgccgtcaagcagactgatctgaaatcgatacttgcattttctacggtcagccagctcggaatgatcatgtcgatgcttggcgtcggagcggccgcactgcattttcagcattttgaatactacatggttgcagtaatcgccgctatctttcacttgattaaccatgcgactttcaaaggcagcttattcatggcagtcggaatcatcgaccatgaaacgggtacgagagatatccgcaagctcggcggccttatgacgatcatgccgattacgtttacgattacgctcatcggcgcgttttcaatggccggactgcctccgttcaacggctttttgagcaaggaaatgttcttcaccagcatgctcaggattacgaactttaacttgtataacgctgacacatggggttttctctttcctgtgctggcttggatcggaagcgtgtttacattcatttactgcatggttctcttatttaaaaccttcgggggaaaatatcagcctgaaaagcttgaaaaacaagcgcatgaggctccaatcggcatgctgatttcgccgattgtcctcgtatctctcgtggtgatttttttctttttcccgaacattctgtcatacagcatcattgaacctgctgcagcgtcgattatgccgacccttttggacggagacgaaaaattcaaggttcatatttacatgtggcacggcttttcgactgagctctatatgacgatcggcgtcgttgctctcggagttctcgcctatttgaccttgtcaaaatggcggaaggtctacggcctcttcccggaaacactgacgctgaacaagttgtacgacagctcgctgtcagggcttgaaaaaggctccaacaagattacaagaacgtatatgacagggtttctccgtgactatcttgtttatgtttttgtcttctttatcgtgatcatcggcggatcgctcgctgttaccgggggcttttcatacgatgtgaaaggcaatgcttcaatcggcgtctatgagctcgttctgtcagccgtaatgattgccgcaacctttaccaccgtttttgcaaggtcaagactgacggcgattatcggactcggcgtcatcggctacacgctcgcgctgttctttgtcattttcagggcgccggatctcgcgctgacgcagctgatcatcgaaaccatttcagtcgcattgttcctgctgtgcttctatcatttgccgaagctcagatttaagccgaaatcggctaggttcagggtcacaaatgcgcttgtatcggtcggcgtcggaactgttgtgacgctgctcgcactttcagcaaacagccagcgctcgcttgaaagcattgcatcgtattttattgaaaacagctataaactcgcaggcggccacaatatcgtcaacgtaatattggtcgacttcaggggatttgatacattgtttgaaattaccgtacttgtcattgccgctttaggaatatacggcatgatcaggctcagattggagaaaggaggggaagagcattgaaaaaggttcagacgaatgatgtgatcctgcaaaccgttacaaagattgcatcctttatcattctgctcttttctttccatctgttttttgccggccataataacccgggcggcggttttatcggcggattgatgacggcgtcttcgcttgtccttctgctgctcgcctatgatttaaaaacggtgcagaacatcttgcccgtcaactttatctatgtggcggccgtcggcttattcatttccgtttccaccggaatcggctcatttttgttcggcgctcagtttctttcccacgcgtttgattactttaaccttccgctcttggggaaaacggagcttgccaccgcggtattgtttgatatcggggtttatctcgtagtggtcggcgtgaccatgaccattattcagacgattggggagagagaataatggagattttaatgtcttttattgtaggaattctgttcatggcggcgacttatctgctgctttccaaaagccttttgagggtgattatcggaactgccgttctcagccatggcgtccatctgcttttgctgacgatgggagggttaaaaaaaggagcgccccccattttgaatgaagagtcgacaacctatgtcgatcctctccctcaggcgttgattttaacggcgatcgtcattgctttcggggttacctcgtttctcctggtcatggctttccgcgcctatcaagagctgaaaatggatgatatggatcaaatgaggggaaatgatcaacatgaataatcttgtaattctgccaatactgattcctttaatggccgcaattctgcttatctttatgaacaggtcgatcgtgctgatgcgtgcattcagcgccatatcttccattgcggcgatcgctgcggccgccgttcttgtgcagacagtctatacggacggaatccagaccttgtatctcggcgggtggaagcctccgttcggaatcagccttgtcgctgatcaatttgccagccttcttgcgttaacgacagccattatcggatttctgacggttctttattcgtttcgctccatcggcgaaaaacgcgagcgtttcttttattatcccgccgtccagttcctgcttgccggagttagcggcgctttcttgaccggggacttgtttaacctgttcgtattttttgaggtgcttctgatggcttcgtatgtgctgatcgtcatcggcggcacgaagattcagctgcgggaatctctgaagtacatcgtctttaacattatttcttccgccctctttgtcatcggagtcgcttatttatatgcagttacgggcacattaaacatggcggatctgagcgttcggatcagcgaatcggggcaaaccgggctgatcacggtcatcgctgttttatttttgatcgtcttcggtttaaaaggcggcatcttcccgctgtatttctggatgcctggttcctattatgcgccgccagccgctgtttccgcactgtttggcgcacttctgaccaaagtcggcctgtacgcgatcacaagggtgtttacattaattttcacccaagacgccgcttttactcatcaattaatggtctggcttgcggcgcttacgatcatcttcggggtcatcggctcgatcgcctactgggatgttcaaaaaatcatcatctacaatattgtcactgcggtcggcgtcatcttgttcggcatcgccgccaatacgccggcttcaatcgaaggatctgtctactatttgattcatgacatgatcattaaaggagcgctttttatgcttggcggagcgctttttgccctgacagggacaaacaacctgaaaaaaatgagcggcctgatcaaaaaccatcccgtgctcggctggatgtttatgatttcagccgtttcattggcaggtgtgcctcctttcagcggattcatcggcaagctgaaaattgcagaaggcggctttttaagcggcgaattcgtgattacgctgctgatgcttttatccagcctgctcgtcttgtattccgtcatgaaaatatttatcaacggcttctggggggatgaacaggaagatgctccggccaaaaggcagctaaaaggctacatgtatccggcagcggtactgctctttctgtcgcttgccatcggactcggaaccgagcttatcgctccgtattttcaccaggcggctgatacgctcgtcaaccccgaaaaatatattgaagccgttttgaaggagtagatcgcatggcattacaaatattgttgaactttattcttgcgttgtgctggatgtttctgaacaatgactacaccgctgccgggtttgtcatcggttatgtgatcggattattctcgctctttctgatgaggcgttttttccgccgccgcttttacttgattaacatttgggcgatcgtcagactgctgtttatttttattaaagagctcgtgctggcaaacgtcagcgtattaaagacgatcttgtcaccgcggttaaaaaataagcccggcattttcgccttcaagacagatcttaaagcggactgggaaatcacgacgttggcaaacctgattacgctgacaccgggcacattggtcgtcgatatctccgatgaccgttcgattctttatattcatgcggtcgatatcgatgatgccgagaaagccatcagtgatatccgcatttcgtttgaagaggccattaaggaggtaagccgctgatgtttgaatttattttgcaattgtcactcggcattttggcggtctccacttttctgtatgtgctgagggtcattaaagggccgagcatcccggacagagtggtggcgcttgatgcgatcggcatcaacttaatcggaattacggctctcgtgtccatcctgttaaatacgacagcatatttggaagtcatcctcttgatcggtattctggccttcatcggcaccgtcgcattttctaaattccttgagaaaggagagattatcgaaaatgatcgaagccgctaaattgcttatcgccgttttgatccttcttggcgcactgatatcgttagccgcttcctttggaacgcttaggctgcctgacttatactcaagaatccacgccgcttcaaaaggagcgacactggggatcatcagcgtgctgctcggcgtattcttttacttctggtttctgcacggcttcattacggcaaaagtgctgctcggtatcgtctttgtatttctgacgtctcctgtaggcgcgcacctgatcgcaagagccgcgtataatacaggcgttaaaatggaaaagaaaaccgtacaggacgattatgaaggctacagaaattttctgattaaaaagaaggaagattcctatttataaaaagaaaactcgcccctaacaggcgagttttctttatgtttacgatgaaggacggctgatgaccgccatcgtgcacctggacgtgcaaatcaggctgtcctgctcatcgcgtatttcaatttgaaacaccattgttgatttgcccacatgcagaggcgtagcgaccgctttaaccgttccgtcttttaccgatttaatatggttggcgttgatctcaagcccgaagcatgcctgctcttttggatcgatatgctgatatgccccgatgcttgccaccgtttcagcgagcgcaacggacgcgcctccgtgcagatagccgaaaggctgacgcgttctttcatcgacaggcatgacggcaacacaccgttctttgctgcactccttcaactcgattcccaacgcttcaagaagtgtatgtttcgtttccatcacaatcgtcccctcatcagagtacaccttcagatttcgcgattaaaacagcctctgtccttgatcctacattcagcttgctgaatacggaagtcaagctgtattcgatcgaccgcttgcttaaatgaagcgcatcagcaatttcctgatttgtgtagcctttttcgacttcttttaaaatcaggcattccctttcagtcaagaggtcgtgctgggtctgctggctgtttgacttcgatttttgctgtgtaatcaactgcttgaaataatcataatcgacgacaattttattatccagaacctgatatatgtactctataatcttttccttcgattccgttttgctgatggcgccgtgcatgccggaacgaatcgcctcttcaaaataatcttcgacttcatagcctgtgtaaacgataattttgcatgatgaacatgtctcaaggattttcttagataggtccatgccgttgatttcacccaaatttaaatccattaagatcaggtcatacgcagaaaaatcatgtttcttgagaaattgttcgctggcttcagggctgaggcaatcgacaacaaagtcctggttcgtttcaagaattgccttcgtcccctccatgacagccggatgatcatcgatcacaagtaatcttctcataatttcctcccttttgcgtaaccttgccctatcaccattttatagaaaaaacttggcggatgccaagcaaaaatgttaactaaacattacaatcccatttcaatggcgaccctaaagcctttcccttctgctgtctgtatatccagactgccgttcagtgcgcggacgcgctcgcgaatgcccgacagccccatgcttgcgctgttttgataaagcttgtccgggtcaaccccaatgccgtcatcttcataatgaagaacaactttttcttttatgcagacaagcataatcaaaacctcattagctctcgaatgtttaaccgcattgcttaaaagctcctgcacaattctgtacaaattcaactgcgtgtccaagtcgagcacctttgagaacctttccgtattgaggcggatcttatcgatcgatgaggactcctgatgctgcgccgccagtttcgaaagggctttgacaagtccgagatcgtacaacagctgcggcctcagctcctggcacgtttcccttgtcgtctggatgacggcggacatttgctcattcatattgatgagcctttgccggatttgattcgtacagactttatctttttcaaaatcagccagaaacatctcgctttgatgcttcaaggaaatcatatcctgcaggacagagtcgtggagatcgcgggctaaatcagatctctgcttctcttcaatcgcaaacatcaatttattcagccacgccggattcggcccttcttttttcacattttccagatgctccatcagctcgccgattttcagcacgttttccagggaaacgctcgtataaaacgccagcgtctcaagccatgaaatctcatcgcgcgtcagcctaggcgtatttaaaaccgacaaacacagcatgacataagacgtcccgccccgttcaccgatcttaatcaaaaacccgcggtcgacttcgacgattttgccgatgtcggtgatcaccttggttacttcttgttcgtaggggatccacggatattctttggcatcttcttcgagcaaagatattgttccgtcgcttttgactttcagaacatgggcttggctgacaatcaaaacatcaagaattgtttgtttcaattccaacaaaacctgatttaaagatgagtgtgttcgaatcgtttgtgtgaacttaaatatactgtcttggtagttatacttctctgaaaaacgtttcagacggaagcgatagtcaagaatttctttaagatagaaaacccctagaattataagatagacataaattgctaatcttgcatcataatagtctccttcttgaaatttcatcagctttacagtagaaaccatgatgatggttggaatgattgcaagcagtccataatattttaaccttcctatcaaaaattccacgtcatacattttgtttgatataaatagataaactaatgtaaaaggaataattaatagaaacggagcaactactgctgcagaatagataaaatcatcaatgactaagaccgggataacataaaatgcaataaaaggaaaaaccgcaaaaaagttgccaagcatcagcatttttaaaaaatatgtttgctctgtatttttatgtttaaccataccgtaaacaaacacagatatcactaatactaatcccatgaaaaatgaatacaaattaatataaggaataggtccattaagtttttcaaaagtaccactaaaaatctcaagaactagatttaaaaccggcagtaaataaaagaaaaacaccttattactacatagttttctgcctatctctttaaaatattgatatataaaatgcaagtaactgattggaattgatataaaggttaataaatttacatacctactaaacacattacctcttgaaactcctcctgcacttacataagcaatcgatacagtaagcaaaaatagaattagtaaaaatgaagatgtttgtttctttttagattttaaaattaaaataacacaaagcaagcataacaaataaaacactatcgggattaaaacagtaaataagatatcatagctaatgatggtgtctcttgtatcagtagtgatgatttgtccgttcctctcaatagaaagggaactaacattagctagtatactattcttcggctggtctttagacggctttttattgttcacttcaagaataatatccccagcttttaagaagaataatatccccagcttttaagcctgtgtaatccgccagtgaatcttcttgtatataatcgaccacaagttgattgtctgaattgtattttaaatatgcacctacaaataaattgttataacatatataaactacgtaacagctatagataaaactaagacagacaagtataactgaaataattttcaaggaaaatttcattttaaatacttctccaaaaaggaacaggccttccaattgatgattctagtaatttaaatccatcaataatactttctaattgatctatatccacccctaatagacaggaattcccattaataacctgttctaaaatttctggatgttgaactaaaaagctcacgatctcctgcacaccctaatcctccttcccaaacatcttcaatacaaacgaagtcaactgctgttttttcagctcccccaactccagctccccgattcccttcttaaatttctgaatagcgagctgattcataacatacatatactgagtgacgcctgctgccttcaatttctctttatagcattttatttctttatcggcaattttatcctcagtttcaaatgtttttaacaagtcaatcgacggctggttaaattttcttgacaaatataagtacgcaagcgtgcgctttttcttggcgatatcgctttttgaatcataaaaaagtgctttataatcattttcgatttgtgaagcaatgcccagctggtaggcgtacttttcaaccgtcgggtcaaatttgcccgtagcaagcatagctcccagcacgcatggcaaggctgtcagcgccccggatttacgcttgatcatgtcaaggcactcatcttcagtggcagggcggttgctgagatcgtcatgctgtccctgcatcgattgaagtgtatattccattagcttttcgaaaaacaccggttctttcgacaccgaaccgatcactttaatgcttattgtataaagcgcagtcgccgcattcattgcgactgaacggttgattttcatccaaggttcatcggggctgtcttcatcctctaaatcatcgaatatatcaaacgcaagaatcaagagttcaatgcctgctccaagggtttctgccgcatcggtgtccgtgccgccgaaactttggtaatgataaaaagcaagctcgctgaaatgcaactggtcctttgcatctagaaaagcgtgcagcgtccgatttaagtccgcattgggaatctcaaggtctataaaatgattcattctttgcttgattttactgtgatctagacaaaaaagcttagagatggtgctccctcctttcttaatattttactaaatcaaaatcccgattgacagagcaatttttttatttaacaattatataataatttatcctttttttgggttcgtttgcacacaaaaaaaagacttgtctgaaacaagtctttttacgaggtttttagatatgtgtacttatcgtattgatcaatgcttttgttaatcttgcgcaaggagtcctttgtttctctgatttcattctctagccgccaaagcagttgttttaattcttcaatttgttgcttttccaccggttccacactccttttggaagatcaatcaatttgtgtatagtgaacgagtcataggtatttgatctgttaatacaagtttaaagggatttggtttctttttcaccgaaaagttgcatataaattcatgcgttacaccgcaaactttaaatagaccataacacccattttacacaacttgcgattagttctcaaatcctaatgaaacataaaatttttgtttgtttttcaaggagtcaaataaagatcgcatataaacccctttatcatcgcaagttcagttgtgttttgttcgttttgcaaccttgagtctaaagtagtaactagcgaggaatagaaaaacttgagtgttcacggaacgcagatcgggtatgcgccaccgaaaaacacgcaatagaccgacacgcatttcggcccttataaaaaaccatcccttcgccttacaccgcaaaaaccgcaatttgacccgtaaaaattgaaaagaggtgttcatattgcttcctcctcattgcttttggatgcatccatatcaacacgtcagctgccggcaggtctatcccgaagttcaagtcagcgccttattgcgctcggcaaaagaagcggagagcttgatggctgacggacagagaattttaagcaggctttcagcctcgcgtactttggcccagcaaatcatgacggctgcccaaagcaaccaaaaaaataacgtgctggccgcgctcaggcaaaccggcgtccgcagccagcttgatgcctcattcgatcccgacggcattcgcatcatgctcatcagcccccgcagcagactattcctgctattgcgttggtcttagcgcaaaaaaaattccggtccctaagaaggagccggaatttttttataagagcttttgacaccaatcaacagcttcaagatagcactggtacgcttcatctttagttaagccttctgtctccggtgtgttgtcttcccattcgtttcgttcgatcgattttgcaagccgcaagatttttcggtaatcattttcttttccgagcagcgcctggcccacttcgtctgtcagcggcagttcgctgatgacttccgttagttctttgtgcagcagtgtatcgataaatgaaaacatgcctgtcagcatataagaagccggctgagggcggttcgtttttttgccagcaattcgcaaagcttcgcgcggatcagcgaaatcttgacgacttcgttcttgctggagttttgctttttcgttaaatccttaaatgagaggatgaagatccaccttttgatttctttaaatccgagaagcacgatagcctggcggatgcttttaatcttttggatcggccggttggctggagaattcaacagcttcagcagctggtaagaaagcgacaaatcgcgctctataatatttgtgacgttttcaatatcaggctgatcttcgcttaattcatgcagcagctcataataagcgtggaaatgatatgtaatgtcctgaccgtcaatcacgacaggctcgctgaagaaatagccttgaaacagatgaaatccgtcttttacagcctgctcatattcttttcgcgtctccactttttcagcgaggaacgtcaggcggtggttacggcatgatcgaaggatgctctgtctttcctgctgcgtcgttttgaaaaaatcgatcttcaaaatatcaatggatgccaaaagctgatggagcaagtccctcttcacgcgatgctttaaacaaaaatcatcgagtgcaatcgtgtagccgaggcttttcaaatgcctgcacctttcgataagctcaagggtaatcggcacatcttcaaggatttccacaacgagctgatccgggtcaaaatacgtcggcagccctgatgccaaaagaccctcggtaaaattcacgtaataccttttgccttctgtcaatttatcgattccaatgtttaaaaagctgttaatcattaattctgttgtcgcttgatcaccgtcaataccggaaaaaaagtttttctcgctttccctgtataaaagctcgtatgcgacaacttgttcttttctgttgaatattggctgtctggcaacgaataccctcattcttcttccccctagcgactgaggtgccttcgcttttaagtatatcaaataattgggcaaatcccgtctgctgtataaaaattcacccaaatttgaacttaatattgaaaaacagataatccccgaagaaattatctgtttcaatccccagttatgttaaaaactatcgtttacagagtcaaccttgatccagaccttttttcgccttgattttcgcttcgtgaatttgctgcatcttgttgttccagcaagcttcgcttaaatcgacaggatattcttcgggcttgctgatccgcttatactcttcccaaagcaaactgagattttcttgaacataccgcttaatatcctgaatgctcggattctcatagacaagctcgcctttttcaaagatcggctggtgaagatctttcgcatcaaaattcgtcacaaacttgctgataaacgtatgaacggggtgaaacatcttcagccgctcctgttcattgaccttttcatagtccaaagcgatataatcgccttctgaatgatggttcagctgattgatgattctgtacacctttttcaagcctggagtcgtcactttttccggattcgaagaaattttaatcgtgtctgccatctttccgtcttcttcgatcgaaacaagtttgtaaaccgcgccgagagccggctggtcgtaagcggtaatcagctttgtgcccacgccccagacgtcgatttttgcaccctgggctttaaggttcataatcgtgtactcatcaagatcgcttgatgcaacaacttttgtatctgtaaatccggcttcatccagcatggctctcgctttcttcgacaaataggcgaggtctccgctgtccaggcggattcccgaaaattcaatttgatcgccgaattcctttgctactttgatcgcatttggaatgccggaacgcaccgtatcatatgtatcgaccaaaaagacacattttttatgggtttccgcatattttttaaatgccgtgtactcatcgcgataggcctgtacaagcgcatgggcgtgcgtgcctgataccggaatgtcaaaccgcttgccggcgcggacattgcttgtcgcgtcgaatccgccgataatcgcggctcttgctccccacatcgccgcgtccatttcatgcgcgcgccttgttccaaattcaagcgccgtctcttctccgatcacacttttgattctcgccgcttttgtggcaatcaatgtttggtaattcacaatgttgagcagagccgtctcaatcagctgcgcttcagccaaaggcgcttcgatcctcatgatcggttcgttgccaaacacgatttcgccttcctgcatagaataaagcgaaccggtgaatctcatatcttttaaaaagccgagaaagtcatctttaaagcccagctcttcttttaaataaactaaatcgctttcagtaaatctgaaatcccgcaaaaattcaatcgctttttcaagaccggcaaaaacggcaaaaccgctgtcaaaagggagctttctgaaaaacagttcaaatacggctttcttttgatcaatgccgtcgcgccaatacgtttccgccatattaatttgatataggtctgtgtgtagtgctagactgtcgtctgtaaaacggtgttccaaccttcatttctccttcctcaatctgacactgaggctcccagggtgtttgcaaaatgagaaagagcccagtcgtgtccgtccgggttaaagctagccactgcgttttgatgaatgacaagattaaaccctttattataagcatctactgcggtatggagcacgcatatatctgtgcatacgccaacaaggtgcagttcttgaatatccctttcacgaagcttcagctcgaggtttgtcccggcaaaagcagagtaccttgttttttccatgtaatagacattctgatcgtgttcgtgttttcgataaagcttttcaagcttcccgtataaatcctgtcctgatgtaccttttatattatgcggaggaaacaaacgggtttccggatgaagcgtatcgccggcctcgtgtgaatcgactgcaaatacgacataatcgccgttttgaataaacgtatccgcgagacgcgccacggcgtcttcgattttgcggccgggttccccgcacgtcagcttaccgtcagctgcgacaaagtcattcgtataatctatacatataagagcttttttcattgccgccctccccgccttttgtatgataggtaacattataacttatctaaacggacaagtgaatggcgaatcaatcgaatatggctgtcaagccacgccagcagcggttttttctttttcagaaaaaaacaaaaaccacgggttcgggaccgccttgcggaaggcgcgtgcgaaaacccgcacctcatctcttgtttaaaaccgactgctcaaagatatcgtcctgaacataaatcgattctttctctacggcctcacgcgccgcgagaacaagtccaaggggagtgtccgattgctgatcggacacgatcgaaaaagggacgccttgcttattggactccttgatgtaaggagataaatgagagtagccgatttcgccgttaagcaataatgttgcatccgcttttgagccaagcgcatcgatgacttcccggtatgccttcggacgcagcacttgtcctttagtcaatgcgatgatgaccctttccctcagcgagcctaaaaacagtctgcgttcatccggcttcgtttcgcgtggtccgtacattccctgctgtaaatattgatccaatgattggtcgctcacgtcttagaccctccagttttatcctgctggcagcgttttttaagctgcatttttttatcagtatgcccacgaaaacagcgggcatgagcccgtgctacatttcggtcacccattgtacgatctttttggacagctcctcggccgcatccgactcagccactttcgacaatgaccggtcaagcttttcggcgagttctgctttttcttcctcataggaaatcagcgtgctccactccagttgcggcacagccacaagcgtatgaaattcctttttattttcatggaggtaaacgtctgtgatcatctgatcttcgtttaagatgtttgccttcctgattttcatctttgtcacctgccttatctatctttttcccattatactataaaaaagaaacagcctctttaaaagaggctgtcacaggttcaatgactgggaaccgtccatcacatccgcatctgtgaaggtcgttttattgatatcgttatgaatcaatccgtagtcccctgtttgaaatgtgcccgctcctcctccggaggaatccgtgcacttcggggaaatcgcaaacacatctccaaaaaaggctgcgctgtcatcaacgactcgcctgataaaaatcggtccgacaattgccggcattttcacacctccgccatttaatttattagcatcatatgtgaaaatgggcaaaacgttcagacttcaggattttccgccgtttcttttttatacctctgccttaaacggacaaggcggacgatattcaatgtaaaagccttgagcagggcataagccggaacggccaggatcatgccgagaatgcctccgaagcttccggcgccgattaataaaaggatgatcgtcagcggatgcgtattcaagcggcggccgataatcagcggcgacagcagattcccgtctgtctgctgaacggcaacgacgatgatcagcgcgatcaatgctttcgtcggcgagtcgagaaatgcgataatgacggccggcgccgctccaagaaacggtccgacatatggaataatattcgtcacggcaatgatcaacccgagaatcagcgcgtatttcacaccggcgatccaaaaaccgatgaagcacgccgttccgacgaacagacaaacaatgagctgtccttgaatgtaagccgccagcgtctcgtacaaatccttaaaaatcttcagcccttcatttttatacttgtcaggcaggatcttgacagccaaattcgggaaacggtggccgtccttcagcatataaaacaggatgaacggcacggtaacagccgtgagcgcaatgttggtcacaacgccgaatacagaagtcaggctccctgtaatattttcaggcaggctcgtcaaatattcgccgattgagctttcgattttggcaaccgatacgaagtcctgattcattatccaagtgaaccactgcgaattcgacatttgcttaatgaaaatctggatctgtttcacataggaggggatgttgttgaacagatcggtaacctgctttgtaaatacaggaccgactgctgacaatacaaacccgatgaatgccacaaacaccaaatagatcagcagaatggacagcgttctcggcagctttttctcaagaagccgcacgatcggattgaatataaaatacaagagtcccgcaattaaaatcggagtaaatagagtcgatgcaaatacgatgatcggttcgaaaagaaaagacacttttgtcgacacataaatgataagaagaaccaataaaatttgcagcgtccaaaaatgggtttttgattttaacaagctttgtttcctcccggcttttttcattaatctaaaaactactattcacactaacgtctgtcaactgttttccttccattcatacgaaaaagctttgacagggtttcatatttcagcgccttttgaataaaaaagattgacagctcctcctgttgtaattatcatgattacaacaggagggtggtttgatgaagatcagcagtagatttacgatagccgtacatatgttatccttgatgcacgtccgaagcgaccatttgacatcagagcaaatcgcagacagcgtcaataccaatccggtcatcatccgccaaatcagcagattgctgaaaaaagcgggcttgattgaagtaaagcgcggcacaggcggagcgcacttattacgggatgccggcgccatttctttgtatgatgtctataaagctgtcgaagttgtcggtgaaggcgaactgtttcacactcacgaaaaccccaatcctgattgctgggttggcgcgaatatccaccaggttcttgagcttgttttattaaaagcgcaaacagccatggagaatatactcaaagaaatgtctataaaggaattgactgatctgatcatccaaaaaaagaatgcttctcagtgaggcatgattttttcaactcgttgtaataactatacttacaacaagcatctggcactgtgtttttttcacctcgttgtaatattgttcattacaacggaataaaaggaggtggttccatgtgatcaacacaggcaaattcggatttccatcacattaagggaggacttaacatgacgaatcatataaaagaaatcaactgggagcaaaacaccaactcttacattcagctcataccgaatattgagtacacaaaagtggaagacacttctttgacattacatttgctggtgtaccgcaatccaatggatgcgttatttaacaggaaaggcaatcaggaaacatacccgctgatcatttatttgcaagggtgcggatggggctggacaaaacaggatacatccgcctttatcccccaactggttccatttgtcgagcaaggatatgtcgtggcaagcgttcaatacagaggcagcggagaggcggtgtttccggctcagcttcatgatgtgaaaacagcagtccgctttttaaaagcaaatgccgcccgctataacatcgatcctgatagagtcggagtctggggggattcttcaggcggccatttggctcttttgcttggattgaccgaaggaattgaagaatttgaaggcccggacgaataccgtcatgtatcgagcaaagtcgatgcggttgcggactggttcggtccggtcgaccttctgtccatgagcaagtatccgtccatcttcgatcatgattcacccaattcaccggaatccaagctgatcggcggagctgttcaagaaaacagagtacaggcgaaacaagcgagtccgataagatatgttcacagggaagcgcctcccattctgattatgcacggggatcaggacgatgtcgtcccttatcaacaaagcgtccaattgtttgaagccttaataaaagaaggccatgatgcccttatgtataaaataaacggggccggacataacggttttacccaggctcataccctggacatcgtcaaatcgttcttccgcaaacatttaaagcctggaaaagcctgaacattgaaggccggatatccggcctatcagtgtatattcctctcttttatgaatattttctaaatttttttcagtatatcggtataaagttcaccttcagaaaataagatgaaaacgcttacaaataaaccatgaggtgaacaacgatgaaaaaactggtgctgctcatgcttgttttgctgctcgtgtatccgcatgtatcgaaagctggcggatttaaaggaggaggaggcgatcctggctactggttcgtgggagaccctgttgaacatcccgatcccgcaaaaccgccgattgtatttgtccatggattaaacggctcttcaagtgcgtggtttgacgaaaatgacatggctgaacaggcctggaaaaacggatataatgcggcttttatcgatctccaccccgataaagacatgcaggataacggagcgatgctggccgccaaactgcgcgaaatctaccagcatttcggccgcaaggtgattctcgtttcctacagcaaagggggaattgacagtcagtcggcgctgattcatcacaacgcataccattatgtcgagcgggtgattacgctcggaaccccccatcacggctcacagctggcagaccttgcctacagcaactgggcaggatggctcgccgatattttaggccagaaaaatgacgccgtttattcactccagacagggtttatgaaatcgttccgcgaccagaccgacaatcatcccaatcgttcgaaaaccaaatatttcaccctggcaggcaataaaatcggcgggctcggcagcgttttattttttgggggcgtctatttaaacatgtttggcgaaaatgacggagccgtcaccgaaaaaaatgcgagactcccttacgccacaaacctgaatacaggaaagtgggatcacttctcgattattaaaggaaacctcacatttcctgtatttatgcctttattgactgttcaggaatatgcaaatgaaacagcggccatcaatgaaaaattatcgtaccctttcatcagagggggagaaaatcatggattgagagaagaggagttcgccgttgaaaaaggcgtcaaggaaatcaccgttcactggctgagcaatcattcctcgggaaatatcaaattgacagatccacgcggcaagccgttcaaagatttttcaatcgcaaagacggcagatgtttttgaagggggattcgtccattccgctgccatcaaaaatcctgcagcaggcacatggaagatcgcatcatccgtcaaacaaaaagaggcgtttttgttcattgtgacgttcgattctcctttgaaccagcaaattaaaaacgcagtcaccagagaatcgtcaaaccttgcgaatgtaaaggcgtccgtccgttcgatccgctatgaaaacggaaaacaaaccgagaaaaagtcgctgaaacctgcttccatcaatgcgctgcaaaacagcctgtcattcaaaaaagcgggcttgtattcggtgacgatcgacctttcaggaaaaacggcagacaactcgccgtttaacaggacgatcatccgctctatttatgtaaatgacaaaggggagaaatttgaaaacagccctttgtccgattaaaccgttcttttcatgggagataaggattcatcaaccatgcggtcaagcttcctgattttctcaagcgccagcttatggtcgattttgcggtaatggtggtttccgcccggctcttcgtccagctcatccgcttttttgacgatttgctgcagcttgtttttatcaaggtccccttctggcaaataggaatccgtatgaagcagaatcgccaaagcaatctctttggccgctttccgatcttcgccgaggcggatgagaagcttgtgggcgcgctcggctccctttattgcgtgaatgtcgttttgcttgtatttttcataatcccattctccgtcggtgtaccattcataatggccgatatcgtgcagcaatgccgcttttgtcgcgatatcgggatctactccagctcgcaccgccaggcggtatgcgtgataggcgcaggctacagcatgagctacaccggaacgagttaaatatttttgtgcgattggatgggtgaatacatccattaaagttacgtttctcatgtaaacccctcctttatatatttttagaatcctaacatattttcatgcaaatctcaattgatctggcacatcatattcaaaattgataaataaaaaacaagcacaatcgattcgatgtgcttgtttttttattttttacaaaaactctttaatatcatacactctgccgttttcaaagtcggtctcaagcaggtcgagcagaatgccggccacataagaggtgcttctcagctttccttctgtttgataggttttgaatcgttcaatttcatgaaaatcttttttcgatgatgaacggataacctcttgcatgccggtatccatgatcccgggggagaaagaaatcatcttcaccggatcagactcatcttcctgttcaaagccgaatgttttcgtgaacatatcgagccccgcttttgagctgcagtaggcgctccatcctttataagggtttttggccgcgcctgatgatatattgacaatcgattttttgcctttatatggcttgagccatttggtaaacagctggctgagcatcaccggcgctaacaaattcaagtcataatgcagcctcagttcttccggttcagcttcgccggcgcgcttgatcggcgtcaccattcccgcattattgatcaaggtgatcgaagcaaaatcatgggcttggacagaatctgagaattgccgaaaccacttttctgtttcggcgagctgcgccagatcggcctcatgctggatcagcctgtcatgactgatatcagacttggtccttgaaacagcatgaacaatatggcctttttgcaaaagcccttcggccatcgcggcgccaagcccttttgacgctccggtaacaatggataaatgcatacggcgtccctccttatccattattgtactgattcatcagcccgcttctcaagtgctgcggttttctgcgctaagaacagccaaccaaaagacagccgcaccgacagcaccttacagaacctcggacttttcattgctgagcgctcttattttttctgctgcccgctgactttcggaatcaaaaagaacagaccggcgatgcaaagaaggatcagcagaccgtatagaatgggcaggaagatggattgccggttttccgcagagtcatcttcccttcccgataaggacggatttgccgagaatgacaggtcaagctgctttagctttgaagccacggaattgctttcattcgtgaagcttccggacaggcttttcagcttttcgatagcatcttcttttttcgaatctgtaaatgagaattccttcagttcttctggaattgatatttcctctttgtattccgcctcttcttcctgaaggtagtccgtctcgattttaatatcctgcttttcgtactcgtttggctttacatcgactttatcggtttcctccgccttcgcgatcggagtgaaaagaaagaaggagagcatgactgccatgatccccttctttccccatttcgcattacgcatcatggtcagtctcgctttcttctgttcttgattttgcaaaatcgacaataaaaggaacagcaattgcgatgatcgtgattaaaattaatgctccgattccgagtgcaaactggcttccagttccgtactgaatcgacatatatacggttgataccggattgttaaagctgaagttcggcatcgccaggtcaagcagcggcgctacatagaacagcaccatggcggctgtcgcgattccgcctgcgatcgatcccagcataaacgccgtccggataatggctgaacttgcgacaagcagcaagatcgtaaagaccgaccacatgacggcctgatcgtctgcgagtgagtaaatgttcaaaccgaacaggctgatcatcaggccgacaatgatattcaaaatgccgaacagcgcgcccctgactaagagcggagcattttgataatggtggctgaaatatccgatcagcaagctggaaagcatcacaatcacgagaatgacgaccggcggtacgttttgcgcttttgactctggaacatccccgctgattttcaccggacttgccagatgatcgtatacatatccgtcgtttcctccgaacgcatttccgagaatgccgtatacgtctccgcggataagctttgtcgtcgcgacattttggccccaatttgaattcagggtatccgcttttttctgaacatcgtttacactttcctgaatattgctcgtgtactcgatgacgcctgattgcgtttccgacaaggaaccgagcatgttggacagctgcaaaatgtcatttccaagcgtatcctgcatgctgatgaccatcgttccatctgtcgcatctccctccatgactgctgttccggcgccttccggattgcgcagctgttcagatacggcatttgctctgtctgagatgttgctgagctcatttagcgtttctgtttgcttttcatcaatgaatgcgccgtaactgtcaacaaaatctgtcatgccggtagtatatgcttctatatcttcgtttgtcgccagcatgttgttcttgaggtttttccattttgtggtttcgttttcattgactctgagaactgtatcaactttatttttgctattttgaagcaatccatcttcaagctctgtccctgctttgtactttccagtaacagcaacatgataaaccgatagtagattatagtaatccattagttgattaatgtttctattgacaaaagattgattgtcaaaagcccgtttcacttcagggctgatatcattctcataatacacctttaaatcttcttcgagcttaattattttaccatatattttttgaaaatccttatctctttcttcaatcagtttttgttttaaatcttcaactcgttcatttaattcatcaacttttttattcagtttttctactttttcatctaaattatcaatttttttcttaagctcttcattatgctcttttgttttttgatcaatgttagatttcacaccttctatgttagcagatatggtgcttaattcttttttcaattcttcaagattactgccgtcttgttcatcgggattttcttcagctggaggtggatcctccttatttgtatcatcaacattgtttccgttgtccgcctgctgttcattttcctcagaatttactgtgttgtcattttcacctgtttgtcctgtatctactggatctgtcgaagtattatcttctgtcgttccatcattctcaccaggtgaaggggattcaggctcttctttatttggaacctcaatgttattagacaattcctctaattcttttgatattttctcaagctcagttgtttcatcatccaaatttatttcgatattcttattatcatcttcgtcggaatcatcttctccatcatttccagggtcttcagctatcggtgtgtcatcaaattcgaacaatttttgtcgatactctaggatatgcgactgagattcaatgttctttatgtttagttgtctagcatcagctttataattggaaatcagctcgctctggatcgtgcttatctgaccaagctgctgttctggcacttctacataacgatatttcgccagattctcaagcgaacttccagcaaggctaaactggttatgcaaaccgctgagcgacatcgccatgccgttcatttgttcgctgaagcggctttgggcgctcgcttgtttatctttgatagatgtcaggccgtcttgaatttgcttttcactgtccgcttgtgcagcctggagcagttccgactgcttctcttgatattgtttgtactgattgacgttgtcgacgaagctgtccaattgttttttggattcttcgacgcttgcgttgcgttcttttgatgtgccttctgtttcattgatcgattctttcagtctgtcgatcatctctttttgtctttctacttcgccagctaaattgttggagctcggcttgtaaaaattgtacatcgcgttttggaactccgactctttgtttacgatgctgtcaaactcttttctgacctttttgactccctgtttgacaaagcgccagtacagggaagacattttcttgctcaccgttttttgcgcgtcctgaagctcgcgctggactttttccttgttgacggcgtcgagctggtcctgaattttgaattccagctccgctttttgcggacgctcatggttgtagcttaaaatgttttgcgaaaagtccgacggaatgtagacaatcgcatcgtattgcttctccgcaagtccgctttctgctgcgctccggttgacgaccgtccatttataatccggacggtcaaccagggaagccgagatttcgtttcccagcagcgcatcttgatcaacggttccgtcatctttcaaaacgccggtatcctcattgacaacggcgatttcccttgtcgcgttcgatacctttttcgtcgggttctcaccgatgaaatgaaaaaacaggacgggcagcaagatgatcgtgacgatggcgctgataattttcagcgtgcttttttgttgttccgtcatttcgctttcttcctttctacagcacataaaggaatttgaattttcctctctttgccgttttcaacgatatagccaaagcccggcagaatttccggctcctggcgttcatatgggagctgaatcaagttctgctcggattttttcatcaatagcatcgcgtgtctgacctgcttgacttcgcttgtcagcgaatcatagccttttgtgaactcgctgtgatttccggcaggtataaagtggaaacctaaatgggcgtaagatttcatgaacatcgccattttgtcctgaatcgatgcgtcgatcgtctgctggaaccgtgaaattccgtcgacaataaagaccatcggtgagaaatcaaggttggcgatttctccttgtttaacggcttccaaatacatcgcttcccttgtccggcaaatttcttccgtctcagcgagccagagcagaatgtcgtcttttgtttctagatagctgatttgatcctctgtcgcatattgagaaagccctctgtctatcgaatcaaacacggcgatttttttcgtgtcatggtcaagcaggtgctcgagcatgatcttgatgacgtttgtttttccgcgctgcgtctgacccataatgaggcagtgcttatttttctcgagattaaagtatacgggttcgacagtttcttcatcgagtcccattggaataaggcctctttcaggctgaagcggataatctctcacaaactgtgtgacggaaagctcgagcggcagcatcggcacaggcgccggctttctcatgccttccgagcgttctgcgatcgcctgaatgtcggctttgatcccttcaaacagctcgatatcgttgtccgcttccacaggcataaacatttgtgcgaagtattggttttctttattgataataacgcgtccagggatcggttcaaggctgaattccggccttccgataatcgaatatgcttcagactgatccatcagatagtggacaaccctcgttttcaggttgttcaagagcgactgtctgattgcattgacccttgtcgcggtcaggattaaataaattccaagcgactggccgtctcgtgaaaactggataaattcgctttcgagttcatgcatttcgtctttaatgatgtcaaagttgtcgaccgttatgaaaataaacggcagcttttcctcattcagcgcattgtacatcttgatatggctgatttcttttgcacggaagagatttttcctgtgctcgatttccgccttgatccggaccataaatttctcgatttttctcgtttggtccatcaggaaataatccgcggtgtgcggaagccttgcaagcggaagcagcgttccgttgccaaagtcgaaaatgtagtaatgcaattcttccggcgtatactgttcggcaaagctcatcatgaacgtcgtggctgtcagggattttccgtagcctgacgagccgacgatgccgatattgccgtcttccatcatgcggtagctgatcggctcctggctttgcttttcaggttcatcgatataggcaaagttaaaggcatcggcttcctccgacggatagcgcgttttcggtatgcgttcttcaagcggcggcagccaagggctcgggagcttctcgattcccatctccgcttgaatccgttcaatttgttcgacgactgccgaaatttccgtcacagcctcttttttcgcagcgcgatcagcatcaacatctgataaaggaattaatccggtatctgtgacgatcgccacttcatcctctgtgccgtagccgtcctccatgtaaggggctccgctccatgcagactggaacagttcatacacctcgttgttgccgacttgcaaatagccgcggcccgttaccgtgatggtagccgcatccccgtttttgaggatctctttactgtcattcgcatcctgcaccttcaaggcgaccttgaatctggagttgctccaaatctggtcatcgatgatgccgcccggtttttgcgtcgccaagattaagtgcaccccgaggcttcgcccgatccttgccgcactgacaagctcgcggataaattccggttcttcgcttttcagctcggcaaattcgtctgaaattaagaaaaggtgcggcatcgccgttttcgcttttttctgtttgtaaagctttgtatagtcgttgatatggttcactttgtactgatcaaagagccgctgccttttcttcagctcgctcttaatggacgcaagcgcccggttgctgaagttcttgctgccttcaatgttagtaatcgttccgagcaaatgcggaatgttccggaacggctgcgccattccgccccctttgtagtcgattagcaaaaatgcgacttcatgcgggtgaaagtgaactgccaaagacaaaatataagtctgcaaaaattcacttttacccgaaccggtcgttccggcaagcagcccgtgggggccgtgcgccttttcgtgaaggtttaaataaacaatgtcgtcttttcctttatagccgatcggcacggccaaagatttggccgattcgcttgtcatccatttttgttcgatgccgatgtcatcgacttccttcacttggaacagttcgagaaacgatacggtatcaggaatcgaattcgtcatgcccgtctggtggtcaagcgttctcagcgtccgggaaaactgttcgttgtcttccctgttgtggtgatccagctgaaacgggatctggacggctttcttttgcttgatcagaatgtcgccttcctgttcagtaatataacgaacaagggtatgaatgttttcggacaggctttcttttgtctctgccgccacgattgtcgacactccgaggtgtttctgcttgccttccaaatattctaaaatgacgtgttctgcgatgagctgctgatttgtgatgataaacacaaagtgcggcttaaacaaagtcttctttttgttttcatctaaatcccgttctctcaaaatctcatatatgcttgaaaggagctgatctctcgtctgttcgttgtaaataaaccctttcgcataaatatgaggcatctgaaaatgcgggagccacttcatccattcccattcttgatactcggcttcgtcaaaaataaagacaaagcgcaagtcatgatagctgtggaaaaatgcgagctggccgacaagctgatgaatttcatttttgacgacggacaattttccgacgacgcccatcgggccttcggcaagattcaccgtgatcggcgcatttttcagctctctgtagacctcttccattttttgcgtttgttcaaggagatggtctgtatcgcggttggccaaatctccgccgttcaaattgatttggtacgaagatgcaacatttcccgttccaaggcggatttgcagaaaatcggcgctttcaatcgatttttcccaaattcgtccgctgatctcctttgttaaatatttcattctctcaaatgtaggaaaatggaaatcaagtacgaacttttgtctttctgcaagttcatgcagctctttctttttgttttcaaggtaaagggtatagacccgctctcttttttcttctctttttttacgctgatttttgtcgcggaagtactgcacggttgacgtaatcagcgtcatcataaacatcgcaagggaaacgatgataaagatcccccgcggctgaatgagcgccacgatccccatgacgatcagcatgacgagcggaggcagaatcatcagccataggcctctgttgtctccgtcgctttcctgtgccgggaagctgaaggatactttttcatccggcaggtcgtaaatcattctcggcggcctgcggtattgcggatatttattttttgtctcggagctcggcttaagaatgttctccaaagacgtatcaaacttcccgaatccctcgatttccaagaggtcgtcttcaacgatgcgaagaatattcagtccaaatgcgatttcgtctccattttgcacggagacaggggcggacacttcttctccgttcaaataaattttcgcgtcattcggcaggacattccattgcccgtcgaggcggatgaaagagaacgtacctttttctccaaagaatgaatccgtttcattgaaataaacatccgcttcttgatcgagggaagaaatgacgatttcctgtctctctcccaaatagtaggcaggaacgctgtcggcttcttcggctaaaaagagcgtcagctgttcagcgccgctttggacggacgcctttccgccaagctttaaagaagagaccgtctcccctcccagctgcacgttcaaaacgtctgagtccttctgcttttccagtgtcaccgggcctttttcaaatgaaaaatgcttaatcgtgacagaatgtttcaaatccggcccgatggtgagcgtgcggctgttctgatcatccagttttattttttgatagtttttatgataaaaaatccataacagactcatttctccgcctcctgccaacaacaggtgttttcgcttttatttgtcatcttttttctttttgtcttccttttctttattttcttttttcgcctgttccttctcggccttctccgtttcagcctttgcggcctctacgtccgcctggttttgctcggtgtttgcctgctggttttcttcagttttggctttctgttcatccgctgtccgcttcaattcttcaagttctttttcgagcggatccagctgtttctgccgctcatcactggacaatttatcatcggctttaatgtcatctgtgtatttcataagtgccaacatgatctgtgcattgttttccagcttacgggccgtctcaagcgcttctttattggcgccgcgtccgatctgaatccagtaaaggaaattattcggatcgacttgaagcgtcaggctcttcatggcatcttcctgtaaatcggcttccttcagtacattgtcaacgatgatatacgaataagccagctgatactgaacagaatcaggcatctcatcggcatcatatttatcaagcgtactgatgactttgctgtactgtttatttaagaagtagcggttgctttcgataaacgcctgctgtttcggctgcgcgaagaataatgaatagaaggaaaataaaacagccggtattaagcataaaattagtcctaaccctatgtacctttgaatcttccatttcttcttcggaagatggacaagcattttttcttcggcatccagttcatcgatcctcttttgaatgacggctttcaaatcgccgtatgtcccgcttgtgatgatgtcttttacctgatctgaaaatttgatggtttcgctgtattttaaatactcttcaaaagaaaattgcccgtcgacagcaagcgccgcggcggctttcacttcattgaaaagtctttcttcgtcgtgttcatatggcggaatgctttctttcactccataatgtaaaaatttaggcgtcaaccctttgtcaaaaacaatgttttcaggcgcagcgatcaggtgcagccttttaattgaatgttcttcaacggctttcacgagctggtacgcgaatagccacttgctttttttatttttcccttttatataacgaaattctttatattcggaaggaggctgaatcataatttggacttcatcatcggtcatgacggcttctttattaaaggaaggatcgacttctttaatgacgtttgcttccaagccgttcacaagattgatcttctctctttgaaaacgaaagatatatgtaccgtcttctttcgtcatgacggcctctaattggtcttcgagatacgttttctttttctctgccattcatccagatcctttcataatatttccagacggtcacctgtcgtaattccgcattgcgataatgtatattcgcctgaaaaaacggcatctttatttgtcacccttacccagtagccttcccggggaggcaccggtatgcttttggcttgccacgcaatgtcgactacctttttaacagaatggtaatccgacagtctgaggtcaaagacgctgccgtcgtaatgttttaaatcgatggtaatgtcaacatacaccagttcatcacctctcaatagaaaaagcgccgtcatcttcttttgaattaggcgcttctctcattcttctaatctgtaaattagccgcggatttggctagcgatgtcttggtcagtgctttcaagagtgttagcagtctgatgaagctgtttagaaacgtcgcttagaagttcagccattttaataaaagaaggtcttagctcttggtattgctctgagaacgcacggcttgattcaccttcccacatatcttgaagctggttgatcatttgatcaagacgctgattgacctgctcagtcacatctccgctttctttttgatatctgtcagccatttgccgcagttcagccggcgtaacacgaatgattcctgacatattccttatacctcctgcgctattcgccctagatatgggctaaataacttatttttttgaacgcttttattataaaaacaagattgaggcacagtcaaacaaatctgttgttattttacaaaatgagtctaaaggtttatcatccctctatttccacccagcaaaaattatagaaatctagtaaaaatatctcaattttcttctttcggaacattcgcatcaaaaggcatggttcaatgtgactatctgagactaaagcgtttccataggataaaggaaggattgcctatgcgcaaaaaagcccgcctctcttagaggcaggcttgtcttgatcagcccgctttcaagccggctgacttttgtttttccttattatagtggtgcaaaaagaaatcgtcagtttccgcccgaatgactttccataagagcacaagggcgatcaagttcgggatcatcattaatgcgtttgccgcgtcggcaaaagcccatacagtattcaggcttgcgactgcaccgtaatatgcagcaatgacataaacgacacgataaagcggcacccattttaaaccaactaaatattccagacatttttctccatatacataccaaccgacaatggttgagtagccaaagaaaatcaccgaaaacgtgacgatgtatttgcccgcggctcccagcgaagaagcaaacgcggcgtttgtcagcgcgccggcatcaagcgatgcatcgtgggcaacaccagaaagcagaccgcctgaaggatcccagaatcccgtgataatgaggacaagccccgtcatcgtacaaacgatcaatgtaacgatgaaagttcccgtcatcgcaaccaaagcggccttgacggggtgatcggatttcgcgtttcctgcgattaaagcagcggtaccaagaccagcttcatttgaaaagattcctttcgacattccgtttctgatcgcctcagagacgaccatgccagtaaagccccccgcggctgacaccgggttgaaggcgtgataaaaaatcagctggaacgccggaatgatttgatcataatgaaggaaaataatgatcagtgatccgccgatataaagtatcgccatgaccggcacaaaaatgctcgcaaccgtgctgacacgctgaaaaccgccgaagatgatcgcagccgtcaataccgcgagcacaaggccgatgatccagccgggaatcccgaagctctgtgtaacgacttccgaaatcgtgttggactggacggaatccccgattccaaaagaggcaagcacacctgacaatgcaaataaaacggcaagcggcttccacttcttcccgagccctttttcgacatagtacatcggcccgcccgaatattcgccccgctcatttttgacgcggtatttcgtggcgagcaatgcttcgctgtattttgtagccatccctaaaagaccgacgagccacatccaaaacaaagcccccggacctccaaccgtaatcgccgtggctacaccggcaatatttccatttccgatcgttccggcaagcgttgtcatcagcgccttgaaattgctgacatcaccgtctgctccggctgattctttttctttcccgaatgcaagtttgaatgcatatatcaatcttttaaattgaagcccccgcaggatgaacgtcagaaataaaccggttcccgcaagcataacgatgcccgggactccccataaaaagccgttgattttctctagaatcgccaatgttcctactcctcttatttcagaataattaaatttggtttaatacatcgccgtgtttatgaaaaataataaatcaccagcgacttttttgttgattttaacaaacaactatattcataataaaagtaagatgggtatatgtcaaaattttttcatgcaaacataaaaagtaggggttttttatgaacaatcgaaacaatccttttaaatatcaatatgaccgtttagaagatgtggcagatcatatcagcgaggtgctggactgtccgattacgatagaagacatcaaccaccgcctccttgcttacagcacccacagcgactacacggacccggcgagaacgtcaacaatcatcggaaggcgcgttccggaaaaagtcatcaacaagctttggaaggatggaacgattcccgccttgatgaaaaccgacgaaccgatcagggtcgaacaaatcgatgaagtcggcctgtcgagccgcgtggcgatttcaatctggaaaaacagcgaggttatcggttttatctgggcgctggaaagccaaaaaacgctgtcggaagacgagcttcaccttttgaagctggccgcggattccgtaaagaacaagctgctgccttatcaggtccgaaaaagaaaaaatgaacagcgcagccaggaatttttctggaagctattgaccgggcacatttcggaagatcaggaaatctccgacggctttcaccagcttggcatcggagttccttcaacttattcggtcatcatcatccggctgaaagacgaaatcgaagaaaaaaccgaaaagcagctccattacttgctggaaacgacgcagcagctgcaaatccttctggctacaatcgactataatgagctgatcgtcctcgcttcgtcaaaaacggggcaaaaagggcagccgttcaatgatttaaagcaatttgccgcgaatatacaaaagcaacttgaagagcgctataaactgaataactgcacgatcgcgatcggcggaatgtacagcttgatcacccttgtacaccagtcttatcaggaagcgctctcggcgctgaaggtcaaggagcgttttcccgatgagacaaggcacctcgtcagcttttcagagctcggcatctaccagtatctcgacgtgctcaacgaaaaacggaaacatgcaagctatccaaactattctttaatgcagcttgaagcatatgataaagagcaccactccaatcttgtcgagacgcttgaacaattcatcgaatgcgacagcaacgtcaacaccgccgcaaaaaagctgaacattcacgtcaacacgctgaattacaggctgaaacgcatcagcaaaatcgccgaaatcgatttaaaaaacatcaatgaaaaatttacgatttatcttgaaatcaagcttcgcaacatgcatttgtgaaattccacaaatgcatgtttttttatttttcgattcaaacaaagaaaattctaaaaagtcagtataaactaaagcaacagcatttttacagaaaaaggaggaatgatcggatgattatcggcgtaccgaaagaaatcaaaaacaatgaaaaccgtgttgctttgactcccggtgcggcttctcaattgatcgcggcaggacaccgcgtcatcgtggaaaaagacgcggggactggaagcgggtttgaaaatgaggattacgtctcagtgggagccgagatctcagaacaagcggaagccgtctgggaagcggctgaaatggtgatgaaagtcaaagagccgctccctgaagaatatccgtattttagagaaggtctcatcttgttcacctacctgcatctagccgcagagccttccttggctgaagcattaaagcagaaaggcgtgacagccatcgcctatgaaaccgtcagcaatggccgttcccttcctttgctgacgccgatgtctgaggtagccgggcggatggccgcccaaatcggcgcgcagttcctcgaaaagccgaaaggcggaaaaggcatattattggccggtgtacccggagtcgcgcgcgggaaagtgacgatcatcggcggaggcgttgtcggcacaaatgcggcaaaaatcgcggcgggcctcggagccgacgtgacgatgatcgatttaagcgcggatcgcctgcgccagcttgatgatcaattcggcaatcaaattaaaacattgatgtccaatccggtcaacatcgccgatgccgtagcggaagccgacctcctcatctgcgcggttctgatcccgggtgccaaagcgccgactttagtgacggaagagatggtcaaacagatgaaaccgggctctgtgattgttgacgtcgcaatcgatcaaggcggcatcgtcgagacggtggatcacatcacaacccacgacaatccgacctatgtcaaacacggagtcgtccattacgctgttgccaacatgcctggcgccgttccgcggacatctacagttgcgctgacgaatgtaacagttccgtatgcgcttgaaatcgcgaacaaaggcgcggaaaaagcgattcttgaaaaccctgcgctaaaagccggcgtcaacacagcaaacggccatattacttatgaagccgtagccagggacttaaactatggctacgttcccgcagagcttgcgatcgaaaattcgtcgtcagccgccggcgcatagcatcaaaaaaacagagcctcggaaaatatgcccgaagctctgtcttttttttatgattccgttttccggcgatcctgaatcaattttgccgcaattgcagaaacaggaaccgccccaaacaggacgattctccacagcgcccggtcagaggcatcgccgactgcggcaaacagtgccagaactgccgcagccgtcagcaataataaaacagcaaaagcctttttcttgaatgatgcaatgaaaagccaaaaacaggcgctcagcattaaaaatatgaacagctgtacgaaaaacatattcatcctccccgctaatcaaagctgtatctttcttctttccacggatttcccctaagatggtagccgtttttctcccaaaagcccggatggttttcctttgtaaactgaatgcccctcagccatttggcgcttttccaaaaatacaaatgcggcatcaccgctctgagcggaaagccgtgctccggcgtgagcggggcgccgttatgggaatgagccaaaagagacgaatccttcaaaaagtcttcgagcggaacattcgtcgtccagccttcctctgcatgcaagatgacaaatctggcttccggaagcggctttactctttcagcgatctcctttgtcttgatcccttcccaaacattatcgagcttggaccagcctgttacacaatgaatgtcattggacacttcgctttgcggcatctcatgaagatcatccaacgtcagcaggagcggctgttcgacaagtccgtaaatttgcaaattccattttgacaggtcttcgtattccggaacatgtcctgcatgaagaacaggaaaagatgttgtgacattttggtttggaggcaccctgtcggacttgtgcggttttgttttcccaaaaaacacgaaagaaccccctttgttaactcgaataaaaaagtggttgacaaactattttgtgatctcttacgataaagttgtgtgaatcactgaggaggaacaaagatcatgaataataaaaaacttcgcgccggcgatatggcgcttgtcggaatgtttgccgctctgatggggatcggcgctaatatcacttcgtttgccccgtttctgcaaatcggcggtattccgcttacgatgcagcctttcttctgtttgcttgccggacttttgctcggccgtaaattaggtgcgctgtccatgattgtctatgcgttagtcggctttattggcgctccggtattcgcttctttttcaggcggtatttccgttctttttaaaggaagcgcaggctttattctatcctatattcctgccgcatatgccgcgggctggatcacggacaaactatccgaaccgaaaacaggccactttttcgcagcctcattgatcggtacgctgatcatttatctgatcggcgtcaactatacgtatctcgctttttccacttggctcaatacaccgatgtcatattcagccgtttggaaaatgatggcctggttcttcgtgaaagacttggcattctccgttctgctcgccgcgctcgcctcaaaggttttccgggcggttcaaaaaggcgcaggcttcagaagaaatccgactttttaataaagagagcccgtggtgcggttctctattttattttaacaaacgtaaagaaaaaaattcccctcgtttgaggggaatttttttaaagaacaatcgccgcgatccagccgaacaaaatcagcggaatattatagaagatgaatgtcggaacacaggtgtcccaaatgtggtggtgctgtccgtctgcatttaagccggatgtcggtccaagcgtgctgtcgctcgcaggtgaaccggcgtctccgagagctgcggccgtcccgataatggcgattgtcgccatcgggctgaagccaagctgcatgcaaagcggaacaaatatcgttgcgataatcggaatcgtcgcaaatgaggaaccgatccccattgtgatcaataagccgacaaccagcatcagcaatgcgccgagcacctgattattgctgatgaaacctgttgacgcttcaacaagcgctttgacatcgcccgttttttcaagcacattggcaaaaccggccgcggccagcatcacaaatccgataaacgccatcatgttcatgccgttagtgatcaattcgtccgcttcgccgcgcttcatcgctccgcttaaaaacaagaccgccaaaccgctgagcgcgcccaagatcattccgtcgacgtctaagctctgagacaaatagagctgtacgcttaatgatacagcgatggccaaaacggcaatcgaaaggcttttcttcgtataggacgccgacttttgaccggcgatttccttcatttcatatgtgcgaggtttgcggtacacaaaagcagcaacggccaaaccggcaatcatcccgacaatcggaatgatcatggcgattggaatatcagccaatgtgacagaaaggcctgcatctttcatattgtctttcaaaatcccctggaaaatctggccgaagccgacgggaagcaaaatatacggagctgtcaatccgaatgtcatcgcacacgcaatcaggcggcggtccacttgcagctcattcaaaattttcaataacggcggaattaaaacaggaataaatgcgatatgaaccggaacgacattttgagacatacaagaaataattaaaatcacgaagacgatcagcgcttttgaaagggttttgcgccttgtatcgccttctttgccgatcagcttgacagcagcttcaaccatggcatccggaagacccgttttcgtcaaagcgactgcaaaagcgccaaggagcgcgtagctgactgcgacggttgcgttgcctccgagtccttccgtaaatacgctgaccgtctggccgagaccgagaccgcccgtcagaccgccggcaagagcgcccacaatcagggctagaacgacattgacccgcagcaggcttaatataagcatcacaataacagcaatcacaactgcattcatatttgaaacctccgaacaaacactttagtttgctaatgtagtagataattaaagtaatgaacgtatattaccacatgttttatgaatacgtcaatgagacatctgcgttttttccataaaaaaatccccttctagcaaaggggatgaaagactacaaatttcccgaaaaccgctcgacaaacgtgacaagcgttctcaccatcacgcccgttccgcctttcggtccaaagcatgagttttgagctgtcgttgccgttccggcgatgtcaaggtgaacccatggcgtctgctcggcgaattcgccgaggaacgttccggccataatcgcatggccttccctgcccggtgaattgttaagatcggccatttggctgttttttactctttttttgtctttttcagtaatcggaagctgccaaatcgcttctcccgcttcttcagccgcctgtctcacctgctgataaagcggatcatgatttgtcatcgctcccgtcgtttccgttcccagagctacgacgacgcctccggtcagtgtcgcgacatcgatcagcacggaagctccgtggtgcttcgcatatgtcagtccgtcagcgagcgccagccttccttcggcgtccgtattcaagatctcaatcgtcttgccgctcaaggaaacgatgacgtcgtccggcttcattgcgcttcccgaaatcatgttatcagtcgacggaatcacggcaagcacgttttgttccggcctcaattcgccgatcgcttccatcgctcccaaaacgctggcggctccgcccatatcggacttcatgccgacaatcccgctctttgtcttaatcgaatagcctccggtatcaaacgtaatccctttgccgactaaaccgatgacgtcatcccatgtttcttttccttgatatttcaagacgatcattttcggcggctcttctgatccttggttgaccgcgaggagaccgcccatcccgagctcttccatttcagccttttcaagaatttcacattcaaattcgtatttcgccgccaattcagcggcatatgacgcgagatccgccgctgtcagcatgttccccggcatgttcacgagggttctcgccgaattcgtcgcatttccgtacacctgtccgacatgcagactcgcctgaatctccttcaggtcatggtctgtcaaaacatagacgctttgcagacattgatcaggcacatttgatctgtgcttgtaatcctgcacttcatagcatgacagcatgcacgattcagccaatgcatgtgcggcgtcagcagctgggacttcttcggatacgaagctgtcgagcatgacggttaactcctgctttcgatctttgtgaatcagctgaacagcttcggcaaagcactgcttcgcatcctcgaaggtaaattccgcttcacggcccaatccgacgatataaatgcgtttgactccctgaagcgaaggggtaaatattttagacactttcgcttttttggaagatacatccccgtctttcagcagctgagaaagctggccgttcaaaaggcggtcgatttcttcagccttaccgtacagccggatttttttaaacagtccgattaaaagcgtttcttttttttcgaaatctttaaaggcataaaacatgcgttcacagctccttatcagcaaagtgagtaaaattaaaacaacaatgttataataggaaaaacattttttcccgatggggtttcatatcatatattttagcaaataactgcgtgcttttctgaattcatctctattttctttatagaaaggatgttctgcaaaatggaaatcctcacaaactttcctttgctggcgagctttgccgcgatctttttcgctcagtttatcaaggttcccatttactttgtcgtctcaaaaaaatgggattggcggcttgtcacaagcacgggcggaatgccgagttcacactcagcggccgtcacggcgctctcgaccggtgtagctcttgatcacgggatggattcttctttgttcgccgtttccgcaatatttgccgttattacgatgtttgatgcaaccggagtgagaagacatgccggagaacaagcaacagtgatcaaccggcttgtccgcgattttaaccgctttgtcaacgaagcgaaggatttccctaaaagccatcaggaagaaaaacagaaaaagctgaaggaactgctcggccatcagccgattgaagtgtttttcggcggcctgaccggcattgcactgacgctgcttctcgattatttattgatgtaaagcaaaaaaacgtttaagacgccaggtcttaaacgttttttcttattctttcgccattttatatttttgtctgaatacttgcatcgatttattttcattcagcttcaggagatcctcttcggtaatggtgccgtttccttttttaatgacataaacatcaagtgtttttttgccccattctttataaacatcctcaaccgtctcatagtacaaatcgagccggtttcccttaatggctgatccggtatccgcaacaaccccatagccgtagtccgggatgaacaatatggtgccgatcggaaagaccgacgggtcggctgcaacggttgaatataaatctctttttactttgactcccgaatatgtaatcccgtaatcgggatgatgaggctgttttcccgttgattcagcccctgctgtatatccggtcgcggtgactttttgcttcggatacttgctccagtcaaacgcgtcttcaagcgatttcggtttgtttttaatttgttctgcggcagacagagacgtcttttccgctttttcttccggaagtgatttaaaggtgagcatcagctgtttcaaggacagatcgcgttcttttgcccagctggatatatcctgtgcctccacgcctgaaacggcaaagaaggtcgtcataaaagcaaggacaaacaaaactgtcatcaagaaacgccggaacatagtcatcacttttctcaattcttccactcctctcaccatctagttgtttccaagtggaaaaagaaatattcagatggcggaaaagttttgagaaaagtgaaaaaattaaccgcaaaaaaaccctctcccttgaagaagaaggcttaaaacatttgatatcccctttttcgcagcgctttgatcgtaacgcccgacaacagggctccggccattccgctggctaaaatgatgatatcggcagcagccaaagaagccactctgtcaaaaaggccggaaaatgcctctcccggcgcctctacatagcgaatcagcttttctttattcacaatgaaaaggcatacaattggataaatgacagccatgatccatgacattctgagcagcatattcagcagaaaaccgatgccgaaaaacaggacgaaaaataagacaactgaaatgatgacaactggtaaactaatcaaagcctccacccccaattcacctcttttagtgtacattggggaaggaacttgagtcaatcattggaaagctgtgatcaacggtcttttcctgttcccttgcagttgctgcacgtttccgaaccgccgagcagaagctgaaaatagccttttcctgaacagaatgtacaggtagattcaagtcgatgggttgacgttgtcttcatcggatacacaccttttttcttaattttctgataatatatcatgaacgttgtcaataataaagtcagaaaatataacagatcatttgatgtaagcgcttaaaagcgaagctttctttctttttctttcgtttttgaagtttttagcctgaaataaaaagcctgcagaggaagctgcaggcttcagcgtgtcgacaaaccctcgttgtcagacctgctaagtcggtgctcatgaatagaggaaggatcggcggctaaccgcccaggcatcctgcctgaacgccgccgtcatcaccttctgtgaaagtctgatcagaaaaatttaaacttgccttttttcagaacaagtcccggcccgccgatcatgaaaagcgagcggttgtcgatgatttttttcatcatggacgccgtcgttcccgtcatctttctgccgaatgcgacgccgattgcatcgtgttcgccgagagaagcgacagagcctttgttatcaaatgagaacgtttccgtttctttgccgtgaatcagtgcggccagattgtttgcgcacgtttcgccttgctgcatggaaatctgcgcagtcggcggataaggcctttcggtttcttcatttatgattaaagagcagtctccgataacaaatatatcatcatggccttcaacgcgcaggtcaggtttaaccttcacacggccgcgcatgttttcaaagccggattcctcaatgatcgggttgccgcggacgcctgcggcccatacgacagtgcctgctttgatttcttcggtctgatcgtcttttccgacgatgattccgtcaggcgtgcattctttcacggccgtgccgattttgaattcaacgccttttccttcgaggtagttgaccgcataatcgacaagctccggttcaaagcccgggagaacagacggcgcggcttccacgcaaattaaacgaacctgctggcggtcgatatcgtattcgcggcacagctcaggaatgcggttggccatttcacctaaaaattcaatgcctgtaaaaccagctcccccgacaacgatcgtcaggcgttccgggcgcttctcggcttctgtgttatacgtcgcgaactgatattcaatgtgctcgcgaagctggcgggacgaattgatgtttgaaatagagaaagcatgctctttcaatcccgaaattccgaaagtttcagggacggagccgagcgccacgacaagatagtcgtaactaagctctcctgtttcaaggacgactttctttccttctttatcgattttctttaccgtatcctgaacgaaattgacacgggatgtattgatgacgtctttaatctgatagcggcatctgtcatgatgaagcgtacctgcgctcgcctcgtgcatccaggtcgtctcataatggtaattgtgcttgttgacaagcgtaatatccgcttcattgatgccgatttttttaacaagtctcgtaacggtcattaatccaccataacctgcacctaatactactacttttggcttattcaacggaatcacatccaccttttctgtattttactgctaagccggattaaaaatagcctttgggttatcttctgccggcttccggctttttatgaaaaaaagtttgtgaaacccttcactttagtttgccgaacaacggaatgtttttcggctgtgcgacgaaaaatattcacgaatcgttaacaatttgttcacaactacatcatagccgcttgcaattgctttttcaaggttaaatatgctctgacggtattattttccgcgcctaaaaaaacagacgcgctcgtatttattttatgtgatatgatataattaagaacaattttcatttagggggcattattttcatgcgtgaagacacaaaagtatatgacatcacaattatcgggggcggccctgtcggcttgtttaccgcattttacggcggaatgcggcaagcgagcgtcaaaattattgaaagcctgccgcagctcggcggtcagctgtccgctttgtatcccgaaaaatacatatacgatgtagccgggttccctaaaatccgcgctcaggagctggtcgacaatttaaaagagcaaatggcgaaattcgatcagaccgtttgtttggaacaagccgtcgaaagcgttgaaaaacaagcagacggtattttcaaactcgtcaccaacaaagaaatccactattctaaaacggtgattattacagccggaaacggagcattccagccgagaaagctcgagcttgaatctgcggcacaattcgagaatgcaaaccttcattactttatagatgatctgaatcaatttgcgggcaagcgcgttgcggtattgggcggcggcgactccgccgtcgactgggcgctcatgctggaaccgatcgcaaaagaggtgtcaattattcatcgccgcgataaattccgcgcacacgagcacagcgtcgaaaacttgcgcaattctaaagtcaatgtattgacaccgtttgttccgaccgagctgatcggcagcgagcgaatcgaacagatcgtcattgaggaagtgaaaggcgagagaaaagaaatcatcgatgtcgacgatgtgatcgtcaacttcggttttgtttcatctctcggaccaatcaaaaactgggggcttgaaatcgagaaaaattcgatcgtcgtcaagtccacaatggaaacgaacatcgagggattctatgcagccggcgatatctgcacatatgaagggaaagtcaagctgattgcgagcggatttggtgaagcgccgaccgctgtcaacaatgcaaaagcttatatggatcctaaagcgcgtgtgcagccgctgcactctacaagcatgtttgaaaacaaataaaaatgaaaaggagcctgacaccggctccttttcattatatgatattcaaatatgagaagatcgttcccaatatcagcacaattgttaagatgccgacgactcccgccgcagtcaagacaatccggtccgtaattttctgtgattttggaagcggtttttcgcatccgcatgcctcgcagacttttgaatcgtacggcgtaagcccgccgcagcttctgcagttgattttttccatggttgaaccccttttctttactgggcttggacactaaataaacctgtccagtatagaataacaaattgacgaatagaatgtcttaagattcacaaaatattcttaaatgaactccaaaaaacccttgttaggaagtgacgatatgtcttactacaacaatcgcaatcaagagcctctgccaaaggaagatatcagtacgtgggaatgtacggctgaggactgcaacggatggatgagaaaaaatttcacgagcagcgaccgccctttatgccctctgtgcaacaaggaaatgataagcggaagccgctatatcacctctatcaccaacaacacgagcaatctgaatcgcatctttaaccagaaataaacacgggttgtgttccggaagcccattgcaaaaaccttgctcaacactttgagcggggtggctgcattgctcctcttcgcgaagaagcagaaaaactatgctaaatctttcaccaatagaatctcatcccgaatcggaatgccgttatcagcgacaaagggaatttccggctttacttttcttgctttgtcaactgcgtttacatacaactcggccaaagtatagcccctcttttgataaaacataagcgcccgcatattatcgttcgtcgtgatcagtttaatcgatttacactgttttcgctttgaaacacgctccacttcttgtaaaaggagtgagccgatccctttgttttcgacaacactgtccaaagagacgacttcacattcgtttccagcgatgaagtacgtaatcaagcctttaatgtcgcttttttcatctgttacagcgaatccttccaattcatcgcagcggaatgttccgtgtgaattgaccatttccggacttccccaatgtgtatgaaaaaacgcggtaacgtccgcttttgacaaggcgtgcgttgatacgagtttcatttctttttcccccagaccataataaaacgccttttcatcacgatgaagcatcgagatgaaaggcgtttttttcattgcatatcgttgaccttatgtcagcactcttcaggcttccccgcattcgctgcggttctgaatgatgatccgcagccgcatgaagcgatggcgtttggattatcgatggtgaagcctccgcccatcatcgattgtttaaaatcaatgaccgtaccgttcatgatatccagactttcttggtctacaagcactgtgattccatgctggacgaattcattgtcgtcttcgtttttttcatgttcaaaacccatgccgtatgacaggccgctgcatccgccgccttttactccgattctcaaaaatgcgttctcctcttcatgctctttcatcatatccttgatatgaagagcagccgcttccgtaaccgtgaccgttttttcgctcatgagattacacctcctaaaagctcatgtgtacctttattataaagtcgcacgtccgatttctcaaacagaccgacttatgatataaaaaactcgccttcacataccgtttcagcgggtcccgtcatcatgacgcgtccgtcgtttttccaattaatgatcaaatcgccgccggcgagatggacggtaatgtccgtgtcccgtttggaatagccgttgagcaccgaactcactgcggctgcgcaggcgcctgttccgcaagcctgggtaattcctgatcccctttcccatacgcggaaatggagttcattttcgttttcaacttcaacaaattctacattaaccccttccggaaacctttcatctttttcaatgagcggtcccatcgtcgtcagcggggctttttcaatatcgtctaaataaaagacgatgtggggattgcccatggatacagcggtacccttcatttcacggccgccgaatatcatcttttcattgatcgtctctgaaccctgttcaccccgcatcggcatatctgatttgagaagtcgcggttcgcccatatcgaccgtagccgatacaacttttccttcatccacctcaacctgagcctttaccaagcctgaaagggtttcaattaaaaaggacgtttcctctaccagtttatgttcatacgcgtattttgcaacgcagcgcaaaccgtttccgcagtttttgccttcagatccgtcgctgttgaaaatccgcattttaaccggcgctcgatctgaaggacagatgagaatcattccgtctgaaccgattccggtgtaaacggaagacactttgacggccaaatccgacaacagctcctcagggagatgttcttcaaactgattgacgtatatatagctgtttcctaagccgtgcattttagtaaaacgaaaagaattcatagccgcctccacatttttttctttcttctagtataaaagctgaaagggatggatacaatatggctatcccccgtttttcatacataaaagctccctgcattcatttgcagggagcttttatcatgttatccgataaacattccggcgatcgccgcgcttaaaaggttggccaatgttccggccgcaacggctttcaagccgagacgggcgatatcggaacggcggttcggcgccattcctccaagtcctccaagcaaaatcgccacagaagacaagtttgcgaaaccgcacagcgcaaagctgataatcgaagctgttttgacggaaagctgatcaaacatcggagcaaaattggaataagcgacaaattcgttcagaacgagcttttgaccgataaagcttccggcctggaccgcttcatcccatggcacgccgatgacaaaggcgagcggggcaaatacatagccgagaatatattcgagtgaaaggtctttaaagccgaaccatccgccgactcctccaagaattccgtttaaaacggcaatcaaagcaacaaaagcaagcagcatcgcgccgacattcaacgcaagagagagacccgttgatgccccttttgccgcggcatcgatgacatttgctgcgtcttcgtcttcagccatttgaatatctttttcttcaattttcggtttttccgtttcgggaatgagcatttttgccataatcaagcccgcaggtgcggccataaagctcgctgcaagcaaatattcgagaggaaccccgagaagggcgtaaccgaacaaaacagaaccggccactgaagcgagtccgcctgtcataacggcaaacagctctgactttgttaagtttgcgataaacggcttaattacaagcggcgcctcagtttgcccgacaaagatattggcagctgcagaaagagattccgttttgcttgttccgagcagttttgccaatccgccgccgatgaagcggatgatcacttgcatgattcttaaatggtaaagaactgtaatcagagatgaaaagaagatgataacaggaagaacgcttaaagcaaaggcagcactgtcgcctacttgtaagagaggcccgaagagaaagctgatgccttcattcgcataattgacgagatgctgaacggcttttgtaaaccaaagaaacgcttccctccccgtttcccatttgagaacgatgaatccgaacaggagctggatcgccaaaccgattaaaatcgttcttatgttaattttgctcttatgctcggaaagcaggaaagcaatcgcgaaaatcgccagaataccaagaagtccccataaaatgttcatgaccacacctcttattattatttaaacttttattaagatatcaattaatgattggcctgtccacaaaaattttcacgaattttttctctttttatgtaaaccctttcatttaaaggctttgcatgaaaaaacgagatcaccaagatgaccccgtttttaaatgagttcattttcatcaatgaacttgtatatattttcgaccaattcagccggattattcgctgtcaccatttctccgtttacaagagcatacatcgtctgcatgcattgtccgcagtaactcaggcagccgtattcaacgacatccaaattcggatctttctccaatatttcctttgcctcctgagaaccttgggcaagattgctgacgcaaaactcaacgattggaaacactatatttcacctcacatcgcctttttttatcgtaccctaaatgcgtttcattagtcaaagtttaaggctggagaataaagcttttgtaacatattaatactttaaagagttttactaattatcgattctaggcgttagtgtaggttattttcccgagaaatattgtgattttacatcaaattagatataattctagagggtatttacatagttttttattttttgcagtgtaaaaggtgagtttcttaatctgaggggaaaaggggaattaccaatgagaaatttagtcttgctcggcggcggatacgggaatatgcgcatcattcatcgtttgctgcctaatcagctgccagatgatgtgatgatcactttaatcgacagaaacccttaccattgtttaaaaacggagtactacgcactggctgcggggacgatttccgatcatcatatcagagtgtccttcccggatcacccgaagttaaagattgaatacgggacgatttcgtctgttgatttggaaggaaaaaaggttttgtttcatgacagggagccggtatcctatgatgacgccgtcatcggactcggctgtgaagataaatatcacaacgttcccggggcgcctgaacatacctacagcattcagacaatcgatcaatcacgcagcacgtaccaggcgctcaacaacttaaatgcggaagccaccgttgcgatcgtcggggcaggactgagcggcgttgagcttgcgagcgagctgagggaaagccgaaaagatttgaacatcatcctttttgaccggggagaattaattttgtcgagcttcccgaagcgtttgagtaaatatgtgcaaagctggtttgaagagcacggcgtcaagattatcaactgcgccaatattacaaaggtggaagaaggcatcgtctacaatcatgacgacccgatccaagccgacgccatcgtctggacagcggggatacagccgaatcaaatcgttcgggatctcgatgtggaaaaagatccgcaagggcgcgtcgtcctgacgccgcaccataacctgccgggagacgaacacgtttatgttgtcggcgactgtgcaagcctgcctcacgcgccgagcgcacagctggccgaagcccaggcggaacaaatcgtccaagtgcttgaactgcgctggaaaggcgaacctcttcctgaaacaatgccgaaattcaagctgaaaggcgtcctcgggtcgctcggcaaaaaagccggtttcggtttagttgctgaacggccgttgatcggcagagtgcctcgcctgctgaaatccggcttgctttggatgtataagcatcataatgggtaggtttgccgcgtacatgcgcgaaaccttggagttttagataaacagcgtttttctttcggggcgctctctcgccttcatgagaggatgccccttatttttgcgcttttttatttccgccaaaaagtcgagcagtccgccttatccgcaatattaaactcgatcattttctcaagcaatgaaaaatccaccggacgatcccagcggaaacggacaagctgcttcgtatgatcatagccggcctgcacaatttcctcagaaaaacgatcgatcccagcgctttcaggggcgacagccaaatgatttttcgcgacgctaaagccgataataaatgtgccgtgatcagtaaacatcggctgattccaagcgattttcggcgttaaatttggaaatgtctccgctacccaacccaatacttcttccatccgggcacgatgttccggatgatcaattcccgctaaatattcttcaaagacttccatgctgctccctcctaaaaatgattacatgctaaattgcgctgttcagtatagaatttcccctgcaatctgtctattggcatgcctcacattggcgttaagaccattataaggatttatagaatgacaagcactataaatcgggcagatttttcaataggattcgaccaaaagccggtgagcgccattcctgtcatgtgtttcatatttttaatcttcgcaagcgatttgcagggacgccggttatatttgctttcataaaaaaagcgccgctggcggcgcttttcgaagagagcttgtccggtgacaagcagggttatgcggtgttttgtcaggcggctggcgaatttccgtcaaagctgtcgagaaagatcgctctgcccgccatcagctgagccggcttatcgtcaagaaaaatggctcggccggcaaactcggcatctcccttcggctgagacgaaaaacttaaaacgacaaggcttgcaaagacggcagtcaacgcaacggcaatcatctttttcactttaactcctccgttcttttaagaatttggtctcttgcatgatgagattcttcaaaatattcggcagctttgtctgcatctccattttctttatagtaaagtgcgatatcaaatgttaattccgctacatccgtccagagattgatcgttttaagatattctaaagcatgttcaaccgtaagtggatcctgttcatcatacagagcatgaataagtttaaatttcgacaaatattccctttctcctgctttttccgcacggaaaaatcctttttcatacaatttgcgtgcttctttgacaacatttgatttgtacagcacatgtgtcagttcaaacatggaatggatgccgtaaaccgattcttcatgctctttgataagcagcgcttctttgaaatgatgttcagccaatgtgaggaggttgcgattgacatagctcaaccctaagttgtggtgagccatgccgaggaggacatgatgtttgatcagtgccgcgtctttaagggcttgcttgtaatgctgttcggcttcatcaaaacgaaataaatcgagtttatttgccccgatcagcatatcgttgctgatcgctttttgaatgtaatcatcatgtgctttaaaggtttttagagctgttttcgcatggtttaaggaaaggaaattttgtttgatttgatagtaggcgatagccagtttgtaatggaattcggcgatttcgatttgatcggggattgtcctgagcttttcctcggctaatttataataattgattgcatttgtataatccttcttatgaaattcgtacatgccagcgaaaaagaaataataatattcaatcatgtcatctgtgctttgcatatcggctttttgctcctgaatatcctcgaacagtttgttggaagcggcaaactcttctgtcagcagcttgtgccgatagtctaaaagattaaaataaagaagcagatcttgattttcttccatattcggcagctggtgctcaatgtcgcatttaatcgagaccgcttgtgatacttcgtgacgcttgatcatgacataccattgattaagcattcccgcaacttcctcatacgcaatttttgtcttcaatcgtttatccttcctttcttcccatgtcatttcctttttatgggttgtttttcattttacagaatcgcttattttttgacaatcacttttctaaatattggcataatttcctaaggtaactcaaaattctgacattaatcgtaacaatcttctttatttgtgcaaatctctcaggaagtattttcgtttgacatcgtttttgacggcattttataattatatatgtaaatatcaacatgtttcgatttacaataaacaaataaaggagcggttcatatgaatcaagatgtaaaagagtttgtaggaagccatatgatctatacgtatgaaaacggatgggaatatgaaatctacattaaaaatgaccataccatcgattaccgcattcacagcggaatggttgggggacgctgggttcgcgatcaaaaagccgatatcgtcaagctgactgaaggcgtctataaagtatcctggacagaaccgacagggactgacgtttccttgaacttcatgccgaatgaaaagcggatgcacggcatcatcttcttccctaaatgggttcatgaacgccctgatattacagtctgctatcaaaatgaccatatcgacttaatggaggaatcgcgcgaaaaatatgagacgtatccaaaatatgtcgtaccggaattcgccgatatcacatttattgaaaatgccggaatcgataatgaagatctgatttcaaaagccccttatcccggaatgacggatgacatcagggcaggaaagcgggtataaaagggaaagttaatgatataatgactggacttttgttaagtcatccagcagcgcttttatatcatcttgcgacaaaggtacaagcatttggtcgtagagggtgatgatctgtccgtcctcatcgtgctcatgctgccttaaatagtgctgtaaagccttgagctggttttctttcagactggtctgcgtttgaaactgcttgattttctttaatgaaaaaacattcatttcgtcatcaaaatcgcctgacatgatttgtccttcaatgcttgacatgcttgctgtccctcctaattgatctggctgatagttagtctgtccggtttaagaaaggtgcaatcataaaaaataaaacagcaaggggcatgtctgtcccttgctgtttatcatgcaggcttatatccttgcttttccatttctttatacacgtctttcagcttcggatttccttcgccgaccacttgatcaccgaccatgacgagcggataaaaatattcgtcgttcaggattttttcggagatttcctgtttttcagggtcgttttccggcggctgatggatatcaatgtacgtgattgagaaaggctggtcgggatattttcttttcagggcggcttctagccactcatacgtttcttttgatgacggaaggttcacacagcttggacaaagaacgtcggcaccgtaaacaaaaagctcggcttgttttttcatcagcggcagctcctttctctttatctttattttattctattttgtccatctgctccatattgaaatgaaaatcgttttttgtctttgccggcaaatatgatataatatgtgggaaaacgattgaaaccaaacaatagctttttattgttcgactgaatataatggttgtatgatttgaaaggagcgatacgaatgacgacagaggtcgaaatgaaagaacaagtacaggaagtgctggacaaacttcgtccgtttttactccgtgacggcggtgactgtgaactcgtcgatgttgaagacggcatcgtcaagcttcgcctgctcggcgcatgcggaagctgcccaagttccaccatcacccttaaagctggaattgagcgcgcccttttagaagaagttccgggcgtcattgaagtagagcaagtattttaatttgagaaggctgccgtaacggcagcctaaattgatgacaaaatcctaaaacggttttcagtttaggattttgtcatcctctcagcgtgattgaaaacccttgcagtctaggaaggtcgagcatcggagcggagcgaatgttggaattcgtgagcaccgacgcgcagccctgacatgcgagggtttgtcgacacgctgaggctgccgtagtgtacggcagccttttcttttttataaataagcttcaaaccagcctgcaatatactcaagccgcctgatccgctgcttcggatgcccgcttcttgataaatcgtgtgacgcgttcggaaatctgacgagttttacttctttccccatttttttcagcgccgtgaacagctgttccgcctgttcaatcgggcacctgtcgtcccgttcgccatgcagaatgagaagaggggtctccaccttgtccgcgtatttgagcggcgaatgctcccacagtttgcctggatcttcaaaaaggtctgcaccgagctgccagtctgtgaaaaaatagccgatgtcgcttaccccgtaaaaactgatccagttggaaatggacctctgtgtcactgcggccttgaagcgcttcgtgtggccgacagcccagtttgtcataaagcccccgtagcttcctccggtgatgccgagcctttcttgatcgacgaaatcataatgttcaagcacgtggtcaacagccgccattacatccttaaaatctccaccgccgtagtcgcccctcacccggttgacaaaatcctgtccgtagccgtggcttccccgcgggttaacatatacgacggcgcttccctttgcggccagcacttgaaattcatgaaaataagcattcgcatacatggcgtgaggtccgccgtgcacttccagaatgagcggatacgtgtttcctttttcatattgggcgggctttatcagccatccgtgaattgtcagaccgtccgctgcctgaaattgaagctcctccggttccgatatgatatgttcttccgtaaacgcttggttggcatctgttagtcgctccgctttttcttcacccaattggagatggtaaagttcgctcggccggacgggcagggctatggatgccgcaaagccactttcgtccggatgcaggctgaatccgttcacatgctctttttccaaccggaccggataagcaagaccttcgattgatatgtagtaaatgcctgtagaaccctggtcagatccgatgacataaaagccgtttccgtctttggtccaggccggtttcggaagaacgcctccgacaaggctgtctcctgccaccgcatcgctgagatggacgtcaagcatttccgtcagacacgttagttttcctgtttcaatatcatacagccatgctttatcgagcgtggcgttttgatattctttctcgtttccgataaatgcaaggtgtttgccgtcaggagaaaacgatagtgaagaaaaaatgccgttttgacctgtgaggcgcttcaaatcacctgtcgaaaggttcatcaagtagacatcgttcacacgcatatccgtttgattggcgcaaaatgcaatctgatctccgcacggtgaaaatgcatggctgaaatggtcgcgttcaagatcggtcagctgtttcatttccccggtttccacttgaacgaggacaagctgcgtatactttccccttttaaacccttggccgtctgctttatatgacaaagaatcgacttccagcggttcgtggtcttcaatctcggttttcttctcatcgtcgacgctttcctcttttgtcagcttcactgaacaaagcaatgacttgccgtccggcgaccattcaggctgtgatacatcatagggaatatcggtcacttttctcgcttctcccccggcggcgcttatcacgtaaatttgtgcggtttcctcgcgattggacgtaaatgcaaggtatttgccgtccggcgaccagcggggatgctggtttctgcctttcccaaacgtccattgcaccgaagcttgtttttcgcggtcgtagatcatgatatgcgaatcatatgagtcctgtttttcgtttacttttgtttggacgtaggcgatttttgcaccatcgggcgaatactggggatcggtaatggatacaagcttgatgaggtctttttcggttatcagctgcttcatgtcgtttctcctcctcatgtctgtttgccatactacttcgacttcctaaataaaaatccttgttttgaaggcaaacaaaaaaagagccgaaaaagctcttttttcgttaaacactgtttactgattttctttcaacgataatgcctgtatccgggacataaaggcagtcgacctcacagtgcggaaacttggacgcaagctggtttctcagcgcctctccttttcctttttcaataaaggaaaggatcgtcgggccggctccgcttaaagccgtcccgaacgcgccgttttggcctgcttcatgctccactttcgaaagctcagggacgagcgcccttcggtatggctggtgaaagaggtctttttgcatcatgcggccgacaagcttccaatctttcgccatcagtccggcgacgagcatattgctgaccgcgcttgcttccacggctttcggataagagaggctttcgggaagaacatcccgcgcatcttttgtcagcacttcataaaaaggaatgacgacgacgacatccaaatcgatgtctttcatagaaaccatctctgtttcatcttcctcatgaagtccgatgacaagcccgccgaaaagcgatgctccggcattgtcaggatggccttcttcaaggctcgcaaaatgaagtttctcgcggtctgaaagcttcaaatcggcaagttcgttcgccagctcaaccgcagcggcaattgcggctgcgctgctgccgagaccgcgcgcaagcggaatatcgctccacactttgacaaggcttggcggaagttcttttccgaagtgtgcggcggtccgtttggccacctggtaaattaaattgtccgttccttcaggtattcccgctacgacttctgtttcagcttcaaaacgccactcatcatgaggaaaaacagacagtcttaaatagcgggacagcgccatgccgactgaatcaaagcccgggccaagattggccgtgcttccgggaaccgtaacggaaaacagcatgtcagcctcagtcatacacgagcggctccttttaagtgttcgagaatagcttcttcgtctgtcggcagtgtgacaggtttgatctgcgacacatcaacggctgtgttcggatctttcaggccgtttccggttaagacggcaaccactttcgcacccggctgaatctctttcgtttgcagctgtttcagcacgcccgcaatggatgcgcatgatcccggttctgcaaatacgccttcttctcttgccaggagctgataagcgtggagaatctcctcgtctgacactgcatcgattttaccgttcgattcttttgcagcgttgaccgctttatcccagctagccggatttccgattctgatcgctgtcgcaacggtttccggcttttcaattactttgtttttgacaatcggggccgcgccttccgcctgaaaacccttcatgaccggcaggcctgtgccgtttttctcatgatactctttaaagcctttccagtaagccgttatattaccggcatttccgacaggaatcgctaggatatcaggcgcttcgcccagctgttcacaaatttcaaaggaagcggttttctgtccttcaatccggtatggattcacagagttgaccagcgcaatcggctctttctcgcaaatgctgcgcaccattttcagggcatcgtcgaagtttccgtcgatcgcaatgatttctgcgccgtacatgacggcttgggccaattttccgaaggcgattttgccgtctggaataatgacgatgcacttcatgttggcgcgggccgcataagccgccgcagcagccgacgtattgccggtcgaagcgcacatgatcgtgtcattgccttcttctttcgccttggcgaccgccatgaccatcccgcggtctttaaaggagcctgtagggttgacaccctccgtcttgacataaagctcgattccgagctttttcgaaaggttttgcagataaataagcggggtatttccctcgttcagcgtcaattccggtgttttgtccgttactggcaaatattctttatattgatggatgagtcctttccacattagctccaaccgttcccttctactcgataagtgcttttcacctgatgaacaacctcaagatcgttcagcttttgcaggatatccgtaaaatcctcttctgacgtatgatgtgtcacaatgacaatctcagccaggtcgtcatggcctttaatcggaagctgaaggatcttttcaaagctgacgcctctttctgaaaaaatcgatgtgattttcgaaaacgaaccaacctggtctttgacatgaattcttaaaaactgctgggcaaagatttcagacggcgcctttatcttcttttcaaactgcggatcgacaaagctgctgccgttcacgccaagacgcatgtttttcatgacggagaccaaatctgacacgacggcggttgcagtcggcatgcttccggcgccaggtccgtaaaacatcgtttcccctacggcttcgccgtatacgtaaaccgcattgaattcattatggacggaagacagcggatgatgctccggcagcaatgtcggctggacgctcacttcgactttttgtccgtcgcgctgagcgatgccgatcagcttcatcgtatagccgagccgtttgctgaaattgatgtcttcatcagacacttgggaaatgcctttcactttgacatcgtcaaggtcgacattcattgagaaaccgagcctggccaaaatcgccatctttctcgcggcatcaagaccttcaacatcagctgtcgggtctgcttctgcgaagccgagctcctgcgcttctttcagcacctcgtcataaggcgcgttttctttgttcatcttcgttaaaataaagttggtcgttccattgacgatgcccatcatcttcgtaatccggtctgaagccagcccgtcttcaaggcttcgcaaaatcggaattccgccggcgacgctcgcttcaaaataaaggtcgcagccgttttctttcgcggcagccgtcagttccgatccatagagggcgatcaaatctttattcgctgtcacgacgtgtttcttcgcctgaagcgcgtcaagcaaatagcgtctcgtctcctcgatccccccgatgacctcgataatgacatctacttctggatcttgaatgacatcataggcttcagtcgtcagaacgtctttggaaagctcgacatccctcttcttatctttatcttttacaagaactttttgaatcgtaacagggcatccgacttggtgtgtcagcttatcctggtgatcctgaataatcttcaccacaccgctcccgactgttcctaatcctagcagccccactcgtatcgccttcaatgaaattccacctttctctctcttgtccgtcctctctgaaaggacatttgtaaacacaacgcagacatttaagttacaaacattataatgggggattctttttttgacaagatgacatttgctgaaaacaaaacgtgaaaacgctttagtcgttgatataataagattctatatattcagaaatatttttgtaagaaaatcttccgagccgctcagggcagccggaagaaacgtcaaatctcggtctttgcctgctttcctctcaggacaagcgcaatattttccgcacaaagcctcatcatggcttctctcgtttcgacggcggcgctgccgatgtgaggcagcgcggtgacttgcggcaggctgacgagcgggtgatccttttgcacaggttcttccgcaaagacgtcgagtcctgcgccggcaatatctttttcgaccagcgcttcatataaatcgtcttcattgacaacctgtcctcttgagacattgataaaaatagcggagcgcttcatctttttaaaagcgctgcggttaaacagatgcttcgtttcatgagtcagaggtgtcaggcagacaacaaaatccgcctgttcaagcagttcatcgaagggcagataggatgcgcccagttctgcttctgcatctggattgcgggtgcggttatgatataaaattttcatgccgaagcctttcgcacgccgggcgacggcttgtccgatgctccccatcccgacgatgccgatcgttttatgatggacatccgcaccggccaaaagcagcggaccccagcccgtccacttcccttgtctaatccagtcgctcgcttcgacgattctgcgggcggatgccatcagcagagcaaacgtcaaatctgccgttgactctgtcagcacgccaggcgtgttgcagcagatgacgcgatgcttttgcgcagcctccacatcgatgttgtcatagcctaccgccaagttggccacgacttttaaatgcggcgcgccttttaaaagctcctcatcaatcgtgtcggaaagcatcgtcaacagtccgtgcgccttttttgctttttctttcagaatggcgcgcggacacggttcttcttccttttcccacatttcaatatgggcttcttcttttaacgcagaaagctgttcttcaggtaattttctcgtcacatatacaaacggtttgtccatgctgcctcgttcctttctaagagtagcttccactctaagcatatcgaaaaaatccgaaaatgttaacagaagaaaagaacaccgcgaagctatggtgtccttttcagccaattgacaggcggcatgcttatcaatcctgcggatctcatgcccgccatttcttgaaagccgttcaggaattgctcatatgccggcgcctgagacaataaatagtcgagtctgctttcaaaataatggtgctctgattcaggagaaatatagtacccttcaaccgtctcaaaatagtggagcggaaacagcagcctgctgtacatcagccgcttagaaaatgaggatagcggcgcggcttgttcgtattgctgaagaaacaacatgatttcattgaagtttttcctttcgtgaaacaagcttctggcatattccgcaagatccctggccgcatgatcaaacacccattccatcgggattttaataagcggctcgcgccttaaagcctcgcaggtgagccgctgctggcaaatcgttcccgagtcagcggcctgcggctgatcatccaattcggtatctgccaaatattgaatcgcattttcggttaaaccgagataataaggaaacgattcgataaattgtttttcaaagggctgcagctgccttgcctgcgttttttgaatccagaattgttccagctggtcgagccgtttcccccaaagttctttccactgcccgatccgcgaggtttcttttacctcgtaagggtatccccttcccttgtgatgaaattcggcgagctccgcaccaaatgaaacggacctgtttgtcatgcggggagcagcttgaagaagcacatatgagacgccattctcctcaaacgtcatctccccgtcctttgtcaatataaaagatgaaacgtatgggtcgcgctgttcttgcaaatactgactcatactaaacaattccgccagctcatcctgactcaagtgggaaacagggacgatcaaaaacatcgaattcggggtatgaaaagcctgataagacaagtacgatgtaagatcgcgaatgtagattccgaatttttctttgatcagctccttcacggacatcacttcctgcaaaatttttctccttctacacatcgtaatcatgaagggattcgattatgaatcgatctggaaaaagagtactaaaatcgttacatttttaaagttgtttgtatacactaagtaaaaaaagattgggtgaaaatgatgccggaaaacaacagcatgcatcagatcgaaacagcagcaaaagaatggcttgagaaacggggcgtcaagatttcggaaattgccgatcttgtctacgtattgcagaagaaatatcatccaaacttaacaaaagaagaatgtgaagagaatgtcaaccgggtcatgaaaaaacgtgaagttcaaaacgccgtgatcacagggattcaattggatatgctgggcgagcaaagaaagctcatggaaccgctccaaaccttaatcgagacagatgaaagcctgtacggcgtcgatgaaatcttatccttctccattgtgaacttgtatggatcgattggttatacaaattatggatatattgataaaatcaaaccgggagtgctcgcacgtttaaacgataaatcaacaggcgaatgccacacgttcttggatgatatcgtcggagcgattgcggcagccgcatccagcagactggcgcatcgagcaaaagatgcggaataagccattaaaaaaacacttgtctttaaaagacaagtgttttttgcgttagacgcgatccagccattctgtcagtgaatcaatgacatatgtcggcttttcctgataggcttcaaggtgttcttttttggtcacgcccgtatgaacgagaagcgtgtccatcccggaattcattcccgccataatatccgtatcataattgtcaccgaccatcagcgtttcactgatgtctgtgccgagcaccttcatcgcctgctccatgatgatcggctccggcttgccgataaaaataggctctgtctgcgtagaaacagttaatactgacgtgagagaaccattgcctggcaagagtcctctttctgtaggaatggcgatatcgccgttagtcgagatgaatgtagcgccgttgcggatggcaagacaaccgacggctagcttttcgtatgtaatgccgcggtcgatgccgacgacgacaaagtcggcgtcttccccgccgaatgccagccctttttcctcaatggcctgacggatcccttcttcgccgatcacatatacggaagcatcgggtttttgttcggcgatgaaattggcggttgccatgctggttgtgaatacctggctctcttcggccggaatatcaaatgaaacaagcttgtccgccacttgcttcggcgtgcgcgacgagttgttcgtgacgaacagatacgggatgttccggtctttcagcttcctcacgaattcgcatgcttcttcgattttttccgtccctttgtacattgttccatcaagatcaattaagtatcctttgtatgttttcatgttgtacactccagttcgtttagtgcggtttgaatgcggataccggaccgagttcatggtttaaataatcgcggatccgcgccggaaatttctcgagcgtttccgcatgcctgctgagcagctcttccaattcttcatggttgacgttcaggtagtcttggaccaatgtcttccgataggcgatcaaatgtttcaaactgtcgccttccgcttggctgacaaccttttcatcggtcagtatatccataatgtcgtcatagcttcccggatctctcataataaagccgtcaatcatatcgttccctatatccaatatacattcgatcagcgtgtggccgattcgttcaagcgcttttttttcgacgtcggaagtccattcttcctgcatttgataaagccgcagctcctcttccaggaagttgagcgtgttttcgattttgtgtcgatcgacaaaatacatcatcagtgcatccccttttatgatcgcttattttcgcagacgttttaaaacaaagtaggcacatccgaaattgcagtactcgtaaatatattcatcaagcgtgctgatcttcgtatcaaatgtggccttttgattttgatcgtcaaaaaagcctttcagcctcagctggctgtatccccaatccccgacgatgtagtcgtatttatttaaaatgtcggagtatctggctttaaacgcttcttcgttaaaaccgtttttcacatctttgacgacttcaaatgcagcgttctgaacgacaatcattcttttcacctcttttatatgataattcaaacccgggccgccatcaattgctaagaataaatcctcccctttggaaaagctataaatgaggaggaaaagcagatgaataaaaaaattcttttagcagggctggtggcgctgcctttagcaggctgccagacggccttaaacgataccgaacacaatatatatgacgaagacggaaataccgttcacgttgcagacaagaaccctcaatatcaggaaaagttcagaaatgacaaccgaaaaggcagattcggatatgcgcgccatcaggcaacaccagtcgcaaacaaggaagaaatgcaggcgccccaaatcgaccgggaagaaatggcgcatattatatctagtttaacggttcagcttcccaatattcaagatgcgtcggcgcttgtgacagacgaagaggcgctagtcgtgtacaaaacggactccgggcagcgcaaacagacggctgatcaagtcaaaaagacggcggcatccgtcgttccgagatattaccatatctatatttccgatgatccggacatgatgcaatccgtcgctaatttcagccggcttggagccaattcaagaaacgtcgatcagctgatggccgatacaattaaggaaatgcaaaaatcgccgcaaggcaaaaccacgacaggtacagatgaaaacggaaacgaccttgacggaaaaggaaaggcgaccgaatcttgacctgaaaataagaaaaacgccagcgcatatggctggcgttttttcatccaatgttatgcctgcgcctggcgttttttagacgcttcattcacctgttcgtcggcatggtatgaagaacggacgagcggtcctgcttcacagtggctgaagcccttttccatggcgatttctttcagttcggcaaactcgtcaggatggtaatatttctgtactttaatgtgttttttggacggctgcagatactggccgattgccatgatgtcgacgttgttcgcaagaaggtcgtccattgtttcgatgatttcttcttttgtttcgccaagaccgatcatgatgctggatttcgtcgggatgtccggctgcatctctttggcgcggcgcaaaaattccaatgatctttcatatgtagctctcgcacggactctcggcgtcaggcggcggaccgtttcaatattatggtttaaaatgtccggacgcgtatccatcagcgttttcaaattattatagtctccgcccatatcggacggcagaacttcgattgttgtaaatgggctttttctccggacggcgcgtacggtttcggcgaatacccccgctcctccgtcttttaaatcgtcacgggcaacggctgtaatgaccgcgtgtttcaggttcatgatgctcacagaatctgcgactctttccggctcattcaagtcaagctctgtcggcagccccgtcttcaccgcacagaagcggcaggctctcgtacagacagatccgagaatcataaaggtcgcggtacgtctgacggcccagcattcgtggatgttcgggcattttgcctcttcgcagaccgtatggaggttgttttcccgcattaatttttttaagcccgtatagttttcattcgtgttcagcttgattttaagccattcgggctttcttaggtgctcgtctttctttgccaattccatcatctccattgtggatagtagtcatgttcaatacgaaatttgtgacatagcgccggatgagtccctctgctttggaaccgcttaaataaaaaatgctaaatcttcatctttagtcactttaacatagtacagatttgtgaacaagagcttgattagacaagatggaatttctaacattttcttattattgatttctgcagatgtcacaaactaaccgtattcaaactgaaaggagctaaggacactgtgaaagctgtattatccgttctcatcctccttttgctcatcttgcagccgtgcgctcttgcaaaggagaaaaaagagcccgatctgcaaaagagaatggccctttatcataagacagaagccgcaacccatattccttggtatgttttcgcggcagtcgaccaatacgaaatcaatatccgcaaaaaccgcaaagacttgccgaagcaaaaagggcacaccgggatatatattccgcaaagcgtgtggagcggacctgaaaaccccaatcctaaagatacatcgccgctcagcatcaaggtttttgacggaattggaatggacggaaacggagacggactcgcagaaccggatcaggatgaagacgtcctttatacgtttggacaatacttgttgacatacggaagggacattgaaaatatccgcatcggtctgtgggagttttacgaaagggatcagacggtcggcatcatatcaggctttatcaggctttttcaaaaatacggccacattgatttgggcaagcacgcctttccccttcccgtaagatcagattacagctatagaagcacatggggagatgcccgcggattcgggggcagacgcattcacgaagggacggatttgttcgcccattacggcctccccatccggtcgacatgctacggcattgtggaaatgaaaggctggaaccgtttcggcggatggcggatcggaatcagagacatcaacaatacgtaccattatttcgctcatttgaacggtttcacaaaaggcttgaaagtgggagaaatcgtcgagcccggccaggtgatcggctcagttggagcgacgggatacgggccgccgggaacatcgggaaaattcccgccccatcttcactacggcatgtataaagacaatggaagaacagagtggtcttttgacccttatcctcatttaaaggcatgggaacggaaggaacttcgaaagaaaaaataaaagacatccctatttcaaaagaatagggatgtcttgcactttaagatgtcttgcactttaagatgtcttgcactttaagatgtcttgcactttaagatgtcttgcactttaagatgtcttgcactttaagaggttagccggcctggcttttcttgcttttcacaaccgcattgataatgcttgcggccaatcctccccaaataatgacgatgccgatcaccatcattgctatagatgcgccgttcatgaggaaacctccttgtcatgttgaaatggcgtatatgccagcccattcttccattttgaaagcgaaaggataaatccggctgcgatcgctccaaaagcgacgcaccatccccatttcaggaggaattcaaccggcaggtcgccataggctgttgtgatattcgtcttgatattatcaaacatcatataccccagaacaatcggggtgacgacgctcaggcagattctccaccaagcgccgagctgaatgtcggaaaccgaattggcgtgagcctgcagagctttcagctctttcgcaaaccatgcaatcgcaacgacttcgatcaatccggcaagcgccactccgaaattgttgataaagtaatcggccgcatcgaggaagaacagtccgcctttcgtcgcaaatacgagcgaacacaatgcagcagcccctccgccgaacaggacggctttccgccgcggaacgttgaatttatcctgaatcgcggcaacatatgtttcagagatagaaatgagagatgtcagacctgccaaaacgagcgagccaaagaataaaaatccgaaaaacgcattaaacgccggaaactcattgatgatttgcgggaagacgacgaacgccaaaccgattcccgaagagacgacttctttgactggaacgccttgctgcgcagccataaagcccagcgcactgaataccccgattccggccagcagttcaaatgacgagttcccaaagccggtgataaacgcattgtttgtaatatcggattttttcggcaaatagctggaatacgtaatcatgatggcaaacgcaatcgacagactgaagaaaatttggccgtaggcagccacccacacttttccgtttgtaatctggctccaatcaggcgtgaaaaaggcattcagtccttgtgcagccccatcaagtgttatcgaataaatgacaatgattaaaaataagaccacaagcagcggaatgaaaatgcggttcgcgatttcgattccttttttgactccggcaaataaaatccccaatgaaacaatccatacaatcgcgagcggaatcaggacgcccggcacgaagccgccgaattggccgatggctcctcccccgatatcaatcctgtttaaatattcattcattaggaaattttctgtatttttaccccaacctaaattgaatgaaaagacagtgtaagaaatggcccatgccacgataacggcataatacgtcgagatgacaaatgagatggcgacctgccaccagccgatccattccttccctttccccatcctggcataggacagcggggctgagcctctgtatttatgaccgattgtaaattccatgatgagaagaggaattcctgctgtcaagagcgcgaacaaatatggcagaaagaacgcgcctcccccgttttcataagctactgccgggaatctccaaatattccccaaaccgatcgcagaaccgacggctgctaaaataaaacccgctcttgttccccattgcggacgattatccataagcttcctcctttacctttttgaaacatctgaaaacagtgaattttctaacaattattattgaatagtatatacagtctttttgcctaagtcaaagtatttttttaagaaaatagacgcatgtcatttctaggccgcgcgaaaaaaagcattctgcctgatgtttgcagaatgcctggaaatcattactctttttgttcctttttttgctctgttttttcatcctttgaagggatctgaatcgatggcgccgtttggctgccgttgccgctgtagaagtcgggtacttctccgtgcacagcttgaatcgttgccggaatcgtatttttgacaaccgccgtttttgtcgcaaacggtatgacgacacggaccttgacttcgacaagcacaccgacatttattaatgcattattaataccatatggctcgacactttgcttaaaatctgtaaagacatcccccacaacattaaaccgtacaggtattttcggccccaggtttccaagaagcgagtttcccgttgcctgacccagaggaatattatagattacaccatcattcttaccttcgggagttttcgcagaagaattaaattcttctgtttctgtttccttcagcttttcgtgaagttgtttcgtaattttcgaatgcataccacgaagaccatgagagttgaaatcaattgttgttacttttccattttcattcgtcttcatttctactagatttttcacattttcatcttggctcatataatcctcgacggcttcctggatgacgtgggtcgcaatccggttcgtttccatttcagcgatgttcagaagggtcggtttgatggatgagttgataatcaacaggctgacggccgttgaaaaaataaaaaatataaacgaaagcagcatgacatatcgcaaaggcaaaggtcctctttttgacagagggccgcgaagtcttcgcaagcaaaatccccccttacatcacaagtgtatgcttgtaagaggggatatacgattcaatcagacaactttatttcaccatttttaaaagggcttcttttccgctcattccgggatgaatgccgagctctccggccgcatcggttacagattcgagcggggcttcgagaagctgatcgatcgtccgcacgccgacggctctggcggcgacgattttccgttcttttaatttatcattcagcagggcgacatcaagcgctccgcacataatatatccatggtcattggttaccgccataaagttcgttttcggcagtttgaccgttacagccgtaaacggctgatcttctatcatgatcggagttaaatttaccatcgctatccctcctttaccattaatgtatgataaagcgagagacatgttccggtttgccccgaatcttagagatctgtttaggaccggtttgcttttttcagcttccaggcgagcagatcgcgcaggaattcaggcataaagtagtcaatatcttccgcatcgcggataacaggaaacagcgttccgagtgtaaacatatcaatcgtggcgagcgtgtagaacgcatcatcttcaatgtccgctccgttgacggagagcttttccgggtcaaggccggcatacagcatcttccccatcacttcgccgcgaaaaccgagccctttaatgcgcagcttctcggtttgttctgatgatgcatggaggatgacctctttcagctctcgtcccgtcagcttcagtttgaccggattaatcggatgcggacagatgcggtgaacatcggctttcgtcaccggaccttgtgaaagagactccagcacaatgcctgagttgaccatcccgatttccgcctcacaccattcctttaaggcatctgccagcatttgcggaagggcgcttctgcggaaccaggcggtttcaagggtgttgtccaatgtcgcaatttcctcttcaaggagatgtccggcttctctctctttttccttcagaaaacgaatcgtctcctctgattcttcattccaatctgccgtcttcatcacggttgctgtgatgttctcaagcgctccgttatatgtcagttcaacatgaccgacatagttcccgtacttttccgcgcaggccagcataacgccgtctttcatcatcccttcttcaagcaggtgatgggtgtgggagccgaggatcaggtcgatttcgggaaaagcctccgcgacgcgctgatcgtccaaaatgccaaggtgtgaaagaaggatgacagtatcggctttttctttgatttcacttagcatctctccgatgctttcaaatgcgtctgtaaccgtccagccaagctggcgatagatcggatagtacgggactgtcacaccgagaatggcaagagttgcgccgctcttcacctttttgagcaaatacggcgctgcccagccgggcctcttcccttctccgtcaaacaaattggagacaacgacaggaaactgagcgttgtcataaagtgtatccaactcctgatgcggcagtgtaattccttcattgttcccgatcgttgcagcatcatactgcagacggttcaacagctccacattcgcttttccgaaggtagcctcagatatcggatggaatctgtcgacatgatcgccgaggtcgaacaaaagcacttcttccccctgctcttcatgtttctgtctttgtgtctgaatgtaatcgacgattttcggccagttttcaaaatggctgtgcaaatcgttcgtatggtagatatggagcttttccgtcatgcaaatctctccctaacgtttaactaaacacgccttgatagattaatctgattccgatgagaatcaatacgaaccgcatgatcaatacgatcgtctttgtctgcatctttttgttaatgtaggcgccgagctgtccgccaaaccaggcgcccgggatcaatgcaagcgcataaagccagttgacatgtcccgagatgacatggccggcagagcccgcgacagatgaaaggaaaatgataaacatcgatgtcgcaacggcgacccttgtcggaaataaaaacagaagaatcatcgccggcaccatcagcgagccgcctccgatgccgaaaagcccgccgagaaagcccacaaaaaaggcgatcgcgattccggctaaaggatggtatgaatacgtatattcctgtccttcatcacctgtgaacgttctgataacgcccgtatgctttttctcggcaggtttcacccttttctttatcattaaggaaagggaaatgaggatcataaaaatcccgaaccatagagaaaacgagtctgagctaaaatatgtcgatacatgggcaccgacgatgctgcccggccccgagccgatgaaaaaaataaggccgcttttatagtcaacggttttatacttcatatacgcaatcgttgaagaaagccctgtgaatatgatgacgaccagcgatgtgccgaccgccatctgcggtgtcacatggtcaaacagcgtcggcagccccgccagaaaaaggagcgagggaacgatgacgatccctccgccgagcccgacaagactgccgatggttcccgcgataaacccgagtatgatcaagataagatattccataaaataagtcctcttttctagctgaataaatcgagctgccttggcgtaagccctttgtattcaatgttgagcagctccatcatttgcttcccgttttgagccgcatcaccgcccgaattgttattaaacagcacgtaaacgtttttcgactgctgttcaagcagctcaaggtttcttttccagtcttttaattcttgttcattatataaatacaaatatctgacctcacgccaattttgaccggaagatggccttaaccagccttccttgttgcggccgtgaaaacggacgagcgttttccggctgtcagtcgcgtgaagaacagtcgggatgctgccttcgcccgcctggggttcatcgcaaatgctgtgaatccattgctgctcctccataaaagcgagcgttttgtcgtaaaactggggcataaaccatgaccgatgcctgaattcaagcgcacacgggatatctcccattttctcttttacccatcttaagtaattgacgttttctttcttgcaatcaaaccatggcggaaactgaaagaggaccatcgccagcttacccgcttttatgtatggcgttaatgagagcttaaaagcagcaaacatgtcgtctttcgtttcaaaggggatttccccgcgctgatgccctgtcattccctgatatgccttaacgataaactgaaaggtttccggcgtctcctttacccacttttcattgttccgctcgggctgtatcgcgtaaaagctcgcatcaagctcgacgatcggaaaatgcgatgaatagtggatcagcttgttttgactgcttgtcttgggcggatacaggctgtcatgatccccccatcctgttaatccaatataaatcaatgcagttcacctcttcttttagtttatcacaggtttttttcgaaaatcttgatccaggtctgcttgtagcatttcctttttcagcggcgggatacttgaacatgaaaaagaagccggacatccggcttcttttaacgggctttcctcggaaaaagggtaaagctgaaactgtacaaaaaatcgatgacaaggatgatcgaccataaagaagcgatgcggattaatggttccgttctttccgggtcgccgatgaacaggtgcatcccggccagcagagccgctccgatcagccatgcgatgaaatggcgaaaccagccttcacgctcttttttggcgtgttccctgccgtactgcgggcctttgtccggcttcggacctccggcaaagcgataggcaaacctttcatccgcccatttgatcatgcggctcccgaacgcgatgctgacgccgatataaacggcggcgatgccgtgcaaaacatccgcttgcgccccattgtgcagatcaagcgacgttgcagccaaaagcagtaaatccaaaaccggtgtgcatgcaaacatgatcaaaccagcctttttccagcctgccatatagcgaaaaataagtccaagcagaataaaaatccaaaagccgatttcacaagctaaaatcaataaaccaatcaccttttatccgcctctctttttttaacacattcgtactaaaaaattatatcacagatgtattaaataatacacccgtgttataatgtgtgtatgccaaaaatagttgatcacgaaaaacaaaaagaaaaaattgccgaagcggtgtggaatgtgattcacagagatggacttgaacaatgcaccgtcagaaatgtcgctaaggaagccggactttcggccgggtcgatgcgccattattttccccatcagtctgagcttttcatttattcaatgaggcttgtggcaaaccgggtcaaaacgcgtatcgaaaacatgacatttaacggtacaccggctgaaaacgtcaaacagcttctttttcagcttatgcctcttgatgaagagcgaaaactggaaatggaggcatggtatgcatttacagccaaatcgctcagcgatccggagctcaaaccgttgagaaaggagatgaatgaaggcatttattcagcctgcaaatcggctgttgaaatgctggtaaaaaccgaaaaaaagaccgggatcgatgttcttaaggaaaccgagcatctatacgcccttgtcgacgggctggcgcttcatttgatcatggcccctgaaaggctgacggctgaaaggatcgatactgtattggcgggttatttaagatcgttggaataggaacagatctatcgcattgcaccagaaggaactcacacaaccacagaaaagcaggcctctcagcctgcttttctggatttaatgctcttgttttaaattctcacggatttccttcttcatttcttcgacatttcttttaataatttcaatttcgtatttctcttttgcatctggaggtaagttctcatctaagtattctcggagtttttcttcactgcgagtatcatctgggccgattgatataactggtctgtttttccaatcacagaactaactaaaccaaacttatcaaaggcgttcagaagtacttcttcagttgttttttgatttggatcagccgcttgtgaagctgtattaaacagtaacaagaaaagaactaagaacaagattccgaaccgttttttcttcattattctctccttaaaataatttttcctaagcacagcattgagtttctatttttatgtatttcagctttccgggacaccgtttattcatattttaggagccggtcctgaaagcgttaacgagagaggtgatctttattttctggggaagtaggctcatgaggtggatcagtgtaagtttatcttctctgaatggagatatttgactgttttgcaacttcttcttttgctagcgattggaggcgttgtcattatttccgcctcttctaccttgatacctcctttatttattcacaagtctaatatagcataaacctcttcaaaatttttcaaattacaaattgatttcacaaattattttgctggtcatcacaaaaaaaacagcctgatcgcaggctgtttttctgcactagtgaaccgctttttgtatctctttcgttcagccatgttccacctgttgccctgcgcgtgccggagccgtcaaacacgagccttcctctatctcagaagcctactcatgatagaaatccagtgccgcctgaagcgcatttcccggcgatactgaagcacctgtgcgaatgagaacagcttcgagagcagccaatgtaaaaagaacattttctttccggcagctgtatcccatcgttccgattctccatatctttccggccagcggcccgaaagagctggcgatttcgacgccgaagtcgtcaagcatcatcttcctgacaagatctgcgtcaacccgatcaggaactttcacacaagtgacggtcggcagctttttccggccttccgtaaacaattcgagtcccatcgctttgatgcccttgattagtgctgtttcatggagccggtgtcttgagaatcgctcgcggagcccttcctcaagaacgacccgcgctccttcgcgcaagccgtacagcatcgaagtcgcttctgtatgatgattgaggcgcctcgggctccaataatccatcagcatgccgaggtcaaaataattgctggaaatcggcaagcgtcccgtttcaagcacgatatcttctcttgtggcaatgccccgttctacctttttcctttcattgatgcgcttttcaacccggctgttaaatgtgatcggcgccatacctgaaggaacggataaacacttttgcgtaccgccgacgaccgcgtcaagacaccattcatccgtattgacatccgtgccgccgattgtagccaccgcatcgactacacaaagcacatcaagctcccggcaggcccggccgatttcttcgagcggctgaatgcatcccgtcgatgtctcgccgtgcacaaccgcaacaatctccggtttcgtccgtttgatttcggagatgacctctttcggttcaaaaacgtctccccacgggcattccattgtataaacatcagcctggtaccgttcgcaaatctcggcaagcagatagccgaaccgtccgaaaatgggaatgagcaccctgtcccccggtttgatgagactggcaaggacggcttcaagcccggcccgcgatgtcccgtctatcgggaatgcccatttatttgtcgttcggaaaatctgccgaagcagcgccatgacgtcgttcatcatgtctgtaaatgcaggatcgaactgtcccagtaaaggtgaggaaagcgccctcagcactctcggatgaacctcgacaggaccgggagtcataattgtccgtttcggaatattcatttcgccaattgtcatgatctttttctcctttcattcatatgccagcctgtataatacatgagtcaagagctcaacgccggctgcaagatcagccggttttgtccattcttccggcgaatggctgatgcccttccggctcggaacgaacagcagtgacgtcgggcaatgcgggccgaaaacctgggcatcgtgccccgccccgctgaccatctcctgataggatacgtcaagatcctcggccgactgttttgagagttgaatcaaatcccggtccatcctcacaggcttcgcatccgtcgtctgttcaactgtgatctgaacgttccattcgccggccagctctgtgaaataagcaaaaatatcgtcgcaatactggtccaacaccgcatcatgatgatggcggagatcaagagaaaaaacagcttctcctgatatgacattcggcacattcggctttgcttcaaacctcccgaccgttgccgttaaaagcggataagcagctttagccttgttcgtcaaataggaaatgcacaatgccgagacggccaccgcatcttttctggcgttcatcggcgtcgtcccggcatggttgctttctcccttgaccataaccgtaaaccgtctttgtccgacgatgtccgtgacaatgccgatttgacggccgctctcctcaagaatgctcccctgttcaatatgaagctcgataaagcacttcacatcacgcctgaacgggcgcctgtaccgccgttttccgaaaccgcaatctttcatcgcctgctcaatcgatactccgtcccgatcgtgcacagccggcgtcttttgacagtcaaacaagcccgttaaattccccgatccccaaaaagtcaaagggaaacggcttccctcttcctcgcacagagacacgacttcgattgacgttttcggcctgccgtacgtgtccagaaggtgtttggcagacaaaaggctcgctaaaatcccgtacgctccgtcgaatttccctccgttgatgaccgtatcaatgtgtgaaccggtcaagatcgctttcgtacggttctctgtaccttctattctcccaaacagatttccggcatcatcgaagtacggctctattccccagtcctccatcttttccttcaacgactgctgggcgctgagccacggctttgaatagagaagccttgtcacccctccttctccgctttcaccgaatgatgccagccaattgatcatgtcttcgatattgcgggctgtactttctccggtcttatgaataccaatggtcatgtaaagaaacttcctttctattttcttgttatatttctttacaactctctatataaatacaattttactggtaacatgaaaaataaacatcggcataaatgtcacaaatccgctcattttttgttgaaaatgactaaaatgacaaaggaggcctgtacagatcaatgaatatctatgacatgatgaaactccctgtatttaaaggcgcaacgcttgccgccggaaaggcgggcgtaacccggaacattgaacacatcaatatgatggatgcgccagatattgccgattatctgcatcatggcgaactcctcgtcacgaccgcataccatttaaaagaccggccttttttattgaaggaattgattgaaaggatgatcaggcggggctgcgccggactcggtatcaaaacccgctttttgcaggaaatacccgacgaggtgatcaagcttgccgacgagcggtcatttccgatcatcgagctaaatgaagatgtccgcctcggtgatattgtcaatcatacactgagccatattttagacaaacggacggcagaactcgaacaggccatcgccgctcaaaaaaagttcacaagccatattatgagcggaaaaagcattcaatcgctcttgcataacgtctctgctgttttaaagcttcccgttcttctattcaatcagcacctcaagccgattgcctcctcaaaagcagatgccgccgggacgctgtcggattatgaaggaatatttcaaaaaggaaacagaacggggctcacctgtttttcaacgattcccgacaaacaaacctattcggtatttccgatctatactcatgaaaaaaaatgcggcttcctcgttgtctgcgggatgatttccccttcagacaaaggcttgctgttaaccctcgaacaagccgccaatgtcatcgcctttgagctgctgaaggaaaatgcgctcaaacaatatttgcgaagagcgcggaacgagtttttcagcaattttttggacggcgccttttcctctgctgaagaaattaaaaaccgagcaaaagaatttcagctcaagtgggatcaaaaatatgtgtgcatcgccggcaaattggaccgccgcgaaaaatcgctcagcttcacggaaaatcagcttgaatcagattccgtgttcgaacgcctggaagaagagctggttgacttcccgtttcctccgcaccttttcacaaaaggaaacatatgcttcctgctggccgaggcgacggacagctgggctgaaatgaatgcagccgtgggcggatttttaaaggcgtttcagcgccatgcatctgagcattttcagcggacgatttcttttggaatcagcaacctcagccatcagctgagagacgttccgcacatttgcaaagaagccgtcgatgcgctccactccggccatttgtcaggcagcaccgagttcatccagacgtaccatatgaaagacgtgtcagagcttttgcgcatgattccggctgatgatttgaagacattttacacgcatgcgctgcatcagcttgccagcctgccgaaggatgacccagggctcctgcaaacattgtccgtctatctggaaacgcactgtcagatttctgaaacggccaagcgcctgtacatccacagaaacaccgtcatctacaggcttgaaaaatgcgaggaactgctcgggaaaagcctgaaagatgcggacacgaccttgcgcttgagactcgcgctcagaattcaaatgctgcttgggttgtgagaaatcccttccccgcggcaatcggaggatgtaaagccgcgccggcatatttgatgatttgagcatttcaccataaaaaagccggcatatgtgccggctcccttatactttttcaggaattgtgcgcgcctgctgcttccgcccccagctgactgccgccaaaaagctgagcacgagaacgaccacaccaaaaatatatggaatttctacgttcacatcgaataacagaccggccactgtcggtccgacaatgttggcaaggctcataaacgcattgttcatgcctgcggcaaatccctgttcatctccggccatttttgaaatcagcgtattaatcgccggtcgaagaatggacgtcagcatgaagaaaacaattgttgccccgaaaaccagccagtacgaaccggcaatcgagcagacggcaagcgctccggcagaaccgatcagcgtcatgttcatcagctttttttcgccgaagcggttcgtcagcatcccgagagccaccgcctggacgaacacgccgatcagacttgccgctgttatgacaaaggcaatgtctcccggtgtaaagccgtgcttatgatcgacataaaggctgaataccgcctcgaaattcatgatcccgaagttcaagatgaacacgaggataaacagaaatgcatacggcgaccgcagcgcgcgcgccatttgcttagcgagcggttcgcgcttttgaacggagcggcgcttttcaagcatcttttcttgactgagcgtttccgggaggacaagaagcgataaaaccgtcgccaagccggctaatccggctgacacgtaaaacgggaaggtgagcccgaacgccgccaaatatccgcctgctcccggaccgatgacaaagccgagagacatcgcggcgctgatcagccccatccctttgcttcgatccttttccgatgtgatgtcagcgatgtaggcaaacatggccggcaccaaaaacgcagctcccgctccgccgagaaggcgggaaacaaacagcagccacatctggctcgccaaggcgaaaagcagctgggaaaccgcaaacgcaccgattcctaaaatgatcattttccgccttccgtatttatcagtcatttccccggcaacgggcgaaaacagcagctgggtaatccccgaagccgcgatcagcaatccgagcgtgctgcctgacgcgccgaattcttctataaacgtaggcatgagtggaataatcaagcctataccaagcatcacgataaacacgttaagcatgagaatatacaatctggccatctttttcatctgcggataccttccttcagcccgaaaataccggacaatcttaaattcgaacaattactaaattagtatatccacagataggtttaaagtctagttttttcatatttttgcatattttttcttctcaaggaatgatgggtaaataaaaaagcggagattcccccgcctttttatccatttacgaccagccgacagcgttagcaaacatcaggaaaagcacggccgctcccatccagaggcaaaacagcggaaggatgaatcgcagccatttgttccaggcaatccggctgatcgcaagcgtcgccataaaatatcccgatgtcggaaagacgatgtttgaaaaaccgtctccgaattggaaggccagaatcgccgtctgccgcgtaattccgacgatatcagccaaaggcgccataatcggcatcattattaaagcctgtccgcttccgcttggaacaaaaaagttaaacagcatctgtgtaaagagcatcgccgtaaccgttaaatacgaaggaagctgtgagacagcatgagacaagccgtaaacaatcgtatccatgatctgcccgtcggccataacgactgctgcagctcttgcaatgccgcaaatcatcgcaccgacgagcacttctttaaaaccctcattaaaggactcggcaatgtctctcgaattcatgccggcgatgtaagcaggaatgatgccgagcgccaggaaatagcccgccattgtcagcatatcccacctgaaataaattacacacccaatcaagccggcaaacaacccaagcgacgcgatcccggcccatttcacccgtccgcctgctttaaaagccggcacgggttcgactgcttcctttcaggatgcgctctgatcttttccgcatatttgagcacataaacagcggcaatcgccgtaacgacaacaaagatgaccgccctgtaccccatcccggaataaagcgggagaccggaaatcatttgtgaggttcccacggtaaatgggtttgtcaaagcgctcgtaaagccggcgatcgtcccgcacaatgcgattgctgctgctgtcatccggtcatatccgagggacagcagcaaaggaagaatgacagggacataaacgatcgaaagctcaggcgtcccgataaaacaggaaatgccggagaaaacgaatattaagacaggcgtaacgaaaacaggcttgttcctgaactgatcggccaacagacggacgccgagctcaatgacagatgctttcctcagaacggcaaaagctccgccaatcacaaacgtaaacacaataatcggagccgcttctgtcatccctttcggaaccgccgtaagcaagccaagaatatcaaccggcgtctgttcgacccgtttgtaggacgctggatcaatcatttccctgccgtccggactttccacccgttcatattcgcctgccggaatgacatatgtcgcaagcgccataagaccaatcatgacagccagaatgacataaatatgcggaaattcctttttgcgtttttcgttctttttcacctcttctgttttgtaagccggcattcccattttttaatctccccttcttccatgttaaattttttaacatattaaatgatcgcagcgctgatagcattgaaaaatcctctaaatttcagcgtgttttcagttaaaatacataaatcaacacgagcaatccagaaaatcgtcacattttctatcaatcattaagctgatcatctcgactgttccttttctgcattttcatgtaaagtcataagaaagatcagcatgtaaaggagagagttgacattgcagcagtggattaaagaagtggccagaggaaaaaggggcgcccgggatttaacttatgaagaggccagacaggctgctgaagcgattgttacgggaaatgcaagccccgctcagacagccgcgttgttaatagcggagaggatcaaaacggagtcccctgaagaattgttcgcgtttaccgaagcattgcggaacagctcggaatcattgagcctttccagagctgtaaaagaggcggtcatcgattttgcaggaccttatacaggaagacattcttttttagcaaccattcccgtctccctccttctcgcaggaaacggcgttcctgcgtttctccacggcagcgatgcattgccgcccaaatatggaacgagcgtaaaagatgtcctggacaaactcggaatcccctctgagactgccccagcgcaaacggcacgctcactcgaaaaggctttaatcggattcgccgccgccgaaacattttgcaaaccgtttgttcgcatgaggaaaatccgcgaggaaatcggcgtccgcaccgtgttgaatacagcagaaaaactggtcaacttctctgatgccgacaagcttatgatgggcgcatttcaccggacggccatacagaaaatgcatcccgtatttcagcgcttgacgtacaaagaagtgttcattgtccaggggcggagggctcggaagatgtgccggtccacagaggcagctttgtgtttacaataaaaaacggcgagatcgattcttttatattaaaacctgaagaatacggactttacgcagaggaagcaaagctcaacaaaccgctgtctgctgaagagcaggcggaaaaaataacagccgttctcgccggagatgaatcggcggatacggaatacgaaagaaaacaagtcatcatgaatgccgcattgcgctattatttgttcggatactgcgcggccattgaagaaggtgtccaagcggcggaaaaacagctgaaagaaaaagccggtctggaagctcttgaaaggtggaaagcttcatttacaagaccgtaagaaaaccgtaatcaaaatgatatttccttttcatgaaaagattggataatgaaagaaatgaaaaggaggggatcgatagatgaaccgaaagtgtgtcattccgtttattttgatgttgtcggcgatgtgcgcgcccgcccaaaacgcagaggccttccagctgttttccttacccgtacaatcctcggctccggcagattactacgaacaggcgcagggcaaaacaggtgaagctttaaaacgagcgcttcacgacacaatcgacgatcatcgagagctgtcttacagcgaggtatgggaagcgctgaaagcaacggatgaagatccggccaatcgaaacaacgtgatactgttatattccagagagtcgcgctctaaacaggcgaacggggggcaaacgggcgattggaaccgcgagcacgtatgggcaaaatcgcacggtgatttcgggacaagcaaaggacccgggacagatttgcatcacctcaggcccagcgatgtgcaagttaacgccgcccgcggaaaccttgattttgacgaaggcggcagcccctatcccggagctcccggaaactactatgacggcgattcctgggaacctgacaaaagcatcaaaggcgatgtcgccagaatgattttctatatggcggtccgctatgaaggggacgacggtcatccggatcttgaaatgaacaatacaacgaacaacgggtctaaaccgtaccacggaaaaatgtcggttttattgaaatggcatcatgaagaccctgtcgatgccctcgaaagaaagcggaacgatatcatctatcagcaataccagcataaccgcaatccgttcattgatcaccctgaatgggcggaggatatttggggctcgggcgttttgaattgaacaaaaaaagcgcctgctcagcgctcttttttcaaacctctgtttttttgttcagcaccgattttttatccataaaacgaaagaaatctgctgtgcagcagccgcgaggcacggcttcattggccgattatctacactgacagcgcagatcccgcagtctccgttcaaacagccgagctcaatccgagccttcctccacgcacatctaaaagcgtgtcggccggcttgatggaagccggccttttttctccgttcatctcaagggttacttccatccttttagcgctttgtcataaggtttcctttttcagcatgccgagaatgtcaaacagagtatgtttgatgacaaacgtgcggtactctgcggaaccttgcgcatcgtccaatacaggaccgggcaggcggttgatcgcctcttccaccctttgatcaacagggagtgcctcgtcattcaacgcagattccacttcagcggagcgaaacggataagagcagacaccgctgaatgcacagcggacgcgtccgtctatttcgagagccgaaatcgttgccaaaggatatcccgtatcccatcgctgcctcacttttatgcttgcaaaaggctgatgaagatagcgttcttcaatcaaaagcgaaatgaggatttctcccttgctcagcttcagctgctgatcaaatacgtcgtgaatcagatagcgctttttccccttgtctccaactgtcaccactttgctgtcggttaataaaaaaggcagcaccgcttcgcggtaaaagatctgcccgcaaatattgccgccaagcgtaatcttattgcgcgccgtatggtcggccacctctctcgccgctttgctcaacagcggaaagccgccgttttccgtgatctccgtcagtgttagcgccgagcctaaagcaaggtgatgccgttcaaattgcaaagtcctgcactcaggtatatctttaatatcgatgacggcatttgtatggatcacattcatccgtacgagcgtcaactgttctgttccgccggaacaatacgccggctttttcccctcccgctccaggctttgaaagagctttaccgcttcctgcgcagattggggcctgtaatactcaaagtcaaactggatcatggcggtcctccttcattttccaaatttgtttagaatcagaggcagccgattcaaaaaaccggcatgcacttcaaataaagccagctcattaacccaaaattttcctccatgaatttatattgaacaatattctattttaaaactgtaaacaagaaaaaagttcactcgaagctagagtgaacttttttctgcacgttgattcaactttcaagcgcgccggccggatcatataaagcgatatcaagctcaggctcttctcccaaagcgagccttgccaattcagcgccaaggtacggacctgacgtaagccctgaagcgccgagaccgttggcaacgaggagcccgcaaatgttcggcaatgagccgatcacggggagaaagcctggtgtaaacggcctgaagcctacgcgcgcctcaagcagctcgctcaattccaaccccggcgcaacggcaagcgcctttgagaaaatttcgtgaaggccgccggccgttacccgaagatcgtccagttccgcttcattttcgtgagtagcgccggcaacgatccggccgtcttcaaatgccagtatgtattggtcattcggaggcatcacaacaggccagctgccggtatcggcatcaggaagacaaaggtggacgatctgcgctttttggtagctgactgaaaaacgaacgccgagcggcttcaagagctcgtccgcccaagctcccgctgtgacaagcacctgatcagcgtatattttcttgccccctgtggagatccctgttacccggtttccttcatagagcaatgaagcgtttcctgaaacaacagaagctccgtatttttttgcggcattcacaagtgagcggcgcagcaattttccgttcacgcgcgcggctccgctgatatgaaccgagctgtacccctctgccaaaggcggaaataaacgcttcgtttcctcatgggataaccgggtgatctcgccgatttcgggcgcatccttgcgccttagatgcgcccgttcttccattttctccagctttcgctcgtctgtatgcaagctgatagcgcctgtccgtttataccccgtatccaattctccgtcagcttcaagctgcttgattaaatcggcatagtacgccgcaccgccttttgcaagcttgtaccatgcctggttcctgcgctgcgaaagccaggggcagacgattccagccgcggcatctgtagcccttccccgctctccgcggtcaatcaatgtcacatccgcgcccttttttgcaagatgataagcggctgaagcgccgaggatgcccgctccgactacaataaaagatttcatgactaacacctttttcatttctgtttattctacaaatataacggatcacaccgatggagcacaacctaaccagcggctaccgatatcacgccaagcaccattaaggcagccgcgatgatcctcagtcgtccgaaaccttcggacaaaagaaccgcccccatcacggttccgattaaaatgctgatttcccgaacaggcgccacatagctgaccggggcaaataccatgacactcagcgccaaaatataagccaaagaattaaaaaccccgaccccgacagcttccatccggtgatgcttccactcaaaccggacttcactccagcttttcgcggcataaggagtcaatatgaccaggcggccgagcgtattgcaataatccagcagcaatggcggaatgagaaaccggctgaccgctgctttatcaaggagagtatatgcggcaataatgccgccgaccgccagcccgtaaagaaccggtgtgaacgagcctgattcttttaaccgcttcactccccctgtaaaaaaaagaatgctgatcacaatcaatagaatccctataatagcgggcagcgtcaacgtctcgccaaaaaaggcgaccgccagcatgcaggtgagcagcgggcctgtccccctcgcgatcggatagacaagggagagatcgccctttttgtatcctttttgaagaacaagaaaaaagcccaagtgagcaaggatgctcgccatgatgatgacaagctgccagatgccgatctcaggcttttcatatatgacgacacctatggccaacggcgtgtagatgacggctgcaatcgctgtgaacagccagataaacggaacgcctccatcggcttttttagaaagatagttccacgatgcatggataaatgcagaacataataatacgcaaaaacccacgacagtcattacacagccctccgtccatcataaaagagatcaatgcttgatgacaatgtagcgcttcaattccccgtgccacttctttcctttgacggcatccacccagacgtcatacttgcccggtttcagctttttcgtcggaaagctcacccgaaaatgaggctttccgcgcgttaaatgaacatctcgatagatcaggacagtcccttttttattgatcagcctgacggcaatcatcgttcccgtaacagggctttttccagtgacaacgatcgaagtggctgatttcgtatatgtattggcatccgtcctgaatttcaccgcgcctttggaaggcatagcaaaggcttctgtactcccggcaaatgcggccagcaagaaaacagcggctatcaacacagcctttttcaacattttcactggtcatatcctttcttatacagtatgaatgtcacatgctatacccttcattatacatgacaatatgatctaataaagatatttgacaagaagatcctgttcttctttaatggacaaatactgtataaaggaggtgatttaatgtattaagcaaagatgaaaaaatgaaacccgcatatagaagaagttactgttgaaatacaaggctatgaatttaccggcttttcaactgtctgtcccacttttatagaagagggtaaagagtatcccgtcatgatcaaaatttaccattttctaatcatgaagcattccccaatcgtaaaacctatgataaagaccgcgcaagctgaggagtaattcggattttccattgacacctcgcaaattgcgaatccggtccccacttccaaaagaataaacagataagatacgattctggattttaaatagcttgccatagaccgacctttctttctgcgattacttaaaataataatcaagtaatcaaaatttgaggttttaataatgctgggggaaattcttttttatagtaagaaatcctgctgctttaactacccctagaacgatttagtttacatgtagaaaagcactcctttgaatttgtcttctcgcattaactgttatccggtagaattccactgcatctcgaattttttcttttttctctaatagttcagccgctataagaccgtattcctccatgtctgcatacttgcctttactttcgaaaaacttgaacgattcgcgaaccatatccagatcaaatgaaagataaagcccttttattaaatcaaactttgcaagcatatctaaattcttgttcttttcagccaactctttgccttcatagtataggtcatcagttattgacaacttcccttgctttgccctgacatgtgcgaggttgaataatgtttttggcaaaaaactatgcttctcctctttataaaggttcagagctctttgaaaattgtaggttgctttatcgacatcttccaatttattgtagcatattccgatatttaaatgtgttgaacccataagatgaagaattccttgtgtctctgactctttaagctctttatttaaattatgtagagctttttcgggatacatatgatctagccagttacctgcaataataaactgactttgtactcgacgctcaccgtaagtatcatactttttgaataagttatacgcacgacttgcataattcatcgaaaagatggtttgtttcatatggtaatacacttcagatgccttgaaataaaattcagccttttccagttcatcacaatcaaaagaatcgagttttttctcggcatccctataaaaattcagcgcaaggattaattctttttgtctgaaatgatacattccagcgaaaaaatgataataataatccaacattccttccagattattctgatcgcgaatctttttgaactcatcaaaacgactatttaaatttacaccgggtttagaatacatataatcaagttgaagattatgccggaagagcagtaagttgtaatagacaatcacatcctgattttgttccatttgttctaattctcgttcaacttctttcttagtatcctcagccttgcctgtccaattgttttttaaggctgtataccaaaaattcattttcgtcgcaaccaaatcatatggtatcacgctcacatatcctcttcctttctcgcaagattataatttttctaaaaacccaaaatagcaattcccttttgttcatagtcatcattttacataaaagtaataatttttcacaacaacattctcagaaatctttataagttagaggttttttggcctaatcaatatgattcgttttccgtgtttgggtgaattttagaagtataggaaggaaggcagaacagatgaaggattatattttcctgttgatatgtaatttggcataactaatcgttaggaagcaaaattcaaaccttttatgaaataaaaagctaaagaaaaaaccgcagatacatttctacgccttttagaaaatcgataggcaatagattatatctgcggtacacaaacataaagtttaatcgggtgcaatcaaatcgaaatctgatcaccccctttagtatcaagggttaaccaatagacccttccatctcgaacttgataagacggttcatttcgactgcgtattccatcggcagttctttcgtgaacggctcgatgaagcccatgacgatcatttctgttgcttcttcttcagaaataccgcggctcatcaagtagaagagctgctcttcagatacttttgatactttcgcttcgtgctccaatgaaatgttgtcgttcaaaatttcattgtatgggattgtatcagaagttgatttgttgtccatgatcagcgtatcgcactcgatgtttgagcgggcgccttcggctttgcgtccgaagtgtacgattccgcggtatgtgacttttccgccttgttttgagattgattttgaaacgattgtggatgacgtattcggtgcaaggtgaatcattttcgcaccggcatcctgatgctgtccttttcctgccagggcgatagaaagcgtcatgccgcgcgcgccttcgcctttcaggataacggcaggatatttcattgtcagcttggagccgatgtttccgtcgatccattccatcgtcgcgttttcttcacaaaccgcacgctttgtcacaaggttgaagacgttgttcgcccagttttgaatcgttgtataacggcagtagccgccttttttaacgatgatctcaacaaccgcgctgtgaagggagttcgtcgtataaacaggtgctgtacatccctctacatagtggacgtgagcgccttcgtctacgatgatcagcgtccgttcgaactgtcccatgttttctgagttgatgcggaagtatgcttgcagcggagtatccacttttacgccttttggcacgtagatgaatgatccgcctgaccataccgctgagttcaaggccgcaaacttgttgtcagtcggcgggatgacttttgcccaatgctcgcggaaaatgtcttcattttctttgagggcgctgtctgtgtctttgaagacgatcccttgagactcaaggtcttctttcatgttatggtaaacgacttctgactcatattgcgcggatacaccggccaaatatttttgctcagcttctgggattccgagcttgtcaaatgtctgtttgatttcctcaggcacttcgtcccatgatctttctgaacgctcagaaggctttacatagtatgtgatttcatcaaaatttaatgagtttaaatctccgccccattgcggcattggcatattgtagaagtgttcaagagatttcaagcgaaagtcgagcatccactgtggctcttctttcatgcgtgaaatttcttcaacgatttcttttgtcaatccccgctctgaacggaaaatggaaacgtctttgtcggcaaaaccgtatttatattcgccgatatccggcattttcttagccatccattttcactccaatctttattcgttatcgctgttttctttggaaacgcctttttcgagggctttccatgacaatgttgcgcatttaattcgggccggaaattttgaaacgccttgcagagcttcaatatctcctaaatcaatcgaatcgtcgtagtctttgccctgcatcatatctgaaaagatccgtgacatttgaagggcggtctccacgtctttccctttgatcgcctgtgtcatcatagacgcagaagccattgagattgagcatccttcgccttcaaattttgcatcttctactttaccgtccgttatcttcatcgtcagcctgatccggtcaccgcatgtcgggttgttcatgtcaacgacgatgctgtcattcaaaacccctttatttctcgggtttttatagtgatccataatcacctggcgatacagtgtatccaagttcacattaaaagacatttgtgaaatactcctttgtcttctgaagagcttcaatcagtttgtcgatgtcttcttccgtattatacagataaaagctcgctcttgcagtggcggagacgttcagccatttcattaaaggctgcgcgcagtgatggccggctctgacggcgaccccttctgcatccagcacggttgccacatcgtgcggatgaacgtcttcaaggttgaacgtcacgagtcctgcacgttcggccggaccatagacaacagcgccttcaagctctttaaagcgctccagcgcgtatgccgccaaacggtgttcatgcgctaatatttcatcaagtccgatgtcttcaaggaagtcaatcgccgctcccaatccgatcgcgccggcaatgatcggtgtgccggcttcgaatttccaaggcagctccttccaagtcgattcgtaaagaccgacaaaatcgatcatttctccgccgaattctgcaggttccatgttttcaagcaatgctttttttccatacaataccccgattccggtcggaccacacattttgtgggctgaaaacgtatagaaatcgcagtccaaatcctggacgtcaattttcatgtgcggcgtgctttgcgcaccgtctacgaccatgaccgcgccgtgttcgtgggcgattttggccatttccttaatcgggttgatcgtaccgagaacgtttgaaacatgcgctgcagagacgatttttgtattttccgtcaccgtttccctgacatcgtccaaggaaatggtgccgtcttcctgaagcggaatgtacttcagcgtggcgccggttgctttgacagcctgctgccacggaataatattcgcatggtgctccatcggtgtaatgacgatttcatcaccgggcttaaggtttgcgcgggcatagctgagcgcaaccgtgttcagggccgttgtcgtaccccttgtgaaaataatttcctgcatcgatttcgcgtttataaacttcctgaccttctcacgtgctccttcatatccatccgttgcttttgttcctaatgtatggacgccgcgatggacattggaattgtaagagttgtaatactcatcaagcgtctcaatgacgacgcgcggcttttgcgaggtggccgcgctgtccaaataaacgagatcgtgtccgttgacctgttggctgagaatcggaaactgttcgcgaatatctttagcattcattattttactttcctttcaatcacagagaccagctgcttcttcacgccttcaatcggaagttcattgacaaccggtgcgaggaagccgtaaatgacgaggcgctctgcttcttctttaggaattccgcggctcatcaaatagtagagctgaaccggatcgacgcggccgacagatgcagcgtgtcctgccgttacatcgtcttcatcgattaataggatcgggtttgcgtcgccgcgcgctttttcactcagcataagaacgcgtgattcctgctctgcatttgattttgacgcgccgtgctcgatctttccgataccgttgaagatcgaagacgcggaatctttcataacgccgtgttttaaaatatagccttctgaatgctttccgtggtgaatgatttgcgttgtaaagttttgagtctgttctcctctgccgacgacaaccgttttcgtatcgccgaatgtgccgtctccatgcagattcgtcgtgttttcagaaatggtgtctccgtcattcatcaaaccgagcgcccattcaattttgctgtcgcgtccgagtgcagttccgcggcggctgacataagccgttacccctgcggaaaggttgtcgacggctccgtattgcacgcgggcattcgcgcctgtgatcacttctgacacgatgttaaagaccgcttccttaggattcaccgtgctgatgtagttttctacatatgtgacggcactgttgtcatctgcaacgacaagtacatggttgaaaagcgttgtatcgttgctttcatggacataaacagcctgcaccggagcttccagctcgacgtttttcggtacgtaaaggaaggctccgccgttcaggagggctgcatgcaatgcagttaatttatgctcatcggcttttacgccgtctttcataaagtactttttgacaagctcgccgtgttcgcggaacgcagtatgaatatctgtaaagatgacgcctttatcctgcagctcttttgaaagagaaaggtaagccggcgtctggtctctctggacataaagcgttttgtcttcatttccaagatcgatcagcgatttgacctcatctgaaagatcatccaaagaatcaagcggtttattttctacagtatgcttatcaaaccgtgtaaaattccaatttgtaatttttgttttatcaggtttcggcagcggcagatcttctgctttttcaagcgcttctaagcgtagatcttgcagccatgccggttcctggtgcttctcagagaagcttttgacatattcccgatctacagatagttttgtttccaatgtcatgtttatccccctaacgcttacgcttcttgaccgacagtttcgtcttcgattccaagctcatgcttaatccagtcatatccttcagcctcaaggcgctgtgcaagttcaggtccgccggatttcacgacgcggccctgcatcatgacgtgcacatggtcaggcgtaatgtagttcaagaggcgctgatagtgcgtgatgatcaggcagccaaagttctcgccgcgcattttgttgattccttttgaaacgactttaagggcgtcgatatccaaacctgaatcgatttcgtcaagaatcgcgattttcggttcgatcatcatcagctgaaggatctcgttgcgctttttctcaccgcctgaaaaaccttcgttcaggtagcgctgcgccatatcagggtccatttcaagaaattccatgttttcgtccattttgcggatgaatttcattaaagaaatctcgtcgccttcttctctgcgcgcgttgatcgctgaacggagaaaatcggcatttgtaacaccgctgatttcactcggatactgcatagccaaaaacagaccggcttgagcgcgctcgtccacttccatttccagaacgtccttgccgtccagcgtgatgcttcctttcgtcacttcgtatttagggtgtcccatgatcgccgcggataaagttgatttacccgttccgttcggtcccattacagcgtggaattccccgccttttatttcaaggtttacaccttttaaaatctctttcccttcaatctcaacgtgaagatctttgattgttaatgtcgaagcagccatgaaatatacctccaattatagataatcatcattctcaatttattctcattctaattttataacaaatgaaaattgaatacaacaatagtcttcctatcttttcgtgtacatgttctcaagtttaacaaaaaacgatttgttcttaaagagattgggacaagaaaacttcccggggcagaaaagcggaatttattaccaaactgtcgaaaacaatcggtacatccgtcattaagagcggggatggtttgctcccaggctgcacgattcatgaggggaacagcgctccccttctatttgaaccgtcacatgctccacgttgcattctttccttagatattttgatacttgttttaaaattctatccctgtcactgttttcatccgctacgatatggcagcttaatgacggcatatcggatgagatcgaccaaatgtggaggtcgtgaacctccctgaccgacgggatggaaagcaggccgtttttaagcgcctccgcatcaatgtctttcggttttccttccattaatatatgcaccgagtctttcgtcacccgccagccgctgacgagaaccaaagcagcgacgacggcgctggcgattggatcggcgatgttccaattgaagaaaagcataaggaggcccgcgatgatcgccccgaaagagcccagcatatcgccgatgatgtgcaaaaaagcgctccgcatatttaaattcccgcttgtgtcgcctttcattattacccaggccgcagcaatgttgacgaacagaccaaccgtcgcaatcgcaagcataccccttcccgcgacttccggcgggctgaaaaagcgattgtatgcttcccaaaaaatataaagtgaaatcaaaagcagggtgatgccattgataaacgcagccaaaatctcaaagcgcctgtagccgaatgttttgctcgcgcttgcggccttttccccaattttaaacgccaagaggctgaagccaagcgccgcagcgtcgctgagcatatgtcccgcatctgacagcaaagcgaggctgttcgtcaatattccgcctatcacttcaatcatcataaaagtaaaaattaaaccgaagctgatgaacagcgctttttgatttgctgatcggctgccatggtggctgtgtcctgtatgtccgtgagaatgagccattttaaatcctcctcttaaattgatatatgatcatgtattcatatttaaattttaccttttccttttaattaaggtcaagcggcttctaagaacatggagaaggacggatcggcatccgtccccctcgcgttttatccgattatgggcaagtctgatacgatctgcttgcttttttgatactgcttttctcgtcttttctcaacttcaagccgattcacatggcttctgctgtactcctcgtaccccattccatgcgacttgtgcatcgctttttccatttcggccgtgaattcaaggtcaagctgatcttggcttgaacaaataatgaatcatcctttcagagattttcttacatagtaccagttatatacaaactctgcaaagatgtgtgtgctttcaatatgctttcacggtcgaaaaatcaatgcttcatctgctggaattcttccatcgcctgcaaaacgagcgtgacggcttggctcatggctgcgcctccgccaaatgccgcagttacaccgactgcctcaagaatttcttcctccgatgctccgcaatccaggcagcccttgatgtgataaataatgcaatattcatcctgcgtattgacactgatgcccagtgcgatcagctgcttatccttttcgctgagcacgccttttttaaagcactcttcggtaaattcgttgtatttggcggcaattccgggcattttctcggaaaagatgccgatccccgccttatattcgtgcagtgcggattcgataatgccttctgattcatgctgattcacgttttgttcctccattttcagtaggtagtcttttttattatgagcctcttttcaaaaaatacgcgaaaaaaccccggttttctccgaaaccggggtgttctttcatttactcagatacagaaatgacagagcctttatattttttgtcgatgaactttttgatgtcgtcagagcgcaatacttccatcagagcttttactttgtcagaatcttcgtcgcctttgcggacggcgatgatgttagcgtaaggattgtcttttggagactcaagttcgattgaatcagttttcggattcagcttgttttggatcgcatagttcacattgatgaacactgcgtctgcttcattagcttcgtatgcttttgccgtcatttcaggcgccacatcatttttgattttcaggtttttcttgttttctgtaatatcttttactgtcgcatctactttttcaatgcctgatttcagcttgatcagtcccgcattttcaagcattgcaagcatgcggccctgttcagcggcattgttgctcataataatttttgcaccgtcaggaaggtcttttaaagatttatactttttagagtaaatgccgaatggctcaaggtgtaccgcaccgacgttgactagatcgtaatctttgttttctttcatttcctgttcaaggtaagggacgtgctggaagtagttcgcatcaagatcttttgtagcgagcgctttgttgatcagtttgtagtccgtgaaatttttgattttaagctcatagcctttttctttcaaaagcggttttgcttcttcaaggatttcggcgtgaggcgtcggcgtcgctccgactgtaatgactttgctgtctttatctccttcgctgctggaagatccgcaagcggccaaaacgcctgcaaaaatgatgaataaagctgttaataaaccttttttcatgttggtgtcctccctaacgtttgtctaatttatttgttataaaatccccgataaattggatgatgaacacaatagctaagatgaaaatagtggcgatcagtataatatcgggattgttcatctgaaagccgtttacataggcaaggttcccgagtccgcctgaaccgattgctccggccatcgctgtcgaaccgatcagtgcaatggctgtaaccgtaatgcctgagatcagcgccggcatcgattcgggcaggagcactttaaatatgatcgtcgatgtttttgcccccatcgatttcgctgcttcaatcacgcctttgtcgacctcgcgcaaagcaatttcaaccaggcgggcatagaacggagcggatgcgataatcaaagccggaagagcggcattcggccccagaatcgtattcattaaaaactttgtgaaaccgagcagcaaaataatcaatatgataaaaggaatagacctgaacacattgacgattgccgagattacaccgttaacgactcggttctgccaaatgttgccttttgaagtcaaatagagcagcatgccgagaatcactccgatgataaaagcaaacaatagggaaattcctgtcatatatatcgtttcatacgttgcttcccacagctgctccatatctacgtttggaaacagtttttcaaacattcgtgatcacctctgcttctacctggcggctcttgatgaaatcgaccacgtcattgacctcgttttcacgtccgtcgacatgtatgaacaatgaaccgtatgcaccgtcctgagtctgcgagattttgccttgaaggatgttgacttcaacatcgaacttccgaatgatctgcgtgatcagcggcgattcggccgcttcgccgacgaaagtgagcttgatcgtccgcccggatgtcgtttcttcgaggaaatgcttcagcgtttcctttgtttccaccggttctgttacctgctgaacaaagcgctttgtcatttcttccttcggcttgatgaagacgttcagtacatcgccttcttctacgacctttccgttttccatgacggccactctgtggcagattttcctgatgacatgcatttcatgagtgatcaggacaatggtcagtccgagcctttcattgatatcggacagaagacccagaatcgaatcagtcgtctgcggatcaagcgctgatgtcgcttcatcgcataacagaactttcggattgtttgcgagcgcccgtgcgatgccgacgcgctgcttttggcctccgctcagctgtgaagggtaggcgttttccttgccttcaagaccgacaagcttaatcagttcagcgactctttccagacgttttgctttgctgacaccggcgatctccagcggaaacgcaatattgtcgcgcaccgttctcgaccataacaggttgaaatgctggaaaatcatgctgatttcctgccttgctttcctcagcttcttccctttgatctcgctgatttttctgccggctacttcaaccgtgcctgaagtcggctgttcaagtccgttcaagagacggatcaaggagctttttccggctccgctatatccaataattccgaagatttcacctttttttatcgtaagggtgacatcttggacagcattgacatctccatgctttgaccgataaatctttgaaacattttgaagatttatcaaaagccatcacctgctttcttgctcaattctcatagttgtctaaattcctgatcaatcaacgaaaaaagcctttctgcacacatgagcagaaaggctttggaaaagtctgggcctttctctcatctttcaaagcataacgcttcgcgtgaattggcaccatttcaacacgtgttgatggttgccgggtttcatagggcacttccctccacctctctggataagagaaacatatatttattttttgattattatgatcggaattcttaaagtaggatatcatgcgaaaaaatagttgtcaactatttttcgtaagacaatcgtcctacggcgaaaagagacgagcgtaaacgcccgtccctgtctgactaatacacggaatgtgccgattttttgaatttttaaaaagtctatgaataaagatcgctgtttttaaagaagccgtccgtcagccataaaatcgcttcaagcttcaataaagctctaaaagagccttttactttaacagtgccgcgctgtacgagatgctgcaatgaaatgtcgccatgaagaaggtcaataatctcgctttgctctccaaaaaaggtcaaatgagctttttctacaggagaatatttttccatttcccctttttcgttgattgctaacgtaaaagcttctttctctccttgaaacgtaatcagcaaagccgttgtagataatagaggttttaaaaaaagagccttgccctctctttctatcaatcccattttctccaactgtataacctcctgtaaattggtcatacttacagattctctgtctgctgcaggagttcctttaggaattgctcgacaagtttttgctggttatttcccgagaaatatgtcaaaaccgcccttaatccacaagattttgtttaatcgtatcatataagtaggaaacggagtgaaaagcgtattcttttttgacgactcgcccttttttgtaaaggataaaacacgggacgctttcaatttcctgctgtttggcaaatgacggggagtaattgagattgtttttataaaaaggaatgtccttcatcatttcatcaacgacctccagcattcttccggccagctgacacgttccgcagaacggcgtgtatacatatagaagacaagtttcatgctctagccgttttagctctttttcttgaagttcttgcatctgttgaaccgcacctcaatacgttttataatagatattttgtatgtacccggatgtttgaacgaaataatacttctgcaacatgctgactcggggcggaagcgacttctttgtatactctatcaatgtatagatgcgaagcttggggaagctccctcttcagctgccggcggagcttttcgcctgattcatcggcatccaccaggatataaacgtctttatcgaacagcgtctcagcgaattcatcgagttttgcctggctgatcgttccgtttgtgcatatgatgtccacgggctcttcgatgacatgcttcactttttgcttatctgatttcccttcgacgatcatgactttttcattttccggcatatggatcacctttaaagatttacttgtaaaaaaaggcagtgaatattcaccgcctgacttgattaacaccagccttggtggtcatcacagtctacatatttagcatccggtccgcttacggtatccgccattttgtaaaacttttcatcttggaatgaatatccagatttcaactcgtattgatccttgccggtcattcggccgatcagctcattttcatgatacagctgcgttccgccgttttttaatcggctttccacatgttctgtaatatcaatacgttcttttttcagcgtcaatttggacaccccctcctgatatagagtatccaaacgacgaatgtctatcctgtttagtcttcttttatcatgtcctcatattgcccggctgtcatcaggttttcgatttcagaagcgtctgacggctcgacgacaatcatccaagccttttcatacggagactcgttgacgaattcagggctgtcttccagatcttcgttcacttcgaccacttttccgttgatcggggcatacagctcagaaacggtctttacggattcaacgctgccaaaaggctcgtccgctttgatttcgtctcccacttcaggaagctcgacaaatacgatgtctccaagctcagattgtgcaaagtctgtaatgccgattctgactttatctccttcggttttcacccattcgtgttcttctgaataacgcaactctttcggtgtgctcatgctaacccctccataaagtgttttaatcgatcctacattgaagatatcatattttgatgtgttataaccagtatgtcttaaactgatcttctttaaaaccgaccgttactttactgccgtctgtcgtaattgggcgtttgatcagcataccgtctgatgcaagcagttccagctgctcatcttcagacatgctttgcagcttgtctttcaggccgagttcgcggtatttttggccgctcgtgttgaaaaacttcttcaattcaagcccgcttttctcgtagagctctttcagtttttccttgctcggcggctgttctgcgatatgtatcccattgatttcttttccgtggtcttcgagccattttttcgctttgcggcatgtcccgcatttcggataccagtaaaaatccaaagccatacatacacccctctcatttaatcgaggtaattttaacatagatcgaatgaaaaacctaaaacagtgctcgggttctattaacagctcagaaagccctgcattaaagcagggcttctcgtttaaacgatatatttctcagcttcaaagactcccttggctgcctggcgctttttctcaatcacgttgacaggcgtaaagcgcgtcaatttgcgcagcgcggacagcatcatgcgcagcgaatcgcctgattccatcgcaatgagcgattctttggcatggctttcaatttcctgaaaggcttcctgcgcaaaaatttgcgtataaagaattttctgtgcgtttttgtcttcgccggttgcccggatggctttttcagtacgtaaaatagctgcttccattgcgtagatctggctgacaatgtcggcgatgttgacgaggatttcctgctcctggtcgagcgcttttccgtatttttgcgcggcgagtcccgcgatcatgagcgcggtctttttggcgtttctcagcagatacttttcctgttcgagaacgccgtcacctggttcttcaggcatgagcatcatcagttcttcctgaagagcctttgctttctcaaacagaggaagctcgcctttcatcgcttttttcatgtaggtgcccgggacgatgagccggttgatttcgtttgtgccttcaaaaatccggttaatccgtgaatcgcggtaagcccgctccacttcgtattcctgcatgaatccgtaaccgccgtggatttgaacgccttcatcaacgatataatcaagcgtttcagatccgaatactttgttaagggagcattcgattgcatattctgcgatcgatttcgcaacctggcgcccgtctttttgctcttcttcgctcaaggtgcccattttgtcttcaaacagcccgaccgtacgataaacagagctttccatcgcataaagtttgactgacatgttggcgattttttccccaattaagctgaactttgaaatcggtgtcttaaactgctggcgctgattggcgtatgaagcggacagctcgatgacccgtttcgaagcgccgattgtcccgacagcgagcttatagcgtccgatatttaaaatattgaaggcgatgacatgcccttttcccggttcacctaataggttttcttttggaacttgaacctggtctaagatgagcgtgcgggtcgaagagcctttgatgcccatttttttctcttcaggccctgtggagacgcctgagtagtctttttccacaatgaaggccgagaaatgttcgccgtctattttcgcatagacgatgaaaatatcagcaaaggctgagtttgtaatccattgcttttcgccgtttaatatatagtgggttcccgcctcattcaaaacggccgttgtttttgcccctaatgcatcagacccggagcccggctctgttaaagcataggctgcaaacttttcccccgttgcaagggacggcagatactttttcttttgctcctcggttccgaaaaatacgatcggaagcgtgccgatccctacgtgcgccccgtacgataacgaaaagctccccgctcttgaaaatttttcggtgattaacgccgagctgattttatcaagtccgagtccgccatactcctcaggaacgtcagctccgagaagcccgagttcgccggcttttttcagaagcctgacagaatgatcgaaattgtgctcttcaatttcgtcgatgtacggtagcacatctccgagaatataatcctcagtcgttttggcgatcattttatgttcatctgtgaaatcttccggtgtgaacatctgatcagccgttacctcttcgatcagaaaggcgccgccttttttcatatgatcttttgtttgttccattgttccatcccccttgtgattaaactaattcgaatacccctgctgctcccatgcctccgccgatacacatcgtcacaatgccgaattgctcgcttctccggcgcatttcgtggatcaatgtcagcgtcagctttgtacccgtgcagccgagcggatgtccgagcgcaatcgctccgccgttgacattgactttttcttcatcaatgccaagcgacctgatgacctggatcgcttgcgatgcaaacgcctcatttaattcgaataaaccgatatccgacagctcaagtcccgccatcttcagcgcccttgggactgcttccacagggccgatgcccatcacttccggcggaacgccgccgactgcgaacgaacgaaattttgcgaggggctttaacccgagtgcgtccgctttttctctgtccatgatcatcactgcggcagccccgtcgctcgtctgcgaggaattccctgccgtaaccgagccgtttgccgaaaacgccggtttcaacgttgacagaacgtctttggttgtccccgggcgtacaccttcatcggcagagaaagtaaacgtccgctccttcaggttatgatgttcatccacttctctgacggtgacgtccaccgggacgatttcatcttcgaactttccttccgcgatcgccttggctgctttttgatggctgttgacggcaaatgcatcttggtcctccctggaaacgccgtatttgacggcaacctgttcagccgtatggcccattcccatataatattcaggagccgtttccgccagagccgcgttcggtctgacgatatgacccatcatcggcacgatgctcatcgattcggcgccgcctgcaatgatcgtgtcagcagctccaagcatgattttttcggccccgtaagcgattgattgaagtcctgatgaacaatatctgttgatcgtaacggccggaactgtgtgcggcagaccggcaagcgcgccgatattgcgcgccatattcaagccttgttcggcttccggcgtagcgcagccgatgatcaaatcatcgatattcccttcataaccgcccgctcttttcagcgtctctctcaccgcatatgcgcctaaatcatcgggacggacagtcctcaatgagcctttttttgcttttccgatcggggttctcgcccccgatacaataactgcctctttcattattttccctcctaattacgcaaaggtttgcctttcacaagcatatgctgcattctcgcctgcgatttcggttcgctcacaaggctcagaaacgcttctctttccaaattgagcaagtattcttccgttacttcggcgccgaatggaactcggccgcccgcgatgacaaacgccagttttttcgcaatcttcatgtcgtgttcagagatggcgccggaaagttttaacgattcagcaccgagcaggagcgccgcatagccggtttcgcccgtcaccggaactttctctttcaccggcggacggtagccgctttcggaaagtgtcaggacgagttttttggcatcgtataacaagtgatcctgattgatgctgatttgatcctctgcggttaagatgttcagttctttcgcttcttgagccgaagtcgacgtttttgcaagggcaattgtctcaaacgtcttgatggcggcctcctggatatccggtttaacgccttcaggcagccctttcaagtaatttaaataaagctctttattgcctccgccgcccggaatcagaccgacgcctgtttcaacgaggcccatgtatgattcgcttgaggcttgaacacgggcagcaggcaggcatagctcagtccccccgccaagcgtcatgccgaacggagcagcgacgaccggcttggaactgtatttcactttcatcatcgtctcttggaactgacggatgatcatgtcaatttccatatagttgtcgtcttgagcttccatcagcatcatcgcgagattggctccgacgcagaaatttttgccctggttgccgatcacaagccctttatagttggcgtctacttcctcgagagcaaatttcagcatttgaatgatgtccaggccgattgcgttgcttttcgagtgaaattcgagcagtgcgacatcatcgcctaaatcgatcaaacttgccccgctgtttttcttgatgacgccttttgtttctttgagtgacgacaaatggatcgttttcttgttttcttgaagcgccctgtattcgccgctttcaaaacagtagtagaacgtctttccgttttccttaaggtagaaggtttcatgtccttttgcgagcatttccttcacccagtccgcgaccttccagccctctgcttcaagcttttgcaccgagcttttcacaccgatgctgtcccacatttcaaacggcccttccgaccagccgaatccccatttcatcgcctgatcaaccgccgttatgctgccggcgatttcccctgtcagctccgccgaatatacaagcgtcggagctgtaatcttccaaaggaggcttcccgccctgtcatcggaataaacaagcgctttcaatctcgctcctgcgcctttcatttgcttggccgcttccagtcccgatgtttttaatgtttgacgcgcgctgtaggtcatcgtcatcggatcgagctcaaggatgtcttttccttcttttttgtaaaaaccttgtttcgctttgctcccgatccagcctttttcgagcatttgttcaataaattcagggagccggaaaacgtttttttcttcgcccgtgacttggttatagacatttttggcaacgtgtgaaaatgtatcaaggccgacgacatcgagcgttctgaaggtcgcgcttttcgggcgtccgatcagcggacctgtaatcgaatcgacttcgcctatcgtgtagccgcctttcagcatttcctgaaccgtcacaagcaagccgtaggttccgatgcggttggcgataaagtttggcgtgtctttcgcttcaacaacccctttgccaagaacgtcttcgccgaatttcttcataaaggacagcacttcgggctccgtttcgtcaatcggaatcacctcaaggagctttaaatagcgggccggattgaagaagtgcgttcctaaaaagtgctttttaaaatcagcggaccttccctcagccatctgcctgacggagatgcctgatgtgttgctgctgacgatgcttccttgttttctgtattgatcgacctttgaaaacacttgctttttgatctccaggttttcgacaacaacttcaataatccagtcggcatctttaatcttttcaaaatcgtcttccatgttccctgtgctgatacggctgatattcttctttgaagtcagcggagccggtttttgctttagcagcttttgtacggctgtccgtgccagccgattgcgcacatccgggtcttcaagggtgcggccttttttcctttcctcatctgttaattcatgcggcaccatatcgagcagtaatacaggaatcccgatattggctaagtgagccgcgatgccggaacccataacaccggaaccgataacggcggcttttcgaatatgcttgaccatgaaagatcctcccccacctttgaatgaatactcattcatttttactccaaaaaaataaactctcctgtcttctttcatcttaaaagattttggaagcgagttcaataacttggtgcaaaatttctgaatttttttcatcgggtatgatcttgccgtgtttacatgtttccccgcttttgggacaaaccaatagagaggaggtgaaggccttggtacgtgaaagaaaaaatccatcttctgccgcagtcagcgccgcaagcataaaaggcaatgcaggtccggattataaaaagacggatgcgggcggtaaacggacaagccaaaaccagcaatataaaaagcataatatggatgttcctgaagatcactaagcccctttaagcatccggtataaatttccgctgtgttaggaaatctaaaaataaacgctaaaaggaggcagacgcatgcagcagcaaggaatgacaacaccgccgccggtcatttcaacgaaggaccatctgtatttgcaggatatgctgaactggaacctgctcgcgatgaaaaaagcgcattttatggcggatcaatgccaggatcagtctcttaaaacagaactcgacagggtcggccaaatgcaccatcaccattacaatatgatattggagcagcttcgtcaaaatcaaacgcaaaacccgtcagcatacatgcaataggaggtcaatgatgaatcagcaaaaccaacagaaaatcggcaatcaggaaacccctgttccaaagacgagcgcgatgaacgacagggattttgtcaacgaactgctgacaaccgaaaaatatatgacgtcagcatactcgacggcgcttaatgaactaagccatgaatcgctttaccaggccgtacagccgctgtttaacgaggcgcaaaacgctcagcgcagattgtaccaggtaatgtttcaaaacggatggtacaaggtggaggcagaagatgcccaaaaaatccagcagtcctatcagcagttccattctacactgcaagaccagtcgccttatcagcaaaatcaataaacaaaaaataagcagaggaatctctctgcttattttttctgattagccgcccggtgcgcttcattacgttctttaatctggcggattacttcttttatcccctgcttcgcatccggataagctccgttccaatgcttggcgaggggcggcatgcttttggcgatatggctgtagatgatccacatcttcacctgttctttcagttcttcgtccgtttcgcccaaaagcagttccgtatatttctcgaccagtccgtccagctgctccctgagtttttccactcacgacaccctttctttatgtttatttctcgggcatgttctgcatttgacgccgttttcgtctgttgcataatacagacagcaagtcgtgcgtgtccgatcctccgcatgctgtccgggataaaaccttttgagagggttttcgtcctcaccttcatcaaaaaggcctggctctgcttcgtaaagaagaaaacggaaatctcgcgccgcccgtgccttgagcttcggatcttcctgaagcatgtcgtacatccaatacagataaaccgcaatattttcccaaagaatgtgctttgaaatcgagaatgtctgtcgacaggcctcgatcatgccgcccaaatggcgcctgaagatatcttcggtcaattttttcagttcttcggtgcggtccccttcgataagctcagcacctttgtgaaaataaaacgacggcgtccatccttgatcatccgcttctatctcccacgatacggaagccgggtcggctgggagccgttttccgcaaaccgtaaacagatagaaatgcagcgcagcaagcatgccgccgcgcttaacgagcattgaagccgcaactttttgattcggagcgttcagcctgtcttttatagcttctgcataacggcctaaaaaatcctcatcaaggagcatgtttcctttaacagagaataaggagccggtctgcttcgttccaaggcggaaacgaagcaatgactcaagctcctcttttgttaaattaagcatgggactgaaccacctgctggacgatgcatcttccttttccgtacggaatgcagtgcggcgtgccgaaaagcggatctttcgtcacttcgcagtccatttcaaaaacgtcctgtacaagcttgcagttgataatggattcaggccggccttcggcatatatctttttatctttaatcgcgacgaggtgatgggcgtagcggcaggcgaggttcaaatcgtgcagcaccatcacgatcgtgcgattttcgtgttcatttaattcaaacaataggtccagaatttcgatttgatgcgtcatatccaagtatgtcgtcggttcatccagtaaaatgatatccgtttcctgggcgagcgtcatcgcgatccaagcgcgctgccgctggcctcctgacaaggaatcgactgtacgctcagccagttcttccattcttgtcgctttcaaagccctttgcacggcctcttcatcttctgctgaccattgcttcagccagttttggtaaggataccgcccctgcttaacgagctggagaacggtcaagccttccggagccgaagggccttgaggaagaatggccagctcctttgccacttctttcgtcggaagcttggcgatggagctgccttcgaggagcaccgaaccgccctttggcttcatcaaacgtgcgagagaccgaaggagagtcgacttaccgcagccgttgctgccgataaatacggtgatttcaccttttgggatcgttaagtttaactcatcaataatgattgtttctccataacctaagcttaacgtttctgttgaaatggcactcataaatgaaatctctccttttattggtttctgcttttatacagcaagtagataaagtaaggggcgccgatcgcggcggtaaacacaccggcaggcacttcaacgggagaaaaaagcgtgcggccgatgatgtcggcaatcagcacgagcaatcctccgatcagcgcggcaaccggcaagagggcgccgaatgacgatccgacaagccttcttgcgatatgcggggccatcaaaccgacaaaaccgacagttccggcaaaagcaacggcgattccggcaaaagcagtgctcagaagcaggagcaaaaagcggtttcgctgaaccgagctgcccgctcctgtcgccagttcttcgccgagcgtctggatattgacgtttctggcggcggctgccgatatcagcaaaaggacaagcgcagccggcaataaaacgttcacatcctgccagttcgccccatatactgatccggtaatccagacgttcgcctgagacattctgtatatcggtccttttatcataaacaatgtcgtcagcgactgggcaagcatcgaaaatccgattccgatcaaaacgagcctgaaagttgaagagccgtttttatatgaaagaaaataaacgagcattccggcgagagccgcgccgataaaagcggcgaccgggagccagctgatgctgaccgtaagcgcattatttttattggaaaacagcattaaaaacaagacaacggcgactgaagccccgccggtcacaccgataatatccggcgaagcgagcggattgcggatcagaccctggaggatcgatccggctgccgccagacagattccggcaaacagagcgaccaaaatccgcggcatcctgaaggacatgatgatcaggtcatcgcccggatcccccatgcccaaaaacgttttcgcgacggcgcccggagaaataaaacgttcgccgatgccggcgctgaggatgactgcacaagccgtcaacaccaataggatcatgaacgaaaacagcgcttttttgccgatcaacagtgaaatgccgccttttccgattctcagcgtgcggtaatttttcatttttggaacccccttctcgcgatatagacaaaaatgggtgtcccaatgatggctgtcatgacgccgacaggtacttcttcaggcatgatcaggtaccttgcgccaatgtctgcggtaacgagcaggatggctccaagcacggcgcagtacggaagaacccagcgatggtcgtgcccgacgataaatttagcaaaatgcgggatgacaatgccgataaagccgatcggcccggccacggcgacagatcccccggctagcaggacaatcgaaaccgccatcagcgctttaatcagccacgttttttggccgaggctttttgccacttcctcccccattgttaagacattgattttggatcctagcaaaaagctgatgatgaatgcgggcacgatatatggaagaacggagaccaagaggctgaggtcgcgcccctggacagagcccgcaagccaaaacagcgcctgctcaagagctgcttcattaacggaaagcattccttgcgtcagtgatgagaacagcgctgacatcgccgcccctgcaagcgtcagcttgaccggcgtcagaccttcccttccgagagagccgacaaaatagacgacaagcgcggcaaaggctgcgccgaaaaatgagatccatgcaatcgcctgaagcgaactgacatgaaagaaaaacagcgctccaacaacaaagaagccggcgcccgcattcacaccgaaaattcccggagaagcaagcggattttttgtcatcgcctgcattaaagcgccggctaccccgagggaagcgccgacagttgcagcgatcagcgcgcgcggcaaacgcacgtttttgatgaccagatgttcattagagccgctgaagtccgtaaaagccttgtaggccatcgaccatgacgtattcgtataaccgtatacgatactggcgcaaacggcggcagccagcaccaaaataaacgacagtagtgcgattgttctatatttattcgttcttaagagcataaattaaaattctcctagtttgactgaaacatctactggttattgtatcagataacactgatcttgaaaatcattttcaattaacaattgacaaaattctgatcaaaaattatgatcaggatgaatgacttacatacctaaggaggacacacatgaagagatggtctattgttggatttatcgctttgttagcgatttcaattcttgcagcctgcggcggaggcaaagatgactctgcaaagggcggagagaataaagatacgatcaccgttaaacatgcaatgggtacggaagaccgagtgcctgcagacccgaaaagagtcgtcgtcctgacaaatgaaggaaccgaagcgcttttggaactcggaatcaaacctgtgggtgcagtcaaatcctggacaggcgatccttggtataagcatattcaagccgatatgaaaggcgttaagcaaatcggactcgaaggcgaaccgaatatcgaagcgattgccgagctgaagcctgatttaatcatcgggaataaaatgagacatgaaaaaatctacgacaagcttgaaaaaattgctccgactgtcttctctgaaacgctgcgcggagaatggaaagacaacttctctctctacgcgaaagcggtgaataaagagaaaaagggcaaagaaattttagaagatttcgataaaaaagtcagcgaattaagcgacaagctcggcgaccagaaaaagaaacgggtgtcggtaatcagatttatggccggccaatcaaggatttactataaagattctttcccgggaattatcctggatcagctcggattcaagtatccggaaaaacaggaaaaactgtttgagaaacaagacgacaaatttgtttttatgacggaaaataaagaatcgatccctgatatggacggagatgtcctggtctatttcacatataaacctgccgaaagcaaaaaagaagctgaaacatggcaaaacgattggacaagcgatccgctgtggaaaaaattgaacgctgtaaaaaccggaaacgcccatgaagtcgacgatgcgatctggacgacggccggcggcgtaaaagcagcgtatctgttccttgatgacatcgaaaaatactttttaaaatcttaagcaaaaaagggcatttccagtttggaaatgctcttttgtttattttccgttatagattctggacgtgccatcaggccatttcacccgcagctgaaaccggtcatattgttcgtcaagattgaaggcctcgagcacattgctgatcacgtcctgctctgaatcggatttggcgatcgaaagctcgcttaaaaccattttcatttcgtttaaagcttcctccccttcgcggtccgctccgttcagatagtctttaatcgatgcttcttcccgctcctgtttgtcgtatacggcttcaaacgtattgtgctttccatggccatagttcacttccaatgcaaatgtatcgtaaggcacgcttttcacatctgaaacaggggcgttatcgggaacggcctccttgccttccgcatgttcttccgctatggagccgcagccggtcatcaggatcaggacgagagcgataacggccatccgaaattgattcatcccgttcatctcctctatgcacattatccttagctatgtccactttgcggaaactcattcaatctaagcggaagcatttatgtcatcgctaaaaatgcttctgcatctcggacagccggctgaatggccgcttcccagaaatcccgcttcgtcagatcggcgccgagatgcttcatggccagtttctcaacagacatggaggctgtatcttttaagagagcaatatatttttcttcaaatgccgcaccctctttcagcgcttgcgcgtaaatgccaagcgaaaacaagtagccgaacgtataaggaaaattgtaaaacggaacagacgtaatataaaaatgaagctttgatgcccaaaaatacggatgatactcgccaagcgcaccgcaaaacgcttctttctgagcttcttccatcagttcgttcagccttccggcggatacgacgccgttttttcgttcatcgtagaagcgggtttcaaataggaaccttgcgtgaatgttcataaaaaaggcgacgctccgctgaaccttatcttccagaaggacgattttttcttcgtctgaaccggcttgttttaacgccgcatcggccacgatcatttctgcaaaggtggacgccgtttccgccacattcatcgcatacgccctgttcagcggcctgacgtccagcatggattcctgatgaaaggcatggccaagctcatgcgccaaggtggaaacgtttgactggcttcctgcaaatgtcataaatattcttgattccccgctgtcaggaaaattggcgcaaaagccgcccggacgttttcctcccctgtcttcagcttcaacccatctgtctctgagcgccttttcagcaaaggaggagagcttttttccaaacgttttaaactgcccggtaataaaagcggctgcctcttgatacgaatattcctttgctgctgaaccgatcggcgcttcgacgtcataccagctcagtttatccagtccgagcaaagacgccttccgggaaagatagtctgcaaacggctttttatgatcaataatgacctgccacatgacatcaagggtttcctgcttcatgcggttgatgtccagcggttctttcaatacattgtcccagcctctcgcctcatagacgttcagtctgaaaccggcgaggtgattcagcgtgctgctgagcaaatcagcgtgctgttcccagccgtggtccaaattttccgatacggagcggcggatctttctgtcaggtttagatgtcaggttctgcgcctgtccgacagacagaattttcgtctcgccatcttcttcatacggaatttgaatttggtcgacgatgctgtcgtacatatcgccccaggcatgatatccgtcaacagacaagccttgaatcaatgtttcctgttcggaactaagcttttccgttacccgctctcttctctcattcaaaatataagcgatatcggaaatgctttcatcttgaaggatcgcttcccattctacatttgggacaacggcaaatttgctgtcaagcacgaccagcgccttctgcgcatcggcagcgagccgggtgacctcaaaattaagggcattcgcctttaaatccgcggtgtcctgggcttggagacatccgacaaaagcgtctgcttcgcggattttaacatcaattgtttcaaaaagcgccagcgtttctttcaattcatcaaggccgctttttgagacggtaagagcctcggccgaacgtttaaaagttgaaagcagtgttttaatctcatttaaatattggcggaattcggcggagccgctcccgcctttaaagaaaacctcgagatcccacgtatccttaagttgatgaaatgtcattgttcccgtcccctttcattggcttgtttccattataagataaatttgccttttcagggcaaataaaaaaacggccggcttgtgagccggctcgcctcttcccttatcatattacagctgcctcatccgcttgaccgcatagctggccgtcaataaaccgattaggccgaacacaaataaaaacaatccgcctttactttgcggttgaccctgaatagcatctgtaccgtttgtcatttccgcgctgaatggttctgcgatttgcagggcttgaagcagcctgccatcctcccctttaatgttaaggattccgtccgtgtctacattttcactcagaacttcgcctttctttttcgtaacgtataaagggtccttcagttcatggctcgtcccgttctggtccgtaaacgcttctccctttttgagttcttgtgtctcgaaattgtgaaatccctcatccagaagagcttttgtatcgctgtacatcattttcttgctatctgccttcatgacgaccgcaattaaatcaaggctgccccgcgttgccgtcgtgacaagggtatgctttgattcatccacaaatcctgttttgccgccggttatacctttgtaaggaatctcacccgtcagcattcgatgatggtttttaagcgtcgtgtcccatgtctgtccgtgccaatccgtttgcttttccgaaaaaagcgctcggaacgttttgtttttcattgcgtactcagtaattctcgccatgtcggcagacgtcgtataatgatttttgtcaaacagcccgtgaggattcataaaatgagtgtcatgcactccggcatgttcggcaataaacgcgttcaaatcatccgcaaactgtttcacgcttccgctgagatgttcggcgatcgccgtaccggcgtcatttcccgaattcatcagcagcccttggagcagccgttttaatggaaccgactccccctcttccagatatacgcttgatccttccgtttgagcggcatttttgctgactttcacacgatcttccaaatttccgttttctattgcataaatcgccgtggcaattttggttatgctggctggatacatttttttgcggctgtttttttcatagaggacctggcccgatttcccatcgatcaatatagcggaaacgcttttgatttccggtttgtttttttctcctgcttgagccgagctatgaaaaaacagcgtcagacatagtacaataatgaacaggagggatcgtttaacattcatcgtgtcaccctgccttctttctcttttgcaatttttataaaaataggtcttttagcactttttaaattttaccaatgatgaactgtcgctgacaagccttttcttgtcaacaagccaaaattttgaatggaggaaactcattgaacaataaaatcgcaattgtaacgggcgcgacgagcggatttggtttattgaccgctttaaaactcgcaagcactcatttcgtaatcgcaacggcgcgccatccagaaaaagcggaagctctgcggaaccgtatagcggagctgtcgatcgagtcatcgattgccgtcgctgaacttgatgtcacaaacgaacaatcgatttcctcattttccgaagagctgaagcagtacggacagatagacgttctcatcaataatgcaggaacggcatacggcggattcgctgaagagctttctcttggcgactacagaaaacagtatgacaccaatgttttcggcctggtggcagtcacaaaagcggtccttccttatatgaagaaacacagcggcgccaaaatcatcaatctgagcagcatcagcgggcggatcgctttccccgctttctcggcatatgcttcatcaaagcatgcagttgaaggcttttcagaaagcctccgcctcgaactccgtccattcggcatcaatgtggccgtcgtccagccgggatcgtaccagacggcgatttgggagacatcgtttgccgcccaagtcactgtacctgatgccgaatcacagtacaaaacatatttcgagcggatctccgcctacattgcagcgagccgcaaacattacggaaacccggatgatgtggctgaattgatctgccgactcgctgcaaaaaagcggctgaacaggctgcgctatccgatcggcaggggcgtccgtctctcgatccttctccaccaaatcctgccatggcggatttgggaacgtgcggtcataaaaaaattgcttaaatgaggtaatttaaaataattataatttagtattgattttaattttgtatttgttataatataattaacaaatgaaaaacacgaggaggaaatatcatatgatctctcaacaattaaaacagcaaaatcctgtacttgaaaactcaatgaatacgaatttgtcaaactggttcatcctttacacgaagcttcaccgttttcactggtacgtaaaagggccgcagttctttaccctacatgaaaaatttgaagagctatacaaccatgccgcagaaacagcagatgtgatcgcggaacgcttgctggccatcggcggacagccgctcgccacaatgaaagaatacattgaccacggcacaattgaggaaaacggagccgaaaaaacggccgaagaaatggtttccgcactggtaagcgattaccgtcaaatccgcgatgaaattcagcataccatcgaacttgcggaagataaatcagatcattctaccgctgacctttatatcgccctgacagaggaaattgataagcagatttggatgctttcttcatttttggacaagtaatatgaaaaagccatggcgtttgccatggcttttatttatgatttgcttttcgcaagttttgctttcattgttgtttgctttccgtttctcagcacctcaaatgtgacagtatctcctgcttttgcttctgtataaagaatttttctgaggtctgaggtggtttcgacgtttttgccgttcattttggtgatgacgtcgccggctttcatacccgcgtctgccgcaggcgatttcggcgatactttatcgatgtacacgcctttattaagctggtctccgaaaaggccgagcgtattttgctggtactgttcaggcacctgctgcatatcgatcatttgcacgccgaggaaaggccgttccactttccctttttccaaaagctcgtcaacgatcggctgaacatcgttgctcggaatcgcgaagccaagcgattcaacaccgctttggctgatcttcaggctgttgatgccgatgacctgcccgctgctgttaatcagaggcccgccgctgtttccagggttgatcgccgcatctgtctgaaggacgttcatatcccaattcccttcagatgttgagacttcaatcgtccggttgacaccgctgatgatgccttctgtaaccgttcttgaaaattgaaggccgagagggttcccgatcgcaattactttttcgccggcgcgcagttttgcggagtctccgaaacttgcaaccttatcaacgcctttgctgctgatctctaaaacagccagatcagtcaaagcgtcgctgccgataatcttggcatccgcggtctttccgttgtataaggagatggtcaccttcgaggcgccttcaacgacatggttgtttgtgataatgtaggccttgccgccgtctttcttaaagatgacgcctgatcccgtgccgctctcctccacgtcgtcttcagagaagccgaagctcgtttgaatatttgaaactccgacgatcgcaggctccaaatcttccaccatatcaggtacgttatctgcgttcgtgacaggttttgtggtgaaattctgcgactgctttggctctgtctgtccggttccggcagtttcgctcggatgatcgcccggcagatacggggagattccaagcaccaagccgcctccgatgatcccgcccaaaatcgggctcagccacgaagccttgcgccgcttttcttttgccgctctcgtttccctggcatcttccagggctgcagcggtttctttattcgtaagatctgactgatcgtctgtatccttctttaaaatcagctcgggctcctttgccggctgttctgactgctgctcctcagaacctgccgtttgcggcgtctgcgcttcttcgtgaaactgctcttcatttgcatgtttttgttcgtcatcgcgtctaaaatccataagcgtacacttcctttatttttcttgtcttcaactatcgcaaatggcattaaagctttaacatccacaaaaaaagagacccggccatcgttcactctgttttcattccctttcttccctgatgaatatgttacgaaaacattgtgggataaaaatgaaaagaatatgtgaaattatgaaaattgaccagacttatgttaaaactagtataatgacgtagaaaggatgtgaaccgcccttgtcatactccatttatctagttgaagatgaagagaatttaaatgaattgctgacaaaatacttagagagtgaaggctggcacgtcacttcttttctaaacggtgaaagcgccaggcaaaaaataggccagtcacctcatttatggattctcgatatcatgttaccagatatcgacgggtatacgctaataaaagaaataaaaaatcaagatccggaagtccccgtcatttttatttctgcgcgcgatgccgacattgacagagtgctggggctcgaactgggcagcagcgactatatatctaagccgtttctccccagggagctgatcatccgcgtgcaaaagctgctcaagctgatttataaagaagaaccgcctgagaagaaaaaaggaacgccggtttcctgctatgaagtctatgaagacttgagagaagtctatgaaaatggcagcatgatcaatttgacgtcaaaggaatttgatcttctgcttctatttataaacaaccagggccgcgccttttcaagggaggatattctcaccagcgtctggggagacgattacttcggaaccgaccgcgtcgtcgacgatcttgtcagaaggctgcgcaagaaaatgcccgaactgaaagtggaaaccatctacgggtttggctacaggatgttgaaatcatgaagaacaggtcgctcgcctttcaaatttggagtgtcatttgcggcatcctgttaacggtctcgattttgctgacgtttctattctcgacgacactgcagaactttttcactgatgaaatttatacaaacattgaaaatgagcagcatgttctgacggaatacggattttccgattcaccggaaagaggcttcggcggaagcagcggctcgcgaagcacaaaccgccacgttcagcacgtcctgctgcctgagaaaggaaccgtctatcagagcccgcagattctccccgattcatttatcgagaaggtgcagaagctcgggaaaaggcaggacgagtcatcgaaaaggtattcggagaatgtcaacggagagcacgttttctttgtgctcaaaaaaatccagacccaggaccagacgtttctgttgttatcctatgcgcttgattcatacagggacgatttgtctcatacgctgtttaagcagctgctgtttattttgatcgtcgtcattttgctgagctggattccttctatttggctggcgaaatatttatcaagaccgctcgtcacgcttgaaaagcacgtcaaacaaatctctaaacaggattgggatgatcccgtgattgtcgacagggaagacgaaatcggcaagctggggcacaccattgaagacatgcggcaaaagctcatccagaaagatgagacagaacgcacgctcctgcaaaacatctcccacgacctgaaaacgccggtcatggtcatccgcgggtatacccagtcgatcaaagacggcatctaccctaaaggagatttggaaaacacgattgaagtcattgaaggcgaagctgaaaaacttgaaaagaaaatcaaggatcttctttatctgacaaagcttgattatttgctgagacaagaaagacagtacggaacttttgatatacaagaggtcattaaagaagttgttgaacgcttgagatggtccaaaaaagaattgaactggaagattgatcttgaagaggaaacaatgttgacgggcgatcaagaacaatggagcaagctgttggaaaacgttcttgaaaaccagatccgctatgcggagacattcattgacatcagcgtcaggtcgacgaaagaacatacattgatcaccattaaaaatgacggaccgcacattgaagaagagatgctttccagcctgtatgagccttttaataaagggaagaaaggcgaattcggcattggactcagcatcgttaaacgaatcttaacgctccaccatgctgacatgaccattcggaatgatcaaaccggtgtgtgctactcaatatccgttccgagaaattagactgtagacgctgcagtcttttttcatataaacgaatagccgttgaaatcccggtagctcggcttcactgtgttttttggctttttcatccatttcttttcgcacaggacgtgctttggatatttaactttgtccaccttaattcccctgctgcgcaggcgcctgatcatgtcatcgatttctttcatcaaccttcaccctttctccgcaaattttgaccactcggtcaccttactttataatataaataatatcaaacaaaaaaacaagttacaatctagttaaaaatataacggagcaaaaaaagtgacccgccagtcaccccggtccgccgaaagccgcttttgggttcgatctttcaggaaggtgaaagctatgaaacaaaaagagaaagtcattattgaaacagccatcaaacttttcgctaaaaaaggatacagttctacttcagttcaagagattgcaaaagagtgccaaatgtcaaaaggcgctttctacatttattttaaatcaaaagaagcgctcctcctttcagtccttcactactactatgaaagaatctttacccgaatccagaaaatcaaaacggagcatgacaatccgcgcgatgtgtaccggatgcagctcgtcgtttttttcgaaaacattttggagcataaagagtttatcacgatgcagtttaatgagcggtcgatgccgatcaatgaagaaattgaggcgtttgcgaaaaaaatgcggagaaccacgctcaggctgcacatcgaaaacatccagaacatttacggcaaagacattgaaccgtacagcgccgaactgtgctttatgatcaacggaatgagcgatgtctaccttgagctgatgattttgctgcaccattcgttcgacctgcagtctctcgccgaccacatgctgaaccgcctcgacgatttggcgaaggggatgatcaagcgcaatgaccagccgctgatcccattcgaaaaagcagacgagtggttcggcccattttacacatttgatccgctgaaggacgccctgctcaatgaaatgcgcgtcaaagcgaacaagcagtacaacggcgctcctcctgcagaccttgccgaaagcctggatattctggagaaagagctgagaaaagaaaaacgcaaaaacgccattatcaaaggcatgatagccaacttgaaggaatatcccgcgattcgaaaagaaacggacaaactcgccgaattgctcaaaaaagacatgcaccatccgcacggatgatccgcaaaacaaaaccggctgcaatgcatgcagccggtttgttgattatgctttcggtttcaccatttcttcaggtttaacaacttcgtcgaactgctcctctgtcaaaaggttcagcttgagagccgcttctttcagcgtcagcccctctttatgagccagcttcgcgattttcgcagcattttcgtatccgatatgcgggtttagagccgtaaccagcatgagagagttggtcaggttcttctcaattgtttcccgattaggttcgattcctacagcacacttgtcatggaatgaattcatgccgtcggcaagaagctgaacggattggaggaagttgtaaataatcacaggtttaaagacgttcagttcaaagttcccctggctcgcggcaaagccgatcgttgcgtcattccccatgatctgggatgcgaccattgtcagcgcttcgctttgcgtagggtttacttttccaggcatgatcgagcttcccggctcattttccgggataagcagctcgccgattccgcagcgaggtccgctcgcaagccatctgacatcattggcgattttcatgagatctgccgcaagcgctttaagcgccccatgcacgtgtgtcagttcatcatggcttgtcagcgcatgaaacttattaggcgagcttttgaatgtctgcccggtcagagcgctgatctcttcggcaacggtgctgccgaattcagggtgggcattaatgcctgttccgacggcagttccgccgatggcaagatcgcggattttttcagcagcttcaagaatcatctctttagagcggtccagcatgtatacccagccgctgatttcctgtcccaatgtcagcggtgtcgcatcctgcaaatgagtgcggccgattttgacaatgtctttgaaagcttcagctttttcatgcagcgtgcttctcaagcggtcaatcgccggaatcagtttatcgtgaatcgcgaggacagctgccacgtgcatagctgtcgggaatgtgtcgttagagctttggctgcggttgacatcatcattcgggtggattttcaggcttgatcctttttcctgcaaataagccgttcccctgtttgccacaacttcattcatattcatgttgctctgtgttccgctgccggtctgccagacgaccagcggaaaatggctgtcatactttccttctaaaatatcatcgcatacggaaacaatcgcttcctttttttccgcctcaagatttccaagcttttcattggcaatcgcagcgcttcttttcaagattgcaaacgcatacacaatttcctgcggcattttctcggaaccgattttaaagttctccttgcttctttgggtttgggctccccaaaacttatccgcgggaaccttgacttcacccatcgtatctttttcaattctgtagtccactttcttatcccttccttctctaattctgcaatattctatatttcgataaaaatcgataaaacccttccatttaaattttatctttattttaattttagctcaatataaacccgggtatcttttgcatatttatatttcggatttgttttaccgtattctttcgatacatatgaaacctcataatgcttagaaaaagattgaataatgcgttcaatctcctccggtttccccgtaagcctgatttgcgccaactttctcactccgtctctgttcaatgaaaatttcgccaaacactactgtaacacagtatattgtttttttaacaggaaaagataacctatacaactccagaaacaccagggcaggtgacgatcatgactcaatcggaattcaaggaacacatccatgaaaatctcgcaatgctccttccccatctcgagcataacgatgatctgattcaaaataaaaaaatgctgaaaaacggaatcattttttactttttgtactttaaagatttgaatgatgacaagaaaatccagaaggctgcgaaattgcttgtctccgatgacagctcctattcattggaggatgtccggctccgcttaaacaagctgaatgcggaacccgttacagcaaaaaaggacgcgattaacgcaatcttcaaaggaaaatgtctgctgttgatcaacggtttgaatactgtatttgcactgccgacagctgagaaaaagaaaagaagccttggagaagtgaatacagaaaacgtcgtcagaggcccgaaagtcggttttatcgaggatgtcgatacaaatgtggctctagtcaggcagcgtgtcccggataaagaactgaccgtggaaaaaatcccgctcggcaagagcaagtttaaagacgcgaccattctctatatccagggcaaagcggacgattcgatcatcaaagatcttaaaaagcgcctgaaaaaagttcagctggatgatattcaagataccggcgttcttgaagaattaatcgaagataataagtactcgccgtttccgcagatccagaataccgaaagacctgacaaggtttcttcagcgctgtttaatggacggatcgcaatttttgttgattactcgccatttgccctgatcgtgccggcttctttcggaatggtgatgcagtccccggacgatttttacgaaagatggatcgccacgaccttgatcagatttcttcggttcagttcgattttcatcaccctgttcctatcggcgttttatatttcgcttgtatcttttcatcaaggcatgctgccgacagctctcgctgttacgattgcgagcacgcgcgaaaatgtgccgtttccgccgctccttgaagcgctgattatggaagtgacgatcgagctcttacgggaagcgggactgcggcttcccaatccgctaggccagacgatcggcctcgtgggaggcgtcgtcatcggccaggcggcggtcgaagcaaatatcgtcagctctgtgatggtgatcatcgtcagcattatcgcccttgcttcatttactgtgccgcagtacggcatgggcctgtcgtttcgcgtgcttcgttttatttccatggtggctgcagccgtgttcgggctttacgggatcatattgtgcatgctcgccatcttcacccatttggctaggcaaagaagcttcggcatcccgtattttaacccgaaccattttttcagcttaaaacatacggatgaagccattattcgtctgccaacaaaagctcgggaggtgaaccgtaaaaatggatccaaaaaatcagcacgatcggattagcacgtatgaagccgcttcgatcataaccagcacaatgctcggcgcaggcctgctgacgctgcccagggcgctgacgcaaaaaacgctgtcgccggacggatggatcgtattaatctttgaggggcttgtcttttttctcattatctacatcaatgcaaaaatcgttaaaaaacacaacgtcctgtctttttttgattacacaagagaaggctgcggctttataatcgggaatattctcaacctgttaatcgttttatacttcatgggcgtggccagctttgaagccagggcgatggctgaaatggcaaagtttttccttcttcagttcacgccgatgagcgtgacgattttcgcttttatcgtctgtgcaatttatttggttgtcgggggtatcagcgatatgtcaaagatattcccgttcttcctgtccgttaccattgtcattcttctgatcgtctgcggactgagcctgaatatgtttcagctgaaccatttgcggccggttctcggccttggtttggagccggtcagcagagctttgacggtcgtttccatttcatttttaggggtggagctgatgatgtttctgccgaaatacgtcaaaaacaaagaaaagctttttaaggcatcggcgattggatttgggataccgctcttcttatatatcctcacctttgcggtcgttgtcggggcgctgaccgcgactgaggtcatgacgttgacatggccgacgatctcgttgtttcagtcttttgagataagagggattttcatcgaaaggttcgaatcgtttttgctcgtcatttggacgatccagtttttcacaacgtttgtcgtctatacgtactttgccgcttcaggacttgaaaacgtattcggatggcctgtgaaaaaaaacgtcctcttcatcggcgttgtcatctatctagcatcccttgtcccgcgggacgccaaccaggtcaacgccttcagcgactaccttggatatatctttatcgttgtcttctgtgcacttccgcttatgatctttttgctcgtgtccatcaaaaggaggtttacttcttcatgaaaaaaaagggaatgttagcagccctttctctgcttctccttttaacaggctgctgggacagcaggcagatcgaaaagcttagcatcgccatcggccttgccctcgataaaggcgaggacgataaaaacgtgaaattgacgtatcagtttcttgttcctaaaaagatcggacaagacggcagcgctcaggatccgtctaaagtggtgtccacctccggaaacacggtccatcaaaccatccgttccaccgctttgaaaaatttcccggtattctcgcagcatctgcaagtcctgattttctcagaggagcttgtatccgatatttctctggaagcattgatcaatcaatttattagggacaacagcatcagaaggagcagcgaggtctatatgacgcccggagctgccgacagcatactgaaggttgatggtgcaagtgaccctgcgtccgacgtgatccacagcatctctgaaaacagagcttcgacgatcaagctgctcaagcccgtcacattgaacgatatttcgattaaaatgcagtctgatttatcttatatcatgccgaaggttgtgatcgaaaaaggacagcttcagcttgaaggcggcgccgtgatcaaaaacaacaaataccatgcaaacctttcgccgtctcagatcgaagcgctgaatttattaactggcaatgtcatcggcggagtgatcgactcaaggcatgatggacatttgttctcgtatgaagtgttttcgatgacccaccgcgtgcgggcgatgaggcagaacggaaagtacaaattcgtcgtaaatgccaatattaaaggaaggctgtcagaggactggtatcttggagaggattcttttaatgaccaatatattaaaaacatagagaaatcggttcaaaaagacatcaaaaagcaggttgagcagctgatccatgtcctgcagcacgatatcaaaacggacgtcaccgatttttccgacaatgcgcggatcaattttccgaaggagtgggaaaaagacagattcaattgggacaaacacttcagcgaagcctatatcgactatcatattaaagcgacgattcaggactttggaacaaaaggtgcgacaaaaagcagatagctccccgtttttctgatagaatgtgtttgaaagggtgatgagcttgaagcggatattgcacatgacaggcatttttttgattgcagcggcagtcattctgtccggattcattatcagtgatgtcgcctatgatccgtttatggaggattcgcagtcgatgcttttcttcacgatcggcacatacctcaccactccgtttttttgcttcattggcggattcattttgctaggcatcggcaagttgatcgacttgcaggagaaacacaatgccatagtggccgagcggctcgacatcatttgccaaaacggtacagcgggcgaacatgcacgcgaagaaaacgaggccgcccaacttaccgcccgcacggttgaaacagattcattcactcttcctgcagccgaggatcgaaaatattggaacggctgaaaaacggctttcttgagaaagctgttttttgtttgatcagtcgacaagtttgtttcggtgggcgtagattgcggcttgtgtccggtcgtcgacttcaagcttggaaaggatgttcgtcacatgcgttttaactgttttaatggtgatatataattcttcggcaatacctttgtttgtcttgccctctgctacaagtttgaggatttccaattctcttgctgtcagcgattgatgaaggggctgttcgccggctgaatgtctcagcttggacaacacttttcctgcgactttggcttcaagctttggttctccgacgctcgcagccctgatcgcatcggcgatttcactcgctttcgacgttttcagcaaatagctgagcgctccggcttcgatgaccggatagaccttgtcatcatcaacgaagctcgtcagaacgatgattttcggatcggcaagctgccggcatatttgtttcgtggcctcaattccgtccatcccttccatcacaagatccatcaaaatcacgtcgggtttggtttcaagcgccaattcaacgccgcgctttccgtctgatgcctccccaatcacttcaatatcaggctgggattccaggaaagcggccagccccattctcaccatttcatgatcatcaattaacaatactcgaatcaccttttaagcctctcctttttgttgttcaaaaatcggaacctttacatcaacctgtgttccttttcccgtaaatgaaatgatttctgccactccgccgacttcgctggctctttccttgatcgagttcagcccgtacgaagatgttttgacggcatccatcttaaatccttcgccattgtcaatgactttcaactggagctgtttgttcctgagcagcagtctgacggtgacttttgtcgcttttgaatgccggaacacgtttgagagcgcttcttgaacgatcctgaacaggtggtcttccacacctttcggaagtttgcccgcatcctcaatctcccaatcgatgtcgatcgactgtttcgctttaaattctttcaaaaggtctgcaagcccttcttgtagacctttcccttcaagcgtaacaggtcgcaaatgcaaaaggagcgccctcatttcattctgggcatcggccgccattttttcgaccattttcagcctttgagcgagcttttcatcagccgcagcatcgattccctccaaaacagctgaagtcatcatggaaatcgcaaacagctgctggctcaccgcatcatgcaattcgcgcgcgagacgctgccgctcttcggagatcaccgattttttcatttgatcctgccattccgctctctcattggacagcttttgcaaagaggcaacctgtctttcgatccgttcggccatctcattgagctggtcggcggccagcccgatctcatcgtctccaagcgatggaatccggtaggcaaagttgccgttttcgtactttagaatagactcgatcagcttttcaagccgttttttcagctgattgccgaacatatagcctgagccgaacccgacagctgtgctgatcaatgcgagaagcgcgataaacggaatcccgaaccacctggaaacgatgagcaccctcggatccagctggtaataaaacagcataaagcccaatacagcaagaaaaatcgtaaagctgacaccaagggataagcggacggcgcgccattgaatgtttgcaagtctgttcgttctcatatgaaccgcacatccacatcgccgataaacagcgaaatcgaaattttgacccgtcgtgccgactgctcgtaattctctgtctcggaatagatttgattgccgatgccgctttttcggccgccgatgacgtcaatgtctccaacgaatgcagaagagctgatggacacctcaagatcggacggaatgtaaatatcgacatctccgatcaaccccgtaatgacgatggtgttttcgccctctgaaataatcgcctttgacaaatcgattttcacgtcaccgataaacccggagatattcaagtcatttaagtcaaaaggtgttttcatcaattttacatcaccgaaaaagaagctgcgctggccagggctgttcttctcctgaagcggcttgaaatccgccttttcctttcccctgtctttcggcttatggcggtcaaataccggctgatttgtcaccagccggtaccccgcataaattaagaaagcggcaaagaaaaagccgaacaggctgaatgtaatgctgaagatgtctttcagcagcagaaagcctgcaaaaatatacatgacagacccgagccagcggcgggaatatttgtggagaaaatacccggcaaaaagaaaagcgagcggccagaataacgcgtctccaagcccgctgttttgcaaaaatatgctgattccgaagagtacgatgatcagtccgatcagctggttttttgtaagacgcatgctgactcgagccccctttcttcttgtcgattactcaattgagacattcccgctcgtaattgagatgtcgattttattttttccatttcctttttttccagtcagcgtccgcttctcattggcgacttggtcaaatgaataggaatgactgatgtttccgcttgtcgactcggcttcaagactgatgtcggcatcatcgggcaggctgagcttggtgtttccggatgtctgtttgatgctcagagaatcgttgatctctgtaaaggaagcgcgcaaattgcccgaagtctgtttgatgctgagtttgccggtgacattttcaagttttgtattaccggatgtggagcggatatcagcagctgccgtttgaacgttttccagcctgaccgatcctgacgtcccttttacagaaaggtcttccgcctgaaggtcatcggccttgaggctgccgcttcccgactttaaggctacatttcgcaaatgcagaccgccgccggacagtttgacatttccgcttccagaagaaatcgacagatcatctttatattcagaagggatcttgacaatcagctcatttttcttccagaaaaacggccaaaagcctttcgaatgagcggaaagctgaagagtacccccctgttcggacgaatcaagccggacgttttttcctgaaatctcggcttttatatcatcgcggttttcagcttgaatgttgactgttatactctttgcatcaatgtcaattttatcgatgtcttccgcctgtgcatgatatgtgcgggctgactcttcatcgaagccgaagaaagaaaagccttcacgcccattaaacatcatgcctgcaaggatgagaatgccggcgatgatcagcagttttccaaccgtttttttcatttagaaaaccctttcggctagtaagtgtatgctccttattataaggaaaatggtctttgaaagaaatcaaaaattgcataaggggctgtgagagcccctattcgtttatgcatttcccgcaggtgtctgcttttccaagcctgtctttttagccctcattttttccagctcttcttccacttcttttgcatattcaaggcggccgaatgggctgcttgatgaagctgataattcagcatagctgttcacccttgtttccatctcttcaatccggttttccattctcataaattcccggtaggcgctttcgctgtcgattttattaaatgatgcattcatatgttctttcgctttcaccgcgtttgccctggcgatcagcgcatgctttcggtctttgatatcgcgcagtttaacctcaagtgtctccagctgttcctttaattcagcaagctgctttttcgcgtgctggtgagcgtccttgtattcagcagctttttcttcaaaatacttcatttctgagagcgcctttttagcaagttcttcttcacccgcatcaaaagcgagctgagcctggtttcttcgcttgacagcaagcttttcggcttcttccacttttcctttaaaactatgttcaattgtctgctgcttgacgatggtatgcttcgccttggcgatatcgctttccatgtcgcgtacgtattgattcagcatcacccgtgggttctccagtttatccaatccttcatttactgatgcgacaaacatgtctctgattctttttaaagccatgatctcgtcctcctaaaatattatttattctttttcaaaaagtcttcccactctgcatcaaagcctgtgtcatatgaagctgcggaaggctccgttttctctgaataaaggatgtcatcctgtttgtcatcttgcttcatcattttccatccgaaataaaccatcgctgcagcaaccgcgatgccgatcagaaacggcaatgaccctcccaaaaacatgatgccgaagatcgcggccagtaccgcggcaaactggcgtccttccttccattttttcacggaatagaatagaagcaatgctccaatagcacctgtaaccaatccgccgaaatggcctccgccgaagaacagggagacgccaaaaaggattagaaaaaagccgatgatggacttcccatttatattcatatttgctcctcctttctcgttcatgtctttactatagtcaatttcaggcttcgacaaaacgagtcacagattgattttgccgtacgaccagggtcgtatggcacatcggacccgctcgcataaaaagaccgctcatctcagcgagagagcggtctttctgcaggttgccttgctatgattcaactttaggattccagccgtccaatacgttttcaattgtccatttctcagcctcatgatcggcaagctgccttcgggcctcatgcgaaatcgcacccggacccgtattcccgtattcgtacaatctggcatcggccgcagaaaagcccgacatatccgtccatccttcaggcttgatgtgtgcgcctaaatcgcagcggtgatatagcacactggcgatggcgtcggggtctcctcccggatgccatgggcgcccgaggtataccgttccatctgcggcatcgcttgtcactctgcagtttgttatcaataaaccgaacggctttgcgatatgcgtgctcgcagctgtcacataaccgttgtttgtagcggacccgcggtcagcgctatggatctggcactcttcaaacacagctcttgctcctccgaaaatgaaatcgacatcgccttctatatagcattgataaaaatattgtgtaccgtcattgacaaacagtgtatcttgtctgcctataaacctgacatatttgaacgtcatcctgtttcctttcgcataaaccgccaccgcttgcgtatcggtcgtgtcgactttcgtgcggtcgaacgagttttcaaacgtcaaattttcggcttcaacatgatccgcataaataaacacgcttgaacttccggtcgtgccgtatttccctcctccttccttttcttttccggcatagttgtcatacgtaatcacagtctcgtaacgattttcgccgatcagcttcacaaacggctttgtagccggaatatgaacgacttctttgtaaactccttttttaatgaatatcactttctgttcccgactgtactcaggcaaagcatcgatcgcctcttgaacggtttgaaattcgccgtctccatccttcgaaaccgtcagccgtatagcagctgcctcccgattaaccacttgaacactccctctctttgaaaacgcttacttaaagtttacgacaaaaagccgttttcccctgccggaaaacggcttgatttgatcaatcggcccgtttctgttagataacgattggcggatggctcattcatgattttttctttgtccggaatacatcagcgcttcgttcatattcgacatccacttccccgagacggtgattgacaatgcgcgccgccgcaaataaataatcggacagccggttgacgtatggcagcgcaagcggcggaatgtcttcttctttggccaaagcgacaatctttcgttcagctcttctgatgaccgttctcgccgcatgcaaaaatgatgccgcttctgttccgcccggaagaataaacttggtcagctgcggcgcttcctcgacataggcatcaattcgttcttcaagcatggtgattgattcagccttgagcttgccttcttcctgaacattgacatgcgccaaatcactgccgcagtcgaacagctcatgctggatggcggtcaactctgacaaaatatcatgaaagagcgcctcttctgcttttaaataagactgagccagcccgatgaaactgtttgcttcatccagtgtgccgtacgcttccactctaagatgatctttatcggcccttccgccaattaaactcgtttttccccgatcgcctgtttttgtatagagtttcatttcatactcctctctttaccacttgtctctatagtataccctgtttataacggctgcatagatcgtttcattatgaaacacaaatttccggaacaatcattgaaacaaagtatcgttgaataaagaaacactcgcttttataatagaattgtaaacggttttattcaaagacaggtgggatgaggatggaatttaatcagcaaacggccattatcacaggtgcaagccgcggcatcggcagagccattgcggagttgcttgcggataaaggggcaaatgtcgttatcaatgggacaaacgaagaattgctcaagtccctgtgtacacaattgaatactgagagaaagtgcgcttcttatgttgccggtgatgcaagtttgccagaaacagcctcgcttctcatcgctgaggcaaaacagcggtttgggcggatcgatattttggtcaacaatgccggcgttaatttgcgcaaaacgaccgttgatacgtcgcttgaagaatggaaaagagtgatagatttgaatttaaccggcacctttctcatgtgtcaggctgtcatctcggaaatgatcacgcagggcggcggaaaaatcgtgaacatgagctctacgacgagcaaaacaccgcatcacaatgcctctcctgcttacggtgcatcgaaagcaggcatcaactatttaacgatgcatttggcaaaggagcttgctgaacaccgcattcatgtcaacggcgtctgcccgggaccgattgaaacggatatgagcaagcagtggagcgaggagtaccgcgcagcagtcgtcgaacggattccgctgaaaatgctcggctcaccagagcatgtcgcaaacgttgtcgcctttcttgcctctgacaaatctgactttatgacaggcgaaaccattaatattaacggcggcacctatatgaactaaaaagaagagcctccttaatcggaaggctcttctttttttatgcatgccgctcacgcgtaccggacagcatgatcgcctgtctcaccgcttcttctatactcgcaggatcggctttgccggttcccgcaatatcaaaggctgttccgtggtcaacactcgtacggataatcggcaggccgactgcaatgttcacaccggcttcaaggccaagcaccttaatcgggccgtgtccttggtcatgatacatagccaccactatatcaaagtcgcctctcactgctctgaagaaaagcgtgtcagcgggcagcggaccgaatgcctgtataccttcactttgtgcgcgttcaacggcaaggacaattttctcttcctcttctccatgtccatctcaccggcgtgagggttcatgcacacggcgattttaggctgcggaatgccttcgcgaatgagcgtgtcatgcgccaattgaattgtcgttacacccgtttcgcattacgagagagtccgttcaaacgattgggacagcccctccaacttaaatcataaatgatgcaatatagggataccattcatttcatcaagtgccgcgcgcgctcgttcaaacggctttattcttgaccggcagcggcccacgtttccggaacacgtacatagtcaatcactgccaaaataaacgttatgatcgaaccgcttaagacatccacccaaactccccctttgtttgtgagcctcttacaggctcatggtgaaaaacatgtacagatccgggcagcctacatatccagcaatttcaaatagacagcttcaatctccgcaacagacatcggctttggattgttatccatgagccttttgacgtcggcagccgcctcagcaagcgatggcacatcctcttttgataccccgaatgtctttaaattttgcggaatatttaaatcggcggtccactattcaatttttcgtataacccgctctgcttggctggacttcgaaccttttggctcgattccaattacgccggccacgtccgaaaggcggtcagttacatgatccgcgttgaaggccgttacatgcggaagcagcattgaattggccacaccgtgcgaaatcttgtattttccccctagagggtaagccatcgcatgaaccgccgctgttcctgcgcttgtcaaggccattccgccatacatggcgccaatgagcattttttctctcgcctccaggttatctccatgatggtaggcctgctgaatgctggaggaaatcagtctcatagattcaagcgcaaacatgtcgctgaatggatttgctttgttggaaatataggattcgagtgcgtgtgtaaatgcatccattccggttgcagctgtgattgcctttggaagtccggtcgtcaaaactggatctaaaatcacaagcgacggcagcagatagggactgactataccaatctttaattctttctcagggaacgttacaatcgcattcggcgtcacttctgaccctgttccggatgttgtcggaatcagcacaagcggaacgccgggcttttcaacgagattcgtgccaatcaaagcagaaatcggtttttcatttgttttcagaacagagaggattttagccgcatcaagcacactgcctccgccaattcccaaaatcgcgtcatggcctccttcagaaaaaagctgaaaaacctgttcgatattttgctccgtcggctcaggctgtatatccgtgttgacttcacttgagatgcctttctttgcaagcccttctttaatttggtctgcatagccgagagagacgatcgacggctgagttaaaataaacaccgaacgaatctgattcaatccaatttgatctaagtaatcgccgagcaaattgagtgaatgtggaccagcctcaattcgggcggccgttcgaaaatgataaagcgttttcataatcttactgctcctttgccagttttgcttcaattccgtagccttccagcatctttttcacttttagcagcggctctcccgacagttctgcaatcggacgtttaggcggtccgacgtcgatgccggcaagctccgctgctttttttagcggcgccggcagtgaaccgagtgaaaacgtatcacggagcggctgcagctgctgttgatagtgctcgctctcttcaatgtttccttgtttaaaagattcatagattgaaacaacggtgtgcggaaacacattggctgtggcagccacagctcctgtccctcccgccttcaatgtgtctaagatcagcgaatcagttcctgccagaacggaaaaggactgttcttttgtacgctcaagatacgccttaatattggcgaagcttccgctgctgtccttaatgccgatgatgttcggcaatgccgccagcctttcaactgtttcgggctccaatgatacgcctgttctcgacggaatgttgtagagcaggacaggaagcgcgacattttcggaaatcgtgcggaaatgctgatacaattcctcctgcgaaggtgcaacaaagtatggcgtaataatcgaaagaacatccgctccaagatccgccatttgattggataaagaaatggtcgcctcagtactgttttcacctgctccgatgaaaacaggcactcgtttattaaccgcttttacaactgtttcggcaatttgaagcttttcctcttgcgagaataaatgaaattcgccatttgtccctaaagcaaaaatgccatggacgcctgaatcaattagacgattcaccagcttttcggctgcgcccggatgaaaggcctgttcttttgtaagcggtgtcagtatggcagggataattccctctactttcaagtgacttcgctcccttctgttgcatttttaaacaatcaaatagtaaaacgctttctcaaatttcattataaaggtgttttgattaattaagcaacattttttaggttcggaacaaaagagtaaaatctcaccttcagctgatgcgttttaaaacaataaaaaaacctgtcaaaagacaggtcaatttaatcttttaaagctttcacacaagcggctgttttattttgaatttgtgtcaaaaaagcggtttgatccgctgaccggccggattgagtggccgctacaaggacatcactacacggaacatgatgctgggctgcggcaaatgccgcagcgcttatcgccttcacaaattgaccatcctgcaaacagccgtcaactaacacccacatgatcaaacgctccatcgtgtctttcataccgacgatgcaaagatcaccgctttccgacacaatatggcagtcagccaattcagcatcatgttggataaacagcgtttcctgttcaaaagctgacgagccatgcggccatccagagttatttccgctgtcgaaaataagttttcgtctccaagcaaagcccctttctgaggacagaagccgcagcgggcggtctgccaaaaatgcgatgccgtgcggcaaatattgttcaattcgctcttttaaaaagaggggctcggttttccgcgggatgtttttcgccataattgtaaactgcggatttgaacgctgaggatggtccagtccagtgatgtccgtatcatacactcgtccgatgcgcccagcagaaagagctgcttccgggcggtcaagaacttctgcttttccatcttttaatagcagcagacggtcacagtataaactcgcaatattcacatcatgaaacaccccgaccactgcgagtttggatgcagccgtttcttgtttcattaaatcaagcagactcttttgaaatgacaaatcgagaaaactcgtcggttcatcaagcagcaaatattcgggttcctgggcaagtgcctgcgctaaatacacccgctgctgctctccgccgctcagctcatggatggatttttgggcgaagcgaagcgtgtctgtctgcttcatcaccctcttcacgatatcatggtcttccgccgtcagctgccgaaaaaggcctgcttgatacgcgtagcggccaaactgtaccgtttcctccaccgtaaaggaaaaggcctgctccgttttttgaggaaggaccgccattttgcgagcgagctccttcgttttgtactccccgactgaacggcattcaagcagcacctcgccgcttcggggggcaattgttcccgacaacattttcagcaaagtggtttttccgctgccgttcggaccaagaattcctaaaaattcacccggctttacagcaaaactgatatcctgtaagacatccgtttttccatatccgccggacacccggatgacatcaatcatgaactcgccctccccggtagcgccgaattaatataaagccgaaaacaggtgcccctatcaatgcggtaataatgccgatcggcagctcggacggctcgataatggttctcgacaaaagatctgacagcacgaggaacgaagcgccgttcagcatcgagagcggcagaagatgacggtgatccgtaatcgacagaagccggataaaatgcggaatgacgaggccgacaaaaccaatggttccagacacagcaaccgcactgccggttaaaatagctcccgccaacagaacgatatatttactccgcttcacattcacgccgagcagcctcgctttttcctcgccataagtcatcacattcagttccctcccgctgatcaaaagcgcggcagcgcccgcagacaaaaaagggcagaaacaacgcgacatagcccccagccccctcatcgatacgctcccgagcagccagtggacgatcggttttaaatcatcgccggtcaaagcgatcatgagagaaataagcgcacccaaaaacgaactgaagatgatccctgttaaaatcaaagcggacagggtcaacgaagggtgtacgagccgcgcaaaaaacaaaaccaaaaaaatcacgataacagccgcagcaacgcttaaaaacggcagtgtaaaacttccgatcaccggcagctgaatcccaaaaaacagcgtgaccacggcaccgacggccgcgccagacgaaatgccaagcgtatatggatccgcgagcgggtttttcaagagtccctgaaaaccggctcccgcggcagccagacccgcgccgacaagagcggccaaaaccaccctcgggagcctgattttcatgatgatgttcgcctctgtcggatcgggatttaacccttgaatgccaaaccattcttccaaaaaaaccttcataatagaaggaatgggaatctccaaagatccgatagagattcccataagaacggatgccgacaaaaacagcaggctgaaggcatatgccgcaaaacggttatttcttaaaaacgtcagggtaaatatgttcagcaagctcttcgacccctttgatcaatcgcggccccggacgggtcacgaggtcagggtccacgtcgtatacttcattatttttgacggctttgacaccgctccagccgctccgttttttaatttcgctgacagcggattcgccgtttgtcgtcacgatcgcatcgggattcagcttgacgatcgcttcttccgttatcttggcccagcctttctgcgcggaagcagcattttccgcatggatcgcttcaagcatttcattcataaaggtgccttttccggtcgtataaatgtccggagccggagacacttcgacaaatactttcttttgatctgctttagatatggctgccgctttttcttttatgccagccaggtcagatttcatgctcttgaccaggctcgctgcttgatcctctgcgcctgcagcctttccgatcatttcgatcgaccggtacgtctcttcaaaagaggccgcatcatttacagtcaccaccgtaattcctgcatctttcagctgcttcagcccttcttcggcactctgcatgctggaagcgtgggccaggaccaagtcggggtttaacgaaatgattttttccgtattaaattccatgcccccgattttttcaacgtttttcacttcttttggatatgtatcaaaatccgtcacgccgacgacttttttccccaggccgagggcgtatgtaatttcggtattgctcggcatcagagagacgattttcttcggttctttttcaattttgacctcttgtcctgaggcatcttttatggtgaccggaaacgcttcagccgccttctcctgtttttgctcgtctgccggtttttgcgcttggccgcagccgctaaggacgccggcagccaacagcagcgacagcaataaaagcccaaacttcttcatcctgcttcctcctcgggataaaataaaaacatctctactcagtaaagatgcagcaaaccaagaacgtacaaataagtgcacatcacttatacgcatctgtcctcgcagattacgcggtcatcatccaggcggttattccggctattggttcatcgctcccggcctgtccgaactactaagcggagctctcgccggcttcccctcttaagctgccgatcagcagcgcctttctgactcattcgtatcctaatttcggaattattatactataatcgacacaggtctgtatatgagattctgaaaaggagattttcagctgaaaaacgttgtttttgctaaaacaattacgatatattgcatatagagaaagggtgattttatgccgataccgaaaaactatacgcctcaggtcagactttcagcaaaggaaaaagcgtttcaccaattgcagcgctggattgtagacggaacccttgaacccggcgaaaaagtcacggatgtcgatctggccgaagcgctcggcgtcagccgcacaccggtcagagaagcgcttcagctccttgaatcccaagggtttgtggaaatgaagccgggaaaagaaacaaagatcacgctcattcatcccgatgatgcgctggccgtctatcctccgctcgcacatctccaggctttggcggcagaactggctgcgccgcttttgacggaagaagagatcgccgagctcaaaaaactcgctgctcaatacgaaaccgcgtttaaagaggaaaggaaccacgatgcagctgaactggacgaacagttccaccatttgattacagaagcggctaaaaacccgtatgttcttcagttttctgccgttctgcagcttcatgtcagacggatgaagtatgtgtttttcaatcggcctgctgctccgaaaatgcagtccgccgccgagcattggaaaatcatcgccgcttttgaaaaaaacgatccgaaattggcggctgaagtgatgaaaaggaattggctccgtccgatggaagatattcataaagttttaaaaggcagggaacaataaagcgccaagcacgattttcgaccgcggtatccagctgcgatatactgtttattagatgttttctttcatcttaactctgaaacaaggattgatggcatatggatttaaagctgaaaaacaaactcgtgctcgtaacgggttctactgctggtattggaaaagcaacggcggaagcctttttggcggaaggcgccgaggtcatcgtaaacggacggacagaagaaaaggtccagtcggtcgttgatgagctttcccggcacggaaatgttcacggaattgccgctgatttatccgatcctgaagaaagcagggcactggtcgaaaaaaccgctgaaatcggggagcttgatgtcctcgtcaataatatgggcttctttgaagtgaaggattttacagacgtgacagacgaagagtggctcaaatattttgaagtaaatgttttaagcgccgttaggctttgccgcgcgtttttgccggccatgctgaagcggaataagggaagggttctcaatttggcaagcgaggccggcattaaaccgcttccgcagatgatcccttattccatgacaaaaaccgctttgatcagtttgtcaagaggtttggccgaaatgacaaaagggacaaatgtgaccgtcaactctgttcttccgggacctacctggacggaaggcgtcgccaattatatggaaggtgccgccgctcaggagaaaaccgatttagacacctttgtcaaagattatttcaaagtgaatgagccgacttctttgattcagcgctatgcaaaaccggaagaagtggcgagtacgatcgtctacctcgcttccgaaaaagctgcggctatcaacggttcagctcaaagagtggagggcggaatcatccgctcgatttaaccgaaatcctctgccggtcggcagaggattttttccttttggttaagaaccctgcttcagacctcccgtcagcctttcgcggtcatccggctcaaagccgttcagccgttttaaacatgatgcacgccaatttgccgacagttcctccacctcgagaagttttttgatgccctcaatatcgttcttttcatgatgcttgatgcgatttgcgtatgaaatcgtaatgcctttagggtggcgtgagattcgtttcagaccatgctccttacagacgaacccttctttcagcacgcgaaagtaaaaacccgtaaatccggtatcttgtaccttcagtatcatgtccggcataccgtaccttacggttagtttatagcagggctgcctcggctggctcacctgtacaacagctgcacccagctgaaagatgtcgccgatatgaacgtcatcctccagcagacccttgatcgttaaattttcgccaaatgctccgtattccagctttctttgcagttccttttcccaaaagagataatgttcatacggatagacgcacactgctttttccgcgccgccgtgatgaatgagatccccctgtccgtcccccgtgaaattagtagatgacaggaagatggggccgcttgccggcttcttgtatattccggtagacacagctttattttgaaactgaatttcctctggcttccctacattgatcgaaaggatatcggcatattccattcatatcacctcttacattcaaatgtcctgcaaaccccttttgagatttaagtataatcgacctcttaccataaaactattcaatcgttattataaaaacaataggttaaacctatcattggaattcggctgtttttcagatggagaggaggaaagagcattggagctaaagcaattggaatactttatggcattgtgccgggagcttcattttacccgcgccgccgaaaaactgaatatcgctcagccctcgctgagccagcaaatccgtttgcttgaacacgaaatcggaatgcctttgtttaaccgttcaggcaaacgcaccgtgatgacggaagcgggaaatattctgctccagcactgttacaatatctttcatgaactgtcacaggcgcgagacgcgatcagcgagcttcaaggtttaaaacggggaacgcttaaaatcggggcgcttttgaccgtggttaattatttgcttccccggaccgtggtcgaatttcaccgcagctaccccaatattgaattgtctgttttagggctgagaaccggggatatttagaccggctgctgcaaaatgagctcgacttgggcattgtagcccagcgggtggaacatcgtgacttagaagccgtcccattccttacccagcatctcgccctcgcggcgcctgttgacaatccggttgcaaagcggcagtttgtcacgcttgacgtgttaagggagattccatccattttgctgcctgagacgtattttttgcggcagctgatcaacgaaaagtgccgcacgcttggattcgagccccggccggtcatggaaatgacaacgatggaatcgatcatgaacatggtcggtaaaggcatcggcgccaccattttgccgaaaggctatcttaatgctattggaaataaatccattcagacgattccgatacaaaagccggatttgacgacggagatcagcatcgtttaccgtaaaaacaagcatatgtgcgctgcaagccgggtgtttatgaaactgctgatttcctcggtcaaaagcgaaaccgctgatgcgccgccgcgttaaaagaaaaatcctctgcatgtctgcagaggatttatgtttaggctttgtgtgagtcatagcgttttccgttaatatacagattcgaaaaaacggggtctttcacatgtttcagttccatcggaacatcgacgccgtcgatctcggaatcagccactttcagcccggtgaccggagagtggtcgtatgccagcaccctgatcccgtattgtccgcccatgcttttcagctgcttaacatcaaccgtgcggacgacaggtttgaaatctccggcatctccttcttcatattccatatcgatggcgatcacttcgcgcttcaagcttttgaccgtatttttgtgaaagtagatgttttcaagaacgccgccacgcaccgaattcgttttaatgcggagggctctgtccaagttcgggctgtccataagattgccctctgcgatgacgttcttcacgccgccggaaatttcgcttccgatcgtgacccctccatgcccgtctttcatttcgttatgttcaatgacgatgttttccgacggaatgttgatccttcggccgtccgcatttcttcccgatttgacggcgatgcagtcgtctccattatcaaaatggcagcccttgatcaccacgtttttacacgattccgggttgactccgtcggtattggggccgtgtccgatgactttgatgccgtccactgtcacattctcgcaaagcacgggatgaacttgccacatcggcgaattcagcacagtgacgccttgaatcaatatatgtttgcagcgatacggctgaatgaaattcggccgcaaataatgcccttttccaaactgccgctcagtgaccgggataccgcgctcagccatttcaaacaaagcgttccgatctttttcctgtgaaggctggccgttcgttcctcttttccacggccaccaatgctcgtcatctccttgaccgtcaagcgtgccctttccggttatcgcaatattatcggcttcgtaagcgtagatgagcggtgaataattatagagctcgactccttcaaacctcgtcagcacaacagggagataatcttcagggttctgactgaatttgatcaccgctccctttgcaatatgaagatccacattgcttttcaatctgagcgcaccggaaagaaacacgccttcaggaaccgttactcttccgccgccggcttggtgggcttgatcaatcgccttctgtatcgcttcggtcgaatcgttttttccgttttcgtcagccccaaacgatgtgacatcaaatgagcgattcggaaataccggaaccttcagcttctttacaatctcttcttttattttctgcagactcacgttaccgccccctttataatgtgacgcctgttttaaatatcgcaagctccctgaaatcgtttatctcattgttcagctgccttccgcttgcgacttcgatcaaatacgctgtcagctccttcaaaacgtcatcttctgatcggtcttcgagcacctttcccgcattaaaatcgatccaatggcgctttgcctcataaatcgccgtatttgtcgaaattttcatcgtcggcacaaaggtgccaaaaggagttccccgtcctgtcgtaaataaaacgatttgacaccctgcagcggccagtgcggatgaagcaacaaggtcatttcccggagcactcagcaggttcagccctttctttttcaaaacgtccccgtattcaaggacatccgccacctttgaagtgccggctttttgcgtacagccgagcgatttatcttccaatgtcgtaatgccgcccgctttgtttcccggagacgggttttcatagacgggctgcctgtgatcgataaagtactgtttaaaatcgttgattaagcggacaattttatgaaacacttcctcattttcagcccgctccatcaatagcgtttctgccccaaacatttcaggcacttctgtcaacaccgccgttcccccttgggcgatcagaaaatcggagagccggccgagcagcgggttcgcggtaatgccggaaaatccatcagatccgccgcacttcaaaccgattttcagttcagaaagcggaacatcttcgcggtggtcaccttttgcatgcttataaatttcctttaacagtttgacgccttccgtgacttcgtctgatacctcttgggaaagcagaaacttgacccggctgtgatcgtaatcgccgagcgcttcgcggaattcgtgaatgctgttgttttcacagccgagccccagcacaaggacaccgcctgcattcgggtggttgacggcattcgccaaaatcgttctcgtgttgatatgatcgtcgccaagctgtgaacagccgtactgatgctttaatacgtgaacgctttcaaaaggggcgatggagccgacctcagccttaaattctttgatgatcagctctgcaatgccatttacacagccgacagtcgggacgatccatagctcgtttctgatcccggtttttccgtcttttcgtttaaagcctttaaatgtaagcggttctttttgatagcggttttccgtaaacttcggcttgtagctgtattcttcgacaccgcccaaattcgttttcacatttttcgtgtgcacccactctcccgtctgaatcatttcagtggcgtgcccgatcggaaagccgtatttgatgacgttttcattttcagcgatgtcttttaaagcaaacttatggcctttcaaaatcggttccttgatcacgatggttcgttctccgacagtgaccgtttcaccggtctgcaattctcttaacgcaatgccgacattatcttgaggattgatcatcaagcagtctttcatcacatgtcccccagctcagccatttggcttttcatcattttttccagcgccttcctcattcccgtttgtttcatgtcccttaaatattcagccgtcttgtccgtcaatccgggcatgtcgttcagattttgcccccacactttttcaaacccaagaacatggaatgcgatgttcgaaacgtctgtctcttccgtccagagccgtttgaggaaagccagcacctcatcgtcgtcagacagcggaatggccccatcatccccatcccgttggtctcggtaaaaataaattaaggcgcttaaagcaaatacggttcgagccggaagtttgcctgttcgttccgcatattccattaagacgggcaaatttctgactttgaattttgcaaaggaatttaaggaaatatcgatcagcttgtgacggataaacgggtttttaaagcggtcgagaatctcttccacgtagttgtcaagctcgctatcgggcatatcgatcgtctcgagcacctcccgctggatcagctctttcacaaatgagccgataagctcgtcttcagccgcttcgcgaaccgtctcaaggcctgccaaataagcgaccggcgtcatcgcggtatgggcgccgtttaaaattctcacttttcttatcctgtacggcgtcacatcctggacaaactcgacattcagaccggcctcatgaagcggaagctcgtctcgaagccatttcggcccttcaatcacgaacaaatgatacggctccgccttcaccatcaaggaatcgtgatagccggccgcctcttcaagccggtgtgcattttctttcgggaatcccggtacgatcctgtccacaagcgtattgcagaacacgtttgcctcttcaagccaatcgatgaacccttgttcaagcgcccacgcgtttgtatagcgcagcacaatgtctttcagtattttcccgttatcctcaagcagctcacacgggaggatcaccagacctttttccctgcttccctgaaaagtcatgtatcgtctgtataaaagtgcagtcagcttccctggatagcttttctgcggacggtcggacagacggtcttcctcgatataaatgatgccggcctctgtcgtatttgaaaatacaaaccgcaaatccggcagatcggccagctccataaattcatcataatgctcatagctgctgacgactctgctgattgatgtaatgacagcagaatcgcgaacctcccgtccttcccggaaaccttcaagataaagcgtgtaaagcccatcctgttcttgaaaggccgttactgaaccgcggcgcggaggcacgacgacggcactgccgttaaaatcggtttcttcattcaatctatgaatctgccagtcaataaaccccctcataaagttaccttccccgatttgcaaaatccgttcggggcggctcggcttagaccttatccgtttggacagcctctccatttaaatcccctcctcatttctgcacacgttcacattttacagcgcatcaaaaaaatgatgctatagatgcttaactgaattgcgaatgatcagctccgtgctgatgagcgtctgcccgccttctgcctgcgggttttcgatcaatgacagcaggctttccgcaccaagcatgctgattttttcagtcggtttttttaccgtcgtcaatgacggtgtcgtatacgccgaaaatccgctatcgtcaaagccgataatcgacatatcgtcaggacagcgtttcccgtttgcatagagggcgttcatcgcgccgatcgccatatcatcattggcgcaaaacagggctgtcggaggattcttcagctttagcagcgtttcagccgcgcgaaagccgctttgcatcgtataatcgccttgaacgaggtattcgccgggcatatcaaggtttgagtcgcgaagcgcgcgaagaaagcctcctttcctttcttgagacgatttaaagccttctttcccctgcaccatggcgatctgtttgtggccgtttttgatcaagtatgaagcagcgaggaaagcgccctcgtgttcattcgccagtatattgacaacggagtgcccttcgatttttctgttcagcacgacgaccggaatattctgtttgaggacatgctcaataaaagcctgatcctgttcgctttggctgattaaaatcatgccgtcatagcggttgcggtgaatggatgacaaatcatgataatcgtcgattcccctgacaaccatattatagttttcatcgatcaccttgttgacgccgcgcaggatgtctgcaaagaaacttgaagacgtcccgtctgtcaggcttgttaaaaacaggccgatcgtaaaagacttttgcgtgacaaggcttttcgcattaaaattcggtttataattcatttcggctgcgatgtcgagtattttctttttcgtgttctcttttatcagcggactgttgttcagcgctctggatactgtggtgtgcgatacattcgccagcctggcgatatctttaatcgttactgacattgttttttacccgccttttcttgctgttgttaccatcagtttaccatatcaaaagcgctttttagaaagtgaaattccgctatgttctcgctttgatttccgcgaccatttcggcgtgcttctgatccgtcaaacggtacaggtagccgagaacgagaatggccgccgtcagcgctgctgccggatacaaaaggagaatcgctttaatgccgagcagcgtccccgctttttgggccgcattcggcacatagccgatgatgctgagaccgatccctgacaggaagccggagagcgactgagccagctttctcgaaaaattaaacagcgagtataccgttccttctttccgttcccctgttctccactcgccgtaatcgatcgcatctgatacgaatgcccaggtgattccgttcggaatgctgatgccgatgaaggcgatgcttgcgagaatcgtaaaaacaaagacattgcccggtgcgaaaaaattgatcagatcggcacagacagaaaccgcgagccccaaaatggcggtatgctttttcccgaaaagcttcacgagcttcggcagcatgatgacgccgataaaggatgagccgatgatgatgaaattcatgtaggccatcagttcggcgttgccgaggttatactgcgcgaaataaatcagcatcgcggatttaaggttataggctgaaatcgtaaaaattgtcatgaatattagcgtaaggagcggcttgttcgtaaaaaacgtctttgaaatcgctttgaatgtcactttttcctgtttgtacttctcatcttttacgacgatccgttcctgacagttcctgtagcaaatgtagaaaaacaacacacccagaaaagacatcagccccatgacgaccggataggcaaccgcagggttgtcaaacctgacaatcatcgggatgacaacaatgctcgtcacaaacagggcgcccagcgagccggcttggcgaaaggaagcaagcgaagtccgttccaccgagttttgcgtcatggcagccccgagcgagccgtaagggatgttgacaaaggaatagccgagaccccaaagcatgtatgaggcataagcgtagatgagtttgcccgtcggtgacagattcggcgagatgaaggtcaatatcgtcaaaatcgcaagcacaaagcttccgtatagcagatacggcctgaatttgcctttcgggccgatattcttcctgtagtcgatcgatgttcccacaatcggatcgacaaaagcggcgaaaagtttgctcacaagaaaaatgcctccggctgccgccgccggaatgccggcaacatccgtaaaaaacttcagaagatagagctgtccaaggtcaaacataaatccgttcccaaaatctccaaaaccgtaagaaaccttttcttttaaacttaatttctcttgagtgacggcgactgtttcggtttgtttgttcgtcgatatttccatgaaaaagcagctcctctgctagccaatttgtgaatctaagctttcaaacgatctttcacttcaaactggaaatagtgttttgcattttcgtagcagatcccttttacgatccggcccagcagttcgatatcatccggcgcttcgccgttctcaacccatgtgccgataacatcgcagagcaggcgcctgaaatattcgtgtcttgtgtaggaaagaaagctgcgcgaatcagtcagcataccgataaaacggctcaatagaccgatgttggcaagcgatttcatttgttcgagcatgccgtctttcgtatcgttgaaccaccaggcggtaccgtgctggattttccccggtatccggccgtcctggaagcttccgcaaaggcttgaaatcacgacattgtcccgcgggtttaaagaatacaagatcgtttttggcagcgcatcttttcgatcaagagaatcgagaaagctgcacaaaggctttgcgatatcctgatcattaatcgcatcatatcccgtatcaggcccgagcttccggtacattttgctgctgttgttgcggagggcgttaatgtggagctgcatcgcccagcccttctccgcatagcatgttcccaaaaagtgcaaggtcaaggatttgaatttgcactcttcctcaggcgaggcgctttccccgttcatcacctttgcaaaaatcgggcgcacttcgctctcatctgtttccgtgtacatcatttgattgatggcatgatccgatatccgtccgcctgcttcatggaaaaagtcaattctgtttttaagcgctttcaaaaaatcgtcataattcgctatcttcataccgctagctgtttcaagctttctcacccaggcggcaaaaccctcttgattgatttccatcgccttgtctggcctaaatccaggtaaaacgcttacattaaagtcttcatctttcagctttacatgatattcaagactgtctgtggggtcatctgtcgtgacaaccgtttcaacgtttgatttttcaatcaagtctctggcgccgaaccctcctccggccagctgttcgttaacccgctcccaaatatgcggcgcgctcttttcatcaagccggtcatcgatgccgaaaaacctcctcagctccaaatgggtccaatgatagagcgggtttccaatcgtcatcggaaccgttcttgcccaggcgctgaatttctcctcgtctgacgcatctcctgtaataaactcttcggatattccattggccctcattgctctccacttgtagtgatcaccgtagagccatacttcggtcaggtttttaaacgttttgttttcgtaaatctcctttgggctcaagtggcagtggtagtcgatgatcggcattccttttgcatactgatggtacaacactttcgacgtttcattcgttaaaagaaaatcgtcattcaaaaacggcttcacagaatctccacctttctttatttataaatgttaacgttaacaaaaccatctgcagcataatgtgaacgttaacatttaatcttattttatactaaccgcgccttcttttccattattttctcaacataaaagaagcctaaaggcaataacctttggcttcttctttttcataccgcttatttggcggctttagggtttttcttaaattccatcgtaatttccgtccctcggcctgtccggctgtcaactgcgatgcagccgtcgtgcaggtggacaagttccaaagaaatagcaaggccgagaccgcttccttctgtcgcatcttttgtatgcgttcccctgtagtagcggttgaataaatttgagacggtttcagagtccatgcctcttccgttgtcttgaattttaagaataatatattgcttggattcttcaaggatcaccttgatgtcagtgccttttttgttatgcttgacggcgttggcgaggaggttttccaagactcttcggaaccagcccctgtctatcgcaaactcggtatctacttgcttgtattcaaaagacacgttgtacccttctgaaaatgaatggcgcttaaactcctcaacgaagctctttaaaaacggcacgagcctcactgtctggcgtttaatcggcaaagcgtcgtttttcagcctgtacgtcaagttcaagtcttcgattagctgtgacatgtagtccgacttttctttcatcgcctggccgatttcgcggatttcctcttttgaccactcatagtttggagactccagcatcatgctgtagccgtaaatcgtgctgagcggcgtttttaagtcatgggagagccctgcgatccattcctcccgggtcgtttggattttcttgcggttttgctcgtcttttttcagcgtttccgtcagctgctccatcgattcaaacacttctgtgaacagccggtacggctgttttcgcttcccttttttgttccggcttcgcgggcggcctttccggtttctcggttcttcaaatcgcccttttgaaaggttgacgatccatttaatcgtatggatgatcggcatgccgaatctgaaagaataccaaatggtcatagaagacatcaataagatcagaacgccgatcacgatgagaacgatttttaaagcgagcccgatcatcgtcctgttgaactcatgatccggattaaaaatcgggttcggcgtagcggcgatcagccattctgtcgcgcttaatcgcctgtatgaaaactcgtgctcgtagttccatggctttgatccgtattttaaaagctccagctcattgattccctggctgtaatctatgtcctggtagatcgagtccagcattttccctttttcgctgaacaaatagacggaccctttgtttttcttaatgaaatcaagcgtgctttttttataggaagaaaggtctgccatatccttctcttctttttccaaataggacaggatcgtatcgcttttcgactcccatccgaataaaatcacgtagtcttcaccattgaaattggcagaccagaagttgacttgatattttttaattctttttttatcaaaaacggataccaggtcttccctgtggtactgcctctgaatttccgcaggaagacggtaggaataaacggttttctccttgccgtctaatatttgaagccagcctccctgtttgtcgatagccgatttcaagatatcttcgatctgccaattgttattgtcatccacgctgacccagctttcaaacgtgtctgaagtggcttttgccaagcctgtatccgcttcgctctcgcttaatcggagagcgaaaaaaatgaaggataacagcaaggtcgcgagaacaagaccgagaatcaggaaaatctgactgacaaagtggagaacgagctttcctctgagcttcatccttcgctctcttttcgtgcaggattgggaacgaacttatatccaaggccgcgaatcgtgacaatatattcggggctgctcgggtctttttcgattttctccctcagctttctgatatgtaccatgacggtgttgctgtctccataagatggaacgccccacactttttcataaatttgatccttggaaagcaccctgttcggatgatcgcaaaaatattgcaggagctggagcagctgcgccgagcagctgaccgtttcgccgtccacgatcagctccgcaaagtcgggatgaaatataaagcgttcatattcgtaggctgaagatactgaagcagctgcaacttctttatgtatatacgttctttttaaatgggctttaatcctggcgattaattccagaggattaaaaggttttgtaatataatcatcagccccgtaggcaaaacccgacagtttatcgagatcggatgttttcgccgtcaagaagaagatcggagcgttggtgtgccgcctgatttcaggagatacatcaaatcctgtctgtcccggcatcatgacatcgagaagtattaagtgcacggtgtcctttttcacgatgtcgagcgcttcttctgcgctgcttgcggtcagaacttctgaaaatccttccttcgtgaggacgcgcttgaccatttgaacaatggcgtcttcgtcgtccacaatcaaaattgtcgcattttccaaaatccttctttcctttctgtctatatcatgtattttatatcctcatcttaccatctattatatctatatcggcacacattttctgattttaaagtaaaaataaacttttttagaaatgattttttactttacgaaatcatggaataaaaaaacagacatctgtccgatgtctgtccagattgttgacaaaatcccaaaaaggtcttttgttattgggattttgtcatccggttgccagcctctgatcctcttcttttttcaatagatcgtaagtcaggcacaccggttttcctgtgcgcgggtctaatataatttcagcatcaatctgaaacaccttttttaatacttctgatgtcatgacttcatgaggggcgccctctttgacaatcgcaccccggttcagcgccaccatatgatgagcgaagcgggcggcatggttgaggtcgtgaatgaccatcaaaatcgttcggccttcttcttgattgagcttttccagcagttgcagaatttcaagctggtgcgccaagtccaaataggttgtcggttcgtcaaggagcaagagctccgtttcttgggcaagggccatcgcaatccagacgcgctggcgctgtcctccagaaagggcttcgatcggccggtcataaaaaggcagcattcctgtcacttggagagaccattcaaccatgcggcggtcatcggccgaaagcctgcccattcccttttgatgaggaaaacggccgtaagaaacgagctcatatacggtcaaaccgcctggcgcctcaggcgtctgcggaagaatcgccatctgtttggctacatccttcgtcgacatttggtggatcgctttgccgtttaaataaacggcgcccgttcgcgaacgctgtatgcgcgccatcgtttttaatatggttgatttgccgcacccgttcggaccgatcatggtcgtcacttttccttttggtatgtggaggtttaagttttcgacaatcatctgttcgccgtagccgatccccaggttgtttgttgaaagagacacgttgcacccttcccttctttaatttgttttcataagcaaatagataaaatacggtgcgcctaaagcggcaatgacaagccctacgggaatttccgaaggcgccagtatcattcttccaattaagtccgccagcaaaaagagcaatgctccggtcaacgcggaagccgggattaaaagctgatgcttcggcccgacaagtcttctggcaatatgcggagccacgagaccgagaaacgtaatgtttcctccagccgctacacacgcgccgctcagcgcggctgccgacagaagcagtgtgcgccgctctttttcaactgccgttccgagccctgttgcgagctgatcaccgagattcagcacgtttaaatagcgcgctttatagaggataaaaggaatcagcacgacaatccagggcagcacggccgagacaaagctccagttcgaactccatatattccctgacagccaaacagccgcctgcataaagtcatttgggtccattttaagctgcagcattaagatggccgccgaaaacgccgcattcactccgatgccgaccaaaacgaggcgaatgggattcaagccttttttccacgccagcaaatagatggaaacgactgcaaagcaggctcccaaaaatgcgaatatcggcagggaaaaaacgaatcctttttgcaggttgccaacgtctccctgaaaatagaagatgaacagcacaacggcaaaacccgctcccgtattgatgcccaatatccccggatcggccaggtcattccgggatatcccctgccagacggctccggagacagcaacccctgcaccgatcagcatggcgaggatcatgcacggcagacggaattcaaataatacaagttcatcctgcggcgttccaaagccgaacagtgttctcaatgtagcaagcgggtcgatgcggatttctcccatgttcatgcttaataaaaacacggcggccgtcagcacggccatgacgagcatcaccgcacccgcccgtctgttgtttttcttgagcattacagtccactcctttccctgcgggccagatagagaaagaatggtacgccgacaagcgcagttactgctccgacaggtgtttcaaacggcgggttgaccagccttgccgcaatatccgcatagatcagaagaacagcgccaagcacagctgagcatggaatgatccagcggtaatcaaccccgaccagaaagcgggtaatatgcggaatgatcaatccgataaaaccgatcgcaccggcaacggatacagcggcacccgtcagcagaacaacggacacgatgccgatcgcttttaccgtcttcgtatattgaccgagccctttcgccagctcctcacccaggcttagaaccgtgatggaacgggcgatgacaaaaacgaccgccaaaccgagcgctgccgccggaatcaacaactgaatgctgagccatttcgtgccggcgacacctccggcataccaaaaactgacgtcgcgcgccacatcaaagtggatcgcgatgctcgtagaaagagcgctcaggaacgtgccgacagccgtaccggccaaagccagctttacaggcgtaagaccgccttttgaaaacattccgattccaaaaacaagccccgctccaagagcggcaccggcaaatgaccagatcatcagcccgatcgatgaggttcctggaaaaaaagcaaacgcaacagcaattgcgaaagctgacccgtgcgtgacgctcataatttccggcgacgcaagaggatttcgcgtcatcccctgcatcacggctccggaaaccgccaggcaggcgcccacaagagccgcacttaccgtccttggcagtctgagttcctgaataatttgatgggccgtatttttcgcgtcaaaatgaaaaatggcgtcccaaaccgttccaagctttatatcagccgcaccgagcgcaatcgataatgcggcgccaaaaagcagcagcatgattccgccggccaggacaaatacagctccgagcggacggctgatcggtctctgttcttcatcagtgccatccgcgccgttgatatgatgtatgtttttgtaagagctcactcgatgccattcctttcgatctttttaaccgataacgattatcattttcatgtttagtataacaggcctaagcaaaaattttaatcaaaattttcggcaggaatcaaaaagccagccgatcttccgctaaaagacccggctggcaaagagctttatcacacttgattatttttgaactttttgtagacgaacgggtagatcgcaagaccgacgaaaaacagcccgattcccaagataaaggtggtcaagtcagacgtgcctgaaacgatgacccataaagagtacgcaagagcggccaaggcaatgatgccgtctcctgttcttgaacctttcagctcgccgtatgtctcccctttgaggatgagcttcaagctgaaaagagctgctatgagataagggacaaggtaagcgagcgtcgccgacgttgttaaaaacgtaaaggcttcgctgatcgttcccgaaatcgttgagaaaataaagatctgcgacatcacgtttgtgacgatcaatgaattgaccggacttccctttttattcgttttcgcaaagaaagcaggaaaatcaccggcttttgccgcctgatacggaacctctgcgccgattaaaatccagccgagcatcgatccgaacaaagaaacgattgccaagaccgccataatcacgctgccgaagctgccgataatcacgtgcagcacatcaacgaacggtttatctgatgcctggagctgatcgtgcgggatgacgcccatcgtaattaaagtgatgatcatataaatgccgagcgcaattaacaggccggtaatggtcgcgcgtttgacatcacgctgggatgatgcgcgccctgataagattaccgcagactcgatgccgacaaacgcccacagcgttgaaatcgccgcattgtgaacctgtccgcccagccctatgcttttgccttctgattcgattggaaaataaaatgattcgaataatgccgtttgaaaaacgaacaaacctgcaacaataaacaggacaaacccaagcactttggaaaaagtcgccaaaaagttcagcttgcccgctccatttatgctggagactaggataaaatgcgtcccccataacaaaatcgtacacacgatgaatgtcaagagctggccaagtgtaacggggtgtccgccgaattcaaccagctcgcgtccgtcggttaagatcggcaagaaagtcgtcaaatagcctgcaaggcttgtaatgatggccacgttgctgatccagctagccacccaatacccccataccattgtaaaacctgccgcattcccttttttagggtctgagaataaagctcttgcatagctttgcggacctgctttgagatccgggcggcgaatggataaatggccgaatacaagggcgatcatcagcacccccgcacccgtcaccagccatgccgccgttacgccgagcgggctagccgtctgggcgagtgtgctggggagcataaaaatccctgagccgaccatattgccgacaacaaaagccgtaagaagccagaagccccatttttttgtctgttccataagatataacctccgagcattttataaaaaatatgccggaccagaccgtgagatcattcaaaataaaaaaagcatgaacaaaagtccatgctttggttaaacatacactcttgatctccggatagccctccgcgggaatacccgcggcagtcctgcacttattcaatgcagacccagcataaagaatgaatggcttccttatgcttcggcgctgatgccttttgcatatgatcatcggccccatcagcctcacacatgcgactcatcatccgcgcaacctctacctcactaagagttaagagtgaggatttatcacatattctgaaaagaggttaccagagaaattttgatctgtcaaagggaagtgatggaaaaaacggacagccgcgccaaaaggccgccttttttggcagccttctgaagaatggaagacgggctctctccatctgtcatttatcggttatttttctttttgttgaccgcctcttgcagagggtctcctttcagcgcttgtcctgcgtcttcaagcgccccccgaacggcgttttggtccttttccttatttcctctatctttattgaagaaaatacccaaatgaatcacctctttaaaaatgtggtacaattttaatttggcttatcaaatttaaattatgcagaaccttggaatgtgttttttatctgaaaacgccatattttagatgtaaacacgccgattgtttaggaaaatgtttttttcagctgacaagttgttaccatctgtcttgaaggccgtcagaactcttgatatagttttcattaggaaattgttataggtcttaaaggagaagcgatatgacaggaaaaacacacatcatgggaggggtcgcttcttgtacggctgctgcttatttttacggatatgatccggtgttcatgacagcctcgggcgttatcggagcattgattccggatatatgccatacaaaaagcaagataggcagaaggcttccgattttatcagcagtggtcagttctgtcttcgggcacaggacgtttacacacagcctgctctttttgctcatcacggcattcgcggcacatttatattttgcagatcagagcatacttgtcggattgatggccggaatggcaagccatctgctcctcgatgccgggactgtaaacggcatcaaacttttctttccgtccgccattaaggttcgtctgcccctttacattaaaaccggcgggaaggcggaacaagtcgttcttgctgtgctcaccgttgtttcgtgctattttattgcgaacttgatcgcctgacgaaagggacggtttgaccgattgctatatgatgctttttttagtcattttatcttggtgttctttacctgcggggattatatgtgaggagctatttatatgaaaaaacaattttttaaaaagcagtggtttttatgcctatccatatttttcatatggatgaagacgtacttcatctacaagctgggctttaatttacaaatcgacaacgcacttcaggaactgatcctgtttatcaacccgcttagctttctcatccctgtactcggcatcagcctcttttttcgcgaaaaatcgcagcgcatctatttaatcggggctaatgtcgtcctgacgggcatcttgattgcaaacagcattttttatggtttctacatcgatttcatcaccattcccgtcctgttccaggcaaaaaacctcggggggcttggaagcagttttcaggagctgttcaatccggttttcatcgcgcttttcctggacctggctctcatggtctggctggcaaaaacgcgcgaaagaaccggcaaaaagctttccgctaaagccgttaagatctactatgcggcagccgccggaacggtgctgtttaatctcgccctgtcggagctggatcagccgaagtttttaagctactcttacgacagggaagtgcttgtaaaaaatatcggcttgtatcagtttcatctgttggacggcatttcacagacctttaatttgacacaaaaagcggtcgctgatgaaaacagcctggcaacgatcgaaaactacacaaatgccgactacagcaaaccgaaccaagatatgttcggaattgccaaaggacgaaacgtcatctttgtaacgcttgaatccacccagacatttgtcatcaatgaaaaggtgaacggccaggaaatcacgccgttcatgaacaagttcattcaaaaaagctattatttcgaccatttttatcagcagaccgaacaggggaaaacgtccgattcggaattcattgtcgctaattcgctctatccgtctctgagcggttcggtgttttttacgaagagcgagaatgcgtacaattcgatgtataaaacactggcgaaccacaattacagaacatcggttttccacgccaaccataaaaaattctggaacagggacgtcatgtacaaagccctcggcatcgacagcttttatgacgtctcccattttcatgtgacacctgaaaattcaacgggctgggggctgaaggataaggagtttttaacgcaatcggccgacttgatgaaagacttgccgcagcccttttacagcaacctgatcacattgacgaatcattttccatttcaaattgatgacgaggataagctgatcgatgagtacgattcagagagtgacattttaaaccggtatgtcacgactgtacgctatgaagacgaagcattgaagcatttcatcgcaaaactgaagaaaaacggcctttacgacaattctgtgatcgtgttcatgggagatcactacggcatatcagaagcgcacaacgatgcgctggctcaatttttgggcaaagacgaaatcaccccttacgataccgttcagctgcagcgggtgccgctgattatccacattccgggggtaacggatcaagacccgaaaacgatatccgaaacaggcggccaaattgatgtcaaaccgacattgctccatttgctcggaattgatgcaaaagggatgattcaattcggcaatgacctgttttcgaaagaaagaatgcctttcgctgtgttgagaaacggcagctttattacagatgattatatctacacgaaaaatacgtgctacagcaaaaaaaccggggacatgatcaacgatggagaggacaaatgcggccctctcatcgagaaggcgaatgaagaactttccctttccgataagattattaacggtgatttgctgagattttacaaaaaataatccgtcccctttaaaccggcattctcgccggcttaaaggggctgtttaaattgagggacagctgggtattatataccgaatgttaaaaatgaacttgcggttttgcagttccttcgttaccctaaatgaaaagagaagttatttcgagtgccgattatttcataaagtgttataaaaaatgataaataagaaggttttaatatgagtgaaacacagcacaagacaaatcaattgccgattgttgccgtcttgattatggggacatttatcgccattttgaatcagacgcttttgacgacggctctgcctccgattatgagggacttaaacattacgccggggcttgcccaatggctgacgaccgtttttatgctcgtgaatgggatcatgattccagttacggcttttttaattgaaaaattcacaacgagaaagctgttcatggcggcaatgtctttatttacggccggcacgctgatctgcgccttgtcattcagctttccggcgctgattgcggggcgcgtcgtgcaggcggctggcgccggcattatgatgccattgatgcagacggtgcttttattgattttcccaaaggaaaaacgcggatcagcaatgggaatggtcgggcttgtgattgcctttgctcccgctgtcggaccgaccctgtcaggctggatcgtcgatcgctatccttgggaagtattgttttacctgctgcttccgttcgccgtgatcgacatgattgccgcgcactttattttaaaaaatgtcaccgaacagacatcgcctaagatggatgttacttcaatcatactgtcttcgcttggcttcggcggcattttgtacggcttcagcagcgccggtgttgccggctggacgggtgcggacgtgctggccggcttcgcggtcggcagcgttgcgctgttttggttcatttggaggcagctccatttggaagagccgattttggagttcagggtatttaaatatccgatgtttaccttggcgacgattatcgggatggttgtctttatgtcgatgatcggagctgcgacgatcgtgccgatgtatatgcaggatatgcgccatttcacggcgatggagtcgggaatgatgctgtttccgggagctgttgtgatggggctgatgtctccgattaccggaagaatttttgacaaaatcggcgcgcggattttgagcatcaccggtttgacggcgatcttcgtgaccacattgctcttgacccatctgacaaagacgacgccttttgcatatttgtctatcgtctatgcgattcggatggtcggcatggggatggtgctcatgcctgttacgacagccggcttgaaccagctcccgcgccatttgattcctcacggaacggccatgaacaatacaatgagacagatgtcaggatcgatcgggacggctgttctcatcaccatcatgacacagcgtgcgcttcttgaccctgccggtccgtcttcggatacagcgatgattcacggcgtcaatctggcatttatgaccgctgctgcattgtcgggaatcggattggttctctcattctttattaagcagcaccgccgcggacggctcgacggcagcaaaagaaaacaagcgaaaggccgcttggccattcatgagaaatgaaaaatcccgggtttataaaaacccgggatttttttatgattattcgaatccgttaaccattgtgtccggatccggaccgacgcgctcatctttattaagagcgttgattttttcgacatcttccgccgataattcaaaatcaaaaatgtcggcattttcaataatgcggtgttctttgatggacttcggaatggtgacgacttcattttgcaaatcccagcgcaggatgacttgagcaacggatttgttgtattttttagcgatgtcagtcagcacctgatcatcgaggagttttccctgcatgagcggagaccatgcttccacctgaatgccttgcttcttgcagtagtccctaagctcagtctgagtgaggcgcggatggaattcaacctgattgaccatcggtttaatttccgcatcttccaataagctttccaaatggtggacattgaaattgctgactccgatcgctttcactctgccgtctttgtacagcttttcaagtgcgcgccacgtatctttatatttgtcttttcctggccaatgaatcaaatataaatcaaggtagtcaaggccgagttttcgaaggctttcatcaaaagccgccaatgttttttcatatccctggtcactgttccaaacctttgacgtgatgaaaagctcttcgcggggaacgcctgattccttaatccctttgccgacgccttcttcattttgatagatagcggctgtgtcaatgctccggtatccgtttttaatggctgcttttacagattcaacgacttggctgccttcttccactttgaaaactccaagtccaaaccatggcattttcacaccgttatgtaatgtcacagtgtcctttaaactgcttaccattttgaacgaccacctttctttttttcagatgcttttaaacgcaccgcttttattatctcacactgggtggattttacaaaacaacttgctcaaccgatggaatgagccaaagcaagcgctccggtgattccctgatcgtcgccaaggcccggcggcacgatgtattcttcaagatcaggcaggtcgacatatccgttcaaatattcggccagctttttgcgaatcagcgggaacagctgctgctgcttcatgacaccgccgcccatgatgattttttcagggcacagaatcaagatatattgcatgagggcctgtgctaaatattcgggttcaagctcccaaacttcctcgttttcagccaaatccttgccctttttcccccatcgcttttcaagcgccgggcccgatgccatcccttcaaggcagtccttgtgatacggacagattccttcaaacgtatcctgcggatgccgtctaatgagtaggtgacccatttcaggatggagcgtgctctgtacgagccggccgccgacaatcgctcctgctccgattcctgtgccgactgtgatatacaagcagctctccaggccttgcgcctctcctttcgtcagctctccaagcgcggcagcgtttacatcagtcgtaaacgaaaccggaatgccaagccttttttccaattcgggaataaacgggtaccccttccaggctaatttcggggtattggttatgtatccgtaatcctctttattttttgcaacggatataggtccaaaagagcccactcccattgatgtgagctgatacttgctgaagaaatcggtcagctttccaatggtctcttcaggcgtctccgtcgggatcgtcagcctgtctatgatttctcccttttctgttccgactgcacaaacaaactttgtgcctcctgcttctattgcaccgtaatgtttcatcctctcggctccttttcatctgtttgaattgctctaattgaatcataaatcagacgatgaaagaaagcaatcgcactgaacaatggttcaccagagcatgggagcttttgatgctgacggaagaaagcttcccgaaaatgtggcagttttttaaacaactgccgcgttcgctttttcgcttaaataggcttctgaccgcttgatcgtaaccgtgaaaaagaggattttttcaagccccgctcgaagctttaataaggagggatatcatgaagcatccattcgacaatttccgttctttattcccgaaattgtctgatcatgttcatcttgccgcatgttccggaagcgcattggctctgcctgttgccaaagcggtcgatgagtatcagaacggccttttaacagccggtgcagactggaaagcacatctcgacaagatggatgagaccaaggaaaaattcgcccggctgatcggtgctgaaaaagaagagatagccgttttgccgtcagtatctgacgcagtggccgctgtggccgccgcaatgccgcagccaccccgtcgaaggcagatcgccttcacggatatcgattttcctgctgtcggccaaatttggcttgcgcaagaccgcttcaaagatcacctcatcatcattcaaagcgaagatgggatgattgacttggaacaatacgaaaaagacgttaccgatcagacgctcttgacgtgtgtgccccatgccggctatcggaacgggtttaagcaagacataaagcagattgccgagattgttcatcagaaagggtcgcttttattcgtcgacgcctatcagactgccggccacattccgattcatgtcaaagacatggatatcgacatccttgcggcggggacgcgcaaatacatgctcggcattcccggaacagcttttttatatatgaaacgcgaactttgcgaacaatttgagccaaaaacggccggctggttcggaaggagcgcgccatttgccttagattcaggctttgcggaaggtgcgaaacgcttcgagtcggggacaccgtcatttatcagcatatatgcggcagacgcggcattgaagctgctgcttgaagcggagcccgacaggatcgagccctatctgcggcagcttgcggcattctctttgcaatacggtgcggaaaaaggcctgaagatcacaggacccaacaccgtacataacagaacaagcctgatctcggtgtatgccgaagaagccgcccgtgttgaatccctcttgcgtgaaaagcatatcatcgtctcaaagcgaaacaacgtcataagaatagccccgcatttttacaatacaaaggaggaaatcggatttgtgatggatgagatcgcggcaatcgtaggctaagcccccggctttaaaatggacagaatgcgattttttccttaaactataaaaaacaattttcatcaaggaatgagacaaaatggagctttatatcgaaggtgaattagaagagcataggaagctgccgcaccgaaaagttttgtttgccattttggctgttttgctagcgaccgggattaccatcggatatatcgtgtatacgcatttttattcgatgaatcatctgccgaaaggaaattggtttcagtcttccggttcgccgaatcaagcatacaacctgaatttgtatagagtgaacaaaggcgggggaacgaactccccttccgtcagaggggaattgacaacggttgccaccggtgaacgaaagaatatctattggggatacgaagaagaacatgccaaaatcgaatggcaggacaaataccatgtgtccatcaacaacaatgtgctggacgtcagaactgatatatatgatggaagaagagagtgacggcgtcactctcttctcgtgtacatatcatttgggacgccgtttaaaaaatgcgtttcttttccaatggaaaagaggtgcagctcatgcatcgccctcgtgcacgccgtataaaataaagtccgctctctttcctttttgtattgcttttcagaagcgtcataaatgatgacggcatcaaattcgatccctttcgccaaatagacgggaatgacgaccacgcctttttgaaacgttctcgtttctttatcgatcagtttaagctctgcatgctgctgaagatgctggaacgcatccctgcattcccggactgttttacagatgactgcaatcgtctcaagtccttctttttgaagggcggtcataagggaagccatctctttatggtgtgcatgaggatcggctgatattgtcaaagtcggttttttgccgttcctattaaaagcttcgatctcttcgcccccttcgatgatgcgctttgtcaattcaacaatttctttcgtcgacctgtagctgcgcttcaaggtgatgatctccgttttttcgccttcaaacacgcctcccgacagaagcgtcttatcgtgataggcatgggcaagaatcgcctggtttaagtctcccagcatcgtgatgctgcacgcgggaaacaagctctccaaaaaagcaagttgaaaaggcgtgtaatcctgggcttcatcaatgaataaatggcggattgccgtgtttttccccccgcctttcagcttgtttttcatatataaaaaagggacggcatcttcataaagcagcttctcaaaacgaaagcttttctgagtgaatgtgcaaatgctctgccagtcatcagagcgcgttttcggggtatagcgtccggaaaaaagctgaaggtatgttcctttaaaatcaataaagccgaacgcttttaccacttgcttgagcggcttgaactccctttcggcaacgatggaggcaaggaggtttcgctccctttcataatcgtcaaacgtattctccgtaaagcgctgttcctcctgaagacgtttataagcctttaagtattcctctttatccagcagctcgctttcttcgatgacccagtctttttttctttcctggcgttcatatttattcaggagctgcaacagccattttcccgtttgttcaatccggttggacagcgtgtctgaatgatcaagggccgcgaaaaatttccgcatctgaccgcttgtgatgatcctttttccgcgaaaggtgatatgtttaaacaccaggttcccttttgccaaatatttgacgtaatcatcgatgatgcctttgaaagccagactggatttcaattcaatcgatttcatccggatgcgctgctcctcaccgtctgaagcggttaaacaatattcaagctgatcgaacggagtctcgcatggtacctgctttccaaggcggcgcgctacaaattcctggaacgtcgtctgctggatgttttcctctccgagctcaggcagaacattggcgacatagctgttaaaaagcaggtttggagagaatagcagcatctggctcgactcgatctgcccgcggccgcggtacagcaaatatgcggcccgctgcaatgccgccgacgtttttccgctgccagccgctccccgaacaattaaaaagcggctcttttcgttccgaatgatctgattctgttctttttgaatcgtcgcgacgatgcttttcatctggatatcggcctgctgccccagcacttcctgaaggacttcatccccaatcgccatatccgtattaaacatcgctttcagctgtccgtttttgaagagaaattgccttttcagctcaatcgttcccctgaccgtctcgtccggaacttcgtattgagccgcgccgggtccatagttatagaacagactggaaatcggcgctctccaatcatagatcaaaaaccgctcttctttttcatacattaaagaggcgagtccgatgtagacggactcagcgttttcttcgccgtcctccaaaaaatctacgcggccgaaataaggcgattctttcacttttaacaggtttttcagctggctgtaaaactgcttatggctcctttccctctcagccaaaacctcagcctgctgtttaatgctaaaaaatgtttcaaccgcttcattttcatcggctatgtttacggtgacatcgctccaaaaatgtttccgtaaatcgatgatatcctccttcaatccgccggtttttccctttagagaatgaagcttttgatccaattcctttaaaacaagccggattcgtttttcctcttccagccattcctgaccgttttcctgcacgctgaccactccctaaaaagatttgacatcgaaaaagattcatgataaaataaaaatggataaaattataattattgaaattttatgttaaaatacacttcatcttatcatataacctttggtcaaatcaatataaaaagccgatttttcaatcaacgaaaaatcggcttttttctattcagctgtgggaccgcagcgaacggttcggcagcttccagttgaacatgtacgaacatacacggcacgcgaccagcaaagcaaacaggatatacaacgtgagcggcttctccgcccagcccatgccgataatgaatccgcccaaagcggcccaaacggcgtaaatctccgttttcagcacaagcggctttcttccggccagaaggtcccggatcattccgccgccgcttcctgttaagaccgccgcaacgatcactgcgctgaccggatggttcatgtgaacggcataaagggctccttgtatcgcaaatgcggcaagaccgatcgcgtctgaaaagctgccccagatgctccagtgctttaacaggagcttcggaaacaaaaaaacgatcgtgatcgagacaagagcgattagaaacagactcccctgctcccacaaggcggacactggaactccgatgagcaggtttctgatcgcccctccgccgaacgctgtcacaatccccaatatataaactcctaaaatatcatactcttcttccattgcaacgatcgctccgctgatcgcaaaagcgacggttccgatgatgctcaacacttcccaagccatctaagatgtcctccatactaaacttcaatctttttgattttataacttctccaacctttaaatcaaccctctctgaatcaaaatatcttataatatagaaagatgtttttaaaggggtggaaacatgggacaggaggtcatcatcgaaaaagcgaaagccgagtgggcgcacgaatttgaagctgaaaaacaacagctcgcagatgtcctcggaaaaaaagttctcgctatcgaacaaatcggcagtacctctgttcccggccttgcagcaaaaccggtactcgatttgatggccggcgtgagcagtctcagcgaagcttcagttggatcgaaccgcttcaggagctcggctatgagcacgtatttcacgaagccttcccagccaggcgtttttttcgaaagggaaagcggagggcgggcacacgccatctgcacgtatacatttttcaaagcgaagaatggaaaaatcagctgagattccgaaattatttaagaaagcattcagtcgagcggcaagcctatgaaacattgaaaaaaacttggcgcggcgtttccatattaccggactcctatacaaaaggaaaagaatcggttcatcacagccgtgattgaaaaagcaaaacattcggaaaggagcggcacggcatgctgaaaaagacaaaacataaactgcttactatagccatcgccttcattatggcggttttgttgtactactatgtccaagttacgaagtgaaagcgggattatacgtgcaaggccattctgactgttttgaggatatgcccttcgaaatcttcatcatattcggcgacatcctcaaaacccttcgccttgtaaaagttttttccggtgcggttttctttttcaacctctacaaagatctttttcactccctttaaatggtttatcccctcttccaataatgcggttccgatgccttttccctggtattccggagctaaataaacggctgcgagataggctacccctccttctctgacaaaggagtagttggcaaagccgacgatttttccgtccgcttccgaaacgagcattaacgagtgttccaaacgctgctgcattctttcgtcattgtacgctttctgcaagaacttctcttgaatatcgaaaggaatgatcccttcatacgtatgattccagcttgttttggcaatctgctgtacttgagggatgtctttctttttcattttgcgaatcttacactccatcctcatcatccttcacatctatttgataatttccaaatattataacatcctttctattgaacatgtataagaaataaaaaaagagcattgtcagacaatgctctttttactcgtctttccccttgagaaagcacataaaaatgataatcaaaataaatgcaataagggcgagaaacggaatcgtgatgaaaccgaaccaattgatatactgccctgagcaaggcactcctgtgacacacggtttaatgccgttgaatccgggaattttttgttccatgtagtgcatcagggaaatgcctgcgccgatcaccgccatcggcagcacgtattttttcacacgggcatcgccctgaaatgtcgcaattccgagaatcagcacgagcggatacatcataatccgctgataccagcacagttcgcaaggaataaatttacggatttcgctgaagtacaagctgcctagcgtcgccgttaatgagacgatccaggcgccgtacagaaaaagcagtttatttttcatcagactggcctttcagctctttctcgatcgtttctttgattttgtcataatcaaacggtttgtcgatttttacgccgttgacaaagatcgtcggcgtcgagtctacaccgtatttgttgatgagcgaattgtccgtttttaattgctcagcgaacgttttgtcatttaagctgctgacaagcttatcgcgtttgattttcgtattggcttccgtgatgtccgccaattttgccggcgtcgcccactcgttttccatcgtgtcattgtcaggctgcgccttgtacaacgcctcatggaacttccagaatgaatccggatcttccttccatacctgctcggaagcgagggcgctcaattcagagcctctgccgtgctgttcattgacgaagttaatatatgaaaaattaacttgatctttatcgatgtaatcctttttcaaatccggaaagacggtctcagtccactgtttgcagctgggacatttgtaatctccgaattccgtgatcgttacagccgcatctttgttgcctagaagcggctgtccttcagttgaaggcttgtcatcaaaggtttgcgaagcattttgggtttgattgttgattacgacaagtgcgccgatcagaaaaacgaccacgactgtcataatcactgcaaatttcatcggtgactgctgtttcttcttcacttagacacctcattattcttattttttagtatgccagtttgataacctctttcattttaacaagacaagccgcattcgtgaagatgctaaaaaaggaatttccagttcattaggtggtaaaaaagttacatttctttcacttttaataccctcatcgcatttaaaacagccagaagggtaacaccgacgtctgaaaagacggcttcccacatcgtcgcgatgccaaaagcacccaggatgagaaaaactcctttaacgccgagtgcaaaaataatattctgccagacaatcgtcctcgtccgcttggcaatgctgatggcttccgcaatttttgaaggctgatccgtcatgatcacaatatcagccgcttcgactgccgcatcagaaccgaggcctcccatggcaaccccgatatccgctctcgccaagaccggcgtatcgttgatgccgtctcctgcaaaaagcagcttttcttttggaagtttttgcttatctaatgtttcaatacggtccaccttgtgctgcggaagtagctccgcatgcacttcatcaatggacagctgttcgccgaccgcctcaccggtgtctttcgcgtcgcccgtcagcatcaccgtttttttaatacccgcttttttcaaagcggagatcgcacgcttggcatcctctttgatttcgtcagcgatgacaatcgagccgataaacgtatcgccggcggctacataaacaacagttccgatttcactttccttttgatactgtatgccggctttcttcataagcttggcattcccggctaaaatgacggctccgtctacaaccgctctgacgccgaagccggccgtctcgctgtaatctttgatgcggtccgcttgtacttccttcccgtatgcttcacggatcgactcggcgatcggatggccggagaaatgttcggcaagcgccgcatattcaagcagttcatcttctttgacatggcttgcaggcgacagcttgacaacggcaaattccccttttgttaaagtgcctgttttgtcaaaaacggcgtatttgacatcattcagcgcttctaaataattgccgcctttcacgagtatacctgcttttgacgccgctccgatgccgccgaaaaagccgagcggaatggaaacgacgagcgcgcacggacaagaaatgaccaaaaagacaagggcgcggtacacccaatctgacagcagggcgcctgaaataatcagcggcgggacaaaagcgagaagaagcgcgattatcacaacgaaaggcgtgtaatacttggcgaatttggtgataaaattctctgttttcgcttttctgctgctggcattctgaacgaggtcaagaatctttgaaacggttgattcactgtattctttgtccacttccacttcaagcacgccgtttttgttgacaaatccgctcagcacctctgttccgggagcggcttctctcggaacggattctccggttaatgcggacgtatcgacaagcgatttgcctgcccgcactttgccgtcaagcggcactttctctcccggcttgacgatgatgatatcgccggctttgacctcatcgggagacactttgaccgttccgccttcggtttgaagattggcatagtcgggacggatgtccatcaaatcgctgatcgacttccgggagcgggtgaccgcggctccctggaacagctcgcctatttgatagaacagcataaccgccacaccctcgggatactgctgaataataaatgcccccagagtggcgatcgtcattaaaaagtgctcatcaaaaacccggccgcgaaagatgtttttgacggcccttaatacgacatcgccgccgatgatgaggtaagctaggaaaaaaagaagccactcggctgcggtgccgccgggaagcagaaagcccgccgcaccgagaacggttcctgcagcaagccttgcaaccgtttttttaaaccgtccgtcgctttctggtggggcctgttttgtcccttccttcagcgtcgcgttgacgtgcggttcgatctcggttacttttttctttattattaaagaaatgtcttcgccgctgttttggtcgacttggacagtcagcgtgcttgttgcaaaattgaccgaacacgcttcaatccccttcataccggctatctcatgctcaattttttgtgcgcaattgctgcagtcaaggccgtttagcgtgtactcctgtttcaccttttccatctctctcacctttctttttcagcgccgggctttattttatatatgagcatatacgcatatattatctacccttattatatgcttcatccgaaaaatgtgtcaatcgatctttgttatcatacgcaccggctgtttccgtgtttaccctgatccgcgtctgcgaaaactctgctggcatattggaagcaatgcccaaatatacttagtttagctattaaactaacaagcttttttcataaggagtgagcgcttttgaaaaaatcgtgtctgatgatcgtctgcctcgcctttcttcttgctttttccgcaggctgcaaaagcagcaccggcacaaagcatacggaagaaataaaagtctgggattactttaccggcaagcagcaggatctttatcatgagcttgtcgaacagtacaatcggtcccaggaccggtacaaggtcgtaacggagtacattccttttaatgaagtgaaaaagcagctgtctgtcggtacagccggcaatgccatgcctgacgccgtattccttgacaatgtcgacaatgcttcattcgccgctatgggcgtgctcgaagatttgacggagaaaatcgaacaatgggggcaggctgaccagttttatgaggggcctctatcatcagccggatatgaagagaagtactacggcatccctttcgcaagcaatgcgcttgccttgttttacaacaaagacctcttgaagaatgcagggatctccaaaccgcctgaaacgtggagcgatctgaaaaaagcggcggaaaaaacgagcaaaggccaaacgaaaggatttgccctgtcagccgtaaaatcagaggaaagcgcttttcaattttatccgtttcttttgtcttccggagcagatctaaaacagctgaattcaaaagaagcagcctcttctcttcagtttttaacagatctgatcaagaaaggcgcaatgagcaaggaagtgttaaacgccacccaggatgatctggccagacagtttgcagcaggtcagctcgccatgatgatcaacggctcctggaatattgaacggctggaagaagccgaagacttaaattacgggattacctatatcccgaaagatcaaacattcgcttctgccctcggcggcgaaaatattgccgtcgttaaaggaaaaaacaccgccggcgcctgggattttatcagttggctgatcgatccggagcggctcgaaacgctgacagcagaaacaggcgtgtttccgccgcgcaaagatttgctcgaatcatcgagccattggaaaacagatgataatttaaaagccttctttccaatcatagagatcgcatcagcccgcggcccttcgaaagactggccgaagatttcggaagctttgcagactgccctgcaggaagcattgagcgaaagcaaaacgccgaaagaagcgctggatgaggccgcgcaaaaaatcagcgccttaaactagctttaagcgcacgaaggagttttgtcatgatcagagccattgtccgtaaatgggaagggtacttttatttgtttccggcagttctttttatgcttgctcttatcggttatcctctcatctacaacatgattctcagctttcaaaacgtatcgcttgcaaatatagcctcacacgatatcagctttatcggaatcgaaaattatcagcggattgcccaggataaagtattttgggcatctttaaaaaacacgctgctttacacggccggaagcgttgtatttcagtttgcaatcggctttttgctcgctttgtttttcagcatgaagttcaggcttgccccgtttctcaggggattgatgatggtgagctggctcatcccgctgacggttacggcgcttttattcaagtttatgatggcttcaaacgaaggagtgttcaatcagctgctcctatcatggggaatgatcgacaccccgatcccctggctgtcagacccgaatatggccatctggtccgttatcatcgccaacatctgggtcggcattccttttaatatgctgctcatatccgctggactcagctcccttccggaagacgtctatgaaagcgcaagccttgacggcgccaatgcttttcagaaattcatccatctgacactgcctttattgcggccggtgatcactgtcgtcatgatgctcggcttcatttatacgttcaaagtgttcgatcttgtgtttgtgatgactggaggcggtcccgtggacgcaactgaagtcctgtcaaccgtcagctaccgctactcctttgacgaatttcaattcagcatgggcgcggcaagcgccaatgtcctgtttcttattcttcttttggtcagtctcgtctatttgcggctgatcaaaaaagatgaggtgatgtcgtgaaaacgaaccaaaaggaatggctctttaacattattggcgtcctcgttacggccggctttttattccccgtttactggatgattgctacggctttcaaaagcgatgccgaattgtttaaaacaccgcctttattgtggcccgagacattccgcacggccggctttgaagctgtgttcacttctggcgtcgccggatactttttgaacagcctcctgatttccggggcggctgccgtcatcgttctcatattggccgttccttccgcctacggcttggcgcgctttcggatcaagggcaaaaaaatgttcattttactgtttctcatcacgcaaatgctgcctgccaccgttgttttgactccgctgtttatcgcctttaatcaactgaacatattaaatacgtatatcggaccgattttgacgggggcaacgctcggcgttcctttttctgttttaatgctcagaaccttttttcttgggattcccaaggaccttgaggatgcggccaaaatcgacggctgcagccgttttaccgcgttcatccgcatcattttgcctatcagcgtacccgggattgccgtcagcggagcggtttctttctttttcacatggggagatttgatttacagcatgacattcaaccgaaatcaggagctgtggccgctgacggccggcatttacaatgtgatcagccaatacggaatccagtggaatgatctgatggcatttgccgttttatcggttctgcctgtcatcatcatttttatgctgcttcaaaagcagcttgttaaaggacttatcaatggatctatcaagtaaaaagaaagggtgttttcgatcatgaaattttcagacggctactggctgacgcgcgaaggatatcacatcaacacgccgaaagaagcctacgaccgaatgattgatcagcaatcattgaccgtgtacgggcctgtcaaagcggttcaaaagcgcggggacacgctcgacacccgcatgctcaccgtcagattttcgagtccccttgaagacatgatccgtgtgcaagtgttccattttcaaggggaaacgcctcggaaacccgactttcaactgcatacggcagatgttgaaccggtcatcaccgaacacgatgatgcgttgaccttccaaagcggcagcctgtgcgtcgaagtgagcaaaaacggttggggctaccaattttcacgtgatggacagagcctgaccgcaagcgaatcgaacagcctcgcctatatcacaagcgatgacgggcgcacctttatgagggaacagctcaacatcggcgtcggcgaattgctctacggccttggcgagcgttttacggcattcgtgaaaaacggccaaaccgtcgacatctggaatcaggacggcggaacaagcacagagcaggcatataaaaatgtgccgttctatttgtcaaacaaagggtacggtgtttttgtcaatcatcccgagctcgtctcgtatgaaatcggttctgaagtcgtatccaaagcgcagttttcggtcgaaggagaatcgctcgactattttgtcatcagcggcgccgaaccaaaggatgttttgaaacgctatgccgcgttaacgggaaaaccggcgcttcccccggcctggtctttcggcctctggttgtcaacatcgttcacaaccgactattccgaggagaccgtgacccgcttcatcgacgggatgaccgaacgcggcatcccgctcagcgtgtttcattttgactgcttctggatgaaagaatttgaatggtgcaatttcgaatgggatgaacgatattttaagcagcctgaagccatgctcagccgcctgaaagaaaagggcctgaaaatatgcgtctggatcaacccttacatcgcgcaaaaatcaaagctttttcaggaaggaaaggaaaacggctacttcttgaaaaacagccggggggatgtatggcagtgggaccggtggcaggccggaatggccatcgtcgacttcacaaatgaaaaagcgcgtgactggtattgttcaaagcttgaaagcctgctcgacatgggggtcgactgctttaagaccgatttcggagaacggattccgagtgacgctgtttactttgacggatcagatcccgaaagaatgcacaattattattcttatttatacaacaagaccgtatttgacttgttgaggcaaaagcgcggcgaacgggaagcggtcgtgtttgcaaggtctgcgacggccggcggccagcaatttcccgtacactggggcggggattgttttgccagctatgattcaatggctgaaagcctgcgcggcggcctgtcgctttctctttcaggcttcggcttctggagccatgatatcggcggatttgaaagcacggcaacagacgatttgtataagcgctggaccgcattcggcctcttgtcgacgcacagccgcctgcacgggagcgagtcataccgcgttccgtggctgtttgacgaagaagcggccgatgtcatgcggtattttgtcaaactgaagcacaggctgatgccttatttgtacgccgctgcacatgaagcgcacactgaaggcattccgatgatgcgggcgatgctcctcgaatttcccggagacaacacctgccactggcttgacagacagtacatgctcggcggaaggctgctcgtcgctcccgtttttcaggaagacggcgctgtccgttattatttgccaaaaggcacgtggacacaccttttgacgggaaaagcgacggaaggcggagaatggaaagaagaacggtacggctatatggggcttcccctgttcgtcagggaaaacacactgctgccgctggggcaggaatccgggcgacctgattatgattatctcgacgatgtgacgttctgcctctatcatttaaaagacggctgtacagccgaacagacgatttacaatgaaaagggcgaagcaatgacactcagagcttcacggcatcaaaatacgattgccgtgaaaacaacgggcgtccaaaagaactggaagctgctcctccgcggtctttctgtcacctctgttattaacggagctgcggaagcgcttcaggagggaacagcggttcagccaaaagaaaaagaacgggatgtcttcatttatttctaaaaaggagtgatcaggatgctgaaaacggtccgcatcatcatattgggcgcaatgtgcacgatcctttccgccgccggtttcgatccgccgcagcccgcagccgctaaaagccaggctgatgaatatgagtatccctttcaagatcccagtctccctgtacaaaaaagagtcagcgacttgctttcacggctgacccttgaggaaaaagtgtcactgatgcatcaatatcagcccgccgttccccggctgggcattcccgcttttaaaacgggcacagaagcgcttcacggcgtcgcctggctcggggaagcaaccgttttcccgcaggctttcgggctcgcgcacacatgggaccgctatttaatcaaacaaatcggctcggcagtcggtgatgaagtccgcggcttccaccaccttgatcccgcggcaaacggagtcaacgtctgggcgccggtcgtcgatctgctgcgtgatccaaggtggggaagaaatgaagaaggctattccgaagacccctttttaaccggggaaatagcaaccgcctatgcctccgggttaaggggcgatcatcccttctatttgaaaacagttccaaccttaaagcattttcttgcctataacaacgaaacagaccggggattcatctcctcaagcatcgatcccaggaacatgcacgagtattatttgaagcccttcgaaacagcaatttccaaaaaagccgcgtatggactgatgccggcctacaattctgtcaacgataaaccggccattttgagcccgctgctcgacagtacagtcaaacgtagatgggccggagacgatttcttcatcgtcagcgatgcctttgatccttccggaatcgtcaatgaccacaagtattatgacagccacgaaaaagcccatgcccacgccgtaaaagccggcattgacaactttacggatcagggggaaaatcccgagctgacgagaaacgccttaaccggtgccttaaagcaaggccttatttctgaaaaagacctcgatcaagccttggccaatacgttcagcatccgttttcgcacgggcgaatttgatccggacgaactcaatccgtacagccgcctgacagatgacgtcatcaacagtccaaagcatcagctgctggcgaaaaaagcggctgaaaaagccattgttttactgaaaaacgaccgggatctgcttcctttcaatgcccggaagaatgaaagcattgcagtcatcggcccgttcggaaatgcgctttacgaagattggtacagcggaacgatgccgtatcggaaaaccccgcttgacgaaatcgcggacaaaatcggcaaagaccgcgtctcttttgctgaaggtctggaacaaagcggcttcaaatccgcgctgaccggaaagtttgtaactgcaggccgggacggcaaacaaccgctcacagcagcggctgataagcttgagaaaagcgcggcattcgatgcggcggattggggagaaagcatcttcaccctccgcgcccaagcgaacggcctctatgtctcgcttcaggatgacggccggctgatcgctgatcagaaacagccgaacggctggaccgttaaagaaacatttcagttcgaacagcagtctgacgggacatttgccatcaaaaatacggcaaacggcaaatatctcaccgccggtaaagacggcacattaacagccgccgccgaaaagccggcaacagcagcggaaaagttttcaaagacgatcatcaagagcggtacggatgaagcggttcagctggcaaaatccgcggacaaagccatcgtgtttgtcggcaacaatccttacatcaacggccgggaaaccgaagaccggaaagatattacactccctccggcccaggaaaatctgctgaaagctgtttctaaagccaatcccaatacggtgcttgtcgtaacgagcagctatccgttcgctctcaactgggcaaaagcgcacattcctgcgatcatatattccgctcacggaggccaggaggcgggaagcgcattggcggacattctctatggagatgtaaatccgggcggacggctgacgcaaacttggcacacctcagtcaaagaactgccggatatgatgaattacgatatcatcaaagggaaaagaacctataaatatttcgtaggctgtttccgttcggccacgggttatcctatacagcgtttcgctacagcgatttaagcctttcctctgacagcatcaaaaaagacggatctgtcacgattcgcgtcaacgtcaccaatacaggcggaagaaaaggagatgaagtcgttcagctctatacctctcccctgtttaaaacacgggttaaacagccgaacctggacctgaaagattttcagcgggttgaactggcaccgaaagaaacgaaaaccgtgacattcaagctgaaacagacagaccttgccttttgggatgtgacgagagaaacttttgccgttgaaagaggcccttacagaatatccgtcggcagctcggcggcggacatccgcaagacaaagcggattttcgtccaaggcgaaacaattcgggaacggaacttgcgccgaaagacaaacgctgaagactacgacgactacaaaggcgtgctcatcaccgaagaatccaaatacggcggcgatgcggtaaaaagcagtacaacaaacgcgtggatcgcctaccatgatgtccgcttcaaaggcgaaaaaaggatagaagcaaaggttgcaagcagcggcgccggcgaaatcggcatcttcctcgaccatcctcaaaaaggaaagcaaatcggttcgttaaaagtgcctgacacatccggattgcaaaactggaaaacggtaaaagcttccgtccgaaaatcgacaggcacccaccgcgtcttttttgtcttcaaagggaaagttgcaatcgattcgtttcaatttgaaagataaaccggcaaacaagaaattttttaaagccatgcagcttgatctgcatggcttttaccgtttttcagcaattttagctctttacaatttaggaatgatatattagaattcaatcaaaagttgcattaggtaaaaaaaatgtctttaggcaataaaaaattgccgaaacaaaaatattgtatgcaggttaactttcatatagacatagaaaggggttaatgaacgctatgaaacccgcaattaccgtaaaagatttatatgtttcttatcacggcgcagaagcgctccgcaatattaatttctcactcgatcaaggaatgatggcgggcattatcggaccgaacggcgcaggaaaatcaacgctgttaaaatccatgctccaattgattccaaaagataaaggcgacgtccgtctgctgggaaaaccgctcaaagatgtacgcaagcaaatcgcctatgttccgcagcgaaatgatatggattggacgttcccgatcaatgtcctcgacaccgtcatcctcggcacgtatcctgaactcggccttttcagacgtccgaaaaaacgcgataaagactgggcgtatcactgtcttgagaaagtcgggatggctgcatatgccaagcgtcagatcggcgaactgtcaggcggacagcagcagcgcgtttttctcgccagggcgctcgcccaaaaagcagagctgttctgtcttgacgaaccgttcgtcggtattgatgtgacaagtgaagaaatgatcgtcagcatcttaaaagaacttcgtgatgaaggaaagaccgttcttgtcgtccatcacgatttgagcaaagcggacagctacttcaatgaattaattttgctgaacaaagagctgattcaaaaaggccctgtctccgacatcctcaatcccgacgtgatgatgaaagcctacgaatctcagcttccgttcctgcaatcgaaaagaggtgcgatctgatggagtttatccatggtttgatggaatattcgtttctgcaaaaatcgctgttcacctcgattatggtgggcatcatttgcggcgtcatcggctgctttatcattctcaggggaatggcgctgatgggagatgcgatttcacacgcggttcttcccggcgtcgccatctcttatatgctcggcgtcaattttttcttcggcgccgtctttacgggcatcctgacggctctcggaatcggctatgtcagccaaaacagccggattaaaaacgattcggccatcggcatcgtatttacggcttttttcgccgtcggaatcatattgatcacgcttgtcaaaagctcaagcgatctgtaccatatcttattcggaaatgtgctggccgttcgttcatcagacatgtggatcacgctcgtcatcggagtcattattcttaccgctgtctttttattttacaaagagctgctcatcacctctttcgacccgacgatggcggctgtctacggcttgccgaaccggctgatccactactttttaatgacgcttttaacaatggtcacggtcgcatcgcttcagaccgtcggcatcatcctcgtcgtcgcgatgctgatcacgcctgccgcaaccgcttatctattgacggaccggctgtgggtgatgatctatttgtccgctttcctcggcgctttgtcagcggtcatcggccttggattaagctatacgtacaacctctcctcaggagcggcaatcgtgctcgtggctacgattttgttcggactttcctttacgttttcaccgaaacaaggcgtgctttggagagctgtgaaatcaagaagaaaacgggcagcgcttcaacaataaccgcaaaataaagggggaaaacaaaacatgaaatggaagcaaacattagcaattgcggcggcattgattctgattctcgccgccggatgctcctcgaaaagcagcagcgaagaaaacggaaagctgaaggtcgtcaccacctactccattctttatgacatcgtcaaacaagtcggaggggatcacatcgatttatacagcattgtacctgtcggaacagacccgcatgaatacgatccgcttcctaaagacgtgcaaaaaacgacggacgccgatgtcgtcttttacaacggattgaatttggagacagggaacggctggtttaacaagctgctggaaacagctgaaaaagacggtgatgacgcccctgtctacaagctgagcaaaggggtcaagccaaagcatctcaccgctaagggaaaagaaacggaagaagatccccatgcatggctcgacattgaaaacgggattcaatatgcaaagaacgcaagagacgcgctgatcaaaaacgatcccgaccataaagaagactacgagaaaaacgcggaagcctatatcggcaagctgcaaaagcttcatgatgaagcggtgaaccgctttaaagatataccgaaagagcgccgcgtccttgtgacaagcgaaggggcttttaaatatttcgcttcggcctacggcgtcgacgcgcagtatatttgggaaatcaacaccgaaaatgaaggaactcccggtcagatgaaaaaaatcgtcgacacagtgaagaaaaaggacgtcccggccttattcgtggagacaagcgttgacccgcggagcatggaaagcctttcagccgaaacgggcgtgccgattaaagcaaaagtcttcaccgattcgatcggaaagcccggtgaagcgggagattcctattataagatgatgaaagaaaaccttgaccggatccatcaaggcctcgccgaataaccaatgaactgctgtacaggatgtacagcagtttttttcttatgtttttccgattttaaagcagggtacaacgaagggaaaacgaggaaaaaggagtgtgtttcgtgaaatctggatatgaggaatgcatcaaagcctgccgagaatgtcttgaagcctgcaaccactgctttgacaaatgtctgatggaagaagaggctgggatgatggccgaatgcatccgtcttgaccgggaatgcgcggagatgtgcggttacgcaattcaagccatgacgcgcaacagcccgtatgccgaagatatttgccagctttgcgcaaaggtttgcgaagcttgcggcaatgaatgcagccagcacaagcatgaccactgccaattttgcgctgaaagctgctttgcatgcgcggaagcgtgcagaaaaatggcttcttaacttgaaacatccggccctcgagccggatattcttatgtaggaaatgtttattttttctccttccccctttctaaactgatacaatatgactataaaagggggttttatcatgaaagacagcgtgtttcaaatgacttctgacacatatcaatctctcagcgattcagaacggcatttgctcgagtacatttatcagcacttagacgtcatcgccactttatcgattgtaaaattaagcgaggatgcaaatgtttcaacagccacgattgtcaggttaatgaaaaaactcggatatgacggctacacttcttttaagtatgcattaaaagaaaaacaccacctcggacacgctccgctgatggatgatatcgacagccaaattaaacaggccgtgctaaagaatgaaagagaagttctggatacgattaagatgcttgatatcgggttgatcgaagatgccattcaaaaaatcagcaatgccgaaaaagtttacatcttcgcaagaggattgtctgaaatgattggaaccgagatgacgatcaagcttcagctgctcggcaaaaactgcgagatgcacagcgacccgaatattatcagaggaaagtcaaaaacactggccaaaaaagacctcggcctttttgtttccttgaacggcgagacagaagagcttgttgaagccgctcaaaatttcaaattgcaagccatttccaccattacattaacgacaaggatcgattcgcgtcttgcgaaattatcagagatcgtactggtcgggtttaaaggggaacaatcattttttcccgattatgaagtccgctctcgcctccctctgcaagtcctctcccgcatcatgctggactcatatgtcatccgcaccgctcatagctgaaaacctttacacaacctgtaaacatcccccctttcatctgtgacataatgtctgtgaagccacatataaaggggggatacagcatgatctatacatgcacgatgaacaccgcagtcgacttattcgttgaaaccgacgagctgcttcccgatgttgtcaaccgtactaaagatgaagattatcagccaaacggaaaaggcgtcaatatttcatttatgctcaagcgccttggtcttgacaataccgcgcttggctttacaggcggattcaccgggcgttttattgaaaatgaactgctgaatgaaaaaatcgtcacagactttgtcgaagtggaaggcatctcacggatcaatatttttatcaattcaacccgggaattcaagattgtaaacaaaggaccgctcatatctgaagcccgaaaacaggagctgatcaacaaaatccgtcaaatcccgccgggccgcttcttatttatttcaggcagtcttccgagaggagtccctgatgacatgtacctttcgctttccgagattgccgccgaaaacaaactgaaattgatcttggatatcagttctcccgtcctattagattgtctttcataccatccttacctgattaagccgaatgaacaggagcttgccgcatttttcagccggaagaaagcgctgtccgaagaagaaatcatccattgcggaaaggaacttctcgaccgcggcgctgaaagggttctcatctcccgcggcaaagacggagccctttatttggaccgccaaagaacattaaaagcgaccgccgctaaaggcaaagttgtcaatacagcatgtgccggcgatgccatgcttgccgtattcgtcggaaaacaggagctcggctgttccgttcctgaagcactcaggcacgcctctgccgccggttccttgacggcattctcgaaaggactcggtgatgtgtccaaactcgatcaaacagcttcacaaattcaaatcactcatttataaagggggttttcttatgaaaaagttcaaaatcatcgcggcaaccggctgtccaacagggattgcccatacatttatggctgaagaggccttaaaacaggctgccgccaaactgggtgtggaaatcaaagtcgaaacacacgggcaaatcggcgttcaaaacgaactatcgccagaggacattaaacaagccgacggggtcattgtcgcggcagacaaagatgtaggcgcagagcgttttgcaggcaaacgtgtccttgacgtcccggttgcgcggggcatccgggatgcggaatctttaattcggacgctgatgaacggcgaagcgccgatttaccgcggacaaactgcggcaaaaacagaggatgaaccaaaaacaggcgaatccgcttccatcggccgtaaaatatataaacatttgatgaacggggtttcccacatgctcccatttgtcgtcggcggaggggttttgattgcactttcctttttattcggcatccattcagcggatcctgaacatccaagctacaacgcttttgccgaattgctgaataaaacgggcgcattcggattccagctgatggttccgattttatccgcctatatcgccgattcaatggcaaaacgccccggcctgattgtcggttttatcggcggcatgatcgccagcacgggcggagcgggttttctgggcggcatcgtatccggttttttggcgggactgatcatttacggcctctcgcatgcacttaaaaaaatgcctcagtcacttgaaggactaaaagcaatttttctttatccggttatcggcatttttctgatcggtgcggtcatgtttttcctcgtcgaaccgatgacggccattaatgaggggatgaagggctttttagccgactttcaaggggcgaacccaatcattctcggcttgatcatcggctgtatgagcgcatttgacatgggcggcccggtcaataaagccgcttatgtcaccggtactgctcttctcgctgaagggaaccaatatttcatggcaggcgtctccgccgcgtgcatcacaccgccgctcgttattgcgtttgccacattgcttttccgcaaatatttcagccagcaggaccgaaatgcaggacttgtcaattttattctcggcgccactcatattactgaaggcgctatcccgttcgccgcaaagaaaccaatccctgtcattccgattttgatgatcggctcttcggtttcggcaatattaacatattcattcgcagttcaagtacctgccccgcacggcggattccttgtacttcccgttgtaacaggagcctttcaatgggtgctgtcgattatcatcggatcgcttatcggcgccttcttatacggcttttaccaaaaacggacatatgaaaaagagaaaggctgatcaaacatgaaaacagcagctttaatcaaaaaagagcacatctatctacaagaaacgctatcttcccaagcggaagcttttgaccggctggctcagatcgcatatgaatcaggagcagccaaaacaaaacaagcggtcattgacggattggcgcaaagagaggctgaaagcacgaccggctttatcgacggcttcgccattccccatgcaaaactgaaggacatcacagaagcaactgtcatcatcattcaaaacaaggcaggaatcgaatggaacgcgcttgatcagacgcctgtcacgttcatcattgcattattgatacccatgccgaggcaggcagcacacatctcaatctattatcatcggtgtctcgcatgcttgttcacgaagatgcgaggcagcagctgcttgaagcctcgagtcctgacgacattctgagcaccttctcaagctatttatcttaattttgatcagaaagaaggaatcgatatgctgacaaatacgaaaaaaatgctgctggacgcacaggcaaacggctatgcggtgccggcctttaacattcataaccttgaaaccgtgcaggccgtgacagaagcggctgaaaccttaaggtcccccgtgattcttgcggctactccaggaaccttcagctatgcagggcgcgactatattcaagccattgcagaaacggccgcggcgcgctgctcgatcccggtcgccctccatctagatcatcatgaagaaattgatgatattcgcgagtctttatcattggggacgaaatctgtcatgattgatgcttcgcaccatccatttgccaagaataccgcaattacggcgagtgtcgttcaatatgcccggcaaaaagatgccactgtagaagccgagcttggaaggctcggcggacaggaagacgatttgatcgtggatgaagccgacgcttattataccgatccggatgcagcaaaagagttcgtcgagaaaaccggaatcgattcgctggcggtggcaatcggtacagcccacggtctttactcaaaagagcccaatatcgattttgagaggctggccgcgattcaaaaacgggtttcagtcccgctcgtcctgcacggcgcctcaggaatttcagagcaagatgttagaaagtgcatcaagctaggctgtgcaaaagtaaatatcgcgactgaattaaaaattcctttttcagataaactgcgccgatatttgcatgaacacgccgatgcaagcgatccaagaaaatatatggcccccgccaaagaagccatgaaaaaaatcgtccaagaaaagattttgatgtgcatgagcaatgacagatactaatacaaaaagccggatgttctttaacatccggcttcctcagcaattcatttgacatgctcttctaaagcatgaccgtcatggggattttcatcgggtatcggttcccgaccggccaatatgctgtatacaagcatgacaattcctacataaacaaccgctgaaaccgtccaaacgagcactgtcttatccttcaagacggattcctccaatcaagcttcaccttttgcagcctgagtgcattcagaacgactgagaccgaactgaacgccatcgcggcacctgcgatccacggagccaaaagcccgacagccgcgaacggaatgccgatgctgttgtaggcaaacgcccagaaaagattttgtttaatgtttttgatggtcaatctgctcatgaggatcgcatcggcgatgctgtttaaatcgccgcggatcaaggtgacgtcggcggcttccatggcgacgtcagtccctgttccgatcgccatacctgtatcggccgccgccaatgccggcgcatcgttgatgccgtcgccgaccatcgcgacttttttgccttttgcctggattttcttcacctcatccgcttttccttccggcagaacttcggcgatgacgtggtgaatgccggcttcagcagcaatcgcttctgccgtccgccgattgtccccggtgatcatgacgacttccagccccatatcatgcagccttttcaccgctgccttcgacgtgtctttaatcgtatcggcgacggcgatcagcccggcaaaccgaccgtcgacggcggcaagcatcgccgtctttccttgtgtttcgagctcttccatttcgccgttcgcatcttgaatgtcaatatcacggttttccatcagacgtcttgtaccgatcaaaatccgcttttcattgactgcggcttcgataccatagccgggtatcgcttcaaagctgtctgctgaggcgggttctatccctttctctttgatgccttcgacaatggcttcagcaagcgggtgttcagagcttttttctgcagcaccgataagcttgagaaacgatgtttcatcgatccatggttcagggcgcacatctgtcagctgaggcttcccatttgtgaccgtccccgtcttgtcaagcatgatcgtctccaagcggtgagccgtctccaaatgttcgccgcctttgaataagattccgaattcagccgcgcggccagatccggccatgatcgatgtcggcgttgccaagccgagcgcacacggacatgcgatcacaagcaccgcaatcagcttctccagcgccgtgccgaattcgccggggctgaccgccaaataccagatgaaaaatgtgatggccgcgatcgccacgacaatcggcacaaaaaccccggaaatccggtctgcgagccgttgaatcggcgcctttgaaccttgcgcctcttccacaacttttataatctgcgccagcgcagtatctttgcctactttttctgctctgacttttaaaaatccatttttattgattgtagcgccgataaccggatctccaaccgttttgtcaacagggatgctttcaccggtgatcatcgattcatccagcgctgaacgaccttcgacaatctccccgtctgccggtactttttcaccgggcttcacatacatgatgtcgcctgccaaaacgttttcaatcggcacggtcatctcttcgccgttcctgacgacggtcgctgtctttgcctgcagccccatcagctttttgatcgcttcggatgaacgccctttcgctttcgcttcaaacagctttcctaaaatgatcaaagttaagaggatggcgcttgtttcatagtaaaggccgtccggatgccggtttgtaccgaggctttcaatgcttaaatacaagctgtagaaataggcggcagacgtgccgagagcgaccagcacatccatgttggcacttttgttccgcagcgctttataagccccagtgtaaaactgcttcccgacgataaactgaaccggtgtggccaacgcgaactgaacccagggatccatgaacatccccggcagccatataaatgacgtgaatttgaaatggctgaccattgcccagagcagcggaaaagacaaaatggctgaaaaaataaatttgccggtttgacgctgaatatctttttctctttgttccgcccgaccgtccgcagttcggtcttttttcagctcgagcttgtagccgagcttttcaacggcttcgatcatctcctccggcgaaaccgcgccagcatgatagtcgactgtcgcagtctcaatggcaaagttgacggcggcgcttttgacgccagacagcttgttgaggcgcttttcaacccggttggcgcaagccgcacacgtcatgccggaaaccgcaaattcggctttttccgcaggaacttgatagccgagcgattcgactttctcagccagctgtccgacttcgatttgccccggatcataaacgatttttgatttttccagcgccaagttcacatttgcgtcctgaacgccgtcaagccttttcaaccctttctcgatccgcgccgcacaggcggcgcaggtcatgccagagatttggagggtggcttctttttgtccgtccatatccttcactccttatataccccttgtaggtatacatcagcctgcaacatcatacccctggtcttcgatcgtatcgatgatctccttcagcgagactttgcctgaatcaaacgatacttcgactttgccctcgtttaaattcactttgacagactccactccgccaagctttccgacgtttccttctactgcctgaacacagtggttgcaagacatgccttcgactttcagtgttttttgttccatattgaaaacctcctgtggtttgatgatattgatcggttttatattaccatacccctgtagggtatttcaagaaaacgattttctcttttttcgttcatgattttgaaaaccgtttaaacacatcaagcagttcctcgatggcttcttctccctcaccgcttttaatcgcgtttgcgacgcaatggtgggtatgatcctcaagcaggctgaaagcaaccttttgcatcgcggcttgcacagctgagatttgaacgagaatatcgacgcagtagcggtcattttcaatcatcttttgaatgcctctgacctgtccttcaatccgctttaagcggtttgtgatttgttcttttcctttagagcttttgggatttaacgcgtgttcatgatgatctgccatcggaacacctctctttcctttatattttgtccaagatccccattggtaccattataaaatgcgaagcggaacatgtctaaaaaaagagacaaccccgaactgctgcggggtcatccctgcatattatttgtttaacgctttaaaaaattctctcataaactccggcagattggaccagtcatgacctgagaccaggttggcgtccacatgaagcttctcctcgacataagtcgcgcccgcggcttcgacttccggtttgcaggcgatgtaagccgtcagctcccggcctttcagatgttctctcaggcttgtgaaaatcaggctcgcatgacaaatcgcgccgaccggtttattttcctcaaagaaatgagcaacgattttcagcagggaatcgtacatccggataaattccggtgcgcgtccgccaggaatgatgatgccgtcgtattcggacgggtcaatctcatcaaatgaagcatgcgcgtcaattaaatagcccggcttttcggtgtatgtatcccaatccaggaagtcatgaacaaccgtatgaatctttttctttttcggtgcggcaatcgtcgtttcatagccctcttcaagacagcggtaataagggtaatacacttccagcgcttcaactgcatcgcccgttacgattaaaatctttttcgccatcaaaaacatctcctttccttttttactcttctattttatcccatttgcgcctgtttttaaaatcaagtgcttgagaagttttgtttcagccgacgatcgtgatgttctctgttatgtctttcaagcgggcaagatttgctttgtcaattcctgaatctgtgatgaccctgtatcggtcatgaaggcggtcgatttgcgagaaagcacgggttccgaatttgctgctgtccgccatcaaaatcgtttcgtccgcaatttcgatcattcgttttttcaacagcgcctgcatttcgtttgaatcgctcaagccgctcgcagggtcgacgcctttgcaagacagaaatgttttgttgacgtgatacatgtcaagggagcgctcagccaaagggccgacatatgacatcgattgcggcagcagcatcccgccggttgaaatgaccgtcaccttttcttttttgctgagttcaatcgcgactctgactgaattcgtaatgacggtcagcgggatgttttcaagcgcttttgccatgtaccatgccgtcgtgcttgcatcaagaataatccgttccccgcttttcacatgcttgacggcttcaaatgcaatcatctttttttcgtttacgtttgtaatttcgcgctcgcgaaaatgcacctctctttcttcagtctgcacgctgactgcaccgccatggcttcttttcagcttattttccttctcaagcttttccaaatcgcgcctgatcgtttcttccgtgacggaaaaaagctcgctcagttctgtgacgcgtacgctcgagcgcagattgacaagctcgacgattttttggtgtctttcagctacaagcatccgtttacttccttccttttttggtaaaagtcactgttacattcatgatagcgcatcggctccgatacaggaaaggttttcagcgggaagcggcgccgagaatctgacttgtatagcggcggtatgcccgctcccacgcttctgtatcttccggtacatacgttttttgaggaaaggaagccttgatcgctttccgggcgctctgaatatcccaaaacatgtcgagcgcgacggcctgtacggcaatgttgccgatggcgcttgcctctgacggtccagcccatacatttctggacagtacattcgccgtgtattggcagagcagttcatttcgaatccctccgcccgccatgtgaagtccgtcatattcttttcctgtcaaggtttcaatccgttcaaaggtgaaccggtatttaaacgcaaggctttccagcacgcagcggatgatctgtccgggcgtttccggcacgtgctgccctgctgcacggcagtactctctgatcgcctcaggcatatggacgggattgagaaacaccgggtcatccgggtcaaccgccgacctgaatgcttctgactgtccggcaagtttgacaagctcggcgctcgaatagctgatcccatctttttcccaatccgcctgacagcgctggaacagccacaatcccataatgttttttaaaaaacggaatgtgccgccggcaccgccctcatttgtaaaattccaatcgagcgcctgttttgtcatcagcggagcgtcaagttcggttccgatcagcgaccaggtgccgcaaatcaaatatgcaaagtcatccgtttcagcggggatgccgacaactgcagaagccgtgtcatgttcgccgacggcaatcaccggtacggcgggcacagacaattcgccgcacactgattgcgacagcctccccgcttcgcttccgggctttgctatatcttttggaaaaatcttggccgggatccccagaaggctgatgagctcccaatcccagtcagacgttttcgggttgaacagctgggttgtcgtcgcatttgtaaattcgctttttttctcgcccgttaaaaaatagcgcagcaaatcaggaatcattaatagtgtgtccgcgtaatccaacagcggagaattcgcttttttcagcgcccggagctgaaagatggtgttgaacggcaaaagctgaataccggttctggaaaacagctcttcttttccgatttcattcaacacctccgtcattattccgtccgtgtaagggtcgcggtaatgataagggttccccatcagctctccgttccgatcgagaaaaccgacgtcaaccgcccatgaatcgattccgatgcagctgattcgtccacagccgtttttcgcctttaaaatgccctgtttaatttcatgataaagcctgagaatgtcccaataaaggtgttttcccgcctgaacgggctgatttggaaaacggtgaatttcctccgctttgatcagaccgccgtccacatgacctgcataagctctgccgctcgacgcaccaagatcaaaggcgagaatcgtcaccagcttgcaccgcctttcccgcgtgccaggattttttccgcatatccgctttccgcataagccttgagcggatcaggcggaacgttcatttcctcccgcacggcgcagaggagcggcttgacgtcgatttcaaatgcctcgcggatcgcagcctctgcggcaagcacgtcatgatcttcctgcgctttcttcacttcatcgaagttgatcaaaagcgcttttgcaaattgagtctgcacattcatgaccgagcgcagcacagcgggtattttcggttcaagattatggcattgatcaagcatatacgaaatatgttcggccgtcttccggacgttcgggtcagaatcacggcaggcgtccaaaatttgagaaaaaatgagaaacagttcgtacgggttgtgagcgcccgcgatcaaatcgtcatcagcgtatttgcggctgttgaaatgaaagcctccgagacgtttttcgtcaagcaaataagcgacaatgtgctcgatgttcgtcccctgggcatggtggccggtgtcgacgagcacctcagccttcgggccgagcttttgcgccaaattgtaagccatgccccaatccgccagatcggtatgataaaaagccggctcaaaaaatttgtattcaatcaagagccgcatatcatcgtcaagaacttcgtaaacttcagccagacactcatacatccagtttttccgttttctgatgtcgccctgaccgggatagttggttccgtcggcaagccagaggctgatttccttggagcctgtttgttttgcaatatcgacgcattcgagcaattgctcagtcgctttttggcgaatggccgctttcacgtttgtgacgctgccgaatttgtagtcatcgtcctggaacaagttcggattcacggcgccgatagcaaggccaagctgctcggcgtgcgctttcagctttccgtaatcatcaactcgatcccaaggaatatggatggcgacggaaggacaaattccggttaatttgtgaacgactgatgcatcttccattttttcaaacggatctcttggcacaccctcttgctgaaacactttgaagcgcgtgcccgagtccccgtatccccatgaaggcgtctcgattttaagcgctttcaatttttcctttgcttcagaaaggctgattcccctgtctttctgctgttcttcaaataaagcgtaggcccggtcattcatcatgtacgcccatcccccttgtttttaacggatatgccatggttgacattaacgcaagttccggctgggtcgtgtccagccggctgtactggacgatcacaggtacatcgcttgcgatctcgatcgcataaggaacattttcaggaatgcgttctcctgatcggtgcaaagaacttgtgcggatatgcttcgttctcttgccatgaaccgtctcggaaatgccttcgagcggcggacggtcttcgaagtatacggtgatcgcaaggtttgcgttttcttcatggcaatttaaaacacaaatggcttcatggctcgtcaagcttccggaactttccggaggaataaaaccgtccggtatgatccaatgggtctcgcccttcatctcccttttccccctttgtattctgaaagggcggccgaagccgctccttatcaattaccttgaaaatgcggccggcactcccccgtcaaccgtcagcatgcatcccgtcgtttttgccgttttttctgaagcgaaataagcgatcgcctcggcaatgtcggcgggataaatgttgacggaaagagccgtacgtttgcggtaatgctcttcaagccggtcgggttcaatcccgtaggcggcggctctttcttcgcgccatttggagtcccagatggccgacccttgaagcaccgcatccggaagaactgaattcgcacggattccgtacggtccgccttcagccgcgatgcatctcgccaaatgaacctcaagcgcttttgcagagctgtatgctgatgcgtttttgcctgcataaacggaatttttcgaaccgacaaacaccatgctgccgcctgaaccttgttttttcatttgcttaaaagcttctctggccacgaggaaatatcctgttccgagtacattcatattcaggttccattcttcgagcgtcgtttcatcaagcgggcttgatgtcgcaaggcccgcattgttgacaaggatgtcaatcccgccgtatttgagggcgatttcctcgaaggccgtctgaacctcctcttctttcgtcacatccatgcggacggcgtaagctcgttctgcaccgtattgatcattaatctcggccgctgttttttctgcgccttcaatattaatgtcagcgaccacaacatgcgcgccttctagagcaaggcggcggcaggcctcgctgccgattccgcccgctccccccgtcacaaatgcgatcttgcgcgaaaattcggcttccggcggagcaagcgttaatttataaagctcaagcggccaatattcaacattgtaggattcttcctcattgagagatacaaagtttccaaggacttccgttcccttcatgacggcaatcgcccggcggtataaatctcggctgaccttcgccatcgccaggcttttccctgctgtcaccatgccgattcccgggatcagcatcacgcgaggcgccggttcaaacatctcgtctccttcgtgccggtttcgttgaaaataggcggcatacgactctttaaatccagcaatctcggttttgatccggtcgaccagcgcttctgtgtcctgttcagcgggattccacggaatataggcaggcacccgctttgtatgaacgaggtgatccggacaagcggcgccgacctgtgaaagcgacggtgcgcgcctgctgttcgcgaattcgagcacatcgtcagcatcgcaccaggtgacgagcatgcgtttttccccgctgacagcgccgcggatgaccggcaagatatcggctaaaatccgtttccgctcctccggtgcaagcggctcgaccatctgtccgccaaacggctgatgatcttccgaacggcttttaatatatgcttccgcttcgcgaatcacggcaatcgtctgatcatagctttctttcgacgtttccccccaagtgacgagcccgtgcttctccattaaaacaagctctgcattcgggttgtttttcacaccttctgctatcatcttcgataaagcaaagcccggtctgacataaggcacccatacaaatcggctgccgtatatctcctctgcgatctcttttccattatcgcagcagcagatgctgatgattgcatcggggtgggtgtgatcgacatgcggaaacggcaaaaaagcatgaagaagcgtttcgatcgacggccgcggatgctttccgtccatcatgcaaagggacaaatatgccgtcatttcttcatcggtcatgctgctccgttccatcagcggacgaatatcatccagcctcagtccggtaaattggcccgctgacatcgtcgccaagtccgagccgctgcctttcacccacatcacctcgatgtccctgcctctgaaatccttttctgtcgttttcatcgatgtgtttcccccgccccagttgcagaccgaacggtcagcgccgatcagattggaacggtagacgagctcggcaagacccggacgcagcgatgcagcctcagactctgaccataaatatttcaccatgcgtatcactccgtttttgtttgtttatttttgaatatgtttgtttcaagagtaacatattttgattttctttgtaagcgcttttttccgaaaccattttaggacagaatctcttcaatcagtcgataaataaaaaacgccaacagcaggcggccgtcggggttaagaatgtaggaatgtttaatctttgattttaaaataaaatgtcaggttttaagaaagcgctggcatcttgttgccggcgctttttgtgccgctgacataccgtttgggggaacatattgatgcgcaaaaaacggttgaaattcgtcttttgatcttttaatatataaactcatgttttttaaaaggaggggtcaggatgaaaaaaacactgcacgctccagtcaaactgatcatcgcaatttttatgatttgtacattttccatcggctttacagagtacgtcgttatgggtatattgacttccatttcaaaggatctctctgttccgatttcgtctaccggcctattggtaacggcatatgcgggaagcgtctgtctgacggggccgatcgtcaccatattttcggtaaaaatgccgcgcaaaccggtattgatcggcttgatgagtgtgtttgtactgtcgaatgcgctcagtttcctggcgccgaacttcaccgttttgttggtctcaagaatcctatccgcatccattcatggtgcattttttgcaacgacaatggtgttcgtcagcgaaatggcaccgcccgaaaaacgggccgccgctgccgcttcaatgaacggcggcttgaccatcgccctgatgctcggcgtcccgtttggttcttatttaggcgatcttttcaactggcggatcgtttttctgatgatcgcatgcctcggattgatcggcctcgccggcatttggctgacggtgccgcacagaaaaccgaaagttgtccctaaattgatccatgaatgggatgtgtttaaaaataaacaagtccttttttcttttgctatcacgatctttggctattcgggcgtattcatcgcctacacatttattgaaccgatgctgcggcattctgccggtttcgacagtctcggcattacagccgcccttttcgcctacgggtttggcggggtcgtcggcattttctacgccggaaaggtgccgtttcacctgttaacccgctccatgatcggggtgatgatcgcgctcatggcgatccttgcggcctttccttttgtcagcggacatcctgccggcgccatcatcgtgacgtttttattcggagccggcgcgttcgcgttcggaacggtgccccttttgcaaacaaaggtcgtggctgcgtctgaacacggaacaacgatcgccacctccgtcagcatcgctgcatttaacttggccaacgcgctcggggcttggatcggcggactcattcttaatgcatcagagtctacacataccttgccacaggcggtgcgcttatgaccatgtgcgggctgacgcttacgatgttcgcctatatgtctgagaaaagacaagtgaaagaagacatgtggggaacggacctgtaatcaaaaagctgcccggcttaagacctggcagcttttttgtttggttcttgcagcgtctttgtgtgagctgctttccgcatgaccgcggtcatcaaaagggcggctgcggcataaacgataccgaaacagccgaaaacgaaaacagaagatgacatccccaataacatgcctgatataacaggaccgcaggccattcccgtatacctgataaaattaaacatgcccatcgcactgccgcggttctcctcaaattcattcgccatcatcgtagagaagagcggcggaatcagccccatcgtaacgccgaaaagaaccagagccgccgacatggcgaaaagcgaaaacaaatgggaaaaggcaaaacagacgacgctccctgcggcggtcagattgccgatcaaaaacaggcgtctgagcgataatctcttttgtatccacttaaacagcacgctgccggcaatcgtgctgaccgctatcggcaaatacagcaagccgacgatctgcagatcaaggtgatagtgatcggtcagcaaaatcggcaaatacacgatcattgaaaaataaataaagaaaataaggtagcttaatattaaaacggcattgcccgccctgtttttgaatatgtccttataatgcgacagcaggctgcccgcgctgagattggtctttttctccgaatggctgcgcggaaagcaaaacaaattgccgaaaagcaaaagaacagacaatactgtcaaaaaccaaaaaatacccggataattatagcgctccccgataaaaccgccgagaataggcgccgctgccggtgcaagggaaagcagcatttgataagttcccatcgcactgccccgcttcgttcccttaaacagagatccgattgtggttgccgcaattaatggaagcgcagcagtccccaaagcctgcagcaccctgaaaaaaagaaacaggccaaagtcccgggaggctgcgcagccgattgtggcgatgaccgttacgatcatgctcgccatcattacaaatctcgctcctttaaaatcaacaatcgagccgacaatgatctgcatcgcagctgtaatgaagatgaacagcgagacggacaggtttaccatcgaaacagaaacgtgaaacgagtctctgattaaaggaatgataggtgaataaatattttgattcaacgatgcgaaaaaagcgctgatacacacaaaatacataatgaaagaagcatttgatttcattggtctcatttcaaaccgcctgccttgtttttgtttattcgttaacaatttacctaatatcgtttactggttaacaatattaattgtagatgacccctttatcattgtcaacgaacatttcttattgagatttgaagttttttacatattttttacttatcgagttccttgactcaaaaaacgccttaaataaaggtttttatcctttccattctgattacaattcctcagattcacaaaaaaagttacgaatattttcatattttgaatttgaattgtgttgacagttggaaaagatagggataaaatgactattgtttactagtaaacttttatgctgtaacttgcctgattttgagtacaaacccttgccctgctttaacaattgaacaaatgccacacctcttcatcatgacccgcatcatcgctgtattcttctcgattcatcacgaagtgagaccagcctattcccagctcgataagccgcacgtatccatcattgattgcaaatgaagtcactctatgtccgttaaggaggaaatcaatgacagagcttataatggagagcaaacaccagctattcaaaaccgaaactcttacccaaaactgcaatgaaatattaaaacgcagacgccatgttctcgttggcatcagcccgtttaacagccgattttccgaagattatattcatcggcttatcgcctgggccgtccgtgagtttcagagtgtatccgtgcttttggcgggaaaggaagctgccaaccttctcgaagcgctcggcaccccacatgggaaggccgaacggaaagtcaggaaagaagtctcgcggaaccggagattcgctgaaaaggcgttggaagcgcatggcggaaatcccgaggacatccatacattttccgatttcgcgaaccagaccgcataccggaatttgcggatggaagtcgaagctgcctttttcgaccagatgcattttcgcaatgcctgcctggagatgtcgcatgcggctatcctcggacgggcccggggcactcggatggatgtcgtggaagtcagcgcagacatgctggagctggctgttgaatacgtcatcgctgaacttccgtttttcatcgccgcccctgatattttaggcgtcgaagagacgcttcttgcttatcaccggccatggaagctcggcgaacagatctcccgtaatgaatttgccgtcaaaatgcggccgaatcaaggatatctcatggtttccgaagcggacgaaagggtggaatctaaaagcatgcaggaggaacgagtatgaatcaatcgctaaaaacattcagcgtgttgtcagaacaatatcacgaaaatccgtatcagtatttctcataccttcgggaatctgatcccgtccattatgaagaatcgctggacagctattttatcagccgctaccaggatgtgcgccgcgtgctccagaatcaggacgtctttacaacgaaatcgcttgccaaacgggccgagcccgtcatgcgcggacctgtgctcgcccaaatgaaaggcaaagagcacacggcaaaaaggagaatcgttctgcgccgctttatcggggaatcccttgatcacctcacaccgctcatcaaagaaaatgcacaaaggcttttggccccgcacgtggagaaagggcggatcgaccttgtcaatgatttcggcaaaacattcgccgtttgcgtgacgatggacattttaggtttggacaagaacgaccaccaaacggtgagaaactggcacagcggcgtcgccgatttcattaccagtttgaatcaggcgcctgaggaccgggagcattccctcaaatgcagtgaacagctcgctgagtatttgaatccgattatcgaggaaaggcgcaaaaatcccggacatgatttaatatccatcctttgcacttccgaatacgagggagtggcgatgtctgaccgggacatacgcgcgctgattctcaatatattgcttgccgccacagaaccggcggacaagacgctcgcattaatgatttatcatttgcttcatcatcccgatcagatgaatgatgtgctggaagaccgcacgcttctccctcaggcaatcgcagagacgctgcgctacaagccgccggtgcagctcatcccgcgccagctttcacaagacgcggagattggcggagtcgagctaaaagaagggacgactgtattttgcatgataggcgcggcaaatcgcgatcctgaagcgttcgaggatcccgacaagttcaacattcaccgcagcgacctggaagtcaaaagcgcattcagcggcgcagccaggcatctcgcattcggttcaggcgtccacaactgtgtaggagcggggtttgcgaagaccgaaatcgagcttgtcgcaaatatcgtccttgatcagctgaaaaatatccggctggaggaagacttcatttaccgcgagacagggctttacacacgcggacccgtctcgctcaacatccggtttgatgccaaacattaatcttgtgaaaaagccttctcctcccgggaggaggctttttcaattgctgcctcactgatcttcgccagctcttcaatacccttcgtaccttcgctcgcgtgtgaaagctcgtgacattgaacgattttaaaaccgttcattttaaaaatcgtgatgatatcaattctcccccggtctccattctttttgacaaccttgaccgtatatctgactgctgcgctttcgaggcgctcgtcaaacaaaaattcatgaaagggcgacaccgttatggtgcgtgcaacgtttttcagcgtccgtatgtgatctttaaactgcacaaggtcaatgtgactgccgtccgtgacttgaacataatcctcgctgaaataatcggcaattttttcagtattcatttccgacacgatgtcctgatacatgttgcttaaaaactgttgggcttcacttttattcattcgctgctcctcttgattaaatgtgttttgaccattcgtttaaaaagcggatgacggtttgcagctcggattcggaaaaccgatcaaacagctcgatgtagcgctgttttgcaatttcatgcatcctgtcatgaatgtcggccagttttttcccctcatcggttaatgtgtaatacaattctttgttgttgttcggttttttgtgcgattcgatcattccgtgctttgtgagcacattgaccgcttttgtcactgccgcttttgaaatttggagttttgctgccaggaaagcgttgttgacgtctgcttcgctttcgctgataagcgagataatgtgaagctgggtcagggtccaatgcttacgcatgctttcttcttcttgaaaggcttcctctgcgaacgcctgctgttcatgctgagcccgcttttctcttttgagaataaaatcctgaacggcttgaaatgcctgctcatacgtcttgttttccactgtcatcattccttttcacaatcattaaccggttaactattaaatagtttaccaattaacaataattaaagcaagcaaaaaaaagcatatgatgcagaaagatccgcagcatatgcttgccctcatacttgaggagatagcacgtgcttttcagtccaagccagaagcttcagatcctgtttgcagccggcgataaatgaaagccccaaaggctcgccgttttttgccggcaacgggacggtgatctgcggaagcccgccgagcccggcaatacacgtcagtttcatcgtgcgcgcccttctctcatttaattcgttttccggcagaccacggagcggcggcgggccgggggcagtcggaataacgagcaagccgtcttctccgagccattccgacagtctttttctcaccgcctctcttttcataaacgcttgcacatgatcgcttatcacaaggcttgacgcccattcaaacctttctgcgattccagggccgaacaccggatttgtgcgctcgatccaagctccgtgctcctcccaaatctccagtccctgcagcaccctgaacgtctccgcccattccgcgaggccgccgtcagcggcaacgcaccagtcgaattcgccgtcaatcaggcctaatgcataagcgtatacttgtgtccggtcgctttcttcaagcaggctccacgcctctttttcaaaataaacccggttgaaacatgcccctgcctcctcctgcccgctaagcaggacgcggcccgccgcatgaaggactccaatatcttttgacatccatccgacggtgtcaaaactctttgccagcggtatgacaccatcaaccgacacctcgccgtgcgtcggccgaaacccgaaaattccgcagtatgaagaagggattctgacagatcccccggtgtctgtcccgagagcgaaatcggtcatcccagaggctgccgccacagccgatccgcttgaagaccctcccggaattttgtccatggcacaaggattgacgggtgtaccataatggacattttctccgtcgaggctgtacatcagctcatctgtgtgcgcagcacccttaagccttgcaccttcccgcagcagcaagtcaacggcttccgcgtttttttcggcaggttcgtgcgtcctcagccaatcagggtttcccgccgcattagcatggccctctacagcaaacacatcctttaccgcaaacgaaagttttttcaagcttccttcagccgatggcggatcgaccatcagatcccggtttataaaagcgctccaatcatgctccattttcaaaatccctctatcaacttttgcttctaacgataaccggacgcctcttcaaaatgaacaaagttgtgacaaaatcttccgttccctaatttaaaaaggcctttaggtttgttcctataggcaaacagggtaaaataaaggggtgttgattacttattaaaaacaaacatgggagaggagaatgaaatggtggacaaggttcgcacagggatattaggatacggtttgtcaggttcggtgtttcatgcgcctttattatcagcgttagaagattatgagattcgaaaggttatgacttcaaggaaagaacaagtcaaacaggacctccccgaagcagaagcggtcagtacgatcgaagacatcacaaaagatccggacattgatctcgtcatcgtgaccacgccgagcggccttcattacgaaatggcgaaagagtgcatccgcgccggaaagcatgtcgttcttgaaaagccgatgacagcaacagcggaagaagcggaagagctcattaatgccgcgaaagaaaaaggcgtgcttctcagcgtgtatcacaaccgaagatgggataacgactttttgacgatcaaacagctcatcaaagaggggcgccttggagaggtcaacacattccacgcctcctacgaccggttccggccgaatgtcagacagcgctggagagaacagaaaggaccggggtcaggtgcactgtacgatttaggttcacacttgatcgatcaggcgcttcatttattcggcatgccgaacggcgtcaccgctcaagtgaccgctcagagagccaatgcggaaacagacgattacttccatgtcatccttcactatgatcagcgccaagtgattctccactcgggctcgattgttccggccaacggcccccgctaccaaatccacggctcaaaaggaagctttattaaatacggaatcgacggccaggaggatgcactcagagcgggtcataaacctgcaggcgatgagtggggagccgatcaacccgaatattacggggaactggccacagtcgaaggcgacgagatcaggaaggaaaccgtggaaacgctcccgggttcatacttaacttattacaagcagcttgcttcaagtattctagaaggcggcagcttgcctgtcacggcggaagaaggacgcgacgtcatccgaatcatcgaagctgcgcaaaaaagcagcgaaacgaatcaaacggtgttcttaaacaaataaaacaaaaccgcggatatgatccgcgtttttttcaaaaagtcctgcccaattctttggctcggacaatcgcattttgttttatttcttcagctttatcaggctcagcattatgcccttctataaataaaccttcaaattccggaaccccgaaaaactgcatcatgatgctgatatagcggtgccccatctcaagttccgcagcctgcccttctgaatagtagccgcctctcgcctggatgtgcagcgcttttttatcggttaacagcccgatcggtccctgttcggtatatttaaacgtctttcccgctacagcgaccgcatcgaagtacgctttcatcaccggcggaaaagagaaattccaaagcggcgtgacaaacacgtatttgtctcccgcgataaattgctcgctcagctcattcaaacggccgactttagctttttcgtgttcagaaagctgttcaaagcccgaccccgactgcaattttccccagccgctgaaaacatccgcatcaatctgcggaatgttttcccgataaagatcaaggtgtatgacttcatcatccggatgagcttctttgtaagattcgataaacgcttttcccgccgccatgctgtaggatgccctttcgtcatgcgggtgagcggtaatgtaaagggtttttgtcatttcttttgctacctgcctttttgtattgatattgcttagtatgggacgttttcaggcaaatattctggaaaagccggagctttcgcataaagtgcagatgcttttttttatctgatgtccgataagactttcgttcggcatcatgatcacctgcgatattttcactctgctttcatttcgcgaataaaaaaggaacgccccgatttttcaggtcaaggcgttccttcattcaatccgaaagccgactccattgcaggagcaaatgccgcttcgattttttatatgatacttttgtttacagcttttatgactgcgctgcatgttcctcttctttcagcttttcgagtctctcttgcacctcttcttctgaaaggccgtgctctttgacatacaggttgcgcggatgaacccggcactcgtgcgtgcagccccgcaaatagcggtgctcattttcttcagagcagatgatctgcttgttgcattccgggtttgcgcagttgacatagcgctcgcaaggctcgccgttgaaataatctcttccgacaatgacgtgctctttctgattgaccggaacgctgattctttcatcgaaaacatagcatttcccgtcccacaattcaccttgaacttcagggtcttttccgtacgttacaataccgccgtgaagctgggacacgtcttcaaatccttcttttttcagccatcctgaaaatttttcgcagcggattccgcccgtgcagtaagtcaatattttcttgccttcgagcttttctttgttatcgcggatccactcaggtaattcgcggaacgctttaatgtccggtctgatcgctccgcggaaatgccccaaatcgtactcatagtcgttccgtgcgtcgacgacaatcgtatcttcctgctgcatcgcctcataaaattcttttggctccaggtattttcctgttaattcgttcggatcgatatcatcttccaggcggagcgtcaccagctcatcgcgatggcggacatgcatttttttgaaagcgtgcccttctgattcatcgattttaaataccatgtcttcaaagcggggatcgcttttcatttcactcatatagcggtctgtctgctctacggttcctgacacggttccgtttattccttcacccgccacaaggatgcgccccttcagccccaaatctttgcagaacttgaggtgatcttcggcaaattgctcagggttatcgatatgaacatatttataatacaacaatactcggtattgattcttcatgatactttaccacctatctgatgcatgtttttataagataaaaaatggaatatccgtccatttatataatcaaaccttcattcatattaaaacaaaccatcaccatgatttcaatgaagcagcttgatcattccattaatcaaatgttagaaattttaacacttccggcggctttacgcaagcaaaacagctcagattaaaggacttccagcaattctgttataaactcccaaaaaccaggcacttcttgacataaaagcatctccgctttttcgcaaatcttcatcttcagctcctgttcaagatcctccctctcttgataggatgtgttgtttaatttgcttttgatcatcggtgtgaaattttccagcaatttctcaatctctttttcatcgtgcagactcactgttatcattcccctctgctttagaattcagcagctctcttatcttttcgagtgcccttttatgaatttttgaaatattttgccttgattctcccaaagagtcagcaatttcctgcatggataccccatgaatataaatttgtgcaagcacttttttctgcttgtccgtcaattgcaaaaacgcttcataaagcatcgggtcttgcaggtgttcgcttaattcctcttcctgttccaagacatcgtctaacagatcccctcggggcggctcgggcagattcggactttcgtcgatcatcaatggaaaacgctctcggtttttccggactcttttatcaaagtcgacggagaaaatccggatcatcgagttgatgtatttgatcatgcggatttttttgtaaaatcgcttaaattcacgatcgagacactctgcctcttcagaatccggatgttccaacacgtggttgaaaagccgctcataccttgggttgctcaaaaaatgcttcacaagcggatgccttgtgatctccttgattttcgcacgcagtaacgtttgatcaatcataaaaaccgcctcctatttatttagatgaaagaaatgaaaaaaaagtaaacacatctcttctattaacatgcaaacataagttcccattcagagaaaatagttctttgcttacatttttcaaactttcgtcacttcttaacataggaggtggtaagaatggacagcgcattcattgaggaagcagcgaaacaaatcggcaatgtcggctttccagctgtattggcaatttacttgctcactcgttttgaaaagaaaatcgatgaactgatcgagctgatcaaagaaaaaaatgaaaccgatgattgacatcggcctcacttttttcacttaacatgacagaaggggaaaacgaaaggcctttcagctctcctttacatttttagaaagaggggatatcacatggaaaaaaacaaacaaattccacagccgatcagaggagaaaaaggagcggaaacgaaaattccgcacaacgttgagcgcgaccgccaaaacccggacatgctcgtaccgcctgaaaccgaccacggaacggtgccaaacatgaaattttcattttccgatgtccacaaccgtcttgaaaaaggcggatatgcacgggaagtcacagttcgcgagctgccgatttcagacaagcttgcttctgtcaacatgaggctgaaacctggggccatcagggagctgcactggcataaggaagccgaatgggcgtatatgctgtacggaaaagcacggattacgtctgttgaccaagacggcagaaactttattgaagatgtgaaagaaggagatctctggtacttcccgtcaggtctgccgcattcaattcaagcacttgaagacggatgcgaattcctgcttgtcttcgatgacggctccttctctgaaaacagcaccttccaggtgacagattggctggcccatacgcctgatgaggtgattgccgcaaacttcggcatttcaaaagacgtcgtcgcctctcttccagttgaagaaaagtatattttccaagaagcgatccctggctgtcttgagaaagacaaagttgaaagcccgaacggaacggtacctctatctttcagctacaatttgcttgaacaggaaccgattgtatccagcggagggaaagtatggattgccgattccacgaacttcaaagcatcgaaaacgatcgcttctgcgttagtggaagtcgaacctggaggcatccgggagctgcactggcatccgaatacagacgaatggcagtattacatttccggacaagcgaaaatgacggttttcgctgccgacgggcatgccagaacatttaattaccaggccggagatgtcggctatgtgccgttcgcaatgggacactacgtccaaaatacaggagatgagccgcttcggttcctcgaaattttcaaagacgaccactatgctgacgtttcgttaaaccaatggctcgcgcttgttccggaagagcttgtccgccagcaccttgacgtcggcagcgaatttacaaaaatgctctctaaagaaaagcatcctgtcgtcaaatttgataagaaataaccagccaggcttgcaggagacatatcctgcaggcctttggcgcttgtgtacatattttaaaggagttgtgtcatgaaacatttcattatttgctgcatatcggttatattcgtttttttcgcccactttctcggcatttcgatactgtttcatctgtcgggcgcgttttaccaaacagtcggatcattgctgctgtttacgctttgttataccggactgacctttgtcctggaaccggctgaaaaggtgctcatcctcagtatgaaactgctgggcatcaatcggcggatcacggtttttgccgctgaaatgatcacgatcggatgtttatgggccgccatttataccgcggacgaattgctggacgacgttctgctgacaacctcggcggaaatcatgattgccgtttcgttttttacaattgataaaatcctttatccgcggcagaggtccggttcgctcttatattgacgatccattttaaaccgaattttttcattgcaggactcaatgatttgcaacaatgttatatactggatttgcagtgattaaaaggaggttttgttcatgaataaggttcttttcagacccggcatgtcgatcaaagaaattggcgaacagttgcaaggctatatcgccgcaaattggaaacaaacgcttgacgatcatcgcgaagctcttttaaaggtgtttcccgaattggaagacgcgacttacggggtctacctggaccacctgctgcctcctgtatttgaaagtctcgaacagtccggctttacaacgattcaaaatgcgggaaaaggcgatttttttatcggaaagggcttgaactttagacagtccatggaaaaatggggagctgacaactgccgctcacgtgtgttttgggttgtcatctccgatcagcaaaaacagccggccgggacgctgctctttgacttttatcactctcacgccggatttgatgtccccctctccccgcggatttacacgttggaagaaacggagagagaccgaattgttgctcacataaaacagataaaggagaactagcttatttcgacccacaaagtcataagctgtagccgctgggtattccagcggtttttttatttacactaaatgcagccaaggaatttttgcaaccaatcaaaccacacattcgtttatgtataagaccaatatcttacataagggagaaactcatgagaactttcgaagtgttgacactcctgtcttttgtcatgctgtttcagcaaaaaatgccgggaaagcttgcggcggcagccggatttgtgagtattggcgtgttggcggacttgcagctttattcaaaacttttgaagcagctcggcatgacgggcgacatcgacggcgaacgaagcgcggatatcgtgaaccggtacgttttggatttttcaacaagcatttaaaagaaaccggtggcggcttgatcagcaagccgaatccgtcatatccggaagtgaaatttccgaaggaataaaccgaaagccacataacgggtgccgctgccgccggcggcccccccctcttcacgatcatgaaaatataaaaaaaatacctaatgcaatcgcggtttgaacaagcgaaatcacagccaagtgcccaaacggagccttggcttttttgatgtatgtatcataaatgaaattaactgtaaaaaagcaaacgtatcctattagcgattccatgatgagcatggtggacctccttttgcctgctctatcgtatgatataccagctaaattcgacatgataccctctgatccttttttagcgacccctatttgattacatggtgcgtttgccatgccgactacaaagaaaagccaatttctgcgaataaatgagactttatgctaaaattaaggaaaaacaggtttgaggtgcagcaagcgtatgatccagcacagtgtctttcttgagggagaatatacattacaggatatgagatctttctttttttattggcttaaaaaatacggattcatttatttcattctaatttttctattgtttgtctgggtgttttccgtcaatggaaagctgccgattaccgtttatcatagtgaaacactcgaattgctgttgaatggccttctcattattgtactttctataattttaacatcacttttgattgggtttttttgtatccggatgcaaattgtctatcgaaaaaatgagcggttaaagcgcaaaagaacttacactatcaatccacaagggattcagattcaatttaagaattccgatacgttgtttgaatggtatgaagtgacagcagtaacagaatataaacgtctcatcctcatgaaaacgtcaagcagccagttgattttgataccgaaacgttttttcacatttgaaaatgaacttgattctttcagagagcttgtgactacatatgggcaggctaaaaaattaaaattgcaatcttaagaagatggatttctcctttttgtatattcattttcatttcataaaagtgagcagtgatgataagaaatttttttaaaggagaatgccatgaagactctggatgttcaggcgttacacaatgcaattgatcaaacgctcgaacaattaaaacatcaatcagacgaattcgccaaggtcaaaaaagccgttgagggcatcacatcacttgatgatgctttaaaaggaaaaggcggcgacgcgatccgcgccttttacgaggaatgccacaccccttttctacagttctatgatactttcatagaggaatacagttccacgttaaagaaaataaaaagcgcactgaattccctggaaccaaatcataacggatttatttcccagtcctttctcgaacaccaactggagaatggcttaaatgccgctgatcgaacaacgaaacatttagtttctaagaccaacgccacaatcgcaaaagtcagccatatcgtcgacttaccggatttgaacgacagcggttttcatgaacagtatcacaaagcattaaaggaaatcagcacgacacttgaaaagctgcatgcatttgaccgcgagcaaaccaacgccctgaagacggctgaaaacgaccttgagacgatgcagagatacatagcgcggctcgaaaagatgtataccggccccaaaattgaaatcaccagttatcaaaaaggcgcgattttaaagccggatgagatggataccctgagtggaaatcaagaaacagccatgggtgtcatgctgaaaaaagtcggagacaaaaaagatgctgacgtaaacactctcgccgacccagatcggttaaaaaaattggcgacacaaaaggtttccaccaaagagtacacccaagaggaattgaatgaactgaaaaaagactatagagtatttaacgatacgctttaccgggcatacatagatggtgatacaatcgtcaagatagaacccgcatacacccttcctgatcatgttgaaaaaagcgaatgggaaacgctttggaatttacaggtgtgtatgatggagtaagagcagcgtttggatacgaccttgcgacaggtgaaatcgttaaaggtagtggtgaccgtttgatggccgcattgaatgtcaccccttttggaaaggcatttaagtacggaaagcgcggctttaagctatttaaaggtgaggaagcgggaaagaaagttgcgaaggtagataaaggatcgaaagcagctaaggatgttggaaaagttgagccaaccccttctaaatcagcaaaggaaactcccaaaaaaacttctgagggaaaagacaaagttaaagattttgatctgagttttgcgactagcaagctcaagaatggaaaaatttccgccaatgatttagaatccatgataccaaagggtacaccaaacaattttaaagcaagtgaaactataaaaaaaggatacaaatacaactttgaaattgacggaaaaaaagtagaagtcaagtggcattcaccggatttaaacgcaaaagagaaatttccggacagtaattccggaaatatgtggactgcccaaataaagatacagaaaaaacttctaggacaagatggtaaactccataaaaaacctagtaacataacacacattccagttgtaggagagtgaaacgaacatggatttttctaagtttgatgaattacccgattctttatctgaagatacattagagaagtatttcaatcagattgttgatatttatgaaagtgcaaaagatagtatcagttatattgaattatcagaagcaatttaccaactttcagaaagacaatggcatacttataaaattctggacgacaaaattaaacacaaaatagatattttaataaaaaatatcttggatgcaaattcttatgatctaatagacaatgctacatcaataatagcttatttgggacttccagaaagctttaaagcattacaggaaatgattaaagaaaaccctagtgaagaagttagagagcttatagaggaaactattgaggaattagaaggaaacgttgaaaatccatattcaggattagaataaatataaatattttttagagggcgccacaactggcgccttcttttttacagaaatggtgctcttaatgaagctaaaaaggatgcgggcattactagatctcaacaccccgaatcaattcgtcgtgtagagatgcgaaccgctccccatgaaggtggccatgtaataaaagacgaaaatggtaaaattatttggaccaaagagtatatctatacaaataacaagggtcagaaattcataatacaagaccatagcgcaggtcatgaaaaaggtggacaagggcctcattttaatgtaaggccatttgataatcctcgaacaggaaaagtcccagggaccaaagatcattatccattcaaaaaataatttgaggtgatattatgtggtacgaaaatttagaggaaaattttttttaaaaaagtctatataatgagattcctaaattagaaaatatacgtattgaaggcatttatattaaagaagaaggtagaaaagtaactctgcattttgatatgccgttttatgcggaaaagccaccgaaaaagtgggctaacttaggatataattcaattgctcttgaagtggatattttcgatatccattctttagaaatgaagacattatcagatacatatagaggaaacattgaaataaataaggttgaccaaggtttaatcgaaatcaatatcacaggagaggttactgcaaaaataaaagcagatacaggactcattcaatcaattaatggttatattaatggagctttagaaaaggaataagcaaaaaaagcatgtggccttttacacaagaaagggcctttttgattacttcaatatagcttcaagtttcgcctttgtcttcggcccctaatagccatctatgccgttattctttgcccctttgtctggatagaaataaagggcagccaacgcctcctgaatctgccggacggccgttcctttcatcagtgggtttttgtaaattccggtcggtagtgggtactttcttccctccggctttttcatgctttttttcgtggccgatgttgccggttgcttgcttgatccaccacaaaagccgagatatttcgcaataccttttcaagaatcgcctggtaaacttcgtctgactgctccagggactatccaattaataaataccagatgttttttagattgtcgggaatatttcataagaagccctaagcgcgaaaaattgtgatttcctttttataaacaccgtatacattggccgcgataaaaagttgaagtctatcagctcaatcggctcacctgcaagtatccccaacatgcctgaactgccgcgcccattcataaaaatcaagaaccgccaaagagtacactcaagaggaattgaataaacttaaaaaagattatagagtatttaacgatacgctttaccgagcatacatagttggtgatacaatcgtcaagatagaacctgcatacacccttcctgatcatgttgaaaaaagcgaatgggaaacgctttggaatttacaggtgtgtatgatggagtaagagcagcgtttggatacgaccttgcgacaggtgaaatcgttaaaggtagtggtgaccgtttgatggccgcattgaatgtcaccccttttggaaaggcacttaagtacggaaagcgcggcttcaagttatttaaaggtgaagaagctggaaagaaagttgcgaaggtagataaaggatcgaaaactgctgaagatgttgggaaagttgaaagcaaaacttctaaatcagcaagtaaagataaattttctgctatgacagccgaagaacaaattaaaatagccaaagaatactctaaaagagctccaattaaaattcctgataccgcaaaaatcaaagcccagtcgaaaactgattatgaacaaataacttataaatggaatgatggaacatacaaatatgaagtcagatggcacacaagtactcctggagcgcctaaaaaccaaggaaatacgtgggttgtacaaaaaactgttccgggaaacggtggtcaacaaccacaaagattctttaaaatcggagaaaacgagtggattgaaggacataaatggtttgaagcgattagggaaagaaaagctgggacagctactaaagaccaattaaaaattttagaaaaaggccattggaaggattgatcaagttgctaaacacaaaattttatgatggatttgagggtgaacctgaacttgttttatctgatggagaaaacaagttcgtaatgtggaatggatactttgaaactttattaaaagctttattagataacaacctagagaaagagggaattattaaagagtacttttatcaagaaggctggtatgatgaatcaccttgggtaattgaagacgtacaattaacaataaaccaaattaaaagttttgatgtaaacaaagtagatacttcagacggttttaaaaaagaattagtggaattagttaaagaaattatacaatttctcgaaaacgccaaaaataaaactgttgttattgaatacgattaaaggccctttttagggcctctttttgttatttcaataatgcctcccccatttcgccattgtcctcgacccgtaaattccatccgcagacagcgtgcaggatgattttttgccgcttgaagaaggctttttctattccgctgcaagagcttgcaatatgggaacgtccttgaattattatgccagtaaccaaacgtttttctcatgatatgaggaccgatgacccgacatattccgcagtatcattcatatgttcattaagcgattccccgctcttgcacaaacaacaaaaactccccaaaaaacaaaaaaaccaccatcatatgtatggtggagacggtgggagtcgaacccacgtccagaaacgtcgattgcttcagcgtctacgagcgtagccctgcatatttagtttcgctcatcttcgtgcctgcgggcgggccctcggagagctagtctgatgagtctcttcctgcgccctcagacgggggcgcaagcgtagcctacttcgttatgggctcttaaccggcacataggcgatgcgggcaagagctcgctgcgctaattaggcagctagtgctaagttctggttagatttgccagttatatttaggtgcgtttttacgagatcgcctctcggctcgcagctcaagctcgatccgtccctgtcgaatccgtaacgtccccttggatgaaaaggaagccggataactggctgcatcactattataacaagatcacgcgtcaattccaaatggtaatgtctgtgatcacgttcatataggataacatgagttctggctttagatcaagcctttttgcctgtcgcggaacgctctttcgatttcgcgtttggcgtctttgcgcttcaagtcttcgcgtttgtcgaacttcttcttcccttttccgagaccgagcagcacttttgcgaagccgttcttcaaataaatcttgagcggtacgagcgaatatccctgctctttcgtcaaaccgatcaatttgttgatctgcttgcggtgcatcaaaagctttctcgttcgcaacggatcatggttgtagcggttcccctgctcatacgggctgatgtgcatattgtggaggaacacttctccgcgttcaattttggcaaacgcgtcctttaaattcacccgaccggcgcgaatggacttgatttccgttccttgaagcacgatgcctgtttcgtatgtttcttctatgaaataatcgtgatttgcttttttattttgggaaacaaccttcccttctccctttggcatacggcaacctcctcccgccttcaatctcactaaagggcggcgaatacgtattattctatcaaatgaacgttcgtgttacaatttcgccgccctttttttgacgtgtgccgtctattttttctttttcttgcgtttttgtttcggcgcgttttgaaaaccgcgttttttctttacttttttctttttcggcttggtgaaccattcccctttgtcagccgatggagcctctttttttgaagcctttttctgctttggctccggcttctgccggcggcgggagcctttcatgccgacgatttcaaaatcgatgttccgctcgtctttattgacgtcaacgacgcggaccgtaatctcatcgccgatccggtacacgttgcccgtgcgctcgccgatcatcgcgtagtgctgttcatcataacggtagaaatcatccgtcataaagctgacgtggacaagcccttcgatcgtgttcggcagctcgacgaacatgccgaagttcgtgacggagctgatgacgccgtcaaattcttcaccgatcttatccagcataaattcggtttttttcagatcgtccgtttcccgctccgcatctacggcattgcgttccatatttgacgtatgctcggcgatctcaggcagtttctcggcccatttttcccttgtcgcttcgtctgtcttgccctgaatcaaataggtcctgatcagtctgtggacgattaagtcaggatagcggcgaatcggagacgtgaaatgcgtgtagaattcagtcgacaagccgaagtgccccaggctttgcggatcgtatttcgcctgtttcatcgacctgagcataaccgttgaaattacggcttcttcaggacgatccctgacttcttcaagcacgctttgcagcgctttcggatggatacttcccgccgttcctttgacgacatagccgaatgtcgtaacgaactccaaaaatctctgcagcttttcctgatctggatcttcgtgaatccggtaaataaacggaacattcatccaatgaaagtgctcagcgaccgtttcattggcgacaagcataaattcttcaatcagcttttcagcagtcgaccgttctctcaagacgacgtccttcgcttttccttcttcgtcgacgagaaccttcgcttccttaaagtcaaagtcgacggctccgcgttccatccgcttgccgcgcagaatcgcagccaagtcttccatgtctttaaacatcgggacaagggcctcatacttctgtttcagctcttcatcatcatcgactaaaattttgttcacatcagaataagtcatccgctcggtcgttttaatgacgctttgaaaaatttcgtgctcgacgacttgcccttgaggattaatgagcatttcgcatgacattgtcagcctgtcgaccttcggattcaaggagcagattccatttgacagcctgtgcgggatcatcggaatcacccggtcgacaaggtagacgctcgtgccgcgttcatacgcttcctggtcaatcggagatccttccgttacataatggctgacgtcggcaatgtggacgccgagtttataatggccgtttttgagttttgtgacggtaacggcatcgtccaagtctttggcatctgcgccgtcgatcgtgacgatcgtttgatcgcgcagatcccgtctgccttcaagatctttctcatcgattgtatcaggcgtattgccggcctgttccatcgcctcagccggaaagtctcccgggaggccgtgcttatgaataatcgaaagaatgtcgatgccgggatcgtttttatgaccgagaatctcgatgacttccccttctgcactcatccggccttcaggatagcttgtcaggcggacgacgactttatgaccctcgacggcgccgtttttggcgtgcttcggaataaagatgtcattcgtgatttttttatcgtcgggaatgacaaagccgaagtttttcgtctctgtgtatgtgccgacaatcttctgaatgttgcgctcaatgatgcggatgatggccccttctttttttgtaccgccggattctgtgctcaggcggacgagcacggtatctccgttcattgctgtgttcagctcagacggcggaatgaagacatcgtcaagcgaggagtcttcgggaaggacaaacgcgaagcctttcgcgtgcgccgacaccttccctttgatcagattcattttttcgggcaaaccgtagcggttgcttctcgttctgacgacaagccctttttcttcaagggttacaagagctttgacgagctctttgtattcgtccgaatcggtgatttccagcatctcttccagttcctgaactgtaagaggtttatatgcttcttctttcataaaggagagaagcttatccataaattcttctttttccactaatcagacctccttatgtctgccaatccaacgtttctaaaaattgatacacatccttgtgcagtgtttcgcgttctttatccaatgtgatggcatgacctgattcttcataccatttcagctgcttatcatccgtttcaacttcattgtagatgatgtttgcgctgtccgtattaatcatatgatcgtggcgcgcctgcacgacaaatgtaggcgaatagatcatgtccacatgctctctgacatcggcaatcaaatcctgcagtgctttcaacgtgttcatcggcgtttttttgaattcttccatctcagcgtcaatctgctccgctgtcttgccttcaaatttcttataattgcgggcataatcaagcacaccctcgtacatcgtctcttcgcttttgatgtacatcggcgcgcacattggaacaattccctttatgggtacagtgtaacccaatttcaatgaaaaaacccctccgagagacagtccgcaagcggcgatttgttcatatccttccgatttcagatattcatatccgtccatgacgtctttccaccagtcttccggtcctgtggagagaagttcttccggaggcacgccgtggcctttatattggggcgcatggcatgtgtagcctttttcattcaaatatcttccgagcattctaacgtccgccgtgttgcccgtaaatccgtgcagcagcaggacggctttttttccgcctttaaatgtgaaaggttgtggtttgacaattttcatgattcactgtctccttttcatatgtattcttccacgtttagtcttgaaacaaactttatcaatcggccggccccttcagacaaagaccggcaaataggaaaaaggcctgacttgaacatcagacctcatgcttcattgtcttatacaaagtaagcaagcgcaatcgttaagaaaaagaaaagcacggttaaaacgaccgtcatccggtgaagaatcaaatcaagtcctcttgctttctgctttccgaaaagctgctcggctccgccggaaatcgcgcctgataatccggcgcttttgccggattgcagtaaaacgacaacgattaatacgatacttacaatcactaataagaccgttaaaaatgcggccataacctacacctccagacaaactggctgacaatagttttattttacatgaaaagcaagcgcatgtcacgagcgtttcgaacagctttttttattttttcccagcgccggaataaggtatacaaaaaaagagagcggctctgctccctttcctgcggaatatgtaatcacatttatttcttttctgacagtgccgccatcatatcttccaggagcatttccgctccgcgcgggctgagtacgattttgccgcccgcatacgttttatttttcgtggtgatgtcgccggtcatcaaacatgccatgtttgcggcgtattttgtcaaaatgatgttttcgccgtcggtatatatttcgagcgggtccttttcattgatattcagcaccctgcgcatttcgaccgggagaacgactctgccgagctcatcgattctccggacaatcccggtatttttcacgtttgaaaagcctccttttctcctttctttattgacttttgtcaacatctttataataaaagagatcttcaaattttttgttgaaatactgaatcatctttccgatcacaagttgtccgggcctcctttcgccatttaaaactctgctgagtgtcgccggggatacgccgatttcaatggcaagctgatttaaggagagattgtgttcaatcatgtactggagaacaaaatctcttttgatatgaatcttttttaccatgattactcccctttctaatctcttatgtttctttttatctacattgaacatatacgatttgttaacttttgtcaatacttttaccatccatatgtttcctataggcaatattcgtactaaaatattttataataagagattgcgaggttttggccatgacgaactttggacaccatttacgacaattaagggaacggaaaaaactgaccgtcaatcaactggcgatgtattccggcgtcagttcggcaggcatttcgcgaatcgaaaacggaaagcgcggcgtgccgaagccggcgacgatcagaaaactggcggacgctttgaaagtcccgtatgaggaactgatggcatctgcaggctatatcagcgcgtctacagtccaggaagcaagaagcagctatgattccatttacgacatcgtgtcacagtacgatttagaggacctttctctgtttgacagcgaaaagtggaaggtgctttcaaaaaaagacatcgaaaacctggacaaatatttcgactttctcgtgcaggaagcaagcagccgaaacaaaaactgaatacttctccgcggcacactctcctctctatcattttcgtctgtttacgatcctgctgttattttatcccttatgttaacttttgtcaatatttttcctgtctaagtatttcctatagtcaacatttgtattaaaatgttcatatcatgaatttgcggggggggatggcgatgacaaggttcggcgagcggctcaaagagctgagggaacaaagaagcctgtcggttaatcagcttgccatgtatgccggtgtgagcgccgcagccatttccagaatcgaaaacggccaccgcggcgttcccaagcccgcgacgatcagaaaattggccgaggctctgaaaatgccgtacgagcagctcatggatattgccggttatatgagagctgacgagattcgcgaacagccgcgcggctatgtcacgatgcaggagatcgcggccaagcacggcgtcgaagacctgtggctgtttaaacccgagaaatgggactgtttgtcccgcgaagacctgctcaacctcgaacagtattttcattttttggttaatgaagcgaagaagcgccaatcataaaaagccgaatttcccttttaggagaagttcggcttttttcggctgccttaagcggtatccggattcggcgtcttgcctttatgatgcttaacggggctcagcgcacgctcgagccatcccatgaacagatcggcgatgatcgccatcagcgccgtcgggatcgcgcctgctagaatgatcgctgttccgttggtcgcgtttgatcccctgacaatgatatccccgaggccgcctgcgccgacaaacgtgccgatggccgtaatgccgatcgcgatgacgagcgcggttctgagccccgccataatgaccgacaaggcgaggggaagctccaccatccggagcacttgaaatttcgtcatgcccatcgccttccctgattcaagataggcatgctcgatgctggcgattcccgtatatgtgtttcgaatgatcggcaacagcgaatacaaaaacaatgaaagaatcaccgtgtttgcgccgagccccatgacaagcatcaagacggcgagcatcgccagcgccggaaccgtttgaatgacattagtgatggaaaagacccatttgctgattttacggtatctggcgatgaaaatgccggccgggatgccgacgacggcggcgaacaatacgccgtatgccgacattaaaaagtggcggtaaaattcccccagcacatagccgccgttttgcgcgtaatacgtccaaagctgctgcagcacttccatttgtcatcccctccttttactcaaaataattgtgcttctttaaaaactcggccgcgacgacagaaggctctttcagctttccatcgacttcgtaattgagctcctgcatcgtttcggtgtcgatttttccaatcagtttattgatggtctcttcaagctccggatgctccttcagcactttttccggcacgaccggcgaacagtcatacggcgggaaaaagcgtttatcgtcttttaacagctttaaatcataggctttgatcctgccgtctgttgaataggcaagaacgatatccattttgccgtttttgacggcgtcataaacgagtccgatctgcattggaaaggtcgagccaaatgaaaacccgtattcctgtttaaatcccggatatccgtcgccttttcgtttcagccatgcattgtcaacgccaagcttcagttgatccgcgtcttttttcagatcggatatggtttcatagttccctttttcagcgagttctttcgtgactgtaaaagcgtacgtattgtcaaatccgtaagaatcgaaccatttgtagttgaatttcttttgaaagtcctgctgtacgatgcggagcgcttttttcgggtctttctccgcttcccttccaagcgtgcttgtcaggtcagttcccgaatagcgcgtcgctgaaatgtcgatgtctccgccgagcatggcctggtgctgcacatagtttgagccgaggtttttgaccagcaccgtattgagatccgtatcatgctcgatcaaaagcgagatcatattggcaagaatttcggattcggtcaggttttgcgctccgattttgatcgttttatcggaagccccgccaaggcccggcagcgcacagccgctgatcaaaagcgagaggaccagcatgacggcgccgagccgtctcagtttttttgtttgcataagagccaactccttatgatacttccttcatcccttttaatccttgaggcgtgactttgtcttcggttttcgaaagaatatagtcgatcacgatggccagtatcgtaaccggcaccgctccggcgataatgtactcaggctggtacaggttgagcccgataaaaatatagtcgccgagaccgccgccgccgataaaagccgaaagcgtcgcccagccgattaagtaaacggtggacgtccggatgcctgccatgatcaccggcaccgatagcggcagctcgaccaggcggatttgttcccatgcagtcataccgattccctttcctgactcaagcaaattttgattgacgccttttacgcccgtgtaagtgtttctcagaatcggtaggactgaatagaaaaacagcgcgacaatcgccggaatctttcccactccgagaagcgggataaaaaacgccaggatcgccaaactcggcagcgtctgaatgatgttgacaacgccgatcacgacgccggctccttttttcattctcgttaaaacgacaccgagcggaaccgcgaaaatgatgccgagcagaaccgcgaaaatggatatatataagtgctcccatgttttataaagcatttccccgccgttgtgctgaagaaattggacaagctgattcatgattgatgcacctccctgcatttaacgttgaacaagggtttcttcatctccccaaatcgagtcgtacacgatatcgacaaggtttgcccttgtgacaatcccgacaaggcggccctcttcatcaagaacgggaacatatttgaatccccttttcaaaattttccggacggtatccctgatgagcgttcctttttgaacggagtaaacattctcattgacaacctccccgactgtgacggattttttccggttctgatcgatgatttcaacatcgatatatccttttaagacattgtgttcgtccacgacgagcagtgaatcgacgcggcgttccctcatcacttgaattgcttcagtcaggtttttttcgctcgtaatcgtgaccggattcgggttcattacttgttcgacatgctcgatgtcaggacgggactgaagaagcctctcttttccgataaattcctcaacgaattcatccgccggtttccgcaaaatgtcgtcaggcgatccgacttgcacgatctcgccggcgcgaaggatgacgattctgtcggcaagcttaatcgcttcatccatatcgtgggttacaaagacaatcgttttgtccagcgatttctgaagctttttgaactcttcctgaagcgaatcacgggtaatcgggtccagcgctccgaacggttcatccattaaaatgaggggcggctctgccgcaagcgcccgcagcacgccgattctctgctgctgtccgccgcttagttcatgagggtagcggttcaaatattccggccccatatcaacgagctgcagcagttcctccgcccgcttctttcgcttttcttccggccatttcaaaagcctcggaacgagcgtgatattctgctgaatcgtcatatggggaaagagtccgatttgctgaatgacatagccgattttccggcgcagctccaccgggtcctgatccattatgttttctccgtcgatgtaaatgcttcctgaagtcggttcaatcaagcggttgatcattttcatcgtcgttgttttcccgcagccgctcggtccgataaagacgataaattcaccttttgctatatcaaggttaatgtttttgaccgctttttttccgcctttataaacctttgatacattctctagcttcagcaaaacgcacacctccaactgttttttaaaaatttcaacatctcattcattataagatacactttgtaaaataaaaagtttacaaagtgttcaaattatatatataagacataaaaaaatatattcatggcatcaatttgccggttattcttaaaattgcggctgatttctttgtttttctgtcgttttagtgttttcaaccgctaacaaaattatgatatattgacaataaaattggctgcccgaagggatgatgagctttggaggaaaacgctttaaaagtgattgaacaagcggaagaacatttcatagaaaaaatcgccgaaaatatgaatacatacggtctatcatcaactgtcggccgcgtgctcgggatcatctatatgaacagaaagccgatgaccttaaatgaactgtcagaagaaacgggcatgagcaaaacgagaatgagccaggtcgtccgcgaaatgatcgatttaaatatagctgaaaaagtttttgaaaaaggcgtccgcaaagatctgtacgatgtcgaacaagactattatcaaacgtttatttcattgtttacggccaactggagcaaagtcgccaaaaagaacaggatgattgggaaaaaaatcagaaaagagctgttggaggcgctcgaggaagaaggccttacgcctgaaaccgaagctaaaatcaacgagctgctggctgaaacaaaacaatggatcgattactgcgagtggcttgacaatctgatcgcgtttttggaaagcgaagagatcttcaagcatgtgccaaaaccttcataaacaaaaaaagctgcgaagactaagcagcttttttgcatttcctcaattatcccgccaacaccggaaacatccctttcaatcccgttccgatcatgccgaccgccacgacagccaaaatcaggcccatcagccgggtgatcacgttcatctccgtctggcccaatttgttgctgatcagcgtagaataatgaaaggccgcaaacgtcagcaggaggacggcggcgatgccgatgatcattccgccaaaatgcaccagactgcggctgccggccgaaaggctcatcaccgtcgcaatcgttcctggccccgaaatgatcggaatgctgagcggcgtcaccgatatatcctccttttccttgctctcgcgatgctcagcatgatgcagcgactgaacatgggactgctttgcattcagcaggttgtaggcaattccgaatataaatatgccgccggcaattcgcagcgcatggatgttgatgtcaaaaagcctgaagataaactctccgaatatgagaaacgcgatcaggatcagaaacgataaaaccgcggcctttctcgccaatgcggtgcgttctttcgcttcgtagccttctgtgagcgctaaaaagatcggaacattgccgatcggatttgtgacggcgaacaatgatacaaaaacgtggatgataaaagcaaacacggttaaagccactccttcctctgtgtaaaatacgggtaatcgatttttacctccgacgctgaccgcttaaactttcaaaaacaatgacaccttcctgcactttcatttataatgaacctttataggccaaaataactattttatattttcatgacatgttcaaagtgcggccatcaaacagatggcggaaaattttgcgagcagtgcgggtcaagtttggccggcggcagtgatggcggaaaaggagcagctgaaacgccgcaggcagctagatatgcggaggcggcgaaacaagcgtcttccatgtatttttcctattgtttaaaggtgctgaaacgaccgtttatcgaaatgaaaaacgccggagaacagcacgtcctcaacagcatcaccacaatggtgatatttgcgctttcggtgccgctgatgttttatttcggcctcaaaggcttctttgacgccatgggggactattccggagtattcggccgctcctacgcaatgccgacattttttgatatcgtcgtaaagcccgctgttacctttgctatttatattttcttattatttgtttttacatacgcaggcgtgcgcattcggggtgtgcaagcggcatttaaggaagtgctcgggcggttcggagcggtgcttattcctttcgtcgcccttctgctcgccgctttgcttttatcattcatgcaaacgggtttgtttatatatgttcttttctttgccctttgcggcatcgcctttttaattccgccggctgtcatctcgagctatcacgaaaaagcggaaggcgctgttgatacgatttacgcgacgctgatcgtctatttgctgacatttatgtcggtgcggatcatgggagatttgtttcttgaatatatcggaaggatcggaggctctatattagggcggctgttttagtgaagtgaaaagcctttttccattgaggaaaaaggcttttttttattctattgacgttaagagcaatctgccgtcctcgatggcggcgtgatatgtccaatgatacgtttttaactgttcttttccgcctttgataatattaattttctccgttgtcttaatcgttgcctcccgcccgttttgcttccagctgtttacgctgaattggacgacttcctcctctgtcccgctgttgtacagtttagcgaccagtttcttttgatcgttgtacagcggacttccttctttcaagctgtcgcggacgaggccgaaatcgtttgtgttgatggcgtcttgtagcctgtataaatacgcttcaatggcgaaagcaaccttttggtcggtgagctcttcgcctgctgatgcattgttcatggcccctttcgctgaggcccatgccgatgtgtattccttcggattgtcatttttgatttctttttgatgctcgatatcgataacggcttcaggatcgcttttttcgatgagccactttttcttgccttcggaatagaccaatgtgtacgtatatccgctatcgttttcttccagtttaggcgcaatgtagtcgtcataataggccgatttgtgcttttcaatccctttgagctctgttttccattgcccgtcttctttgtatagccggaacgaatcaagatcaaatacagtagataagtaggtgcctttatagtaggtgctgctgcttttcagcccgtccgtgacctctttcaggcggttttgataagacggggcggccattgtcatgccgctgacattgccgcttgcaaaggcctttgctgcttcctttgtatggttgacgacagcggtcatcatgtcatccataaaccctttgtctgatgcaagattgacttcgatttcttcaccttcaatcgacgttttttcgcttttcagcttcccccacggaaattgcgcctcaacctgagcagacattgaaccgtcagtcagcacaggtccgaattcagttcctttgaatggattgatcttcatctcctgatcattgatccagagcgttcctttcaagttttcatagccttcttcaaagacaagctttgccatgtgcccgttaaggtccgcattaaccttcacatcaccttggagggcggtgacctttacctttttttcaagatcggcgattccgcttttcagctttgccttcacctcgtaagtaccggggacaaacgggccgatttttttctcgaagttttctttttctgttgtgatgacctttttgccgttaacaaacaggccggtatctttatagtttgtcttaaccgttaagtagacaggctccgtgttcaagacatagcggtcatagatccaaaaacgcctgccctttttttcgatcgtcatcaatggatggccggcaccgctttttaaggatgtgatcttcatccgggtgttctttcaagtaatccaagagcggcttgacgtttttctccgtgacagccagatccacgtctgatgattgaagcagttttgctgctttcttggcatctttctgatcgagggcggcttcaaaatcggaaatcagtttttcctttgatgtgagtgcttcaccggttttatagccggcaaacaataaaatcaagcaggccgcgattgccgccatgatgatgattctttttcgtgtcatcgcacgctgataccttgccgccgggtcggaagctcgttcctcgtccgcccgcgcgccgcaatgcttgcaatacagcgcattttttgttcgttcccttccacattccttgcaaaaatccatgactttcctcccatcaaacaaaaacaccattagtcattttatactatatttatcgtaagaagggatttaatattaaggccgcatcaaaaaaagccaaacgaatgcgctgatccgtttggcttttttgatcattttaaaaagtatttttcaatatcatcaagcatcaggtttgctgcaaggacgccccctgctgtattccagatggcatcgctcactttatggacgtttccttttttggagacgtttaagtttttaaagagcggatcattgacatagtctttctcaatggcgcttgctttgtcatcgcctgtctcatacgtgtaataaaaaagcacgtccccgtccatatcaggaatttgttcctttgtcacttccatttgtccgagatcgttggcttcctggcctttaggccttgcaaaaccgagctgatccaaaatcgttccggcaaatgatcctttgtgatagatgcgggtatcagcatctgtaaagcggacgagagagactttttgtttcactttatcgcctagtttttcatgaatgtcttcaacgcgcttgtcaaagtcagcgatgactttttcgccttcagcttttttattgagcgcttcggcagtaagcttaaagttgtttttccattcccctgacaatgtctcggcaaatacggtcggcgcgattgctttcagcttgtcgtatacttcttcttggcggattttgttgccgatgattaagtcaggcttcaggctcgcgattttttcaatattcgtcgcagcctccgttccgacgttctctacgcctttcattttatctttaatatggtcataccatggatctcccagccaggattgaacggcgccgacaggttttacgccaagtgcgagcactgcttctgtcgcttcattcgtgagtacgacgacttttttcggagtgccgtcaattgtcgctgttcccattgcgtgctttacagtataggaatctttgctgccgttcttctccgcagattgatctttatcttgatttccgcaggcggctaataaaaggataagcgcagcgaacagtgcaaaccatttaaaacgtttcatgatatgtaggatccccttttctcaagtgattttcattatcaattagattatataatgaatcaacctaaagtcaatatgaaattcctatatatctgttttggattgtgctaaaaaccgcttttgagctgcatccggataaagaaaaccctgctcggcagacactgtacaatgagcatatcgtcttcttacgaaaaccgggatgatcctccttctagacactttgaattcattaggttaacataatcttgtatgaatatgtttttttaccatagtaaggaggggtgatttgactaagtttttattgagtggtttctaccttttcggacttgtcatgctgagcaattggtcgatttcttttggtgaaatatttggagccggcaattcagccgtttttcaattatcggaagcggtgctttttacgtttatcatcgggtgctatacaggtcttcctttgatttatgccaaattcactagatctgaaacgttgttttttacaaatcaaaaggtcttcctcatcaccttaggattaggcgtgctgctttcctgttcggcttacagccttcagcaagccctctctcccatcgcgattgcgctgttgtcgatcattggttttttgatcgttggcatcagcggttttcttcccgcctggtttctgaagcctgcgaaaaatctgcgataaacgggtgggtttttcttaggctgacggggtgttggagccaaggtcgaactcagtggtttctataaacggcgctggacaatatggtgctctgagaaaatcacttgccaatgcgtaatctgacgattgattttttaaaaaacaacatttgctttcgccatttacaaattaatgaaaattctttatgatatagatatctaagtaaacatgttgcatatactaaaaagaccgaagtgctccaacacttcggcttgtacaaaaagccggcccttcgaaggggcttgctcagattgacctaaaatagaccactccctatcactttccaggctcaaggggcggtctatttttctttgttctctgacaacatggcaatcagcatgccaaaagcaatcattaaagagattgtttcatatgctgtcatttttatcaccccctttcagaaggggatgagcaagacttcccttgagtgagcaaagctttttatacgaggtagattataccatatcaaggagaacataaaattagggaaaaaacctttttcactcatgaaatctagcttttccgccgaattgcttcgacatcgactaaattcttggtctttcagctcatttattgattgaattcattagcttgaagaagtattcacgttgaccggtcttattgagttgataccatgaatccaatgtatccggtgcaaacacgtctaattttttcagcacttcccttgcgaattcgagaggagccgctcctgatgcagtaaccagattcccatctgataccgcgggtcccatctcataaaacggttctcctttataatgaggacagaccattttcatataggccaagtcattgcttgtatgctttcttgaatccagatatccgctattcgccagtcccgcagttgcaccgcatattgcggcaaccatcgcgccaagctctaaagcttcgccggcctttttcaagatcggctgatgaatcttttctccccaagtattccctccgggtaaaatgattagatccgcactctcgggcgtccactcatcaagggagatatccggttttatgcgcagtccacccatcgtcgtcaccatttctttattcactcctattgtcatgacttttaaaggtgccgcatcttttttgaaatatcttcccgagttcagttcggccattaaatatccatattcccaatctgacattgtatggaatgcataaagatatactgttttcgactgcatccagtaacactccaatcgcaattgatacagcctattataatcaaaaaccctgacagcttttgtcagggtaaaggaaattcagctttcacatttaaaagaggttggccgcatctgcagccaacctcttttttatgcttacttattcaagttgtagaaagattgaataccgtggtattgcgcagtttcagccaattgatcttcgatgcgaagaagctggttgtatttcgcaacacggtccgtacgagacggagcacctgttttgatttgtcctgcgtttgttgccacagcgatgtcagcgattgtgctgtcttcagtttcaccggagcggtgagagataacggcagtgtagcctgcgcgtttcgccatttcgatcgcatcgaaagtttcagtcaatgtaccgatttggtttactttgatcaggatagagttgccgacgccgtttttgattccttcagcaagctttttcgtgtttgttacgaaaaggtcgtcaccgacaagctgaacttttgagccaagacgctcagtcagaagtttgtggccttcccagtcgttttcgtcaaggccgtcttcgattgagatgattgggtacttagaagtcagctcctcgtaccagtcaaccatttcagctgacgtttttacaacgccttcgcctgcaagatggtatttgccgtcttctttgttgtagaactcagaagatgcagcatccattgccaatttcacttcttcgccaggtttgaatcctgctttttcgatcgcttcaacgattgtttgaagcgcttcttcgttagatccaaggtttggagcgaatccgccttcatcacctacagctgtgttcaagcctttttctttcaagactgatttcaggctgtggaaaatttgtgctcccatgcgaagtgcttcgcggaagttttccgcaccgacaggcatgatcatgaattcttgaatgtcaacgttgttgtccgcatgctctccgccgtttacgatgttcatcatcggtacaggaagcgttttagagttgaatcctccaaggtattggtatagaggaatctgcaagaaatccgcagctgcgcgggcaacggccattgatacaccaaggatggcgttggcgccgagcttgcctttattttcagttccgtcaagttcgatcagcaatttgtcgattgatacttgctcagtcacatcaaagccgataagctcgggtgcgatgatttcgttcacgttgttaacggctgttaaaacgccttttccaaggtagcggtctttgtcgccgtcgcgaagctcaacagcttcgtattcgccagtggaagctccgcttggaaccagcgcgcgtccaaaagctcctgattcagtgtatacttcaacttcaaccgtcgggttaccgcgggagtctaatacttcacgtgcataaacatcaacaatgtatggcatgtttgtttctctcctttaatgcttatttttgaattaatgacgatcctgtcatttctttcggtttttcaacacccagcaagtctaaaagagttggcgccagatccccgaggattccgccttctcttaatgtcacgccttcttttgtgacgatgacaggaaccgggtttgtcgtatgtgcggtgtgcggcttgccttcttcggtaatcagcacgtctgcgttaccgtggtcggccgtaataatcgcgtagccgccttttgcaagaatcgcatcaacgacttcgccgaggcactcgtcaaccgcttcgattgctttgaccgtcggctcgacttttcctgaatgtccaaccatgtcagggttggcaaagttgaggatgatcgcgttatgcttttcagcctcaatttctttgacaagcgcatcttttacttcatatgcgctcatttcaggtttcaagtcatatgttgcgactttaggcgagtcgattaagattcgctcttcgcccgggaacttttcttcgcgtccgccgctcataaagaatgtgacgtgcggatatttttcagtttcagcgatgcgaagctgcttcagcccgttttgggataaaacttcgccgactgtgttgtcgagattgaccggtttgaatgccacgtatccgtcaaccgtttcactgaaatgtgtcaagcaaacgaaatgaaggtttttcggatgcttgtctccgcggtcgaagtcgcggaagtcgtcattggtgaacgtgttggaaatctggatcgcacggtcgggtctgaagttgtagaaaatgaccgcatcgttgtccttgattgtcgcaacaggttcgccgttttctttcgtaatgacggaaggaatcacgaattcatcgtaaattccgttttcataagaatctttcacgacatcgagcggattttgatatttcggtccctctccgtatgccatggcgcggtacgctttttcgacgcggtcccagcgcttgtctcggtccattgaatagtagcggcctgacaatgttgcgatctcgccgacgccgatttcttcgatttgatcctgaagctctttgatgtacttctcagctgtttgcgggcctacatcgcggccgtcaaggaagccgtgaatatagacgttttcaacgccttcttttttggcaagtttcaagagtgcatataaatggtgaatgtggctgtgcactccgccgtcagacagcagtccgaacaagtggaggtttgtgcctttttctttcacgtgcttcatcgctgcaaggaatgtttcgttctgttcgaattctccctcgcgaatcgcaacgttcacgcgcgtcagactttggtaaacgatccggcctgcgccgatattcagatggccgacttccgagttgcccatctggccgtctggaagacctaccgcttctcctgaagctgtcagcgtctggtgcggatacttgttccaatagcggtcaaagttcggttttttcgcttgggctacggcgtttccgacggtttcgtcccttagtccaaacccatctaaaatgatgagcgcggctaacttgttactcatattgacctgcctccaataattgcacgaaagactgcggctcaaggcttgctccgccaacaagagcgccgtcgatatcggattcggccatatattctttaatgttcgcaggttttacgcttccgccgtactgaatgcggacgctgtctgctgcagtttgtccgaactctgatgccacggttttgcggatgtgcgcgcatacttcgtttgcatcttgtgcagttgaagacttgccggttccaatcgcccagatcggctcataagcgatcacggaagcagctacctgttcagttgttaaacctgcaagtgcttttttcacttggtctgcaacaagctcgtttgttttgtttgcttcgcgctcttcaagcgtttcacctacgcagatgatcggaacgatgccgtatttaaatgcagcatgcgcttttttgttgaccgtttcatccgtttcagcaaacatttcgcggcgctcggagtggccgatgacgcagtattcaactccaaggtctttcaaagccgcagggctgatttcacccgtgaaagctccgctttcttcaaaatgcatgttttgcgcgccgactttcagatctgtgccttttacagctgatgtgagcttttcaaggaacagtgcaggcgcacagacaacagcttctgctttatctgctgcgggaatggaagatttcacttcttcaacgaagctgacagcttctgaaagcactttattcatcttccagttaccggctataattggttttctcatgtgctccactccttatgctgtatattttgcttacttgtcgttcaatgctttgacgccaggaagttcttttccttccataaactcaagggaagctccgccgcctgttgaaatgtggctcattttgtcagccaagccgaacttttctacagcagctgcagagtctccgccgccgatgacagagtatgtatcatttgcctctgctaatgcttcagcgacagctcttgttcctttagcgaacgcgtcgatttcgaatacgcccatcggtccgttccaaacgacaagcttgctgtttttgatgacgtcggcatatgtttttcttgtttcctcgccgatgtcaagcgcttcccagtcgctagggatttcgcttaccggcacgattttcgtgttggcgtcgtttgagaaatcgtcagccacaagcacgtctgtaggcatgtagaagttcacgcctttttctttggcgcggtccatgaaagatttagccaattcaattttatcttcttccagcagggattttcccacttcatggccgagcgctttgacgaacgtgtaagcaagaccgccgccgatgatcaggttgtctactttctcaagaagactttcaatcacgccgattttgtcttttacttttgcgccgccgatgatcgctgtaaacggacgttcagggtttgacagcgctttgcccagcacttcaagctctttttccatgaggaagcctgcaacagccggaaggtgttcagcgatgcctgctgttgaagcatgggcgcggtgagccgctccgaatgcatcattgacataaacgtcagccaggtcggcaaacgctttagaaagctcaggatcattcttttcttctcccggatagaagcggacattttccaatacgagaatatctccgtctttcatttcggaaatttgcgctttgacggcgtcgccgtaagcttcatccgcttttttcacttctttgccgatcagttcgccgaggcgtgcggctaccggcgttaagcgaagctcttctgacacctggcctttcggacggcccaagtggcttgcaagaagaactttcgctccctgctctgttaagtattgaatcgtcggaagtgcggcgcggattctcgtatcatccgtcacttttccgtccttcatcggaacgttaaagtcaacacggcagaaaacaacgcggccttttacatcaatgtcttttactgattttttgttcatggcttttaggagatcctccttttaatgttttacaagcctgaaaacggaaatccccgggcggcttaaaggcgccgatatggaaaaagggaaagggagtgtgtgtccccttcccttgtccgctttcattatagcgcttctctcatcaagaaccaagtctgattctggtttccggattaaagaccttgttttgcgatgtaagcggcaaggtcaacaacacggtgagaatatccgctttcgttgtcataccaagaaataactttaaccatgctgccttccataaccattgtagaaagagcatcgattgtagaagagtttgtattgccgttgtagtctttagatacaagcggctcttcgctgtagccaagaacgtcttgaagttcgccttctgctgcttctttaagcgctgcgtttacttcttctgctgttacttctttgtcaagttcagcaaccaggtcaacaagtgatacgtttggtgttggaacacgcattgctccgccgttcagttttcctttcagttcaggaagtacaagggaaacggctttcgcagcaccagttgttgtaggaatgatgctttcagctgccgcacgcgcacgacggtagtctttgtgcggaagatccaggatttgctgatcgtttgtgtaagagtgaacagttgtcatcataccgcgtttgatgccgaatttgtcgttcagaacttttgcaaacggcgcaaggcagtttgttgtgcaagatgcgttagagataacatggtggttagccgcatcgtatttatcttcgttaacacccataacgattgtaatatcttcttcactcgcaggagctgagatgataacttttttcgcgccggcttccaaatgtttcgccgcatctgcgcgttttgtgaagaaaccagttgattcaacaacgatttcaacaccttgctctccccagcttagtttagaaggatcgcgctctgctgtaacttggattgtttgaccgttaacaacaaggttgcttccgtcaacagaaacctctgcgtccaattttccatgtactgaatcatattgtaataggtgagcaagcatgttagcgtctgtcaaatcgttaactgccacaacctcaacttcaggattatttaatgctgcgcggaatacattgcgtccaatacgaccaaaaccattaataccgacttttactgccatgatgatttcctcctttaagtaaataagagatatttaatttatattgagggaagaagcttcccttaataactgttttgcggctccttcatcagtgatcaaaaccgtattgcgcggctttttgaagtatgcctctatggcgtcagcttttgacgagcctcccgccaccgcaatgatgttcgggatcgaatcgagatcctcaagctggatgcctacgctgtgcactttgtgaatgacttccccgtggcggtcgaaatagtagccgaacgcttctgcaactgcctcattttcttctattttcttcaaatcttcctttggcgtatttcttcgttctgccattgttttagcatccccgattccatgaatcaccatactggatgattgaatcgtctgaagcacttctttaatagaaggttcctcaatgatagaagaatatgcttctttgctcagctgccccggcacaaataacagtttgtatgtaccggaagctttctcggccatatgggcgcaaatcgtattggcctgattcctgacgttttcgcccagtccgcctcttgccggaacaaaaagcagcttgcggtttttcgagtcaggcgtcatcatttctgccacggcctcaagtgtcgtacctccggttacggcgacgatattttcccccgtaaacctatttttcatgcatgcgacggccgctctccccatctcttttttgacccatggggactggtcgctgtctcccgatacaatgatgacttcgtcgaggttcaacctctcttttaatgtattttccaaatgagttaaacctaaaacgtccttcatcgtatcttcgagaactttcagcaggtcggatccttcaggtgtcaatatcatgccggttgttttaatctctagtagattttgttcttttaaaaactgaacctccgcccttaaaatccgctcgctgatgccgaggctggcagcaaggcttcttctgccgatcggttcagtcagccttatgtactgcaaaattttgtaccttttctgcatgacatcgagaagatccggcaataattttttctgagcctgtattagttgattcatgccaaaacgttcctttcatctcatcctggacgaataatgtcccgcagtgactgaaaacgtcccacctcagccaaaaaaaattactcctgcttacattccttattgtaacagggttaaaatgtttattcaactgttaagaaacaattcatcgacaacattcgcgcgaacgttcacacttctgttttaattattgttcctgataatttctatattatacatatttcataaaaacgtgcctcaatgaaaattagctcttttatttcattcaaagctgttcgatttcttccaggcatttttctagattatattgtagctatttcaaaaataaatatattgctaaaatacgtacttaccagcaaaaaagcaacgggcggtttttccgttccgttgcttttttgcgtttatccgtttttccatacatctgcaatgatttcgaacgagcgaagtctgtcagcatggttaaatgtttctgaattgatcatgatctcgttcgcctgagtcgtccggatgaactcttcaagcttttctttcacactgtccggcccgccgatgatcgttgagctgagctgctcgttcaccatcgctttttcgcgcggcgtccaaatctgttccatatcatctacaggcggcttaagctgtgtcggagcgccgcggacaagatccaaaaacttctgatagtgcgacgttgccaggcgctgcgctttcgcatccgtatcggctgcgataacggtaaccccgaccatcgcataaggctccttcaagacgccgggcttaaacgaactccgatacagttccaaggcaggcagcgtattggcgggcgaaaaatgagccgcaaatgcaaacggcaaaccgagctccccggcaagccgggcgctgaatccgcttgaaccgagaagccaaatcggcacatcaagcccttctcccggtatggcgcgcacatgatttcttacattgcccgacggcttaaaatattgccgcagttcttcaagctgctcgggaaaatcctccccgctgcttatgtttcttcttaatgcgcgcgctgttaattgatcagtgcccggagcgcgtccaagtcctaaatcgattctgccgggataaagggattcaagcgttccgaactgttcggcgatgacgagcggggaatggttcggcagcataatccctcccgagccgatgcgcattttcttagtacctccggcgatatagccgatcaaaacagaggtggccgagcttgcaacaccttcgatattatggtgctcagccagccagaacctgtggtacccccatttttcggcatgctgcgccaaatccatagattgtttaaaagattgttccgcatttccgccttgtacgataggagacagatttaatacggaatacttcgtatttttgaaatgctgttctgacattgtctttccttcttcctgaagtgtagtggtcatgtaattagacgataacataatcgtcccggtgaataaaagaaattagttcgaaaaaaatcgaactaatgtataaaaagcttgcctccgctgggaggcaagcccttttttaagaagcggccgtttggccggctgtctggtttcttcctttaaagaaataagcagcgctaatgagcaaatagatccccgccgtcaccaatgtaatgacaatcgacgtggtcaggatgacaccgatcagtatggctgtcagcgaaatgattgccacccaagtcgtataagggaaccatttgacatagtagccgtttccagctgtttgattccgtttcctcgattttaaatgggcggcggcaatcagcatccagatcacaaggacggtatagccgagagaccccatcaaatattcaaacgtttggctgccggcaaatagtgaaaacaatacgcccaagtataaaaacgaagtgcataatagaatcgaataaaccggcacctttctcgcagaaagcctcgaaaagattttcggcattcttccgtctgacgcctgtgtatacaaaatacgggaggcgccgtaaagccctgagttcatagaagaaatgaccgccagtaaaatgaccgcattcatcaaatgatccgctccgggaacgccgatcatcttaaagaccatgacaaagggactctccgacaccccgttcacttgattccatggaatcaagctgacgatcacgaaaaacggcagaagataaaaagcaataatgcgcgttaacgttccccgcacggctttaggcacaaccttctcaggatttttggtttccgccagggtcaccccgataatttccgttccgccgtaggaatagatcacgacaagcatggctgtaatcagccctccggcgccattcgggaagaagccgccatggtctgtcaaatgagtaaagccgacagccgaatgttgtccaaaagagaaaaataacaagataaatccggatataataaagacgacaatcactgtgattttaatgagagcaagccagtattccgtctcggcaaagcttttgacagaaagcaaattcacgctcgtaatgacgagtgaaacgaacagcgccagcacccaaatcggcagccccggcagccagtactgcaaaaatatcgcggcgacaacagcctcagccgcaatattgagaacccacattttccagtatatccagtccaaaaaataagcggcatacggccctaatatcgattgaaccagatccctgaatgttctggcttcgctgtttcggacagccatctcggccagcccctgcataataaacagcaaaatcacgccgccgatcaagtaggggatcatgaccgaaggccccgccaaatcgatcgctttgctgcttcctttaaataatcctgccccaatcgctccgcccaatgccatcatcataatatgccgcgatgtcatcgtgcgctcgagcttctgcatgtctttctccatctatgttcacttcctctattaaaataaaaaagctcaccgtctccctcttcaatttgaagataaagagacgatgagctttgaagcttaccgcggtaccactctttttgatcctataccaagaatccagctttgcgaagcacagccatgctgtgcaaacctgttaacgaaggttaatcgtaaagtcctcaggaattgatgtccgtcctttagccagtccactcccgggcgagttcaaaggttcattggtctgcgtctcacctacccgcagctctctttgccaatgccgatcttttactgctcccgttcattgtgttttcttctgcctgaaatatattcatataatatacgtgccgatcttcactttgtcaacatcaaatccgatgccaaaaaaataaaaaattaaaatttttctcttttttcaaggaagatcgccttttctattggaaaatgcaagggcagatatgcacaactttcataatgatagagcatgaaccaaaaaaaggaaaatagtaaaaatcggcagatatcccccgaaaaaaatagttaaattgaaatattattcaaactttacaaaatattttaacgatgatagagtgtgaaccgaatcataacatcagctaaaggaggaagagaacatgaaaaaactcttgtttatggtgatcttgtccgtattgacgctcgtctttggttcatcgtccgtaagctttgcgaaggacattcctgaagacaggtatacaacacctacagatgctgaatttagccagattaaagagattttaaacgaggctgatgtcgaaaccggcaatttgcagaaggattacggtgtgatcgtcaatgatcctgctgaaaaggtcggcgtcatatcggacattcctgccgaaaaagatgactggagccatgtcagcttccattcttactatgtcgacctcaacagcggcacactcattgctgatgttcaatttgaattcacgcaaaacgatgacggtacatcagaaaccgagtacaaaaacgtaacaaacggaggcaggtacttcgtcaaaatggatcaagacggaaatgtcattaatgaagcaacaaccggcgacatgtcgattttgtggaaatactagaaaccgagccgccccttatggaaaacgcctttattcaaaggcgttttttttggtcgtatatttaatggatctatccggtggcgccatacgggtcagcaagattaaagacatgaggcccgaacaatgccgaactcatgcctgtcaaaatctttctggaatattagcccaccatagtgtcaagacacaacgcgttccttcgagctgtcgataaagatgtcttcaagcgacggttcatcgacgtggattctgtagattcccaccttgcagttcgttaatactctgacgatggcaggaattttttcttctgaattgacgatgatcgaaatctcatggtgcttaaattgaacgttttcaccagctgactcaagaaatcggtcgatcaggccgaaatgctgctcgggaatattcgaatggcggatgtgaacgcttatgttcgacatgaaatgccttcttaactcatcgagcgtgccttccattaaaatgcggccgtttttcatgatcgcgattcgtgtacagattttctcgatttcatgcaggttgtgtgacgtcataaataccgtcttaccttctttttgcaaatccataatcagcttttgaatgtggagtgccgattcggcatcaacacctgatgtcggttcatccaaaaagatgagctcgggatcatggatgatcgcttgggcgatgccgagcttttttttcataccgaatgaatacgcgcccgcttttttttcagtatgctcagtgaaccctaccctctctaagacttcttcgcaacgctcagtcgatacggtccgtccgttcagctttgcaaaatacttcaaatgcccgaccgctgtcattgaatcatagagggtcaaataatcgggtaaaacgccgatgcggtgcttgacgctttcaatcgaagcttcatttaacagcagaaaactgccggctgtcggctggataatgcctgtgatcatattcataaacgtagatttccccgcaccgttgcggccgaggaatccgtaaatctctcctttttcaacttgaaggtcgacatggttgacgacggttttggcgccgtagcttttcatcagcccttttgcctcgatcaccacattcattataaatctctccttttaaacaaaacgatcgcaccgcaaagaacaatggcggcgtagacaaagttgatgaaaataaaagaaccgcccagtacggagtaatagtacggcgttatatatttaaaccaggtgatcatgccgttctctgaataaacagcccataaactgaccgctggaaaaacgagagcaaacacgattccgaaaaacattgacacggcgggccttgaaatcacgatcgaaaataaaaggttcaaagagatcgcagctgtaagaaaagccatgctgtctgcataactcagccataaaaactcttttgaggcgatcatcaccaaggcataagaaacgagcatgcagaaaaaccaaaacagccagacgccaagaaactttcccagaatgatcttgatccgcgacgttttcgtcacgagaaatctgaccgtccgggtatggacttcgcggttgatcatgtcatgggaaagccccgcgataaacaggaaaccgagagcaaacacgataacggccgttccgatcgcgcctgcatcgcttcctaaatccaattcccgcacgacatccgcaggcgcccgttcaatcaatcccgcagtcttatagctcacccaaaacataataataatgacaataatcgacttgatgcttttaaaaagactgataaattcgttcagacacactgcccgcatatgagtcactccttcactattctccattatagtgagtgaacattatcgggaaataatcttatccttaacattaccttaaattttaatagactctttctatcagaggtgcttctgtggattataaatgagataaaaaatctcgcaagcggcttggacctgcggcagaaatgtgtatgcagagccggcgatccgataaaaataccattttaatatactatttataatcggcaaaaaaagcagaacgatgcgttcaatctgtatgcgccggaattgtcatatcgcataataaaaaagattagctcagtatgaagctaatctttttgctatcgataattaccggtcctccacgactatatatgccgcctttacggggccgtggacgccgactacaaggtccatttcgatatcggctgaattgctcggtccagtgacatagttgatgcaggacgggatgacgtcgccgtctgcaatcttttgtttgatgattgcgcttgcttgtgtcatccgcgggacgatggtgcttttcgggacgatcgcgatatatgtcgtcggcagcaagctgacggaacgtcctttgtcttttgagctgaagaggacgaccgttccggattcagcaagcgtgatctcgctgaatgtcacgccgatgttagcctgttcggctcgctggatgttctcatctccggccgctgcatcccattcccacactttcgtcccttcattcggccacttgtccgttaacaggcctgacagtccgtactctttaaaacggtcatctttcgggatcatgacaggcccgcctccaaatcgcgctgcttgttcatacaaggcatcatgcaagccgatgacatctgtttcaatcagctccgtgtgaattttccggcagtggtcctttaagacgccgacaagctcatcctgtgtatagccttgatataccctgtgctgcggctggtggatataatcgggaacggtgacgcctgcagaacgcctgttgcggccgagcctttcagcaatccggtttaaaaagccgtctttgttgtggattgttccgtttgtcatttgtcttcccccttctctttccgtctgtcctcaaaccagtcgcggaaccttgacttgttcggcgcggggaagtcgcgtatctgggtccactgttttaacggacccggtcccttcgtaatcttgccgtcttctttaaacggcttcatggctgccggcgcccatttggagcccattttgtaaagggatggcgcagaagttcccaagccgaacgctttcatcgccagcttttcggatatcggcgcgcgcccttctttttcaacgatgcgctgcctgtgctttagaagcagctcatgaagcgggattttcaccggacatgcttcagagcaagccgcacataacgaagatgcgtacggcagttctttataatcgtcatatccgccgagcagcggcgacaatacagccccgatcggacctgaatagatcgaaccgtaagaatgcccgccgacatgacggtaaacggggcagacattgatgcaggccgcacagcggatgcattgaaggacggactgaaactccgttccgagaatgttggaacgcccgttgtcaacgatgacgaggtgaaactcctccgggccgtccgcttcaccgggcagcctcggccctgtcagcgccgtgatatagctcgtcagccgctgtccgaccgcgcttcttgtgagcatgccgacgagaacttcaaactcgtcgaatgatgggacgatccgttccatccccatcacggtaatctgcgtcttcggaatagtcgtgacgagacgtccgtttccctcgtttgtgacaaggctgacagatcccgtatcggcaattgcaaaattgcagcccgtaatgccgatatcagcttcgagaaatttctttctaagcacggcgcgcgcgtgcatgacaagctcttccggcttttcggtgttgcggtagccgatccgctctttgaagacgtcgcggatttgctctttgtttttatgcaaagcaggtgcgacgatatgtgacggcggatcatgatcatcgatttggaggatgtattcgcccaaatcggtttcgaccacttcgcagccgtcgctttcaagtgcctcgttcatgttgatttcttcggtcaccattgattttgatttgacgatttttttgccgtttttctttttcacgacatcgcggatgtagcctgtcgcttcttcagccgtctgcgcaaagaaaacgtgcccgccttttttggcgacattttcggcaagctgttctagatagtaatccagattttccagcacgtgctgcctgatttcttcggccagagaccgccattcttcccagttcccgagctcttttgccgcctcaagacggcgcgctcttaagcgctcctgcgcgcttgaaacggcccccctcataaactcgttgtcgagcccgtctgacacgcgctctttaaatttctgcgttccgatcttcattgccataacgaatgtccccctctatctgtgaaatgaccggattgtctgtttatctgctgttcagcacttctgcgatatgcatgacttcaatcggcttgttctttctcccgatccgcccgccgatattcatcaagcagccgcagtccgccccgattaacacgtcggcggctgtttcttcgacacacgccactttctcatcgaccatctgttcggatatttgcgacatcttcaccgagaaagtgcccccgaatccgcagcagtcgtgtttgcgcggcagcggcgtgaactccagtcccttcacatgccgaagcagcttcatcggcgcgtccgtgactcccaaaagccttgtcatatggcatgacgtatgataagtcgcctttttctcgagtgtcgccccgacgtcctcaatcttcaatacgttgacgataaaatcggtcagctcatacgttttgtcagccagccgctgcgctttttccgcccaggccggttcatcccggaaaaggtgcgggtactctttgaacataaaagcgcacgatcctgaagggctgacgacgtattcagctgattcaaacgtctcaatcatccgtctcatcgcttttttggaatctttgacatagccgctgttgtacgcaggctggccgcagcagatctgcccttcgggaaaatccacttcacatccgagccgctccagcagttcaacagtcgcttttccgacatttgactgaaacatgtcaaccaaacacgtgataaacagtgatactttcatcttgatcccctctccaacccgattaatcaggtcatctgatgacttggttagaaaaccctctttctccatcttacaccttggcaaaattttttgaaaggggtttcttttttcgttttcactcaggccgtgcagctgactgctgcttaaatagccggctcgtcggcttgtttcgtttcttcaaaatatgaggccagcacattttccacatttgtcagatgattgtgcatcgcttgctccgctttttggccgtctttttccttcacagcctgatagatggcttcgtgttcctcataaaggcgcttaacagttgtattcttcgagaacagccaaattttgcgcgtctccctcatcgtctcaattaagagagatgacacatgattcatcaagcctttcagcagatcgttctgcgaagcgccggcaagcgcaaggtgaaacgcgaggtcggctttttcgccaagttcgccgttcccgtccgccagcttcatatcctcaagtgcttcctgcatgcgtccgagatcatcctccgtgcgtttttgagccgcactggaaactgccccgatttcaagtattttacggacttcgagcagttcagcgacatctttctttttcatcaaaagtgcagccgaaagggggatggaaatttgctcaggctcaaaccttttcacatacgtcccttccccctgcttcatttcgaccatccccatcgcttttaacgcggacagcgcttccctgacggccgaacggctgacctgaaagctgtcggcgagcgcttggacggagtcaagcttgtcgccgggctcaagctctccgcttttaatcgattcaagaagcgcttccgcgacttcttcatatatttttttcgtcttgatttgtttgtatttcaacttttttcacctcgtaaccagactgggcatgatgcgctattttttattataccgttctttccgtctggaacatatagacttcggctccatgcaaaaaaagattgtaatttatgacattgagaaatataatgctaaatgatcagtcttatcatcatgtcatcagatgactagatgaggcttttttgacgaacaaagggggaattggagatgggatggacgcaagattatactccgctggggaacagtttgctgctctcttcgcttgcagcgcttataccgattttgtattttttctgggctctggcaatcaaaagaatgaaagggcatacagcaggcttgacgactttgctgatcgcactcgtgctggccgttttcgtatacggcatgcccgctcagcaggctgtgatgtcggcttcgcaaggcgcggtttacgggctgctgccgatcggctggattatcgtgacttcagtttttttgtacaagcttacggtgaaaaccggccaatttgaaatcatcaggagttcggtattgtcgatcacagatgaccgccgtttgcaagcacttttgatagcgttttcattcggggcatttttggaaggtgcggcaggcttcggcgcccctgtcgcgatatcggctgcattgcttgtcggcctcggctttaatccgttgtatgcggcgggcatatgcctgatcgccaacacggcgcctgtcgctttcggagcgatcggcatcccgattatcgcggttgaagggccgactgggattcctgcgatggacatttcaaaaatggtcggacgccagctgccgtttttatctgtatttattccgttttatttgatcatcatcatgagcggtttcaaaagggctttggaagtgctgccggccattctcgtgtcgggcgtctcttttgccgttacacagtatgtaagctcaaacttcctggggcctgagctcccggatattttgtcagctatcgtatcgcttatcgctctcgctgtattcttaaaattttggaaaccgaaaacgacattcagattctcacaagaaaaggaaatggccgctgcagcggaggcgcagcagcttgaacatcaaaaggcctcatactcggcggggcagattttcaaggcatggacaccgtttttgctgctcacggcaatggtctccatctggggaattccatctgtcaaacaggccttgacgggccattatgaaggttcaaatccattgctgctgttcataaatgatatcggcggcaggctgacgtttgcacccggcgtgccttttttgcacaatcaaattctcgatggttccggaaaaccgcttgaggctctttacaaacttgatctcgctggatcggcaggtacggcgatcctgattgccgccgtactgacaaagtttgtcacaggcatgccttggaaagaatggggcgccgtatttacagattcgctgaaggaactcggcaagccgatattaacgatcgcttccgtcgtcggttttgcctatgtcaccaattcttcgggcatgagcacaacactgggcatgtcccttgcgatgaccggttcaatgttcgcattcttttctcccgttctcggctggctcggtgtgtttataaccggttcagatacgtcggccaatttgctgttcggaagcctgcaaaaaatgacggcacagtcagtcggaatggagccggtgctgtctgtggcggccaactcttcaggcggcgtcacaggaaaaatgatctctccgcagtcgattgcggtcgcctgcgcagccgtcggactggcaggaaaggaatccgacttgcttcgctttacactgaaacacagtctgtttcttcttttcctcgtttgcatgatcactttcctgcagcatcatctgttttcgtggatgatcccgtaaaaaagccgccggcgctcgtgccggacggcttctttattgatatctctttcttacagacgaaggcagtatattgagctgatcacggtatttggcgacggtccgcctcgatatgacaacgccgtgcttttcgtttaaaaggtcggccagtttctgatctgaaagcggtttcattttatcttcttcatcgatcagccggcgcagatgcgctttgactgtgtgacttgacgcatgcccgtcagcggcgtcctttaccttcgccgaaaaaaaccgtttaagctcgcaaagctcaaaaggcgtctgcacgattttccctttgactgcgcggcttaccgttgattcgtgaacgccgagggcatcagcgatctcttttaatgtgagcggcttcagttcgtctttcccttttaaaaaataatctttttgccgcaccatgatttccgccatcaccctccgcatcgtttcccgtctttgcctgagggcattgtcgagccatttccactgcttgaacttatcagagatataagcggtcgcctcgtcttttgactgacgctctaaaaacggctcgtaaaacgcgttaagctggatgtcgggaaaagaacggctgctgagctcaagcaccaattttccatcctctgctgaaatgattaaatcaggctcgacatagacttcgccatcatctgtgccatatatcaatccgggacgcggcgacagttctgcgacaaggtcttgaatgtcctgaagctctgaaagcgaaagccccgctctctctgacagctctttccatccctttttggcaaacaggtcaaagtatgaggaaatgactttttccgcttttgccgtctccttgggcagacgctttaattggatcaggatgcattcctgtagcgaccgcgccccgatgcctgccggatcaagagtctgcagcttgcccaagacttcttcagcttcttctctggtgacagccagctcggaagcgataaaggcgatgtcttctgtcacatatccgtttggatcaagtgattcgaccaaatagctgaaaacccgcttttcgcggcttgacagctggagatcgagcgcctgccgtttcaaagcgcttttaacatcttcacgggaatgggccgtctcagagcggcttattccttcattttgcaaatgacgattcgttttatggtaaaatgatcggggaatatcggagtcttttcgttcgatcagggggttttccaatgagagttcatcaatccggctgttcagctcggccgacgaatactgaagcatatgaatggcttgggcaagcccttgcgtcaagtgaagttttgccgtttgctgctgctgtacatgcaagttcatcatatctcccctcccactattagtttacacgatcggttccgaaccgtatagacttaaaaaaggagtgttaccattgacagagcttttctccgtgccctatttcatagaaaattttaaaacccatattgaaatgcatccaaatgaggataaaatccacgcgatgaacagctactaccgttcagtcgtttcaacgcttgtgcaagaccagctgacaaaaaacgccgtcgttttaaaacggattcagcatttggatgaagcctacaacaaagtaaagcgtgaagaagcatagcaaaaaaaccgcctgtcatacgtgaacaggcggtttttctgcttctgtctgatggttttgaatcagtttcgtattcgggatgtctttcatccatgtattgtagtaattcgcgttttttccgtaggagttgtcaatcactacgttttcttttccgagcaggcacgataagatgtggccgtgcagccttgaagtaacgactgattcatagcggctgaagaaacggattgatttgtcgacgaggctgtccgaaaagcgtttccaataagaagcgatcggcagcggattgcccgcttttttgttgaggacattgatcgtctgcaggcgtttgattccgcgtttgtcgccttctgataagatgacgttccaatcgtacgtgtccggctcccctgctttctgcaggctgctgttggcttctttgtcggtcctgatcaaccgcagaacggactcggacggcttttcggcaggtgccgcgatcggccagagctggtgagccatatcgggcatcattttgatgtttttcacctcttcgaaacgcttgacggcaaaatcgaatgatgccttttcccgcgtgaataagtgcagatccgggtgagccgccaaaatgccgcgcgtttttattatattttcttcatgctcataataaatcgactgcggcagaatgacgatccggttgtccgggtaatgttcgaccacccgttctctgaactgctggaagtgagggtacaagtcgccgaaattgccgcccccctgacaaacaatgatggcgtcctttggaatgcggcggcccggaatgaaattctccgcattccatctttcgcgcaccttgatgccgtatgcttcaaaaaaagcttccgttcctttcatgatcaatagatccccgacgtttccgtatagcgggtagtccaagtaaacgactgatgaatgccttggaatgacatccaaaatttctgccagcttatgctttaagctgtccatggaatatgtaatcgccatgtttagcacctcatttatatttaatccggtcggcaacgatttgaattacccggtcctgctcttttcgcgtcatacttgatcctgacggcaggcagagcccgcgctgaaataagtcgcagcagacagagccctggtcatcgtgcggataaaaggccgcgcctttaaaaaggggctgtctgtgcaaaggcttccataacgggcgggcctcaatgttttcatttgcgagctgttcgatgatgtccgccggtgttgtttgaatctttgctgtgtctaacgttaatgtcgtgagccagcggtttgacatgccggcctcaggcatgaattctataccttcgataccggaaagcgcctccttatagcgctcgaaaaccgcccgtctggcatgtacccggtcatccagaacggcgagctgtgcgatgccgattccggccagaacattgctcatccggtaattgtagcccgctttttcgtgctgataatgaatggctggctcgcgcgcctgagtggctaaaaagcgcgccttcttcaacgcgtcttcatcatcgctgaccagcattcctccgcccgatgtggtgatgattttgttaccgttgaacgaataaatgccgaagcgtccgaaggtcccgctttttctgcctttataaacagaaccgagcgattcggctgcatcttcaatgacaggcacggcaaatcgatcgcaaatggccataatctcgtccattttcgcgctttggccgtacaagttgacgacgatgacggctttcgggagattcctggcccgctccgcttcgtcaagcgcccgttcaagcgcctcgggcgacatgttccatgtatcccgttcagaatcaatgaaaaccggttcagcctgctcatatatgatcggattggcgctcgctacaaacgtaaaagaagagcagaagaccgtatcgcctttgccgacgccgagcaatttcaaggccaggtggatcgcagctgttcctgagctgactgccgcggctccggacgtccccgcataggcggcaagcttttcttcaaatgtgtcgacaaggggaccgaggggcgcgatccagtttgtccgaaacgcttcggctacatagcgctcctcgtctccgctcatgtgcggcggtgataaataaattcgcttattctgactcatgtttttcaccctttttactgctgttatttgatcattcttgcagggactccgactgcggtgcaattatcaggaatgtcgtgaatcacggctgcccccgctcccgtcacgctccagcgtccgactgtctttccgggaatgaccgccgttcccgcgccgagatgagcgccttccataactgtcacgccgccggttaacaccgttccgggcgaaagatgaacgtaatcgccgatccgattgtcgtgttcgacgatcgcacctgtgttgacaatcgcgtggatgccgacgtctgcatccgcttggatgacgctcgatgccataacaacggcgccgttttgaatccgggccgaaccgctgacaacagcagatggatgaatcaaaaccgcataccggtcaagcggaagaccaatgcgttcatacagctgctgtctgatgctgttttggccgacagccaggacgaacttcgcgtccggatgaagccgcgcaagttcttctgcggcagctgaaggccctcgatgcagaccgttctcaacatgaagctccgcataccggtcatcaagaataccggcaagctccgtatccggccgctcttttacaagttcccgaacgactttcccatggccgccggctccgatgatcaccacgttttgcatcaggcattccttctccctgtaaatttttctgctgtcacatgccggtcctggctgacgccttccgacttcaaaacctttacgacagtcaacaaaaggattttgagatcaagcaaaaaagaacgatgatccacataccagacatcgagttcaaatttttcctcccatgtcactttatttctcccgttgatctgcgcccagcccgtgatgcccggcttgacttcgtggcgtctccactgccgcttcgtataaagggggatatactccatcaaaagcgggcgcggcccgacgaggctgaggtctcctttgataacgttgatcagctgcggcaattcgtcaaggctcgtttttctgatcagccgccccgtctttgtcagccgcttttcatcgcttagcagattgcctgctgcatctctttcatcagtcatcgttctgaatttatataatgtaaaaggctcgccattcagccccggacgggtttggcgaaataaaacatgcgagccgattttccatctgatgagacaagccgtcagaatcatggccggactgagcgcgaccagcaaaataactgacaatgcaagatcgaaaaaccgtttcgctagcacgaaaaacgcacccctttcttttatttaaaaaatcccttttgaaatgggaaggatagagaacaccggtatgcttgcagcttcgttgtgacaatgcgccgttccgctttcgtcaacatgacgaaataggcaaacaggccgtaagccaacgtcgcagccagtgccgtgacaaacaaagacagcaggctgacgatcgaaaataagtattgaagagcgtaacagacagccaaagtaaatgaagcgccggcaaccggcccgtatatgcctttataaaagaccctttttctttcacccgtaatctttgatgcataaatcggagtgaagacgacgtttttcagcgttaaagctgccgcaccggccagcgcaattccgtaaaggccgagtcccgccgggccgctcagcacgatggcaagcagcaaattgacaacgccgaaggcaaccgtggtcagcgccggtgttctcagcttgttataggcggtaaagatgtaaaacagcggcgccgggcttaatgaaacaaccaaatagcctgcatgtatcagtaagagccatttcaaatgttcgaatgaagggccgagccaaagcgacagaaacgggccggcaagcccccccagaagcgccgccggcaaagcgagcaggatgccgttaaacctgacggcctgattggcataacggacgagcccttctttgtcgccttttgaataatagagtgtaatcgtaggtgaaaatacggccgctagcgttcccgaaagcgtccgcaacaacagcggaaactgaatgatcgccgcgtacatgccggattcggaaacccccagcatcacattcgccaccattaaatcgatttgcagaaacagcaggatgccgacttggctgacggagctccatcctcccgcctgaagcagttttttgcactttgcaaacgacatatccctcacccggaacgtaaaccatggaatcaatctcttaaagaaaaagatcgacaggatgcacgccgaagcggttgcgatgagagcggcgagctgaatgtgccagatcttcggtgcaaaccacgcgaaaatcaacaatacgctcagaacgcgaatcagcatttggatggcttggatcgtgctcgtaatatagattttattggcgaaaaacggaccggcggcaaaccccgacatcacaaaggtcaataaaaacagcaggctgccgatcaaaagcgcgacctgcacatcccccaaaagaccggcgggaacgcgaatgatctgatcgataaaaaacaccgtgccgccgagcggaaaaaacaagatgactgaaagcaccagtgatgaaacgatataggtattcatatagcctctcgcttcatcaagcgctcccctgtgggcggaaacagaaaaaaaccggacaacgaccgcgctcagggcgaccgtaattatcgaaaagtaattgatcatattctgtgtaagatggacaaatccaaacgcctcaacaccgagggtcttgatgacgtaaggcgtcagccacatcgaaaacagcaccgataataaaaaagacgccatattggcgccgagattcaaaacaaatgtcttattcaaaaggctcatcccttactgggcagatttcgtttaaaaaacaattcgagcagaatcggaatattcagcttgcatagcaataaaacgagccgctggccgattaacaggttgcggttgcggagagacgtggctttgacgcacgactgcaccatccggtaagacaaaatgtctttaatgtgccgcctcacctgctttgaaggcttcggttccgcacaggcattggctaaaagcatcggaatttgatgtttgcatgtgtacgtttccaaatcgtccgcacattcatccaaaagctgaaacgtctcatagaatctccttttcgcccggtactgccttttcaggctttcatccatgtacggtttaaacggcgcctctgtcaggctgtccgggttgcacctgtacatgtagtagtcttcatcgatcgctctcactcgtttcgctgcataaaaggcgtacaaattaaacggcgaatcctctgcaaaacgaatgtcttcaaaaaagtacagctggtttttcttcagcaggtcgcgcctgtacaaattccgccacacataccagatgaagcgggtttcgtgcgcctttttgagctcgcgtttaatatcccagctcaacaagaggcgatcggtcggcagcggcggcgggaagtaggcgtcttccgtatcggaatgtttatgatacccgcacatgacgatatcgaggtcgtcttttttggcagcggcgtacatgttttcaaacatggcaggcaatacaaaatcatcaccgtcgacaaacccgacataatctcctgtcgcggcttgaagaccggcatttctcgccgagctcagcccgccgttttttttatgaatcactttcactctggcatccaggctgcagtacgttctggctatctccccggatctgtcgggagagccgtcatcaacaaggatgatttcaatatttttcagcgtctgcctgcgcagcgaatcgacgcattcttctatataatcttcgacattgtacatcggaacaatgatactgataaatggcttcattggacatcacccataattttccgtcttaaatctgcgaaataatgatcccttgccggggtctcacgatgcgagtcaccggtcttgaccagctcttcgattgcgccgagaacctctgccgcatcgggattttccacaagcttcatcgaaggaacgtctttcagccagcgaaagccttcaagcaccttatgatcaaaagagcggatcacgacgcacggcgttcctgttatcgcacaaaaaatcatgccgtgcagcctgtctgtcacgacgacctccgcgcctctcagctgatcccaaagccggttcagctccttctcgcgggacacgcggctgaccctcctgccgatcgtcgttgtaaaagtttttgcaccgccatactcgtcgccgacagccttcagcagctttttacgctcttccggcctgagaaagctttctttatcctcccttaaacaaaccaacacaccttctctttcagactgctgttctttctttaaataaagcaccatatcaggctgctttacaatcgtttggtttgagaagtgctgtttcataaattgataggttgtatcatcgcgcgccatcatgaacagccggcgatgggagttgtagatttttttcgcccttttcagctcttttttgccgcggagcgtctcggaaaagtgcgcagttgccgggagctggacgattttataatgcttgaatgttttgataatgaagcgcctcgtccattcctcattgcggtacaaatcccccatgtttcctccgccgatgatgaataccatatcctcggggtggcggatgcgcatgagcgcttttgcatgcttgtaaatatcgttaatgccgatttcaattaactcaaaatcgggaaactcgttttctatgaatgtgcggcttgccagggcaatcgcatgatctcccaaattatcatgggacggaattaaagtcagaatgatttttttcttgcctttatattgttcaaagcgccttaaacccggcgttcccatcacatattcagaaggatatttcaccttgagcaaaagccattctgcaagattgatcttcagttcctgaaaggtcatttcctcaccgcctatttcttcattctgtgctcgatcattttctggtaaatggccgcaaatccatacactgccggcatcaaccgcaagcgaatcagcataagcaaaagcttcttcttggaatcgaatgccgacatgtccactgcggagattttccccctgaattccggacaggcgcatatgctgcggatatttttatatttttctattgaagggtttttgtttcggctcttgcattcatttaaaatactgatgcagccgtggttgacgataaagacgtgcagcgcctcctttaaagccgggagctctccgtgctttgtcaggcagtccaggtttgcttcataaagagcgagaccgtcttcaaacagccctgcctgatacttttggacgatggacgacaggtggaccctgtaatgataaagcggcttagtcacgaacgccgcggtattcgcatatagaaggcatctgaagctgaaatattgatcttcgatgttttccagctcgtcgcggagcgggaaaacgagcttatgccgctcaatcagactccgcctgtagagcttgttccaggaaaagccgcttactttaccctttaacaaatccttcataaatgcctctttcggctttccttcatagttcttcccgatgtccgggcagaccgttttttcggtatcctgaatttcaacggcataatcacagatgacaagatcggcatcctcatccttcgctttttcatacatagactggcaatagtccggctcaatccagtcgtcggagtcgatgaatgccaagtactcgcctgacgccgcttcgatgcctttattgcggacagcgccgaggccctgattgtcctgctgaatcgttttaatgcgcccgtcctttcgggcgtaatgatcaatgatcttctggcttccgtctgttgaaccgtcattgacgataatgatttcaatatttttcaaggtctggctgatcagcgactgcaaacaattcggcaaaaaagcttctgtattataaacagcgaccagtagactaactgctggattttccaatgtgatgactcctttgacgaaatttttacaagacctaaaatgtccggtctttccgctattcaacgttcaaaaatcgttctgtacggcaataccgacgagtcgaacggcatgagcataaagctgtataagaagtaacagatcaaaatcaaaacataaagaagcgcgtttgatttcggttcaaaaatccgtacaaaataaggaacgagaatcagctgatagagcccgaaataaatgttgaacctcgcaaaaatgacatcctttgtcgccaaaattccgaacaggaaaccgatcagacaaaggtttacgatataatcgacttcgggccagcgctttctgagctgctccctgaagcaaaaggcaagtgcgagcgggagaagaagaacgatgattttaataacgttcatgccgtttgtattcttcatcagccattcttcataatgtccgtattgactgttttcaagcacgacaaggaatacggacagaaatttttgatacagaaaagtccccgccaaaaagacgagcatcaggcaccagaggacaggcgaccacgcttttcttctgacgatgaaataaaccggaatcatgatcaaagccgaagaatgaaaaagcgaacagatcagtacaacgatcatatagcgcaccagcttcccatcgatcagataccgcaccgcccaaaacagaatggccgccgccatgtattggcgaatgccgttaaacgaagcataatagtgaaacatgccgataaacagaaacatgctcaattcaaacggccttccatacacataaagcgtcttgacgatatagatataggtaatcgcggcaacgacggcaaacatgagcgccggatcggctgaaatctgatttaaaatccataagagtgcggtaaatcccgggtccgtcgacgacttgcctgttccgaaaccgaatatctcccaaatgctgttgtattttccggctaattcgtaaagcagcatatatgtgtggtaatccgttccgaccttgtatcttaagccggcaacgataatcaaagacgcgagcggaacgacggtgaggatcgcattcggacggtagcccgtcggcagcctgtgatcttccctgccgtacattttcgcaaaccatgaccagacgaaaacaatccccatattcaacatgtagacagccatacactcactgtccttctgctgcggagattgaatagatgtccatcagtctcgccaaatttgcttttgcatcatagcctctctcagcaaggcttctctctatttccggccatgcaggctttttcggctgagcagcacggctgatatcctcagcccaccgttcaaaaccggcatttaagctgagacgttgcagcaggccgagtcccaaatcggtttcttccgtaatgttgtctgatacaatgcaggggagccctgacgcttgcgcttcgaccagtacgaggggtagcccttcaaacaaagacggcatgacaaatacatcaaatgcctgcatgagagccgggatatcttcgacgacgccgagaaacagaatgtcgtcttttacaccgagagcagcggctttttcttccatctgtctgcgcagcggaccgtcacctgcgaacaccgcttgaaaaggtatgcccgatttcttgcaataagcggcaagcccgagcagaaacgcgtggtttttctgttcaaaaaaacggccgacatgcccgatcaccagtgcgtcttctttgataccgaagctctttttcgcattcgtttttgaaacgccgttcgcttctttgaaccggtcaagttcaatcccgttttgcaaaagatggaccgcgttttcacccatcttctttgcgccgaataaaaaacgcccggcatctttgccgcaagcgcacagagccgtagcactggagaaaatcaagcagcggaatgcaagaagctgccatgtatcccaaaaccgggggttaggcttccaggccgtgttgtgggaatggcagaccctgaccggaacgccggcgagcctggccgccaatgcggcaaagcccgtctgaaaatccgtatgagcgtgtacggcggcataaggccctttctcaaccaaaatccttctgatgtttttgatgtaggcgacaggacccgaccgaccgatgctcggtacataaaacacccggccgccgcgcgtgatgatctccgggtcgtaatcgcacgtttcttcccggtgggaaataaaatcaaattgaatatgccgcctgtctgtgtggcggtatatattcataatcatcgtctccgcgccgccgcggttcattccgcttacgatgtgaagcacccgttttggtctcacgcttccgtcattcatgttttacgacccctccgccttcattcatcaatcttcttttatgatatctgttcatgataaaaggaggcataagccccctgatgatgggtttcattgtataaatatagtccgatagcggcagcttcagccgtctgcaggcggcaaagacgataaacgcattatcaatcgagtagctgagctttctccttttaaacgccgattcgtcttcccttactttgtataaggcttcctgaaggttgtagcccgtgaagcccgcctcaaaaaaacgaagccacaaatcgacatcttccatccttcttgttctccggccgacccgatagccgtccagcgcctcgtagacgtcggctctcatcatgatcgtcgcatggcaaaacggcgtccctttcgccatgattctcggttctggagaggaaggaagcattctgacgcctctaatcccgttttcgtcgaaggccatcatgccgcttccgacgacatgataatgagattgcgattccaaaaacgcgacctgcttttcaaaccgcctcggcaaagagatgtcatctccgtcctggcgcgcgatatatttcccgccggcgtattggagacagtggtttaacgaggcagccagccgctgattcttctcgtttttgatcagcttaatcttatctgcgtaatgatcggcataccgcctggcaacagcatatgtcccgtctgtcgaagcatcgtcgcatataatcagttcccaatttttataggtttgatttaaaattgactcgatgctctctgcgatcgtgttctcacaattgtagactcccataatgacagaaactttcggcttttgaccccctatcatcctttcagcctcctttcaactgtttcgttatccataaaggaagagtaaatgcccgccatttctttgacggtgcgctgctgggaaaaagcggcggctgttcgtctccccgcgtctcccatcttttttcgcaaagaaggcagacggtacagctgcaatatccggtcgctgaacgttccggcgtctccctgcggaaccaaaaatccgttcacgccctcttgaatgacttcccggtgtccgcggttgtccgctgcaacggcgggctttcctgacgccattccttcaaggaggttcatgccgagcccttccctgatgcttgaggcgacagacacgtctgcaagctgaatccattcgtggatgtttttttgaaaaccggcaaacatgacgagcgaagaaacgcctttttgttcagcgtgatttcggtatttttgctccatctgcccttttcctgcaaacacgacctttaagttcggggctctgtcttttaaagcagccgccgtttcgatgagcaaggcctggtttttattcgcgttcagctccgcgggatatatgaggataaagtcgtcttctttgaaaccgtatgttttcctgagcagcattttctctgtttcactgacaggatgaaaccgctccgtatcgacgccgatcccgtggattttttccgtgcgcagcgcttttcgcaagccttttgcaaggacgaaatcttcttcattgatcgtaatcaggcaatcggtcaaagcggacagccctttttcaatcggataatacagcagccaattttttaaaggagcaccttggcaaaagtggaaaccgtgagcggtatagatcactttcgtcccctcttttctctgtttccgggccgcaagccttgccagcacgcctcccatcggcgtgtggcaatgaatgatgctgtaccggtgttcgtcaatgattcgcgccagctcccgataggcagcgatattgcttgcattcaaaggagaacgcctgatatcgatatcaaattttttatctgtatagggcagtgtcatatctccttttgcggcgatatgaacattccacccctgctctttaaaccattttaaatacgggaggtggaaggccttgaaatggtaatccacagtagcgcaaaacaaaaccgttcttgtcatgttcttccccctagtgcgctgtcaccagctttttctcgtgctggccgatcgctttgaacaagcgttctctcagctcgcggtctgacaaatacataaattcatccataaatgacttcagcaccgtccattcgacgtcgaccgccttgccgatatgaatcttcggaaaaacctgctctgccagcacttcattttgattcagcagctcttcgtacattttttctcccggccggatgcctgtaaattcgattttgatctgttctgtcgtatagccggaaagctggataagatttttggcgaggtcgacgattttgaccggttcgcccatatcgagcacgaatatctgtcttcctttggcaagcgcccccgcttgaataacgagccttgaagcttccggaatcgtcatgaagtacctcgtcatgtcctggtgtgtgacagtgaccgggccgcctttagcgatttgttttttgaaaatcggaatgacgcttcccctgctgccgagaacatttccgaagcggacggcgacaaatttggttttgctcgttttgccgagattcatgatcagcatttccgcgaaccgcttcgttgcccccatgatattggcagggttgaccgctttgtctgacgatatcaggacaaatgtctccacttcggtttcgtcggcggcctcagcgacgtttttcgtgccgaggatattgtttttgacagcttctttcgggcatttttccatcagcggtacatgcttgtgggcagctgcatgataaatgacattcggtttgtagcgttccatcagcaaaaacattttttctctgtcctgtatgtccgcgatttcgggataataggcgacatgctttccgaatttctccttcagttcaagcaggatcgaatggatgctgttttctccgtgcccgactaaaatgatcgatttcggtttaaatttgctgatttgccggcagatttccgagccgattgaacctccggccccagtcacaagtacgacgcggtccttgaccgtattggagatttcgctcgtatcgagctggacaggctcccttccaagcaaatcttctgctttgacatcgcgaagctggccgacaggatgtctgccaagcaaaatttcgtctattttcggcatgatttgcgttttgacacctgtttgcgcacacgccttgtacatttcctgcatctgagtgacgctcaaagatggaatggcgatgatgatccggtcgatattccattgccggaccgcctgcataatctgctctttcccgcctaagacgggcagacccatgatttcaagccggtatttcgttttgtcatcgtcgataaaggcgacgggcttaatgttcaattccggcttctgcacaagctgttttgcaatcaaactgccggcatagcccgctccgatgataagcgcccttagagatcctttgctttctttgttcacctgttccctgatgatgcgccacatcatccgcgatccgccgatcaaaatgagctggaacagccagcttaaacataaaagacgaaccggaacgttttgaaagaaaaacagctcgagggccgccgtcacaagatgggacaatgtaatcgatttaagcagcacatacaattcaccgatgcttgcatactcccatacttttttataaaggtggaagcaatgggcgaataaatgctgagcgccaagcagtatcagtgaagtcatcagcagcatttccgaagggtataaatcatatgatggcaaaattagctgatatccgataaagatggacagcaaaaccaagtacgaatcgagtgcggtaataatggaaagccttctccgatatgtcaatttcctacctcctaatgtatctttctagctgataggatctttcagggcaaaatcccatgagctaaaaagatacgggcgattttcaaatttaaaccgagcacgtaaattaataaagatgggcatttaacccgtcctcacgccccgccatcgacgacttgcgtctaaggcagacaggtagtctgcccacggtagagccgagtgcctccatcggtaaaggcaaggagacatcacctaaagcggctgcagccgcttcataagattacatggttgcgtaattatattggcgcgctttcttcactttccgcccgttcagcacggcgccgagcagttcgcttttggaagaattcagcgcgtcccgagacttgatcgcgttatcaagctttgtttttccgctgaggatgacaagaatgcttccatccacctgattcgccaatatttgcgcgtctgcgaccggcaaaagcggcggcgaatcaaggatgactaaatcgtattggtcgtacgcttccgcaagcaggtcctccatcgcctgcgacgacaaaagctcggacggattcggaggaatcggaccgcttgtcagcacatggagattttccgcctggctttgctggacgacattttccagcgtcgattttttcattaatacatttgtgacgcctgaatggttatcgagctcaaaaattttatggatcgtcggctttcttaaatctgcgtcgatcaaaaggacctttttttcctgttgcgaaaatacgatcgccaagtttgaagccgagaatgatttgccttctcccggcaggcccgatgtaatgagcaatgacttgaacggcttctcaaatgatgaaaactcaatgttcgtcctgatcgtccgatactgttcgacgatcggcgtgttcggctgatgcaatgcgacaagcgccgattgatatttgcgagagcgtttttttctaatacccaagcggctcactccttcctgcttttacgcggatattcatatcggggtccccgcgaaacagactttttttatgcttcatttgctcaatacttcccaaataaatgaatcccgcttccttttcgacttgagacggtcttgcaaccgtatcatcgataaagtccaaaaagaacgccaaagcgattccggtcattaatgcggcgccgaatgccagcaaaatattcattttgtaattcggtctgacaggtgtcggcgaatcgactatttcggcttttgacaggacggttacccgatcggtgttcataatttgcttaatctcttttttgagcaccgcagttaaagtgttcgctatatcggccgcccgtttctgattttcatcttggaccgaaatatttataatctcagattcgctttcactgctcgttgcaattttttcacccaaccggcccgcagagtaaggtaaatcaagctctctcttgacttgctccaaaatcaccgggtttttcaaaagcgcttggaatgtccgtgtgtattgaagattgatttgaatatcgctgtatgtggcgctcccctttttctcccctacttgatgcaccaagatctgcgtcgatgcctgatagacaggtgtcagcacatagaactgaatgattccggtcgtcaatgttacacctattgtcaaaacgagaataagaaccgttctttttcgcaagattgcaatcagttctctaaaatcaatattttctttcatgcttgactgcctcctcaggaatgccgtttgttaatgattggattataaaagaaaaaatttgaattgaaaaatgctgaatttagctatatagttctttttagagaacaaattcgttcgttttcttttattttctgtcgatatcttaaatttttgaattttataaagaacaaattatttcttataatgaacaggaaagcgttttatatgaatggcaaggggaaggggaggattcagtatgatcggaagagtcatccgaatgtacagaaagagaaaaggctactccattaaccagcttgctgatatagcaggcgtatcaaaatcatatttaagcaaaattgaacgcggcgttcacagaaatccgtcagtcgaattcctgaaaaaaatctcccgggcgctgaaagtcgaattaaaggaattgtttgataccgaagtgatcctttatcgccggactgagcaggaagatgagtggagaacccatcttgtacaggccgtgcaggccgggatgaaccaggaagaactgtttcaattcacacatcgcctcaagcagaaaaagaaagaacgggcgctttatcgaaacagagagctgacccgggcgaatatcgacgaatggagagcccttatgctggaggccaaagaaatgggactgaccgtcaaagaagtagaagcgtttttgatgaggacaaaaaatcattaatttatcctgcattcatattttttttagaagaaaacgggtgcttttgacttgaaccattcatccggatataaatccacatttccatttcaacttgccgaaaattcggaataatcgcattaatagatatcgcccgatcatgatgatccatgtctatagctccgttttcacctgtttgccttattttttcatggcagtctttaagagactttttgcttatgtttatatataaatgaagaaactcggattttgacctttcgcatcatcctccaatgcatgcaaagtctgtgtcttgcggcttatatcaagacctttgtcacggcccgattccttgaatggggacggagcgtttttgttgaatccgcgctggctgttcgttaagatgaataaaatggaagaaggagatgaaatcatgaaagtattagtgctcgcatttcatccgaatatggagcagtcagttgtgaacagagcatttgcagacacattgaaaggcgcaccgggcattacatttcgcgacctttatcaggaatatcctgacgaggccattgatgtggaaaaagaacaaaaactttgtgaagaacacgatcggatcgtcttccagtttccgctttattggtacagctcgccgcctctcttaaaaaaatggctggaccacgttcttctctacggctgggcatacggaacaaacggcacagcgcttcgcggcaaagaattcatggtcgctgtatcggcgggcgctcccgaagaagcctatcaggccggcgggtcaaatcattatgcgatcagcgaactgttacgcccttttcaggcgacaagcaacttcatcggtactacataccttccgccttacgtcttctatcaagcgggcacggccggaaaaagcgagcttgctgaaggtgcgacacaatacagggagcatgtgctgaagtcattttaaatgagaaaagcccggcttatgagccgggcttgttccttatacttgaatctgtttcacttttcccaataggaatagataatttaaaatggcaatgatgatcaaagcagccgaaaaaaggagcgccggcacgaaagaacccgttgcgccaacgatgaagccggtaatgatgggtccgaccactccgcccatattagagactgtattttgaataccggcaaccatcgacgtcatatttttcggagccacatcccccggaagcgcccagacttgggacgcggcgacagtcgttcccgatttcgctacacaaagaaggatgacagccaggatagcggaatctgcaaaagcggcaaaaccgatgcacgaagccatgacaagcccgataattaaaaacagtttccggacggctgtcagcgacagttttccctttgcatatatccggtcggacatccatccggctccgacttcgacgaccattgcagtcaaaagcgggagagacgccataatccccatctcgattaaatccatgcccctttctttaacaaggtatgtcggcagccatgtgataaagaagtaagaattataattgatcatgaaaaatccaatgcacatcgcccatatgttgcgatatttgaatagctgataccacttcagcggctggccgccgcccgtttcttccatgtgagcctgcccttcccgaatatgggccagttccgcctcattgacgcgcttatgatctgcgggattctccttaaagaaaatcatccagacaattccccacgcgacaccgacaagtccgatcaaaagaaacgtcagtttccagtcaaagaccgctatcatccaggcgatcaaaggcattgcaacagctccgccaaactttgacccgctgtcaaaaattccggctactgtcgccctttcttttttcggaaaccatttggcggcaatccccgcattgctcggatatgcagcagcctctccgactcccagtgcgacccgcagcccgagcagggatttgaagcctgtcgcaagacccgtcagcgccgtagcaacagaccaccaaacaaccgcaaaaccgagcgtttttttctggccgtacttgtcggccgcccagcctgaaggcagctgcagcaaagcgtacgaccagaagaaaccggacatgatgattcccatttggccgggtgtcaagttgaactcctcggtaatatagggagcggcagccgaaagaactgtccggtcaatataattgatggcaatcgcagcccacatcataaacgcgacaacccagcgtacatttgactttttttgaatcgggtgattcaacatgttatccacctcatcccatttgtagaaaacgctttcaaatcatgatgcagggcatgaatgaaaacacattcacaacccgttgacgacaaactccggtttttgtttgtcgatcagtacactagcgatgtttttgacgcatatcatgccaaggttctgtacggcatctcgggtataccccgcgatatgcggcacggcgataaaacggtccagctcaaagagagggtgctgcttcagcggttcggtttgatacacgtcaagcgcagctccagcgatgcccccgctcgccaaggcatcatataacgcacactcggacacgatgcctccccttgaagcattgatcagataagccgtttctttcatagcggctaattctttttcaccgatcatgttttccgtttcggctgtgagcggcatatgaagagtgataaagtcgcattctttcaagagctgatcaagctctgtaaaatggatgtgatgatcggctgcgaatgcacgatcaggaaacacatcataggctaaaacagtcatattgaagccttgcgcccgtttggcgacttcttttccgatcatgccaagtccgacgatgccgagtgttttgccgtaaacgtcagatccaaaaatcctcggccattttcccagctttgtctccctgtcggctgcaggaatctgtcttgcagccgacagcatgagaccgaatacaaaatcggcgactgcatgcttgttggcgttgggggcattcgtcacccagacgttgcgctctttcgcagcgtgcagatcgatattgtcgacaccgacgccatgtttgcagacaatttttaaagaagggagacgatccaggacatacggcgtaatctggttaaacgccacgatcgcggcatccgctccttctgctgcttcaataaactgctcctcggttatatctgcaggaaggcgttccagcgacatgccctttttttccaaaaacaagacgggatcgtctgagtatttcgcaaatgacggtgatgtacatacgactttcataagatgcaccaaccttctttcatttttctacgatttgggcgccagctcagcggctgaccgcaaagcagcgagcatgcttctttcatcggctttgttctgccccgcaatgtcaaatgcggttccgtggtcgacagaggtgcgtatgatcccgccgtttaatccgactgtaatgttgacgccctcttccaacccgaggactttgaccggtatatgcccctggtcgtggtagcaggctacgacaaggtcaacatctcctctgacagctttgtaaaacagcgtgtctgcggggtatgggccgccggcatcgattccctcagctgccgcctgctcaatccccggaagcaattgccgttcttcctcgccgcttccaaacaggccgttttcccctgcatgggggttgattccgcaaacagcaattttcggctgttcgaatccggctcttgtcaatgtatcatgtgcgagacggatgactttataggtccgctccggcgtaatcgactgaatcgcctcgatcagcccttgatgcgttgtcaggtgaatcaccttcagctttggcgaagccagcatcatgctgtagtctgttgtattcgttaaatgagcgagaatttccgtatgccccgggtatcggtgtccgcctttatgcagcgcctccttatttaacggcgctgtgcaaatcgcttgaatacagccttttttagcgagctcaaccgcttttttcacgaaatggaaagcggcgtttccagcttcagccgatacctttccgacaggcaggttttcaggcagcagttcaatatcgagacaatcgatctttccatgtacaaaaccgccctcgttcggatgcccgaccttgttaataacaacctctgatccgatttggaaggcggcttttgtcagcattttcatatcgccgatgacgagcggcctgcacatatcatacacttcgcgggacgtgagggcttttacgataatttccggaccgacgcctgccgcgtcgcccattgtaatgccgataaccggtttcttcattgtttatcctccttgtagcttgattgccgcacttgccatcaccgaacgcgagccaaaatttccggcctttgtcacaatgtacaattcttcaccggctgctcccagcggaatgccgggctctacttcgtccagcaatcgtatctcatgaatccgaagctgatgcagcacttgatatgccgtgtcacctccggttaagaacagccgtttcacatgaaaagcttgaatcagctcgcccgcaaattcgccaagtgcaccggacaccgcattgctcgtttgaactggggtgagtccgcggctttcaccaatcttctgtgtctctgccgcattgtctgaggtgcagaggacgatgtgtttcgaacggcgccggacgtccgccgccctttccttcagccgttcgaactcgtttcttttctcagctccgccgcacagcacgcgctctgatctcatttcaattttttcagccgcacgtccggcgaatagttcgtgaagctgttccctccccgtccgactcatgcttccgacgacaaacatgatcggctggtcggaagacggaacggtttgaccgagctccctttctttcagattgaacgctttgggcagacagctcatcaagcctgccgaaccggccaaaatgatagaatacggcaaactctccagaataagcgccagcccctgcagatcggattcgtgaaccgaatcggccgtcacatatgaaatcccctccgcccgaaagcgttccagcttgttgcggacatgcccgtgtccgcggcggatgtcttcatatgataaatgcccgctcttatttcgagtctgcttttctattaatctttgaatattcgactcggctacaggcgttttcggatcgtttgccgcttcggtttcttcaagctttacgccgttcacataatggatgccgccgataacctggcgtccgttttgagggtagccgggagcgatcagcacaaagtccggctgaaacacttcgtacatcgcttgaagctcggctccgatatttcctctcatcgtgctgtcgatttttttgtagacgatatcaaacgattgccgggagatgtgttcactgatgtttttcacagtcgccttcgcctctgcggctggcagcgatctgctgtccgtattgaaaataacgacgccttccgtttcccgtctggtgaattcggcgtcgagtttgacggaaacatccatcccgtaatgaacaagctgaccgccgcagtcgttcgctcccgtcaaatcatccgcgatgattgcaattttcaaatgtcttcatcctttagttgattagttttcgatagatgtcttttatattttccagactgagcggtttcggattgttatgaagcaggcgcgtcacttttgaagctgagtcggctaaatcgtccacgtcgcttgcggttacgccgaacgcttttaaatcctgaggaatattcagccgctccgtccactctcttattttctgcacaacggcctcagccgcttgttcggcggtcaaatcagatgcaacgattcccattgtttctgccgcaagagacagccgttctgtaatggcatccatattaaactccatcacatgcggaaggagcatcgaattggcgacaccgtgggaaattcggtatttccccccaagcggataggcgagggcgtgaacggcagcagtaccggcagccgtcagcgccattccgccatacgtcgaaccgagcagcatgttttctctcgcttgtatcgatgaaccgttttcatatgcttccacaatacttgccgaaatcaatctgatggattctaaagcgaacatatcgctgatcgggtttgctttcgtcgaaatgaacgattcaagcgaatgagtgaatgcatccattccggtagccgccgtaatcggttttggcaatccaagggtgatgaccgggtcaagaatgacaagtttcggcaaaagaagcggactgacgatgccgactttcaattcctcttctggaagggtaacgatcgcgttcggcgtcacctctgcgcccgtccccgaagtactcggaatcagcacggtcgggattcccggcttttcgaccaaatctgtcccgagcagctcctcgaccttttttgaattcgtttgcagcacggacaatattttcgttccgtccaaaacgctgcctccgccgattccgatgagaatgtcgtatcgtttctcacggatgcctctaaatacgtcttcaatattttgtacggtcggttccggcaatatggctgtgcaaacatctgactgaatgccgatctctgtaagctgagcctgtacctctccgatcgcgccgagcttgacgatcgacggctgggtaataatcagcgccctgtccgccttcggtacaatcgttcgcacatgatctttcagccggcggatggaatgttcacctgcaacgatatgaccggctgtccgaaattgataattcgctggcattcttgaaacctccctattttgattgataggaagcaaccattttttcgacctccaaaagcgccggaccggtcagttctttgacgggcgctttcggcgggcctacagggatcgaataaagctcaaccgcttttttcagtgccgccgggatcgtacctaaacgaaacgtatcgcgaagcggctgaagctccatctgggcagcctccgccttttcagtctcaccctctgcccaatggtggtaaatagacgttacgatatccggaagcatatttgctgttgctgcgactgctcccgctcctcccgcttgaagcgttttcaatatgagcgaatcggtgcctgcaaaaacggaaaagtcgtcatttttcgtctgctcgatatactgttgtatgttttcaaagtttccgctgctgtccttaattccaacgatattgtccacttttgcaagctctgccactgtttctggttctaaatggaaacctgtttttgaagggatattgtacaaaaggatcggaagtgaaacggatgccgcgattgttttataatgcaccgccgcttcttcctgtgtcggtggaataaagaatggcgtgatgaccgacagcgcatctgctccaagcctctctatttccttagaaagccagatcgcttcttctgtgctgtttcctccgctccctaccatgacgggaacgcgttcggccgtttcttgaatgatgatttctgcaactttcagcttgtcttcgatgttgaacatatgaaattccccgttggtacccaacgcaaaaagcccgtgtacatgagcatcgatcaaatggtttgtcagctgtttcaatgccgattcatcaatgctttgatcttttgtgagcggtgtcagcatagcaggataaatcccctttggtacgaatcccatgattgcctccccttcctataaagcgttttcaaaaatgattatatacataaatgtttcaataatcaacggtatttatctaaatatttttatttgttgttgcatattaaaacaaaaaataagacaccggtttagccggtgtcttatcaatctgacgatttcaattttctccaaagcgtcgttctgttgatgccgagcctttccgctgttcttgtttgattgttcccttcttcggcatagatcttttgaatgatccttttttcgatctcttcaagcgttccggataaatcgatgtcttctctttcttcctcgttcaagcggctcaggacccgttcggcgtcagtcttctcgatatatacgccctgcgcttcaaggacacagttttggaccgtttttctcaattggctgaggttgcccggccatttcgcttcttcaagcagaacaccagcttcgtttcgaaagccgacgatttgtttgccgaatgcctcattgctttccgcaataaacagataagccagatgcaaaatatcctcttttctttcggaaagagggggaacgtccagttccaaatgacaaagcgcatcatataaatcgcttgaaaattcctcggcgcgcctgcgggaagaagaaacgatcagcctcggcccatcatacggttcgctgatccgcctgagtaaaagccgttgcgaggacggcggcatgcgatcgacttgtttgatgtatagcgttcctctccctgaaaagaattcttcgctttcacaagcctgttcccattctgcttcagacagcaaaccggcatcgatttttcgaaacggctcatgcttgtcctcccccttcatatggatcagcccggccaagctctctttccctgagccgggcgctccattgatccatacgggttcccgccttgccgagaacaactctgcttttttcagcaccttctgcatcgtttcgttccttgatgtttccatataactcatccgcaaaggagaaagaatcgttgccccgggcaaagaagaaacgcgaacatcttttgcattttccgcggtaaatacggtcaatgcctcgtctgatgcgaaaaacctgcgccccgtgatattccatgtccgcccatgctttcggagtctaaaatggatgactcccttcttttccgattccccgatcagctcttccagattatccagcaagccgatatgttcggcaaatacgccgttttgaaaaaccggccgcaatgtcttgttgtatactgcataaccggtctcggccttttgtaaaatgtgatacggcacagcgtacttctgcttgatgctctctaaaaaggaatacagttttttagcgtatgcaaaagctttggcaatgctttcttttccggatgtcaaaagcagtccgtttaaaccgagctgctctgctttctcaattgtgatcacatcgccgataatgatctgatagccctgttctttgagctgaagaagcaccggttcaacatcgcgttcgtctgatacggtgcaggcgtcgatccgaatatccaaaatttcgcacaccgccgatgcgccgtcggcaatcatcggaaatccgacaattgccgccttgccgggatagcccttggcaagcgtaagcacacgcagcatatcgtatcccgacacttcgatatccacaaccggaatggaaacttctcgctggatcagctcagcggttccacctctgctgataatcaaatcagtcccgtttgcttccgcttgtttcgccagctccacgcccttctctaaatctccggaagccgcctcgaattcaaaattctcgccgcctgccacttgaaccatcagctctttcagtccttcatatggagcaattgccatcactttcatattcgatcaccttttgttgcaaatttaaacacattatcactataccaaaaggcagaaatatttggaaccgcaaaacgaaggcaaaataaaaaggctccattacggaagccatttcccccccccatgcggccatctctttaaaaatgctgtggaactctttacctttttctgttaatttatattctacagtaacaggaaccgttgggaacaccttccgggaaatcatgccgctttcttcaagatgtcttaatgtgtcagttaatcctttcgtgttgacgtttcccaagttccttctgagctcgttgaatcgccgcttgccctgaatgagttcggcgagaactaaaaatgaccatttaccagagaaaattttcaatacatcctgaattaaagaagagcattctttatgatcgacagctgaattcatagcaattcctccattgcctcatagccaattttgacttgatcctaccatatggacatcagagcattcaagaaaacgatcttacggtttatttttataaagcatatataaaaaaattgcgttcttgtggagccttccggcggttgctatggttatatcaaaaggaggaaaaacatgaaaaaacaatacgagtctttattcaccccgtttacttttaaaaacggaatccaattgaaaaataggatcatcatgccgccaatggggcattcatcctcattgccgggaggattcatttctgacgacgaactggtctattatgccgcgcgggcgacagaagtcgggatggtcatcacatctgcgacaaccgtacagcccggaaccggatttccaggcatccccggagctgagaacgatgatcaaatccctggactaacccggcttgcagccactttaaagaaacacggagcaaaagcaatcctccagctcttccatcctggagccaaaggtatagagcggacggtcagcgccagcgccgtcgctccgaatcaaccgaatgcaccggtgccgagggcgctgtctgagcaagaaattcaagaccttatccattctttcggccaggcggcgcgaagagcgatagaagccgggtttgacggagtcgaaattcacggcgcaaacgggtttctcatccatcagttcttctctccttattacaaccggcgcaatgacagctggggcggcactttagagaaacggatgagatttccgcttcagattatagaagaaatcagacgcgtagcggatagctgccataagccgtcctttatcatcggctacaagttttcgcccgaagagccggaaacacctggaatcacaatggatgaaacgttgtctttcgtcaatgtactgcgggagcaaggattggattacctgcacgtatcactggttgatttccggtccttgccgcgcaggggtgcagacagatcccgcgcaaggatggaactgatcaaagaagccgtccaagaccgtctcccactgatcggagccgggcaagtacacacaccggaagacgcccttcaagcgctggaaacaggagccgatctcatcggaatcgggcggggtctcctgatggatccggagtggctacaaaaagttcgagccggaaaagaggacgatattcaaacaaccctgtcaagacatgatcagcggaagctcgcaattccagatgccttttgggaaagtataccgatgtatattgatttcagcgattgacgattcccgcttatacagactatagattcatataaaaaaggtgtctttccgcttaaaatcggtgtcatttgcataaaaatgtataggaaaagaggaacttagaccagttgagtcccagagatgagtatattagaatgatggtaattcaatatcgtcgggattgttactgtctaagcaggcaagacctaaaatgtgtgaagggcgaaatctatcttttgcctatatgaacttgcacattttaggtcttttttctgttcttcaggacaatgccgcagttaggagggatgattgggaacgttcatgttgtcagaagcaatctattacatattgaaaaagggaggaaatattgatgaacatcaaaaacattgctaaaaaagcgtcagccttaaccgttgctgcggcactgctggccggaggtgcgccgcaaacctttgcaaaagaaacgcaggattacaagaaaagctacggattttctcatatcacaagacatgacatgctgaaaattcccgagcagcaaaagagcgaacaatttaaagttcctcaattcgatccgaaaacaatcaaaaacatcccttctgcaaaagggtataacaaaaatggagagctgatcgatttagacgtatgggacagctggccgctgcaaaatgccgacgggacggttgctacataccacggctacaatcttgttttcgcgctggcgggcgatccgaaagacgtcgatgacacatccatctatttgttctatcaaaagaaaggcgaaacttctatcgacagctggaaaaacgccggcagagtgtttaaagacagcgacaaatttgttccagacgatccgtacctcaaacatcaaacacaggaatggtcaggttctgccacgctgacaaaagacggaaaagtccgactgttttacacagctttttccggcacgcaatacggcaagcagacgctgacaacagctcaggtcaatttctctcagccggattcggacacgctcaaaattgacggtgtagaagatcataaatcggtctttgacggcgccgacggcacggtataccaaaacgttcagcaattcattgacgaaggaaactacagctccggcgacaaccatacgatgagagacccgcattatgtggaagaccgcggccataaatatctcgtatttgaagccaatacgggaacaaaaaccggctatcaaggagaagactccctattcaacagagcctactacgggggcagcaagaagttctttaaagaagaaagcagcaagctgctgcaaggtgcgaacaaaaagaacgcttcgctggctaacggcgctctcggaatcatcgaattaaataacgattatacactgaaaaaagtcatgaagcctttgatcgcctccaatacggtgacagatgaaatcgaacgggccaacctcttcaaaatgaatggaaaatggtatctgttcacagattcaagaggatcaaaaatgacaattgacggcatcggttcaaaagacatttatatgctcggctatgtatcaggttcattaaccggaccattcaagcctttaaacaaatccggacttgttttgcatatggaccaggattacaatgacatcacgtttacttattcgcactttgccgtaccgcagaaaaaaggcgacgaagtcgtcattacaagctacatcacaaacagagggatttcgaacgagcatcacgccacgtttgcaccaagctttttgctgaagatcaaaggatcaaaaacatccgttgtcaaaaacagcatccttgaacagggacaactaacggtaaacaaataaaacgaacgaaggaaaatgccggtgaacatcggcattttctttcgtatgtcatcttagaataaagcggggaattttcttgaagaaggcagtatataagcggatcagcattttaactgtttgtcttggaatcttcatcatgatatttctttcagtccgggaaacagaaaaaaagggagaatctccggatacaccggaatatcgtgcagctttccatttgacaacccctgacaaatggaaaaacgaccctcaaaaacccgtctatttcaatggagaatatcattactactacctctataaccgagactatccggacggcaatggaacagagtggcgccacgcagtatcagatgatctcgtccactggcaggataaaggggttgccattccgaaatatacgaataaaaatggcgatccctggtccggttctgtcgttgtcgactcaaaaaacacagccggcttcggcaaagggacgatcgtggcggttatgactcagccgtcggccaatgacgggaaggaagagcaatttttatggtacagccaaaatggaggaaaaacatttaaaccttacggtgaagagccggtcttgcctaatccgggcaccgtcgatttcagagatccgaaagtgatctgggatgaacaggatgataaatgggtgatggcgctggctgaaggaacgaaagtcggcttttacgaatcgcaaaaccttaaggaatggcgttatacaggtagttttcaaacagaaaatatcggcatcatcgaatgtccggatctgtataagatgcgggcggatgacggaacatataaatgggttcttggagcaagcgccaacgggaaagggaccggcaagccgaatacttatgcatactggacaggcagcttcaacggcaacgaatttacggcagacgaagcagaaccccagtggcttgattacggatttgactggtatgcgggcgtgacatttgaggacggcgaaacgaacgatccgtacgagaaacgctatgctttggcgtggatgaataactgggattatgcaaaccggacgccaacatggaaagacggttttaacggaaccgattcgatcgtccggcaaattcggcttaaacataaaggcggagatcgatacagcctcgcctctcatccaatcgatcaattggatgaattaaccgaatctgccgatgaattggatcgcatcgaagtgaacggatcaaaaacgctgcagattaaggggaatacctatcagcttgaggcagatatctcttgggacgaccttaaaaatgcgggtttcaggctcagagaatccgcggaccgaaaacgccatatcgatgttggaatttcggctgaaggcggatattcttatgtgaacagaggatttacgggacagcctgacagcacccgcacctatttggaaagcaaagcaccgtttgatccggaaaaaaaacgggtccatttcacaattatcgtagatcaaaacactgtcgaagcatttattgatgacggcgaaacgacgcattcaaaccttgcatttcccgacatgaatgatacaggcatcacactctttagcgaaaatggaacggccgtctttgaaaatcttaagatcaaacatttgcgttcaatccgcgattaaacaacacgggcggccaagcggccgcctttttttgtgaaagcgaatcattacgctcactctccgaatacgactaaagtgttcacaaaaaaacaagggcggcaaatgccaaacccttgtcttgaaaacgcgctcggagggattcgaacccccggcagacgtggtaccggaaacctaacccgattttatatccgttcgagcatccgcaaccctttacggacacttattgcgattaacggtcccgaaattaaggacgcggacaccgcatgtacttgtccgtattatataccgtcaattcttcgggcgtcaatagccccgacaacaaaaaaagcgccccatccgattaaggacggggccagacgatctattcagtttttccgaagcctttgacgtaggttaatagatacgacagtgcgagcagtatgccgcctttatataacggatcaacgatgtcagaaacgatctgcatcattcgtattggatcaggagatctgccttccggtacgtattgattcgcgttaagatacagcgtactttcgatgttcgtcaatatgccggccacaattacgatccagccgagaacaaacaatattttcggaaatttttctttcattgatatcccgccttcatatttgattagtccgtatcctattatcggttaaacggtgggaattttgaactattcgcgaaaattgtcgaacgaaagtgcggcctagacagccctaaatttaactcttttgtccaagaaaatgtgactgtatcgcgatatcttgggtaaatttactatcaatgtgcggataggttgcggaagcaattgtttctccgtcaatttgaacggccacattgcggttctgccttacgccctggtcaatcgaacgtaatattccgatgacctcgctcgatattccgagttctcctccaactgccgccgtgtgtccagcgtcaatcatccgcattaaattcgcctgctgtgcttccgtcaggaccatttcgttccgcagtgcccggatgtcgacttcgtggctcatcggagcattttcgaacttagacgcaaggcctccggtgtggagcttgttgatctgaccgcgtccgacgatgccgccgatatgatacggagtttcctttccgcctttaccgtgcgtcttcttgaatgtctccgcgctctcttcgatttccgttccgtccatgctgtaggtgacgtggatctttttactgatccttcgcgccagcttttcgttcatattttcggcttctttagtgattttctcgacttgattcaaagcagatttaagttgcgaaatttctttatcgacagcctttactgaatcgcgatatttcttcgtctttttatctgcctcagacgtgttattttcgagtttgaattgcacgtcttgcagacgcgaaagttccttcctcagaacgtcaacgccttcgccttttttcgcgttcaaaccgacttgttgcagctcaatatcaatcaatttctggttaatatccttcagtttgccgagctctttttgtacttcacctaagctttctcgctttgtctgtagattgtcgaggtttgcgacgagttgttcccgcaatttattgagcgtcgcttcttcggcggctaaattaatttcggcttggtactgcgctttttcgttaccttctgcttttgctgagttaagttcgtcagttacgtcctttactttttgcgtttgatcagcaatcttcccttctagttctgctcgctctccatctaattttttaatatctgttttaagattctgctgtttttgaaggtattcagcttctttgctctgagctgtagctttttgtttttctaattcagtccgcaattcttccgccttagccgcactcaactttttgacggcctcggtgtttttcgcgaaagcattgccctgctcgctaatagccgcgtttgtttcaggcgctttcttaacgatgtcgtcattcagtttcagaaaacggtcaaactccgcatttgtaagcccggaccgctcctttaggttcgcctgctcgtctttaagacgtttgataacctctggatctgtctcggttttcagccgatcatttaaatcgagataatgagcaaactcatccgcagtcagcttcgtttttgattgaagtttatcgaattcagatgcgaccttatcaagagactcgatctctttctgcttcgtctccgcagcctccaaactaacggtgttcattgcgtcataactatttttaacgccgatgagtaagccgccgagaagagaaagagccgtaatcgtcagcccaaccggccccaacgttaagcttttcagcgcaactccaagtttgacaaccgtcgacgctacgagcgcaatcgccgccgctgtcccgaccatttccagaccagtcgtaatgatccccggattcagtttgttaaggaaatcgagtattttcgttccctcgtctacaatttttcggaaagtaggcaaaaactcgttaccgatcttgatgccgagcccatcgagcgcacttttaaacttttcgaaggagcctttcaggttatccatttgcgtcttggctacacgatcagccgtacccccagcgttccttaaagcgtctgaataatcgcgaagccctttttcaccaacaccaagcaacgttacaaatccggacgccgcttccgttctgacgagctgagccgctgttgccgttttctgtgcgtctgacattccttcgagattcttcgaaatgtatccgatcaattccggaagcgattttaagtttccgttggcgtcttccaattcgagattgtactttttgaccgcttttgccgtctgacctaccggatttgacaaatgcaatagcgtcgccctcagcgccgtacctgccatcgatccctgaataccggcgtctgacattttcgcgacagctgcggccgtatcttctatcgaataacctagtccgtttgcgaccggggccacgtatttcatggcatcgcccaattggccgagatctgtattcgctgtcgtcatcgctttaacaagcacgtcgaccgcatgtccggactcttccgctttgattccgaagcccgtcatgatgttcgaaacgatatcggctgaacgtccgaggctttcgttagacgcagacgccaggttaaggacggccggcaatgatccgacttgttcctttacactaaaacccaaatgttatggtagccgtttaaactacctctccgcgtttccacggagtatcggactatatcttcacgtaaattacgtgtcaggcgctcgtgggggtttcgactgttctagcctactccccctagtctctacacctttatcgtatccctacgacacttggctcggagttgacttagcgaggtctataaattcggcaagttgagtaccgttgtttttcgtatacccatacttgtcatggaaagctttgtggcagacattacaaagcgttataccattatttaaatctgtctggagatcaggatgctctgagtaatttagaacgtgatgagcaacaaggttaccgcccttgctatcgccgcaacatttgcaggtatacgaatctctctcatatacatccgctctccattttaaatactcagggtatttcctgttcacaagtcgatcttcttctgatagagaagggttccatcttggatgaccactccctgttctcaaaagagcttggtgtttattagcgcagggacgagagcagtagtaatgggttttcccaatcatctgactctcccaattataaaaatctttcccacaacaaaaacacgagtaccgtttcttcggcacccgcttccttgcacgtttattaatatttgaaagataacaatccctgctacagtagactgtcttcgacttgatctcagattttttcctagtaaaagatttgccacaaccattacacttgcactctactaaattcataataaccagcccctaacttaaattagtggcctcgccgtagtgttctccgaattcacctgattttagatgacccgctatgttaagccatcgcgaggtattgaaggccctccgccgcctctaccgctgtaaatttcgtttcagcgcccatcttagacgcgatgttctttaaatcttcgaattcctgaccggtcgcgccgctgatcgccttgacgttcgacatggccgcttcgaaatctgcagcagtcttaacggacgctccgatgccggcgactaccgcaccaccaacggccagcgacgccttttgtacgagtcccatctgtttcgaaagattttcggacgatcgccccatttgcgtcatatcgttccgagcctgctgtgatctgcgcgaccaatcggacatgtcgagaatcaaacgggcacgtatttctccgactgttgcggcactcattcttcagtacctacctgtgtccaataaatgaaaagcagaatttcttgagggctatattgatttagagtttctgtggctgccaatatctcagcctcttgttctgtggtgaatgagaaatttccggctatcactgcgtctttcatccagtcaataaccccaagcgctttggcaactttgttagcttcctcttccgttctgaacggtgtttttacctttaccatacaattcgctccttttcgttgaaataaaaaaaaggcgccgattaaatggcgcccaaaaatgaggaggtttgctccgaaacggccatgtcagaaaccgtttcatcatcgcaagagtcgtattcagtttcgttcgtttatcattctgtcaaaatactgatgcggcttgttggcgtacatggccgtctctggcccaagcaattccttaatcgcgttatggtgtacgccaccatccagtaacaggtcgctgtttttcccggctgtagcaagccctttaagtgtttcagcacgtttctgctcctcagtcatagatttcactttgatgtgttcgtaaatttcgtgcaatttaactttctcggcggcagatccgtcttttacaatagaggcggccatttcatagaattcagactgtagctgttttgccagataagggtctgtagtctcctccacgaacattttcaagctctctattcctcgctctggattcggcgcaagaagaagggatgttttcaggtctgccagcttttgattgaacgttgcaacctctgtttcttccggctgcactgggtcttctaggagaatttttgtcgcaagatcaatcgttttatcagccgcctccgtagctttatcttttatcttcatcatctcgcccagaaatatatcccggtatctctggtttagtttttctttctctatctgcttaccttcatttgacaacatcctgtcattagttatctgggatatctcttcacgatagctcgttttggcttctaatacgatatcccgggctctttttcgagtagtttccatttgttcgtagctctctcgcatctcttcgaatttagtcattcaatattccccctgtttttcagttcttgcggccttctcattggccgataattctttttcaaattcatctgcgtccatgacgtcttttccgcattcaatcattgcattttttgcaccatattcgacagcgcaatccattgcacggttgaaaagctcccggacgtatccaatttcagaagagtacacgtttttgaccgttgcaagaaacaacaattcgccgtctatgttgcgtatttcgtatctgccgccagcacaatcgagttttatgctcgcatcctcgcctgggaacaaaaaagaccgctgctccccgtctttgctttcgcgaagataggaaacaccggccggtccgtatggtccgtagtattcggtttcggttacaacgcagaacatgccggttcctccttttcatagacgaccttcgcttcttcttcgtaagctcggcattctagcaccgcccgcgagacgtttaggtcacgaatgcggccggatgatcggcggatgatttctcccgtttctgctctaactgtgatcgcctctctcggtttcacatagataaatacgtcatacaagcaaataccccctaaaagtaggtgtaatgaacagattttcgtttaaaatgacacaaaaacagccctcgaaatctgatcctaataggaatggtcgtggcgacataaaaaccgcttaaatccttcgatttccttaaaaacttgatacgcgaacatcgaacattctctcggctgcgcggcgctgttcaatcggaattttaaactggacgcccacgagacggtcgtttttaaaatagtcagcagcgatgatccaatcctttttatatcgcttcacgcgccgaatcaattccttgtcttctgtataaccgcatagccaccctttgccgaacttccacagatcattatttgtcatcataagaacctccacataaaaagacaccctccgccctggtaacgagcattatcggatgtcttgttaaagttatttatttgaacagtacctttacggagtctaactcttttgctggaccaccaaaaacaacgttaggatttacaaccactatcttttttcttttgtcgttaggatcgggcggcaaccaaaaaaccggcttaccgttcaggttaatactctctaaggtctgtcttagtttattggaatctttataatcaagtaaggcggctagtttatctaagtgcattttgttaagtcgttccgtgtccgtctcatctggattaaaacatatgatatttgttttcagattcaaaaacggaagaaccatatagacaatagataacttttttgccgcccggccgctataattctcgtatagctctcggattgtctttcggtataactttattcgggaagtttccgcaggttttcctcggacttttccgcgatggaatagaaaaggagtcaactcgataacgccttcttcgttttctttaagaatctcggccgccgtcatcctcttataaaaatcccgaaaattattagcactcaagccgagaatctttcggaggcctgacttatcgatcttacgtccgttgtcatgagaaagttgctgattctcaaacccgacaaatgtagcgatgaacatcaggcgcgcaaggtccggttctttgacagttgtataatcgtctaggaacgatttgcacgttttgtaaaaagcccacgtaaagccgccattctcagcgtcatgccctcccgcattccttgtaattctatagccctcattcgagcgtcctgatgttttaggggccacctcaaaataatccgagacgtcgttcccttctctgtcgtaaattctcccatcttcgagctttccgttctctttcaagtcaaaaaagcgtttttttgacctaggtgttagccctttccacgctctttgttcatctagcagacttcccatcttcgaacatcccccttgctctcttttgtttccttcacatgaaaatacaaatgttatataatagacatctaataatggaggataaatacctcctcacctctttataaatactgtcattttgtgaccttttttcttattctcgataatctttttctaacaacttcatggcttacatccagtttttctgctatatatttttttattatcctgatctctccatagatgttacacgtatatggggcgacattccccacttctttatcttctttgactacctccaaaatctgatcaataaactcattttcaccttttgttagttgatctctgcaatcactaaaatctaaacctaatattgtctctatgagatactcatcatctggaaaatatggttttaaactaaaactctcaagatctccgttgattttcctacgtatgcgccgcataccattcctttttatttcggcatcaatcaatttactacgaatagctctgttaatatacttaactatttcgcgttcacttcgagaagtatcaacccttaccaatgcatactcaatagctttctctgcaatctcaagaatttctttttttaattgctctttttgaggctcgatatcggctgtcacttgtttatgcttgttgtataattcttcgaaatacaacctatctgataaactacaaaattcctctaagcgtaaaagaatttcatcaagaagaggttctagttgtagaaaaagactctccgttatttcaaaatagcttacatatgaatcgccgcccgactctacattcgcttcgaaatctatgcagacatcatattttagtatcgataaaaatcgattaaaagaatctgtttcgttcttggtaatcggtttttcagacttaatatgccgcaatattaaggtgtatattgcttttattgagtaagctatataggattccggatcttttaaattgattcgtattcctccagacggtgtaccgtccttaactctatgacggctcggatcttccatgaagtttgtatcgaatttttctaaaatatcttggataattctcttatcatctgaactttgaaatactctgattttatttatgaactccgacattttattccccccacataaatgccctgctttttcagtgcttttttggctatttaccctgctttttcggtgtggacataaccattcagaatccttagagtgccaacgatttcagccattttcatttggtttaggatatatatatcagtcatatcatatctttaaaactaaatcgcaacaagaagatacggatagaaattcaaaccctagcgccctcattcgcttacgctcattcggacgcgcaattattttttaaaagatattaatcgcgatagaaaataaatgaatatccgcggacaacggagccacggtttaagtggcgaagttgggcgctaggtcttacttctcagcgtcataccgtcggtgagactccccggaactacatgcgtagccccggaccgcgcctctataatgtagtcgttcctgttgcgtcctttaacccggccaaccatcgcctttgacgaaagccacgtcaatccgtcagatcgcgttctccaataacgtactttttcgcctactctaaacatcggcaattaccccctcattattaactgcgaatatacttttataaccggacgttgtatgggttatatatacggcacaagcgcgcgctccaactcggttctttccttcctcaacgcagacctttcgttgtgcagccgtttgttttcggcgcaaagctgggccaggcgtctttgtattcgtcaccggtcgcccctattaaagccagccgccgcctagcaatctcgtagctattcgaatggaagtcgacttctacctcgcaccatttgcgatgaactgcgtctcttttcgcaattaaggcgttacgtgtcgcttctttcaacgattgcagagcatcatcagacaaagcgtgcggagactgaagcgcatagtcggccgggaaaacatctaaaatcgtcccattttccgcgataaccaggcgcacctgttcacgaggattatcataaacggactggctgccgcttgttgaatcgagtgaccagacgaacgaagcgccttgagcatacttcggtaatacgttttgtgcctgcgtttttgataagccgaggcgcgccgttgcttttttaactgccgctttagaaactgtatactgtatcatcgtgcaccctcccctagtgaaaaaccaattcgaacaaaatctgcaaacgatatatttgcgagctcagaaacatcaattttgcggaggtctgcgtcgacctttgacgtgtctaccataaaaaaccgagggtagttgttttcgtaaagatggtatccatcgctccttttttctaatcggccagtatcgtaaaacaccagcccgtcatccgaatacattccaataacatcggccgcaattaaccaggcgtcagagatttcgtgtatttcctgttttgtatcgaacgtttccccgtgataatgcagctttactgcttgcggttgaaatatatctatcacgccgaccgaacctcctcaccgaatagttctcgcgccgccgtgacgccgatttcggcgcagcctgcgaatgctctccgggacacttgcggcaagagtgcggcgaattcttccgggttaaaatttataaattcatctgagcctgcgggatagatgttccaccatcccacaattgtttttctattaaacattcattctccaactacctcctttaattgtccgccaagatgagccaacagctcgatcgtattcatattcgcaatagtttcgagatccatctccgagtcagagacgtacggtaaatcgtaaatcaattccgcacgctgaccgatttctaaaccgtgaggaccgtgatatagtcgataaagattaagccactcctcgtctatataaagtacatagtcgcgacctacgtttaagacctcaacctgttcgcggctttcttcgccggtatccgaataaataaaaacgaaatccacggtcattttcttcggttgctcccctgcgtcaatccacgttaattcgctcatagcgtctcctcctttttttgcgccaaaaatagcatgaaatcgagtacagacattttcgcgatctcttcggttgttaggccgaaattaaatccgacaggaaattcgagtggaagatcgtacaggacttcgcacttttcgccgatttcccattcgccatctttgccgcgcatcctataaagcgtgagataggcttcgttcacttcgagcgcgatatcggctccaagatgcaacacttcggtaggctctcgataatcgacggcccccgttttcggatcgtacaggacgaaatccacggttaggacttcccaatgatggttggaaatttggttattcaattcttgaaccccctttacttctgaagtaaaactcgttgggttaataatattacttcaggagtaaaacgtcaagagtttttcagatatttttcaaaaaatattttactactggcgttttacttgtataatacgattagaatcaaattcatggaggactgttgaaatgggttttagatttaatttgaacaatatactggacgagttaggaataactaagaacaaattagctgttgaggcaaaagtacggccggcaactattggggatctttgcgaggggaaaaccaaaagattagaacttgaaacaattgagaagatcttaaatgtattaaatgacatctcaccaactaagacatacacaatagatgacattattctttacaagtcggatatacaggattaaattcagatgatgtttgaagaagaaaaacaagagtggcttctttttaaagaaagttaaacgtccgggtgttcaaggttaattctacatatgaggtgcatgcatcgattatcggaaaaggtacatacacagctcgcggccttgaaaaatggtcgactattgcggaagctattgagggcattaataaaaagtaaatacacaacattagaagaaaacaaaagcccgactcgatttgagcgggctatctatttttcaattttagttttttcgatctcatcatcatagatggtataggactgtatctccttattaggaggatcatatattccttggaatttgctttccttatctccgtttaaatatccttctaccctgataccccccatcggacttatgtagtagtcgtcagaaaaactaacatctttaacacctctgtaattttcatacaaaaacttctccatatgttcttgagcttctttaacaaaagcaatctctttttctttttgatcatgctgatacttcataataaatcctccaactgctataattattaaaataaggataattatgtactttttctttttcaaagaaaccaaccctttcataccctaattttacaaaaataaagaggcgatgtatatgaccaacgacataaaagtgccaaatgtatcagataaaacttatttcattcttaatagagaggcctacgaccgcgaacggttggacgatctaatgaattctggaaaaccaatacaaaccgaaaagaattcgtattggtacgtagaaaaaattaaaagggataacgatacaggactcgatgcggttgttgtatcgcagggcaaaaaaacaaaagacggcaagtgggtcaaatcagataatcccgaaaacgttgtcgtagccttcgcgggaacagatcctaagagccaattcttccaggatgttattgacgctgacggcgggaacgttgtaatgggaattgacccgaaaaagaaggaacactacatagtcgaaaaagatgcgaaagatacttctaaaacactcggaaaatataacggaactccttcacaagacgcaaggcttagcaccggcgattataaattggttacgaaaacatcgcaaatcgatcaagccgatcaacttgtgcgggaagttaaacaaaagtataaaggtacctcgacagttatttcaacaaccggacactcgcttggcggcgctgaggctgaatatagtgcggtcaacaataatgtctatgccgtcgcatttaacagcccctcaattgttaagctgcattctgaggagcaacaaaagaaaattaataacggcgagtatgaccgatccataaaatcgattatcaatccggatgacatggtcggggccggctggtggaacgaatatgaccggcacaacggaacaacaatttatacgaaggaccctgaattatcaaatgcggtgcgcgaggcgagaatgcagggcgatgtattccaacaaatcgggcaaaacgctgggtatttctttcagaccgcaatcttaggaatgcctgatacgcattgggtcgggagtaataatttcaccttcgacaaaaacggaaacgttcaaaatatagagggcgatgaactcgtttatgacaaaaatttaaaagcgatgctcccaccggaagttgcatccggaagtggcgcaattaaagtaacacccgaagttgccaagcagctcgcgcaaaaagtaaatgcttgcggacgatgaaacgggaagccgaaaacgcttatcaggaacacgacgccgagatcaacgacctgaagcacgatacctaccgtcaagtcggccacggtttatacgacaagctgacactcgaggatgtaaacaatacgctgaaaaacctggcgcagtcgtttgacaaaaaaggcaatccgctcttttacgatgttcatgccgaaaaagcgtacatcgcctcattaaaaaatacgatttcagatttagaagacatcagcgggtaccttgcgcagatcgcaaaagattttaaatcgaaagacaaaatgctggcaaattggcttaagctttaggagatgacataatggaaaatttcaataaactggcttcactcaacaacttaaactgagatcaagaagatacgctcttcatacggcgcaatcagcttcaaatgctgaaaacgggcatgagagtaacagccgcaactaagcttgaaggcattaaaacgacgctaagaccgaagtttaaaatagacgatatacaaaaagaaatgaacagcgtttattcatcgcttctctacagctttgaaggaaaagcgcaagaggcgctcgctcagcgaattagccaaagcgcccagcagcttattaacacggagcaggacggagagagctttgtgaacggatttaagacgagatagaggcgtctttctttttgcgcaacagcatggactccgtgacgatttagacgcccataaacgctgatttaacgtgcttttgaaatgcagaatcgaaggggccactatatttgtattcaatcgccaattttgacgtcctaaaccgtcatgaccctccgagttcaaaaaattgcacgctagttccgaacggcagatgaggcgggattgagtgggcggcctgggggcgggcgcaagcgaaaactttcgttgaataaaacattcatcgttttgcatatcgaatgtaacacaatctgtttttgttacattgaacattcgaacgaaacgttgacatgaccgcgttcgctgatcgatgtctatcgcaatcaaccgaagtttctttatgcacgttttaaaccgcattaaatcaacgatcaggattgcgtctggtgccggttgatatgtataagatcgtgcatataggaccggtattgctgccgttggtcaggcgagtcgatgcaacatcgtttctacttccgatgagtctgacggccataggtgcgtcatgcaacggcgatgtacaaagtgttgcggctattcgtaggttatcgatatacgttgcgtagtgtagcggcgcaccccctgagattgggacggtcgcccccgcccggcacgcctcgctgatgtatgcggctatacctcgatcgactcatatgccgcctctatctcttccgcagtaatcccgatgtactttgccgtatcgcgctcgctcgaatggttaagaatcaccatgattcgcgaaagcggcacgccggactgataaagccggtacccaaacgtcttgcgcagcgtatgtgtaccgatgccgccgatcttatcgtaaattccggctcgtttggctgcgtcgcttagaatgcggtaagcctggacacggctgatcggctcgccgcctttacggctggcaaatacgtaatcatcgtcgtcaccttcgatttgggaaacgattttgagaacggaggagctgaacgtaatcacacgctttttcttgcgtttcttctcccatagggtaatcgacttctggccgcgaagctgtccgattttaagaatccgcaagtcgctaatacgcaggccgaatgcggtacctaattgcgccagccactgatcgcgccccggcttgagcgcctttatgaacttgttataatcgcgttttgacttcatcggaaaaacttcgtttgccatgtaaagcacactccttttgttattcattcgtttagcgcaaattgcgctaatcaaacacgctcacgacgcaaggaacgtttcgaattccttcattagtagctacgttttaagtttcgcaaaataaaaatcgtgcgtactgatgcgctagttgtcgcaatttgcgataagatcacacgtcctccaccgcaacccaaacgatttccttaaacggaatgtcaacgccatcaatccgcaatgtccctccgaccggatcaacggaatcaaagcgactcgaatcgggtttcatatagtcggtctaacattcggtccagcacaccgttataatagccggcaagattccgaatgtgcttgcgctttgtcgcaacgaacgtctgacgcaccgcatgtaggccgatttcttcgagcgtatcggaatcataagcgccttttaaaaacgacgtatgcgcaaggtaaatgccgtacagcctattcgtcagcttccgatcgcttacaaacgattcgaccgcagatttgaacgcactatacgtattacgtagtaatttatttacgcttttagaaataacagattcgcttgcacttttcggtgtttcagccgatgattccgtaggcttgtccgctgtcgagcggggttgcatttgcggagtagcatcgccattatcagccggcaaaatcacgtaaatattagcgccgttgccaccggataccggccgtaatttcgtttccttgcggatgatgccgcaggctattagccgcttaattgcccggataactgtggtacggtgtcggccgatcaagtccgcgatcgattgcagcttcaaatatgcgacgcctggcgttttgcaggcatgacgcgacaacaccttcagaacctcgatagcggcaggcgttagggcggatttattgcggtatatatgcgtgcggatggcgccgttaagctcgtccacagaacgaaaagacgccattttagcggattctttcgtgtacattcggttttctctcctcggagacgtaccgacccttatcggaaaattaggcgcactcaaataagcgttgactggaacgctttttttcgataagatagacgtaggtcaggacgcgctatctatcggattatttccgacgggtggtcgtctttttttgtttttaaaccttcaactcatcgtttttgttcgcttttctatactgctcgatcacgatttcgtcaacatagtcgagataaatttctgtagaggcgagatccttatgccccataattttttgtaaggaacgaatatcgccgccatttcttaggtagttgatcgcgaaagtgtgtcgcaggctgtgaatgcttggccggcattctttctttagatccgccatttccccgtatttgtcagccctttttctcaaagaatctttagcgagcttttctccgtactgattaacgaatacatgcgtaaaagtcccaaaatactccgtcatttccgtaagtaactgcttcaattcttccgcgacttgttccgtcatcggcaccgttctattttttcggttcttattaatggcgccaggcaacataataacaaggttgtcgaaatcgagatcttccggctcaagcccttcaagctcgttcgatcggagtccgcattttagcgaaagcaaaaacgccacaaaatcacggaagcctgagaacgtagttttatcgatcattttgaaaaaacgccgcacctggctgtccgtgagcatttttaccgatgtttcatcgacgcgcagcttcgtcactctttgcgccggactctcgtttattagcccacgttcagttaagcgactgaagatcgatttaattccgcctaaacggatatttacggttactggcgatagattgcgtttctttaacatcgttgagatgtaagaacgcagatgatcttcggtcacatccgttatgctatccgtcggcatgatgccggtcatttccataaactcggaaaaataattccggtaatcattaatcgttcgctcccgatagttctctgtttcgtatagcgagtaggcaatacctaacgcttcatgtacggtctttgtcgatcgaaagctcttcactattccgtcagtctcgcgccgattcctaacacctttccttcgtttcaaaacggccacaacaaaaaaacctcccggatttttttatccgcgaggttgcgtttgctgaatcggactatatcgatttaggtgatgcgaaccaaccgattttggccggtcacatttttctccggttcgtgtccattcggacacttttcgctttaacggaccgtcggaaaacgttgatatgacggggctaaaacgtgaaaacgcgctcggagggattcgaacccccggcagacgtggtatcggaaaccaccgctctatccagctgagctacgagcgcacaatatgattttttaacgtcagcaattcatattataagggctgttctttaaaaagtcaatcacaatctcctgctcgaaacaaaaaacccgcatcatcatgatgcaggtttagataatacggaagctataatcttttgttcgatttcttcatttacttcgtccgttgttttgacaaggcagataatgccgtcaataaaaggccaaatgaataatgtaatccagccgagaagcaacatggctacagcgtagccttttctctcgtccagataaaatctgtgagcggcaacgcctccgagaaaccaccataaaagaaatacaatcagcttcgatttcttcttattttgcagctctgaagccacgacaagcctctgctgatctgtcaggttactcttgtccaagttcacataacccataattgatttccttctttcctataaaataaaatgaagaccaatggactaatcttagactattggacctaaattttctatacttttctctataaagttgatattttgtttgagtttccttcaaaatgggaaaaataaacccagtatgtcttttggatgaaggcggctttttgtttgacctttattgaccaaaaatgtatgattaaactacatacttaccttttaaggtgaaggaggagcattatgaatttaatacctacagtcattgaacagacgaaccgcggggaaagagcgtatgacatttactcacgcttgttgaaagaccgtatcattatgctgggatcagcaatcgatgacaatgttgcgaactccatcgtatctcagcttctattccttgaagccgaagatccagaaaaagatatcagcatctatatcaacagccctggcggctccatcacagccggtatggcgatttatgacaccatgcagtttattaaaccgcaagtctccacgatttgtacgggaatggcggcatccatgggtgcgttccttcttgcagccggcgagaaagggaagcgctacgctcttccaaacagtgaagtcatgatccaccagccgcttggcggagcgcagggtcaggcgactgaaattgaaattgccgcgaaacgcattctttcattgcgcgacaagctgaacaaaatccttgcagagcgcactgggcagccgcttgaagtaatcgagcgcgatacagaccgcgacaacttcaaaacggctgaagaagcaaaagaatacggcctgattgataaagtgcttacacgcaatatcgacgcacagaagtaaacagccaaaaagctgccggagtcaccggcagcttttttttactccaaatgggttgtcccattcgctatatgtaaagcttctataaatccttccactttttctcgaggacagggtagcgataatcattcatgttcccgatcaactccgcagggcttgccgaagcatgaatcagctcaaggtgcgatttgttcgaaaagccttcttgaacgctgtattcgagcattttaagaaggggttcaaaatagccgttcacattgtaaagtccgatcggcttttgatggatgccgatctgcgcccagcagagcacttcaaacagctcttcaaacgtgccgaagcctccgggcatcgcgataaagccgtcagctaattcactcattttcgctttgcgctcatgcatgccgctcacttcgatcagctccgtcaactgctgatgaacgatttcccctgtaaaaaggcctttcggcataacgccgacgacttccccgccgttttccaatacggtatccgcaatcacgcccatcaatcccattctcgatcctccgtaaacaaggcgaagccccttctcggcaatataaacgccaagctctgcagctttcttcttgtactccgggtccgcccccatatttgatcctgaatatacgcataccgttttcactttcgctcactccaactccatatattgataaaagcaattaacattgtactatatattgtttgttccgtgtgcgataatataattgaatttctaaacgggagtgtataacttatgacaatcacagacgcggagcaatggacaaaggcattttacagggaaagaggatggagcgaatacggacctttcatcaggatgggatttttaatggaagaggctggcgaactggcgagagcggttagagcatacgaaatcggaagggaccgtcctgacgaagcaaaacggccggctgctgaactgaaaaaagaactgatcgaagaaatgggcgatgtgatggggaatttgatcatgcttgccggcatatacggtgtttcattggaagacatgatggatgcccatcgctgcaaactgacggaacgatttgcaggagagcatcatgaagatcaatgaccgcctttacggggaggcagatttggagcctgtgctgacagacctcattcgttcaaaagccgttcagcgtctgaaagggattcatcaggacggggcctcttttctcgtcaatcccgcatggaacatcagccgctgtgagcacagcatcggagttatgcttttgatccgcaggcttggcggaagcctggaagagcaaattgcaggtttgctccacgatgtttcccatacggcattttcccatgtggctgatgatgtatttaacatggaaaacgaagattaccatgaacagatgtttcggcaatgggtcaagcaatctgatatctccgggattctgcatacatacggattccatgatgaagacatcttatatgacgagcaaaaatggacgctgctggagcagccggctccttcattatgtgcggatcgcatcgattacacgcttcgcgactctttagcctatggatttggcgatccggtagagattggacgatttttagaaactggattgaccgttgctgaaggcgaaatctgctgcacttcggcagagcatgccgaatggttcgcccgcctttactatcaagaagtgattgacttctttatgaatcccctcaatatatatgcgctctgtaccctcagccaaatgctgaaagaggcgcttgacatgcgtgttattgcggggcgcgattttttcaaaaccgacacggaactgcttgcgatgctaaagcaaaaagcgcgcttccgggaaacgctggtaaagctcagcacagcgagcaagcgcgttaaacaaggcgacgaaggcgattttacttttcatcaaacattaaaggtgagatggatcgatccaaaagtcgctgttaacggaagaaaaatccccgcctccacactttcaaagaacgtccttctgaagaaagaaacggcaatagccgccatgaaaaaaggcgcatatgtaaaagcagcccaataaaagaaaccgcctgcttcagtccggccgaaacaggcggttttcttggttatgtcacgtcaaatatttgttcaggcctgtcgacaaaatgctttttgccgatcttatgaaacagccctgttttatgaagaagctcacgcggctgctgctgaagacccacgatcatcactttcccgttttgctggtggacacggttgacgatcgtcatcaggctgccttctgcggaagagtccatgtagtctactttattcatcagcaggatgaggagttttggcgggtggcctttgtccaaaattgaatcctccaatgaattcgatgagccgaaaaacagcgggccttcaaccgaatagatgctgacagagcgttgaaaatgcttttcttccgctgcagctgccgactggacgatcgattcagacacatcttttttaatgcggaacgacttgctcattctggcgataaaggtgatgatcgccagcaggatcccggccgccaccccaaacacaagatcctgccaaacggttaaaagaaatgtgacgacaagcacggcagagtccgaatttctaattttcaaaatatttataaactctttccgctcactcatattccaagcaaccaccatcaaaatcggcgacatgcttgcaagcgggataagggaagcgtatggcgcaaacaaaagcagaaccaataaaacgaacacaccgtgtacgatacctgaaatcggagaagcagcgcccgttttaatattggtcgccgtacgggcaatcgcacctgtcgccggaataccgccgaacagcggtgcggcgatgttcgcaattccttggccgacaagttctttattgctgtcatgccttgtccccttcatattgtctgccaccatcgcggaaagcagcgattcgattcctccgagcattgcaatcgcaagagcgggaggcatcaggtaaatgattttttccaatgacaactcaggaaattgaaagctcggcaagctgcgcggaatttcgccgtaagctgatccgatcgtcaccacctgttcgggaaacagcatcgtggccatgaccgttgatacaagcaagcctgcgagcgctcccggcactttcggcagaacctttggcgtaaacagcacaaagaagagcgatacgacagccgtcaaaatgctgtaaaagctgagcgtattcaggttgatgacaacctctctcatattcatataaaaactctcatgcttctcgacatttctcaagcctaaaaacttggcgatttctccggtgaaaataatcaccgcgattccggccgtaaatccgatgatcaccggccgcggaataaatttgatgatcttgccgagttttagcagccctaatatgaccagaatcactccggccataaaaccggcaatcagcagattctcaaatccgtattggagcacaatagcgaacaggatcgggacaaaggcccctgtcggtccgccaatctggtatttcgacccgccgagaagcgaaatcaaaataccggcgacaatcactgtgtaaagaccgtgttccggtttcacccccgaggctatagcaaaagccatgccaagcggaatcgcgacgactccaacgaccattcctgctacaatatctttttgaaaccgcttaaggctgtatccttcaaatctgcctgaaaatcgtaacattcaatctatccccccatttgatcatcgcacttccgaaagcgaaacgtcttcacgtgaataaccatcttccacaacatccaaacggccggtctttggatcaatcaccaatccgtgcaccggaacgtctgaagacaagagcggatgtttccggatcatgttcacactgtggctgacgctgtcttcaacgctgtcaaagcccgtcatccatgtgtccaaatcgatgcccgaatgctgcaggagttcgagacagccatcatcgacaccccgctgtttggccttttgaaggatagatgaagcgttcaggcttgccattccgcactcatggtggccgatcacgcagacttcttcagcctgcagctcatagacagccacaagaatgctgcgcatgacgcttccaaaagggtgagaaacaacggctcccgcattcttaatgatttttgcgtctccattttttaaacccattgcatgatggagcagttctaataaacgcgtgtccatgcatgtcaaaatcacaagttttttctcaggaaatttcgtcgtttcgtaaaactcgtaccccttttcctctacaaaagactgattgtgcttcaaaatggaagttaaaatcgccatttttctctcactccttttcatagtcatatgaccttgatattgttacagccgaattatagcacatggatttccgctttggattcgaatcaaaaaattcactaaaaatgtactgaatatttttaaaaatctaattttatatctttctaaaataataaaatgtacgctgttcttcacctataaaaaaataactggaagcaaaatggaatatcaaatatttggatttatagttataaaaatgcattaaaataaattaaaaaactagaaataagattctatgattttctaaacaacgataattgagctgatagtcctgcgctagctggaacaatctttgatttttacagaaaccgtttttcctctataatggaagcagatgatacgcggaaggagaatgcagatgaaaccgtttgtatatgtcacaaaaccggtcccaaaagaaatcgaagagatgctcgctgaacattgcgaatatgaaatttggacttcgcgcgagcgtattcccagaacgaccctgctcgagaaaatcaaggaagcggacggccttttgacctcaggaacaaaaattgaccgtgaattattatccaatgcactgaagttaaaaatcgtcagcaacaattccgtcggctatgacaactttgatattgaagcaatgaaagaaaaatcggtcatcggcacccatacgccatatattcttgacgacacagtcgcagaccttgctttcggtctgatcctttcctcagctcggcgaatcgccgagctcgaccgctacgtccgcgagggaaaatggaccaaatcagaggacgatgaaagcttgttcggatctgatgtccatcaccggacgctcggcatcatcggaatgggacgaatcggcgaacaagtcgccaaacgggcggccttgggttttgatatggaagtgctctattacagccgcagccgcaaacccgatacagagaaaaaaaccggcgcggtttatacgggctttcatgagctgttggagcgctcggatttcattgttctggtcacaccgctcacggatgagacataccgcctcatcggcgaagcagaattcaaaaaaatgaaaccgtcgtccattttcatcaacatctcccgcggtaaaacagttgacgaacaagcgttgattcaagcgctgaaagaaggatggattaaaggagccggacttgatgtatttgaaaaagagccgattgaaaaagacaatccgctcctaagcctttccaatgtaacccttgttccccacattggatcatccacccatgtcacacacgtcaacatgctgaaaagcgccgttcaaaacctgattgacggtcttcagggcaaacggccaaaagatatagtcaaagaactgagataacgcgcatctttcaggcgcggaacgttttgccaagctctcctcctaagccaaaatagtgtctgaaaagataaatcaaaggttcccatttttgaggatcgatgtggtgttccccttttaaaatcgcttcatgtgcgtgcacatgaagcacttttgtttcaatgacggcaaaatacggggaatgttccggaatgcgaatgttgacagcttccgcttcaatttgaagcgggcaatcggcgactctttcaggtttcactgccaaggaatccgcggccgtaaatccgccggcttcaaatttctccttaaggtaagtaaagccgagccgctttttttcttccggaacgaatcgtttgccggtataggaagccagccgttctacatttctccataaagatgaatccggcacattgataacgcatccagcatgcctctctaaattttccaatgctttaccttcggttccaataccgagtacgatcgaatccccgagcgcccaagaagatgacagcgggctgagattcgtggaaccgtcttcgttcattgtgctgagtaaaatgactggtgttccgtaatataaaatgcttggctgaataattttgctgttttgttccatatgcgtctcctccttttatgcttttattgtaattcttcaatatttcaattaacatcgaagtatcgattgcattttaggaggaagtgtaatgaacgtgaatccaaatatcgccgaggtcgccaagcttgtcaccgatccgtcgcgggcggcgattttaaccgcattgcttgatgaccggtattatacggctaccgagctggccggatatgcgggaatcaagcagcagacagcaagctttcacctttccaagctgcttgacgccgagatgctgacatgcaggaagcaaggacgccaccgctattacaggctcaaaaacggaaagattgcacaatcgctggagaccctgcttaacatagcgccccctgcggaaattcgctctttccggcagtcagctgaagatcgggcggtcagaaaagcgcgcacatgctatgatcacctggctggatcgctcggcgtcacacttgtggatcggctcgtggagatgggcgtattgaaagaagaagagacggcttttacagtgactgaagaaggggaagcatttttgaaagagcttggcatcgatgtcagggaagtcaaaaagaaacggcgctctttttgccataaatgcctggattggagtgaaagacggcatcacattgccggcgccttaggctccgcattgctcgatgccttcatccgcatgggctggatcgagcggcgcccgcatacacgggccgttgcagtcacgcccgccggcgcaaaggaactttaccgcctatttcatatttccattgaaaagaactgaagaaatagttctcgatcgttttccggcattccgggagaccaaatagcatgcggttaggaacctgcggcaagccgttcacgtcctcggctttcatggaagatttacaataatataatgatttttgggcatgttttaaggtacaattcaagatgattgcagacggaatatggaaatgaagaaatgcggctgttcaaccccatgaaggcacattcttcatgtttatgttataaagtctaaagacagggaggactttatccgtgaaaaaaatattatcaactcttgcgcttgggtttgttctcgcgctgggctttctggcggggaacctttttacaagctcagctgaagggccgcaggcagaaaaaggcggcaccgttcagtcaaatgaagtcatcaatacatttgaaggtgttgccgactatattgtgaaatacggcaggctgcctgacaacttcatcacaaaagccgaggcgtcaaaattaggctgggatccgcaaaaaggcaatctggcagaagtatcgcctggaaaaagcatcggcggcgatatctttcaaaacagggaaaagctgcttccagatgcatccggacgcgtatggagagaagccgacatcaactatacatcgggattccgggggtcagaccggatcgtctattctaacgacagactggtttataaaacgactgaccactataaaacgtttacgagaatgagatgatcatatgaaacaagtcactttaaaaggagaaaagatcagaagtgtatcagatcttcacaaagaattaaaagaacagctggagcttcctgactactatggcgaaaatcttgatgcgctgtgggattgtctgaccggctgggtcggcatgcctttgctgatagagtggaagaatgtcgagaaaagccggatttacttgggcgatcaagccgaggcatatttgcagctttttcgcgaagccgaagaaacactggacggctttcagctgaaaacagaaggatgaaacagaaaacgagcgggcgcttcagacaggcgtccgcttatattaattgatgcagaaaatcggttcttcagtcaaaaaatgaatgaacgaaaatggtttggaaatctcctgcattcacatcctctttcgtcaaaccgccccctgtctgctttgtgaagtgatccttcgtcaaaattaactttccgtcctttatcagcttggaagcgagcgggtttttattaaaaggcgacgccttctcatcgaaaattgcatcccgcacgcatgtaagcacagcttcatcgattggcgtcagcgaaaatgcatagccgatctgccacccatctcccttatccatttcaagaaggtaatctcctttatccgtctttgtttccctgacacggtaagctcctgtttttgaggggacaggttcacctgagaacggaacgggtgcaagcggcaggttgatgccgaatccagtgtccagcagataggtttcatcaccttcccgcagaattacggcgacatgcgttcccgtcagcgcccacgcctgctcttttgcattaaataccgttccgcggaccatgtgaacggaaaagccgagctctgtcagcacatagtaaagaaaagcgttcaaatcatagcataaaccgccccttttattgttcagcaaggcttccgtcagctctgttttcgtcatcgaaatccgttcgtttcttaaaaccgcgccattttcaaatggaaactgcaaagccagcagcgataaaaactcgggcaagtcggcaaatgtcacctgctgacctggcttgtatccaatcctcttaaacagcgaatcgagcatcgtcgtcatcggtaattctccttccgcttatcaatgagaaaaagccaaacctcataaaggtttagcttctttctcttgaacatatgcagtcagtgcatcaagggcatcttgttcatcggatccgtcagcgatcagcgtgacttccgatccggagctgacagcaaggctcatcagccccatgatgcttttggcattcacttttttatctcccttttccagaaaaatatctgattgaaaacggttggcttcttgaacaaacaatgccgctgggcgcgcttgaagccctgtttttaaaagaacttccactttttgttgaaccatacgatctcccccattccctattttaaagagacagattgtcctgaacgcagctgctcagctatttcatccagtttcctaagtcggtggttgatgcccgatttgctgatttttccgctcgacaccatttccccgagttcctttaatgttacttcctgataatcaatgcggagctgagcgatttccctcagcttttccggcagcgcatcaagcccgattctttcgtcgatcagcttgatgttttccacctgccgcagagaagcgccgatcgttttgtttaaattggcggtctcgcaattgacgagccggttgaccgagtttctcatatcgcgcacgatccggacgtcttcaaagcggagcagcgaattatgcgcgccgatcacattcaaaaactcggtgattttttcggcttccttcagatacgtgatgtatccctttttccgctcaagcgttttgctgtttaaatggaactgattcatgagcctgcacaatgaatcattatgctctttgtacagcgaaaaaatctcgaggtggtaagaagatgtctcgggattgttgacagaacccccggctaaaaatgcccctctcatataagaccgtttgcagcatcgttttttgactaagtcttcggagatgtttctggcaatgacaaagttgtctccgagtattttcaagtcctcgagaatcggcttggcattttcgatcaggcgtacgatgtagacattgttttttttcagtctcattttctttcgaacgagcagttcaacggaaacatcgtattgtttcttcagcaatgtgtaaattcttctggcgatggccgcgttctcggtctggacgtcgagaaccacttttcggtttgagaaagacaatgaaccgttcatccgaatgagggcagagagctctgctttcgcgcagcaatcctttacttcaaggtttgtaagttcttttttcgtttccgatgcaaatgacatattatagacacccccattccaaggcctgctattcttttaacaaatcaacaagtagcgaagcgactttatgtgtatcatgacggatcacgccattctcgtatgtcacaatctgatctttgatgacctcaagccccatcgcagacagatcatcaatattaaactggacgggctgtgcctgctccttcgcatagcgttcccgaatgtcgtccgggatttcctcattgttgacgaggatcgtatcgataaacggaccgcccatatgctggttaagcgcttttacatggtctgccgcactgtagtacagcgtttctcccggctgggtcattacattgcaaatataaactttttttgccggggcgtttaatatctcttcccttatcttcggaacgagaaggttcggcaagatgctcgtatacaggcttccggggccgagaataatcaggtcggcgccgcggatcacgtcaatcgtttccggaacgggttcgattttttcaggggttaaaaacacccgtttaatccgcttcccgtaagacggaatcgtcgattcccctgatatgatctgtccgtcatccatttccgcatgaaggacaacgctggtattggccgcgggcagaacccttcctctcacatttaagactttgctcatttcagtgacggcgtgaaagaaatcaccggttatattcgtcatcgccgccaaaatcaaatttcccaatgaatggccgattaaatcgccgcctttagagaagcggtgctggaacaggtcttcaacaagcggttcgacgtcagacagtgcagcgaggacatttctgacgtcccccggcgggggaattttcagctcgtcgcgcagcctccccgagcttccgccgtcatctgcgactgtcacaatcgccgtgatgtctaccggctgctgcttcaatcctctgagcagtaccgaaaggccagttcctccgccaaagattgcgatttttttctgatctgccatgctattttctgcttttcttctcgatgtcccggtgagtaacatgagtatagtagtcctttttaaaataatcggcaaggtattcagccagcgtcacagaacgatgctgtccgccggtgcagccaatcgcgatgacaagctggctttttccttctcgcttgtatgacggaagcataaagctcagcagctcggtcaatttttcaagaaacttttgcgtttcgttccatttcatcacatatgaagatacttcctggtctttccccgtcagcggcctcatgctgtcgatatagtacggattgggaaggaaccttacgtcgaacactagatcagcgtcgatcggcaatccgtatttaaacccgaatgacatcacattcacagtaaaggtatgtccgtgatctgccgcaaaatgctggacgattttttcgcgcaggtctttcggcttcatatcggatgtatcatagatgatttgagaacggcctttcagctcttcgagaagctcccgctccgtttggatgccctcaagcggcaggcccgttgtcgcaaggggatgggatcttcttgtctctttatatcttgaaacgagaaccgaatccttggcatctaaaaataaaattcgcggggtaatccaggatgtttccccaatttcatcaagcgcttcaatcaggctgtcaaaaaactcgcggccgcgcaaatccataacaagggcgactttgctcatttttgaacttgattccttcatcagctccaaaaatttcggcagcaaagatggcggcagattatcgacacagaaaaaaccgagatcttcaaagctttgaatcgccactgtttttcctgcccctgacattccggttatgatcacaagctgtatatcatggcctccattcgcgttcatgcttctctccccctcttatgtttattcgccttgcgggtcgaggcgataggacagcaattcaaagtcaggcgtataagtaaaggtgccgtgaagcagtcctttgcctttcagcataaaatcaagaatatggacgtcgcccggcgccatcggcaagctaccgacgtcccccgcctgatgccacctgatgatgccttcttctgattcttctacatgcttgcctgtataatgatcggcgacgaatgtgaacatcatccattcagatacaacctgatcattttcctttatgataaaggtgaatattcctttcagctgcgggttcagcacatacaggcccgtctcttcgcggtattccctgataacggcgtccctgacggtttccccgctttccattttgccgccgggggccacccaccagcctcgtctgggcttttgcagcaacaggactttatcacctgaagtcagcacacaattcgtcactctttgcaaagtctgtcacccatccttttattccttcaattcttttttctattataccgtttcctgtccccgctcacaatgaacatgcagttccgccgcgaaaatcgccttttcccgggctgttttaggctttttccgggtaaaaacttaatgaaacggctttttcagcaaatggaagcgcttgcgaaaaccgttcttttattctattttacagcaaaaacgactgtttcaatattgaaatttgaacaacttgtgaaatttgtaaaaaattctctttgcaggaaaataagacaaaaaaaggacacggataagatcatccgtgccaataaaattcattataaaagggggtcaattactataccaatcataacgaataattgtttcactggtgttacaggccggttaaatcatgatgacgattaaaatgcgttattttacagccttttctttctctttcagctcttcgatatagtgctgaacgctctgtgcggcaatgcttccgtcccctgttgccgttacgatttggcgaagggttttctcgcgaatgtctcccgcagcaaaaatgccttcgacttttgtttccatctgttcatttgtcacgatgtagccctcttcatttgtaatgccgaggtttttgaaaggctctgaaagcgggagcataccgatgtagataaagacgccgtcagtccggaactcttcttcttcgcctgtgaccgtatcgaccagtgtcactttgccgacttttccgtcatgttcatgaatttccttgaccgtcttattccagagaaagtcgactttttcgttgtcaaacgcgcgcgcctgaagaatgctttgcgctctcagcttatcgcggcgatggacgattgttactttcgaagcgaaacgggttaagtacacgccttcttcaacagcggagtctcctcctccgacaacgaccagctctttgtttttaaagaaggcgccgtcacaaaccgcacaataagaaacgccgcggccgccaagctctttttcgccaggtacgccgagcttcttatattcggcgcctgctgtgatgatgaccgcgcgcgctttaaattcttttgatcccgctttgacgatcttatagtctccttcatcgacgacttctttaatatcgccgtacgcatactcagcgccgaactttttcgcatgttcaaacattttatttgaaagctcgggtcccagaatgctttcaaatcccggatagttttcaacatcctccgtattggccatctgtccgcccggaacgcctctttcaaccatcaaagtcgacaggttcgcccttgacgtataaacggctgccgtcattcccgcaggacctgctcctataataatgacgtcatacattttttcttctgacacaatgttcactccttcatgaatcttatgcttgcaagcagtgcattcctgttaaataagattcccttcttataacttccttacccatatcctataaaatatcatgaataatcgctatttttttgctcacataataaaacaggctgaacaatgaagttcacccctgtttctatagatgctcttttaatgtacgttcatactttgaaagcgttctgggcgatatttggaaaattttagcggtttcggcttttgtcaaacgctcctgatgctccgtcttccaaatgtaatagatcgctgccgcaagcccgccggcatttttcagctgaagcccgtaagccctgatctgctgaatgacatggaaaatccaaaagcacatggcctcctgctccatcgccgactgatccgcttgttcaatcgcttttgcagtcctgtaagcaagtagcgcgtcttttgaatcaacggctgcaccgctttccccgtaaagcacaagtctgacaaactgatcttcaaacggcgtttttgccatctgtgaatcaagcaccgctttcagctgggctttttccccttttcttccgctgatataatatgcggcaaggcgctcctcgagcggtcgctggacaggtctcttttccttccgttctttccacggctccatgcgggcgtcatccggatactcttcctgcatctttttccatacagaccgggcaaattgaacgcggcccgtgtaataagccgagcaggcgagccagtaataaaaggtctcatccccttcaaatcccatgcggtagagtgatttcagccatttaaacccgagatcgtatcggccgacaagggctagcgtggcaccgagcttatacctttgctcaaaaagcatcggataaatatttgaaagctgttcggaaagcgcctcgaccttatcgtcccgtcgttcatagtgataaaaaataagaagattgcaaagcgcatgcaggtttccatgacttttttccaagaccgtaaaaaccgtcgttttggctttctgaacgtccccggcataaaagtatgcgagtgcaagattgttataagccgaccaaaactcagggtaatcggaaataatttcttcaagcatcgcgatcgattcctgaagctgtccattttccagcagtgatttggcccgatcctgtttcagaatcaggtcgtcctgatcgaactgcgaatagccctgatcttcctctcccatatccaataaatcaagcagctccgcattttcctcgctgaactcgccgtccggatcttcctttaaataagtctccgccgctttataggcctcttgaaaaagaccgaggtgcgcatagttgttcgctttaaaatagtagcattcagtcattttttcgttgatgttcttcaggataaagtccaaaagttcgtttgattgctgataaaagcccatttccgtataaataaccgcaagttgggacagcattcccgtgttttcaggttcaagaaaaatcgctctctgtatgagcttgctcgcgcgggataaatttcgctctctgtatgctttgagccctttatgataaaaatattgcccatcttggaacagctggacaattctcgaatctttatgatgttcagaagtgtactttcccacagataccctccatttcaaactatataccgtgagtagtataacatagtttccagcaagcttaacaggccaaaaacaagtttcgagaaaattctcttcattttccacatatggttttttcaccattttatttcggacgtttggagcaccaggccggatagggctttcagaaggatgaaggtacgttttatatcggaagtacgcttttcatcttaacccgggcaaaatctttttttagcacttaatgatgacgaatgtacgttcccattgtatgataatagaaagggggttcacaaagtgaaaaaaggcggatcaatagaattgacgcattactcagaagaacattcagctgcgcttctcgaatttgagcttcctgaagaacagcatcgatttaccgctcttccgaaagaggctttaaaacggacggacggccagtttccaatcgtaattttaagcgaaggcgagcctgtcggattttttatcctccatgcgaccgagagggtaaaagactattcggacaacctggacgccatgctgttaacggcgctatccggcgacagaaagcaccagggaaaggttttgcaaaagaaggaatgctcaaacttccagagtttatctccaaggagttcacccattgtcatgaagtcgtgctggttgtgaatgtgaaaaacaccgcggcccagcacctgtatgttaaagccgggtttgccggcacaggggaaagaaaaacagggccgatcggagagcaaatcgtgatgaaattgaacatcaaatagctcccctaccgggaaaacaaccaaaaggccaaccgccttttggttgtatgcagtgtgcttatgattcagatccttcatggcgctctttcaagacgccaagcacatcatcaagcggaagggactgctccctcagcaaaacgagcagatggtaaagaaggtcagccgcctcccatttcagttcttcaggatcacggttttttgcagcgatgatgacttccgccgcttcttcgccaactttcttcaaaatcttatcaacgccttcacggaacaaatatgttgtatatgcgccttcaggcatttcagcctgccgtttggcaatgacggtttcaagttcattgatgatgtcaaagcggccgccatcagtctgtctgatatgttcgccgggcgagaaacagctgtagcttcctttatgacaggccggccccgccggttcaacaagcacgatgagcgcatcttgatcacagtcaagcctgatgtctttcacacgctgaatgttacccgacgtcgctcccttatgccagagctctccgcgcgatctgctgaaaaaccatgtctccttcgtttccagcgttttttcaaacgattctttattcatataagcaagtgtcagcacttctttgctcgctgcatcctggacaatcgccgggatcaagccggcttcattaaatgtcaactcgtctgccttgatcatcttacattcaccccgcgctcttttaaataagcttttacttcttttacagatgtttctttgtaatgaaagatagatgcggcaagagccgcgtccgcccggccttctgcaaacgcatcatacatgtggtccgcacgccctgcgcctccggatgcaatgaccgggactgaaacggcttctgacacaagctttgtcagcctgcagtcaaatccgttcttttctccgtctgaatccatgcttgtcagcaggatttcacctgctccccgccgaacggcttccttcgcccaggaaacggcctcaaggttcgtttttttccgaccgccgtgtgtataaacatagtacagatcagcttctggatcgtattttgcatcaatcgcgacgacaatgcattgagagccgaaaaagtcggcgccttccgttatcagttccggccggagaacggcagccgtattgacggaaactttgtcggctccggcccgcagtatcgttttcatatcatccaaacgattgatgccgccgccgacggtaaacgggatcgccagcttggccgccactctttcaacgacatcaaccatcgtttttctcccctcgtgggaagccgagatatcgagaaaaacaagctcatctgcgccttcatgatcatatacttcagccagttcaaccgggtcgccggcatctttcaattcaacaaattgtacacctttgacaacgcgtccatcttttacgtccaaacacgggatgattcgttttgtgatcactttgccgccaccctttcaagcgcttcagccacggtaaattggttggtataaagagcttttccgacaatagcgccagagacgccttccgaagcgcgggaagcgagcgcctcaagatcggcgagagaactgacgccgccggaggcaatgacttgtttgccggttgccctggcaagctccactgtactgttgatattaggtcctgacagcataccgtcagtcgcaatgtcagtgaagataaaaacttctgcaccttcatttgcaagctcgcggccaagctcttccgctctaacggaagaggtctcaagccacccttcagtcgaaacaaatccgtctcttgcgtcaagaccgattgcgatgtgccctccgtaggccttcagcatttttttgacaaactcggtatttgatacggcagagctgcctaggatcaccctctcaacgccttgcgacaagtagtcatacacgtctttttcggtcctgatgccgccgccgacttgcactttaacgtcaagcttatcagcaatgcttatgacgtggccgccgttcacttttttgccttctcttgcgccgtccaaatcgacaagatgaatccagcttgccccctcttcagcaaaccgtgaggccatctccagaggggaatgaccgtaaatcgtttctttttcgtaatctccctggatgagcctgacgcacttgccgtttcttatgtcaatggcaggatatacagtaaactcgctcattttttcaccttctgttcttgtgtaaactgcttgaaccgctctaagatcaacatgccgaccgtactgctcttttccggatggaactgggccccgtatacattgccaagaccgacgacagcgggtacacacacaccgtattcggcgcttgcaagcaaagcttcctcttcgattccgctgacataatacgaatgaacgaaatacgcgaatccttctttcgcttttggcaaaagcggcgagtcgcggtggactttgagaagattccagcccatgtgaggcacttttaagcgatttcccgcttgatcacagtctttcagtttaacgacttttcctttcaacaggccgagcccttctgacgccccgtgttcttcgctttcttcaaacaaaagctgcatgccgaggcatatgccgagaagaggttttccttcgtttgcggcagcttgaataaatgttttcaggccgttctcggttaaaatctccattgcatcccgaaaagcgccgactcccggaaggatatagctgtccgctctcttcagttcatccggatgctcggacacaaaataaggggcatcaatccgttcaagcgctttagaaacgctgtacaggtttcccattccgtaatctatgacaccgatcatttacagcattcctttcgttgatggaattcccttgacccgcggatcgatcaatgccgcttcatcaagcgcacgtcccagcgctttaaaaatggcctcgatcatatggtgtgtgttcgtaccgtaatgaacgatgacatgcagattcattcgcgcttccagtgcaaacttccacaaaaattcatggacaagctctgtatcaaatgttccgattttcctgcttgggaattcagctctgaactcgaggtgcggcctgttgctcagatcaatcgcaacctgggcgagcgcttcatccatcggcaccatgctcgaaccgtagcgtttgattccttgtttatctccgagcgcttccaaaagcgcctgtccgagacaaattccgatatcttccgtcgtatggtggtcgtctatttcaacatcgcctttcgcttcaattgaaaggtcaaactgcccgtgttttgtaaataaatcaagcatatgtgtcataaacgggacatccgtttgaatatccgcttttccttctccgtcaatatgaaaggataatttaatatcagtttcattggtttttcttgcccgttcggcttttctcatcagtcttcctcccggtttctggattcaattgctcttgcatgggcttcaagcccttccaatctggcaaaggccgcaattttctcagcattcgcgcggaaagcttccctgctgtaggaaatgatgctggagcgcttttggaagtctgtcacatttagcgggcttgaaaatctggctgtaccgttagtcggcaggacatgattagggcctgcaaaataatcgcccaccggctctgaactgtagcggcccaggaaaatggcgcccgcatgtttgatctgtcccagcagcgcatcgggttgaactgttaaaatttccaaatgttcaggagcgagctcattgatgacggaaactgcttcattcatcgtctctgtaacatagatcaggccatagttgtcaatcgactgccgtgcaatctcttttctcggaagatgttcgagctgtctgtaaacctcttttaaaacggattcggcaagcgtctctgaatcggtgacaagaatgctcgatgccatcgcatcgtgttcagcctgtgaaagtagatctgcggcgatttcccggtagtttgccgtactgtcagcgagtatggcgatttcacttggacccgcgatcatatcgatatcaacctggccgaatacttcccgtttagccaaggcgacgtaaatatttccgggtcccgtaattttatcgacgggggtaatcgtttccgttccgtaagccaatgcggcaatcgcttgggcaccgcccattttgtaaatctctgtgacgccaagctccgcagcagcagccagcactcccgccgacaatttaccgtcttttcccggaggtgaggcaaggacaatgcggtcgacgcctgcaacaagcgccggaatgacattcatcagaacggatgatgggtaagcagccgttccgccgggcacatacacccccgctgaatcaagcggcgtaattttttggccgagcatcgttccgtccttgcggtggtaaaaccaagatgttgcgagctgacgctcatgatattctttaatgttgaaaatcgccgcctgaataatctcgagatcacgttcttcgagcgcgctgtatgcttccttgatttcctcttcggaaacgcgaaagccggccacatccgctccgtcaaattgtcttgtgaatgcggaaacagctgcatttccgttctttttcacttcttcgataatgccgcggactgcttttctttgttcctccgttccggcgtcaatagagcgttttagtgaaaccgacgtatttccgctgatggatttgatcttcattttgctttttctccttccacaataagagaaagtcttgaagccatttcatcgatgactgcgtctttcattcgatagctgacaggatttacgattaagcgggatgtgatgtcgcaaattttttcagtttcaactagcccgttttcacgcaaagtctgccctgttgatacgatatcaacgattcggccggcaagcccgatcagcggagcgagttcaatcgacccgttgagcttgatgatttccacttgttctccctgttctctgaagtagcttgatgcgacattcgggtacttggtcgcaacccggggcgcaacggtgtctgccgccgtctcgggcaggccggctacggcaagacggcatttgctgatgtttaaatcaagaacctcatagacatctcgttcttcttctagcaagacatctttgcctgcgattccgacatcggccaccccgtgctcgacatatgttgtgacatccatcggcttagcgaggataaagcgaaggttttcttcaggcacttgaatgatcagctttctcgaatcgtcgaattcttccgggagctgatagcctgcttttcgaagcatatcggccgcttcctcaaatatccgccctttcggcatcgcaatcgtcaattccttacccatgcttctcttcctttctggctccgataaaataggtcacgttttgaaaagactttgtcatttgatcaatatctccgattcccgctaagtcctgcatgacgacttttttgccttttcttcgttcttcttcggcaaatctgattgcctcttttctctgttctgtgctgaagatgacgacatcgatcttttcttgttcttccgccggcttcaatgcttccagcagcctgtcagtcctgatgccgaaaccggttgccggtgcgggtgagtcgaagcggccgagaagctgatcatatctgccgccgtttccgatcggaaagccgacgttttcagcatagatttcaaacaaaacaccggtatagtagctcatatggctgaccatgcctaaatcgagcttaatgtcgtctgtgcaaccataatcgccgagcgtctcccatagcgtttcaagttctaaaaccgcacgttttcctttttcagaatcgacgatggatgccgccctgctgcacgtttcaataccgcccctcagctccaaaagctccagcagcctgcttttatcaattgaggataaattgagggattttacatgctcccgatagccgacatagttcttttcgtataaatagcgccgcaggacatgagccctttcttcattccctaaaacttccacaaacaaggcgtctaaaataccgacatggccgatcgagattttaaatgaagtcaggccggcatttttaagcgaaaaaatgacgagcgcaatcacttctgcgtcagcgcttgtcgatccatcgccgatcagttcaacgccgacttgctcaaattcggcggggcgtcctccttcacgctcctgtgcccggaacacatttgcagcatagcatactctgagcggatgatcgtctttatgaagctttgaggccgccaccctggcgattggagccgtcatatcaggccttaacacgagcgtctgcccctcctgatcaaggagtttaaacaactgctgatccaatatggccgactgcacaccgaccgtatcataaaattcaagggcaggcgtctccatgaactgatacccccacaaagccatcacctctgttaatgaagagcgcacctttttctttgtttcgtaaagcataggcagcgtatcccgcatgccatgcggtttttcaaacataaacatttacacttgcacccccataaccgtttgaaggaaaattccgaatactttagttcgctaatatgataatatgctaacagataaaagaatcaaaatcaacagccgctcataaaatagacgcctgcaccgtatgggaaatgataacttttatgtaatgaacatcttgatgttataatatatatacgatcgcaaatctttgccttaaccaaaccagcaacgggaagacaggagactcagaatgaaatttttcaaaactcttttttttatttttttcgtagcagttcttatgaccgccgttcttatactgttttctaaagatgcgttaagcccgttagccgaaatgttgcacagcagccataaaactgctgctgacaatgcgaataataaaggagagcgtcagccgcttgacgttccgctgatcaaccaaatggacccgccgaagctttataacggctgtgaagtcgccagcctggcgatgatcttaaactacagcggatatagtgtcacaaaaactgaacttgccaatgaggtgaaaagagtgcctctgcaatatgaaaacggcttaaagggaaatcctaacgacggctttgtcggcgatatggaaaacggacccggactgagtgtctaccatggcccgatttacgatttggcccattcatacgcaggtaataaagcggtcgatctgacgggaagtgagccgggaaaaatttatgaacagctgaatcagggcagaccggtttgggtcatcaccactgtacatttcaccccagtcaacgatatggaaacatggaatacaccgtcaggcaaagtcgatgtgacgtacagcgttcacagtgttgccgtgacaggctatgatgaggattacgtttatgtgaatgatccgtacggatataaaaacagaaaaacagacagagaaaattttgaaaaatcatggaaacagatgggcagtcaggcgatcgtgatcgccgcctaaaaaggcagattaatccctgcctttttttagttctttcagcccttattaaattaagccgctttacccttttgataaatccaaaatacagaaaacaacctttctgcacatgtttaatttactgttttttcataatattcaaaatactcgtttacattcagcaagctcgcatatatgatagtaccgaaataggtgtctcattttattacataatgaccagaaatcactttcatttaagggagacacacacctgtttcaaaaatatttcttgaggaggatggaaatgatgaagagattagcaggtacggttattttgtcaggtttgctcgtatgcgggtttggacaggctctgcctgaaaaagctttggccgccgaggtcgttcacaaaacgatcgtagtcgagaaaggccaaacgtatgacggaaaaggcaagcggctgattgcaggtccggagctcggggacggcagccaacgcgaggatcaaaaaccgattttcaaagtggaggatggtgcaacgctcaaaaatgtcgtgcttggcgctcctgctgctgatggtgttcacacatatggaaacgcttccataaacaacgttgtttgggaagatgtcggcgaagatgccttgactgtcaaaagcgaaggaagtgtcacgataaacggaggatcggcccggcttgccgcggacaaaatctttcagattaataaagcgagcacatttaccgtgaaaaattttactgccgatcaaggaggcaaattcattcgccagctcggaggctcgacatttaaagccgtggtcaatattgataactgtacgattacaaacatgaaagaggcgatcttccgaaccgacagcagtacaagttccgttacaatgacaaatacaagatactcaaaagtcggtcagaaatggatcggtgtgaagcatgctacggaaagaaacaatcatgaattttaacactgattgcaaataaaggcccccgctctttattcagcgggggtctccaatcttttttccatttcttcttttgtatagatcagccgcatcggattgccgccgacaaaagcgcccgggggcacatctttatgaacgagcgtaccggcggaaatgacggcgccgtctccgatctcgacgcccgggaggatcgtcgtattggctccgatcatgacttcatcgccgatgatcacctcaccgagccgatattcttttattaaatactcgtgcgccaaaatggtcgtattatagccgattacggtgtttcgcccgactgagattttttcgggaaacatgatatccggcatgaccattaaagcaaacgagcatttctctccgattttcatccgcaaaaacgtccggtacatccagtttttcattccaagaatcggcgtatagcgcgccgcctgaatgacaataaagtttttgactactttaaaaaacggaaccgtctgatagatgtgccataaggaattggcgccggacaccgggtagcgcttcgtttttctcaaactttctccaccccaagaatgtgaaggaggtcgctcatttgctgaagcataaaatcaggctcgtgtttggccaggctttcttctcccttaatcgtccatgcaacgcctgctgttttcgttccagcattcttcccggctaaaatatcgtggtaattatcaccgatcataatggcttcttccggacggctgccaagcttggaaagggcgagcaaaacaggctcggggtcaggcttcggccgctcgacgtcatccagcgtcacaaccgtctcgaaaaaggcatcaagcccagtcagtttaagccccatgatgacggtgtcccgcagctttgtcgtgacgatgccgagcttatagccttcttccgcaaggcgttcaagcgtctcgtaaaccgtctcatactcggttaccagttcatcatgcatctgatgattaaatgtccggtacatggtgatcatttcttcagccttatccttttgaatgcttgagaacgtttcataaagggaaggtccgatgaaagcaagaacatcctcccgtttatagcgtcccggtgcataatgatcgagcgtatgcaaaaatgaggcgataatcagctcatttgtattgatgagcgttccatccaaatcaaataaaaccgtattaactttcatacaaagcttcctttctgcgaacggaataacccggctttctccagaagcgcgaaatcgcgatcgtcagcagaaccgcggtcgcaagcctgatcaacaaaagaggccagaccggaatgccgagcgggataaataccaatgtatcttcaacaaccgcgtggcaggcgacgagaaaaataaaagcaagcgtgacatcccttttgctgacgccgtcttcttcgaccgctttgatcataacgccggccccgtatgcaaggccgatcgtcagcccggcaaccattgtcattgaggtgttctctttcattccaagcattctcgttatcggtgcaaaccactttgaaaaagcattcagccagccgaggtctctcatatattgaatgatgatcatcagcggtattacgatggctgcaagctgaaggacaccaagacccgccttggtcacggcttctagcgcaatgtcaaaccagccggaaggagcggcgcttttcgctgagattaagccgtatttggccgcatcctgcccgccatgccagacaaggttgatgataatggccgaaaaaacagcgagaccgatgcgcacgagcaaaatcagccatattttgattccgacccttgaagcaacagtcgactcgataatcaagttgtggcaaaacgacagcataaccgctaaaataaacacttctttaacggtcaaatcaagcgttaaaattcccgcaattccggcatacaagttcagcatgttgccgagcacaagcggtatcgccgcttcccctgacaacccgaaaatccccatcgccggcgtgatcagtttgatcaaccagtccatcaccggtgtatgctgaagaaggctgacaatcagcgtgacaggaaaaatcacttttccaagcgtccacgttgttttcagccccgccacagcgccggcttttaaagttcccttcattgttgtcctccccttagtaaagtcgctacatctcctgataccgtttaatctctctgcctttgaaacgtctgtaggctatcagcgcagctgcacagaggatcagtacgatcgaaataacctgtgcgatgcgaagattctccgtcagcatcagactgtccgttctaaggccttcgataaagtagcgtcccatcgaataccaaataacgtagattaagaacagttcgcctctctttaaattcgcttttcttaaaagaagcagaacaacgactcccgtaaagctccacagcgattcatacaaaaaggtaggctggtagtattgtccgtcaatatacatttgattgatgataaaatcaggcaggtggaggttttctaaaaacgctcttgagaccgcctcaccgtgcgcttcctggttcataaagtttccccagcgtccgatcgcctgaccaagcagaatgcttggagcagcgatatcagccagcttccaaaacgaaagccccttgactttcgcataaatgattcccgtcagcacggcgccgatcagtccgccatgaatcgcaaggccgccgttccatatttgaataatctggtcaggatgttcactgtaataaccccattgaaaaatgacataatatgctcttgcacataaaatggcaatcggaatcgcaaaaagcaccaaatcgacaaaggtgtctttatgcagtcccctccgttcgccttccctgactgccagccacaaaccgagcaaagcgccaaggccgatgataataccgtaccaatggacagcgatcggccccagttgaaaagcaatcggatttaatggttcaatcgtttcattcatattgtcagctcctattcttcaagctcaccatcttcaattacatccgcaagcttatgggtaaattgctccgcggcattcagccccattctcttcagtctgaagttcattgcggccacttcgatgatgacggcaaggtttcttcccggacgaaccggaattgtcagctttggaacgtctgtatcaataattttcattgtttcttcttcaagccctaagcggtcgtactgctttccttgctcccaaagctccaggctcatgacaagggtaattcgtttaaagcttctgaccgcccccgcgccaaataacgtcatgacattgataatgccaagacctctgatttccaggagatgctcaattaattcaggcgcgcttccgatcaatgtatcctggtcttcctgtctgatctcaacgcagtcatccgccacaaggcgatggcctcttttgacaagctccaaagccgtttcgctttttccaacgccgctctttccgataatgagcaccccgacgccgtaaacgtcgacgaggacgccgtgaatcgcagttgtcggagccagctggctttcaagaaaattcgtcagacggctcgtcaggcgcgtcgtctttaatggggaacgaagcacaggcacgccgttttcttcggatgcctccacgagttcaggcggaatcggcaaatcacgggaaaggatgatagccggtgtaatttccgtgcataacgacagcatccgctgctttttttcctcctctggaagcttttcaaaaaaggtaatctcagtcttccccagcagctgaaccctctcttttggatagtatgtaaaataaccagccatttcaaggcccggtcttgataaatcgctcatcgtaatcgggcggttgatcccttcttctccgctgatgagctcaagcttaaatttatccatcacatcttttgttcgaactttcggcacgattgatgcaccctcctcttctcagatgaagaactagacattcagctttattctatcactttcaaaatgaacctaaaacattttttgataatggcccccttgacacttcgatgaagtgctttctttcaaagcgaaaaatcagtagtatgtaaagaggaacgcgaaaaggaagtgaagaaccgttgaaatacaatattcatgatacaaccgtgctgaacgaagacattttgacaccggaagaaaaagagacatgggttctttatatgaaagtactgactgctgccggcttgggggatgtctccgaatggatgaagctcgatctcagcatgccgcaaatgaaggttttaatgcttctgaacaaccacggcacactgaaagtctcagaaatcgccgaaaaaatgggagcttccctttcgaatatgaccggactgctcagccgccttgaacaggcgaactttatcaaaagaacacattccgagcaagaccggcgaacgattgtggttgaattaaccgaagatgcgaaggggatttttcggagcctttacaaaaaagggcatgaaaagctcaaaagagcgcttcagaagctgaatgaacaggaaaaaaacaaagtgaatgaaggccttaccattcttgaaaaagcgttaaaagctgacgatgaatagacaagctgcccggaaaccggtgcagctttttttgttgaaaaatttcttttgacaaaacgtgcttttttaaggatgataaaaataattcattcaaagtgaattattcattcgaagttaatgaaaaaggaggatacgtggcgtgaaccaaaagtgggctgtattattgtttacgatcggcgtgtttatggctgctttagacaacggcatcatttcagcggcactgacgacaatcaatgattcttttcaagtatccccctcatggggagcatggggcatcacgctttatacgctcggtttggcagtcagcgttccgatcgtcggaaagctgtctgaccggtatggacgcaaaaagctgtttatcatcgaagtcttgctgtttggcgccggttcgctgctcgttgcattgagccaaaacttcccgatgttcttgttggcgaggctgattcaatcgcttggcggaggcggaatctttattatcgggagctcgcatattctcactgcgctgcctaaagaaaaacagggaaccgccttggggcttttaggtgcgatgaacggaatcgcggcagtgctcggtccgaatatcggcagctttattttggatatgaccggaagctggcactggctgtttttgatcaaccttccgattgccgcagcactgatcatcctcagcgttccattgatgaaggagacaaaaggcggaacacgaaaacccctagatctggccggaactgtgatattgtctcttgcgattttagctgtgatgtacggaataacgaatataaacggacagcgcctgtctgccgtcttgtccgatccaaaggtttacttttttctcctgatcggctgcgcgctgtttgcgggactcattttttacgaaaagcgcgtagagctgaagggaggcgacccgatccttgcctacagtttattaaaaaacaaggtgtttcaatggacgctttttatcggatttttatccggcggactcttggcagccgttatttttattcctgcatatgcggaacaatatttgcacgtcgctcctgaaaaagcggggtattggatgacgcctcttgcgctggcttcagggataggagccgggctcggcggaatgctcgccgatcgaaaaggaccggtaaaggcggcccggctctctggcgtcatttcgttcgccgggtttttgctcttgtcctcctgggtgacagagaagtgggaatttgttttggcaagcatcatcgcaggggtcggttttggctttctgttaggcgcgccgttaaatatgcttgtatccgaggcggcaaaacaggattacgggacagcgctcggtacattatcgctcgtcaggcagatggggatgaccttggcgcccgcgctgtatgcaggatatataacggccggctacgaaaatatcggcacacatatcaaacataagctgaatgatgcagggatcactctgaaggggtttgcaggcggtgagacggacgtatcgcggctgagcgaatccctcagccaaattcccgacccaaaagtaaaagacatcataagcgaagcgatccatgaaagtgtgggagcggggttttttaacctctacttcacagccgccgtcctttcacttgcagtcattgcttctgtcagcgttttatcgctttataggaaaaaacaaaccgacacggcaagccgtctaaaaaaagacgtgacaaactaaaaagcatttgctccctcttaggaaaacaaatgctttttgcgttcgcaaaggaaaaccgccgccagccacaagctgatttcagcaattgggaggtttgtccctttctttaaaatcatcccggccgggggggggctccccgacaattgcctcagggccgagcccgccccggctgtttgatctattaaaaaggatttcatgccatcgtcttttgtcgtcaatctccacatttgagacctgctgttgccgccgtattgatctgaagctgcggcgtaccagaaataggttgtattcggctgcaaatctttccacgtcacggaagccgtctttccgcttttcaccgtttttgctttcccaatttccttgttcgaaaagacattcagctcaaaataatcggttttaacctttttcttcctcggtttcagatccgttttaatgttgaactcgtccttcgggccaaattggtgcggatcataaaagttatagtcatcaagatatggcgaatacgttttgacatggatcgtgtcatgcttcggatccacatggagaattcttaaataaccttggcctccttcaggaccgccctgatagtcggcaagcatttgataaaccttgcgatccggcttgccgtccccgttatcatcaagcttgtcgacttttaagttggagctgtgatagtgaccgctcaatacggcaatcacattcggattccgcttgatgatctgttcaaatattttctccccgattggacttctgcttccgctgacaagcaaaaactcgtgaaatgccaaaatcgcttttcgatcgggatggcgtttcagaacatcatctatccactgcagttctttttttccgattccccaccccatcgacaccatgatatagtcgttgcccccgctggaaatgaggtcgtagtgccctttgttattctgataagacccgccgtaatgcggtttttgtttaaaacgtctctccccgaagtacctgccgaatttcaaatatgaccggtctttatggctgacatcgtgattgcccgccagcacgccgtatggaacttgattgtcgtcgagaactttcatgaactggtcggcgcgcttccattgcagcggctgatccgcttcatccacaaggtcccccgtatgaaagacgtactgaatgttcagcttgtccttttgttccgcgatccacttgacctgacgttcaaaaatgtgcggatagctttccgaataatattgcgtatcagacatccacacaaatgtatagtcattttgcgaaagctgaatttgatcctgaatgatgatgctcgccttggattggcggatataatcggcggcttttatgcttcctttgagggtaaaaggtttgccatcctttgcaacatggaatgcaagcgtctcccacctcttgctggcccaattccaggcgaacatggagacttttctgccgggaagcgaactcccgcgccacagcacttccaccttgtcgttcggccccgtattttcatccacttttacatcaaagcgatggtacggaaactttgttgttgatgaggtttcaaaaccttttccgtcaagtgcggacatgccgctgcgctcttcttttgtcagcgccttttctcccctgaccgcaaagctttgcggaggttccgtcccgctttcgttcgctgacacatcaacatgctcttcgtcttttactgtgtactgaaatccctgatggaatgacactttcatcttatcttttgtcgggtccttgacgcggacggcgagcttagcatgtgtgctgccgggtgtatttttgacccgagcgggcttgtccggcttttcctctttaatgtaaaatgccttttttacgattgacaggttgccggcgctgtcctccgcttttattttcaactcgtgctttcccgcatccaggcgggcagaagatacgagatagggaagcgcaatctttttgccgtcaagaaaggcttttatgcttttcatcccgctccatttatcgtgtgcggccgcattgatctcaaacgaccctttatacgtcctgccgtcttttaatgacgttttgatctcaggacctgtgttatcgaccgttaccctgcggatgagcctttcttcgccattctccgcttcaacgatgtgctgcccttcgttccaggcgcgtgtatgccattgactcgcaagcgatgcaaacttggcttccggaatcgtaaaacggaattcataccattcatgcgccccagggccgtcaccggccggaagctcggctttcggatcgtcgtatcgctcatcgcggatgatggtcccatccgcgagtatgaggcgggggttcttgaggacaaaatcatccctgttttcttctgcagtttgttcaaatggtgttgatttcgtgcctgaacgaactttaatcgaaaacggctttccttttttaaattcatccggagaaaccgggaccgtaattgtcgcataccggcggcgcgaatcgtcaaaaactttttgaactctcctgccgatcgttacagcatttttaaaatacagattcgtttgattgacatcgaaagcaaagtaggcttttttttcaagcgccggttcaccttctttttgttcaatcccgtcaatacgaattgtcgtttcagaaggcggcttttctgatgtggctttcaacagcatttttccggaaacggttccgccttcgcttacattcagcctgagtcccttcaaaatgcgctgttcgagcggtatcgttttcttttcagtcgacgaaacatttgatccatcaccggcccgcatatagtactccactttttctttgccaatgagttcggcaaaatagatattgtggcggtacaggccgtcattgcggcttttttcaacacggacttcggtaaacggctcatcatcattcatgcggtagaaaaactgcgcctgcttcacttgccgattgtctttcatatcagctaagagctggatcgtttcacccggttttacagcttgatgatccgtcatatcatggatctccggcttttctctgtccggcataaccgtcaccgtctgtgaaggtgcctgcgtcttcagaagcgaaccaggcgacggtttttcttccccggccgatatgattttcatatgcttcgttccgtccagcggatatcgatacagaagcgctttatttttggcgacatcggttttatccggctcgctttgataacgggcggatgcgacctcttctccgctgtttgtgcagatgatcacctctctcggcgccgtattctccatgccgccccctttgagagcagtaagcgttttgccttcacgaaggtgaacaccgtaataccgattgaaatcactttccgtcagatgaccgtttgagcggtttttcacccaaaacacgtgtgtttgaccggaaggaatcgccacatcatcgtgctcaaaaggccagatgacgtctgattccttgcccttttcaggatgtctgtacttgattttgtagctgttcagatgaacagctttattggtattgttataaacttcaataaattcatagccgtcctttccaccggtgtttgacgtgtcgactaccatttccgtgatcaacagctccggaagcttttgtgtatctgtacgcatgcctttcagggcgacagtatacacatccgtcttcacagaggagtcgccgacttgagcttcaatgtagtactggactttgccggatgctatggattcgctttccaatttggcaatataggcgttctgtctgcccggctcaacttccatcggaatcgcccgatacggcaattcgtcatgctgcttgtaatataaaatgaccgtttcggcggccgcctgcgcggaaaaatatatgtcatctcctttttgaacttgttcaacaggagtatgcctgataaccggtgaaccaggctgaatatgctcttcacccgatgcggacgaaatcgggatctgcaaggcaaaaagtaaaactgcggccaacaataaaagggtttggcgatttctgtactttttcatcgtctacctccctttcgtattttgcctttacagatcatttttatgaaagagacatccgggcaaaaaaaagaagcctgatgattcatcagacttcaacttattttctggacatcggttcgataattgctttttgaatgagcaagtgaaaaaccgacaggacgatcgacgcaaaaatggctgtcccaaagccgtccaggtcaaaactgtcccccataatggacgcggtcatataaagagtgatcgcattgatgataaacaaaaataaacctagcgtaattactgtgacgggcagcgtcaaaatcaccagcacgggcttcacaaacatatttaagatggataaaatcaagcttgccgtaatggctgctccgatgcttctgacgtgaaccgcatcaaagtaaccggcaatgacaattaataataaggcattgacaagaacgtttataatccatctcatcatctgttgacgtctccttcattcggcacaaggaatacccagacaatataaatcagcaggacgggaactccggtcgaaaatataaataatagaaccgtaatgattctcagcaatgacgcatccatatttaaatattcagcaagacctccgacgaccccggcaatctttctgtctgtttcggatcgaaatagccttttcattgtatcactcctgtgtatggtttaaatggatcgatcctgtcttcgattccaaaaacacggtcatgctatgatcatgattttgatttgcttttaggtacatttccttctggattgtctcgtttttttcctttaaaatttctgcatctgaaagatcatgagacagagaaccgagattgcttttcagctccgctgtaacagcgcagtcccggggaacattcaactctacgcttccagtcgttgttttcacatatgccgtccggcagtgcggatttttgactgttgccgcgatattgccgttaaagctctgcaggtcaagcgcctcgcatgaacctttaaggtcgatcaatccattgatggtttccgcttcaatctctccgcaagtatggtcggctagtttgatttgtccatttgcagtttccaatgaagcttttcctgccgtgagagcagagaacgacagcacgccgttcgtcgttttggcggacagctcttttacgtttaaatgttcccctctgaccgggccgttaaacagtttaaagcggattttgccgtactctttgtccggtatatagacggtaaggttggtcttcatcgtttttttctcggtacggatcatgaacttatcgccttccacaccacagtcgatatgctggagaaaagcctgccttgcttcatcctgattttcagcccggtacacttttgcctggcattcgactctgatgtcggaatcgctccatggtacaaggttgacgctgccgttggcaagctgaatatccagagtcgaaaaatcagtgtctttaaactggaatatatgctggacatcgtacgagtgcccgaaattcaaatccaagtctgcttcttttactttttttacagcggtatcaatccattcgaacagttttgaaccgatagaaggcttcggttcttttttcttttcgctgtagaagtcctccgaatcaatgacatcctcagacagggctgtcaccttgctctcggtttccttgtagtcttcttcaagtttttcgatcaggatcagcgcctcttttgcagacagctttccttcctcgaccaattttaaaattcgttctttctcatgcttcatgaaaagctcccccgttctccttcttttaggcctgagtcagcattttaatcccttgaactacgttccagaccacaataatcaaactgatgatcccgaaaaaaacgaaacctccgatcatgaaaatgaccgccaaataaccgccgtcaccaaagataagcgtaccgcttatcgcgcctgctgccaatatgactacgcttataaacggaataatatgcgaaataagcgaacgcatcgcatgctttttcgtttcttgatcatctgttataaaatacgctgcgattggcaaaataagcggggcaaaaaaaacactaaaataacaaattgaagaaatcagcgcgttgtttctcgtcatacataacactccttatgatgtaaaccgttctttgtgagtctaatgtacagtgaccttatacttagtttacgtgtatcatggcctttaggtttcattttcattcgatcggcgtgcgtcaaacttcgcaaattgatttttttagattttatgaatagattctttttttataaccctttaaaatatgtggcaaagccaatgaaaaggagcgagcgttatgaaacagaaatcggaagtatacgcctcatccgcctcccagcttcttagtctgattcaggaacaaaaaaggatgaatcaggagatcgtgaaccgattggaatcgatcaattccgctcctccgctttccagcgaaatccgctatttaaaggttctgctgaacagcagcagcacccatattttaaacagtatgagtgaagcgaccaaacacatcagccggactgaacgttaaccgttttcatgatattttaaccagatttccgtcgggatctctgatataaaccgaaacgaccggcccttcagcgcccattcgctctgcggggccttcttcaattttaatggacagcccctccagatgacgaatcacatcatcaatgccggcatttgtatgaaacacaggtctgcggagccgggcatcgggtgctgtgccttcggctcaaactattttccggcttcgtggaggtttattttttgcctgccgaatgtcgcgcttttcttccttctcgaaaagtgaccgcattcaaccccggcacacggctgtaaaaatcacatgtcgcatcaatgtcttttacagtcagtaccaaatgatccatgcgatcgatcttcatcaccccatccccctttattgtttgtttttttacgttataacagctattgaataaaagagcaatgaaaatctttttgaacaaagcttgccgcggatcattcggccattgaaaaagctgccgacgtgacatcggcagctttttctttacggtctgacagcttctttttcttgaagccgcttcttcattctgtttttgtcgcgttcaatgatcggttttaaataacggccggtatatgacccttcgactttcacgacttcttcgggaggtccggcagccacgatcattcccccgccgtctccgccttcaggacccaagtcgatcaaataatcagccgcttttataatatctagattgtgttcgattacaagcactgtatctccattgtcgaccaggcgctgcagaacggccaaaagccttgcgatatcatcgacgtgcagtcctgtcgtcggctcgtccaaaatataaagggatcttcccgttgaacggcggtgaagttcagatgccaatttgacccgctgcgcttctcccccggaaagcgttgtagccggctgtccgagcgtaatatagccaagaccgacatcatagagggtctgcagcttgcgcttgattttcgggatgttctcaaaaaattgaacggcattctcgaccgtcatctcaagcacgtcagagatatttttgcctttgtacgtaacttgaagcgtttcacggttgtatctctttccgtggcaaacctcacaaggaacgtatacatcgggcaggaagtgcatctcgattttaatgattccgtcgcctttgcaggcctcacagcgtccgcctttgacgttaaagctgaagcgccctttcttgtatcctctgactttcgcttcattcgtctgggcaaacacgtcgcggatgtcatcgaacacgccggtatatgtggccggatttgacctcggcgtccggccgatcggagactggtcaatatcgatcactttatcgaggtgctcgattccttttatttctttgtattctcccggtttcgtcttagcccgatgcagcttctgagccagcgttttgtggagaatttcattaacgagcgtgcttttccctgatcccgataccccggtaacagctgtgaacacgccgagcggaaatttcacggaaacatttttcaagttgttttcctttgccccttttacctcgataaagcggttgttaggctttcttctctcggcaggaagaggaatgaattttttccctgaaagatattgccctgtcagagattgatcatcgttcatcacttcttccggcgttccggcggagattacttctcccccgtgtacacccgcgccgggcccgatatcgattaaataatcggcggcaagcattgtatcctcgtcatgctcgacgacgatcaatgtgtttccgatatccctcatgtttttgagcgtctcaatcagacggtcgttatcgcgttgatgaagaccgattgacggctcatcaaggatgtaaaggacaccggtcagccttgagccgatttgcgttgcaagcctgatccgctgcgcttctccccccgacagagtgccggctgcgcggctgagcgtcaaatagtcaagcccgacattgttcaagaatccgagcctttcttcaatctcccgcaaaatgaggttggcgatcttcatgtctttttccgaaagatcaagttcacggaaaaattgaagggcgttagctaccgacatttcggttatcttaccgatgtgaaggccgttaatcagcacggcgagggattcctttttcagacggtagcctttgcatgaagggcacggctgattagccatatatttttccatcagttcacgaacataatccgagctggtttctttatagcgcctttcgatattgcggatgacgccttcgaactcaatgtagttttcccggacttgtccgaagtcgttttcatatctgaaataaatctgctcgcctccgctgccgtagaggattttctcaaggtggtgcttcggcaggtctctgaccggaatatccatatcgattccatagtggctgcataccgcttcaagcagcttcggataatattgggagctctgcggttcccaaggtgcaatcgcattctcctttagagacagctcatcgtttggaatgacgagctctacatcgacttccagcttggacccgaggccgtcgcagctcggacatgcgccgaacgggctgttgaaagaaaacatcctcggctccagttccccaattgaaaaaccgcagtgcggacaggcatggtgctcgctgaacagcagctcttcctgcccgatcacgtcgatgatcacacggccttcgccgaggcggagcgccgtttcgagcgagtctgtgagacgggcggttacgccttcttttatgacgatgcggtcgacgacgacttcgatcgaatgctttttattcttttcgagctcgatgtcctctgagaggtcgttcatttcgccgtcgatccggactctcacatagccttgttttctgatttgttcgagcactttcacgtgcgatccttttcttcccgagacgatcggcgcaagcacctggatcttcgtccgctcgggataatccaaaattctgtccgtcatctgttcgatcgtttgcgaggtaatttcaatgccgtgaacagggcaaaccggctttccgattctggcaaacagcagccggagataatcgtagatttccgtcaccgttccgactgtcgaccgggggttccggctcgttgttttctgatcgatgctgatcgccggcgacaggccttcaatcgcatcgacgtcgggtttgtccatctgtcctaaaaactggcgggcatatgcggagagagactcgacatagcgccgctgcccctctgcatatatcgtatcgaacgcaagggatgatttccctgatcccgaaagacctgtcaaaacgacaagctgatccctcggaatagagacatcgatatttttcaggttatgggcccttgcacctttcacctcaattcgtttcgttgccattttctattcatccttccgattttaactctaggagcaagtcgcgaagctcggcggcgcgttcaaagtcaagcgcttttgccgcttccttcatgtcgctttccatttgagcgatcactttttcccgctctttcttcgtcatcttcgaaagcttcggctcctctttcacttgatattcttcctggtcttcagcagcatgagttgcccggatgacgtccctgatctttttgttgatcgttttcggcgtaatgccgtgtttctcattataagcctcctgctgttcgcggcggcgcttcgtttcattgattgcgatttccatcgagttggtgattttgtcggcatacatgattacgcggccttcggcatttctggcggcgcggccgatcgtttggatgagcgagcgttcggaccgcaaaaatccttctttgtctgcgtcaagaatggcgacgagtgaaacctcaggaatatcgagtccttccctcagcaggttgatgccgacgagaacgtcatgcttgccgaggcgaaggtcgcgtatgatctcgatccgctccagcgttttaatctctgaatgcaggtacgtgaccttgataccgatttccttcagataatccgtcaaatcctcggacatttttttcgtcagcgtcgtgacgaggacgcgttcattccgctcgattctctgctggatttcaccgatcagatcatcgatctgcccttcaatcggccttacctcaataatcggatcgagcagccctgtcggccggatgatctgctctaccatttcaggcgtatgctcaagttcataaggccccggcgtagccgacacatacacgatgttgtgaatgtgcttttcaaactcttcaaacctgagcggacggttatccaaagcggaaggcagcctgaatccgtgatcgacgagaacctgttttctcgcctggtctccgttgtacattcctctgatctgcggtatggtgacatgcgactcatctatgaccatcaggaaatcatccggaaagtaatcgagcagcgtatatggagtcgaacctgccggacgaagcgtcaaatgtcttgaatagttttcgatgcccgagcaaaagcccatttcgcgcatcatttccaaatcgtatctcgtccgctgttccagacgctgcgcttcaaggagcttgccttcttcacgaagcgctttgaggcgctcttccagctcctcttcaatgtttatgatcgctttcttcatcttttcttcccgggtgacgaagtgggaagccgggaagatcgcgacgtgttccctctcccctaaaatttcgccagtcagggcatccacttccctgatccgttcgatttcgtccccgaaaaattcaactcggacgcagtgctcatcccttgaagccggaaagatctcgacgacatcgccgcgcaccctgaatgttccgcgctgaaaatcgatgtcattccgcgcatattggatgtcaacgagctttctgagcagctcattccgctcgatttccatttccgttctgagcgagagcaccatttccctgtattcctcaggagaacccaagccgtaaatacaagagacactcgccacaatgatgacatctttgcgttcaaaaagagcagacgtggcagagtgccttaatttatcaatctcatcgttaatgctggcatctttttcgataaatgtatcagtctggggcacgtaggcctcaggctggtaatagtcataatagctgacaaaatattcgactgcgttgttggggaaaaattctttaaactcgctgtaaagctgcccggctaacgttttgttgtgggcgatgacgagagtcggtttgttgacctctttaatcacgttcgacatcgtaaacgtctttccagtaccggttgcccccaaaagcgtctgatgctttctgccttcattgattcctttgacaagctgatcaatcgctttcggctgatccccctggggctgataattcgagactaattcaaagcggtctttcacataaaagcctccgtttctttacgaaatcttcctgtttattattttaacacacccgaagcaaaaatacgaactaaagttcggtttttgtgttttcccacaaaagccggcgatttctgatctatcaaaaaacccctcctttttgtcatcaaaagcagggcttcacggcaatcaatcttacggtttctatgagtcttccttcttttcgcccgccttttttgccgcatagagcgaaccggcgacgagcgaggcgatatcaagtcctacaataaaaaaggtttccgtataaccttttaaatatgaagcgaacaacagcgctgcagtgagcgcaattccgacgtaatggttataggtcacccttgtaaaaaacaagacaagaataaaaggaaatatcagtgcaaaaacggcttttgtaaacacaaaaaccctcctcacgtttcttgatcttattcgattatattaaagaacaaagaaacggacaaacatggacactcattcattttgtccatcatcttgccgcgttattcggaatcggacgttaaaaggcgaaaaagaacgatattccggcggccaggaggtttggcatggcgaaaatggcgagagcgtttgccagcttgctgttccactccccgtgctctttcgtttctgcatcgtgatttcccctgaaccggtcaccgctgacaaatacgcccgaacataaagcagacaacagaatcgcgcctaggccggctgctcccgaaactttgaaaatcagcgtccaatccccggccgcagccgaaaccaatacagctattaaacaaacgaaagcacctgcgagaaaagcccttttcatcaatcattctccttcaatgagttctatccatcatcctagcggaacgttttgtaaaagacaaccaaaaagtttcgaaacaaggcaaaagcaaaagcgcctgaaagcggcgcttttttaacatcggttattctgtttctgctgaggctgctgcctcggcatgcttcatcaccgcatcctcttcttttacaaagatgatgccgagctcatgatgctccccttcataagaagctctttgttcaaaacgaatctcattgtttaaaccgacgacttcaagcttgaagaaagccctgttcttttggagcgcttcgtagaagtccgccgcatttttcacttcaatcccgttgaccttcgtgatgatttcgccgatcttgagaccgagatcggctgccggcgtgttcggaataatcccgagcaccatcaagccctggtctctctttgaaaaatggaaaggggcggaattgtcgttcatccgctgcttccaggataaaaaggcccttcctgcgatcgctgctccggcggcaagggcggcaagcggagtccaccatatgcttccggccgcgatcagcagaatgatgatgccaagcacgctgatgcgcttcgctgtaattttaatgctttcaatcggaagcgatccttgaaccctttggccgaagccgatgaaatacggaatccacaagagctcaaagccgccgttaaatgacaaaacaggccaccacggaacagatgattcgatcgcatgtcccggaataagaataaacaacggcagaagccaggttctgcccgcaatctgctgtccgatcgggagaccccttgtgctcatgacaatcgcaggggacgttttgatatgtgccgttttatagacaagcactccttccgccaccaacagaagtccgagcaagacggcagcagccgaccaattcgcgagggacagctgcggcagaaacgcgtcaagcgctccgaaaccggtgtattcaatacataaaccaacgacgatgctcacgccaagcgtatatgccgctgacagcagactctgtctgaaagttaaagctgcggcaacgctgaccgccgctattaaaaccagcatgcccatcgggagatacagccccaagccgaacgaaacaatggacagtacaagtcctgccagaagtcccttggaatatgtaaatttgaactcgtcataaatatcttcaatacgcgtatggaacgtctttctttcacgtttgatccgggcatagccgtaagcaagactcataatcatcataaaatagaagagcgggtgcaaaaagaacaatcctgctccttttaaaagttcaattaagctttcttcaactgacaagggaacgttcaccgcctcagccaagcatttcaggccgccttcaacacggcagctttttaacgttggatattttaaggaaacccagcttgtctaaagcgtcggcacgaggaaatgacgggcggccgttcaggcgggatgcctgagccgtcagccgcagaaactttcgtcatgatgcttaaacgccggtgcttttcatgcgcattcgtgacgacaaatgctggcacctttaggcaagctggtgcattttattattattctaacaaataataaaatgcttgggtatggtaaacgtgaggtttatttctcctggctcatccaaagcgtcacattcgacaaagaaaaatctttcaggtaatgattgacctcgacatcaagaatatctcctatcagctgcattgaccgcttgatgtcggtcagattgatgccgagccgcttgtggttgtccatcaagtagttgaaataaagttccgcgcaatcctcattaatatcttccacactttcgaccgaagtgtagttcacgaggtatctgctgaacagcataagcaatcctactgcctttgtagcggaaaacgtaacgtcttgtgatcgaacttttaactgctccactaattcatagtattttttctctctcacaatacttgcccttttcaatcgtgtacccccatttattatttatatataagaaaagcgcaagcgtcagacgactccaccaacagagacgaagaacgcaaacagcgctaacattctccgcaaaaaaaatgcacacattataattcttgaaaaagctttggttctattttaaaaagttttcctatgttatacaacttgcaaaagttacatttttactgcatctttacatccttataaagtctcccatatacttatgttatcgggtcaattctattcattatgaatgttttttttatgaaaaagcaaaaattttaggtaaaaagattgagaatttactttctgagaataaaaaaagtgaggacatcccgtgccctcactttttgttaaacagcacttttaatgcggcttgcagctgaagatcgttcttttcatccatctttttctcctcaatccgcaggttcattgtatttgccgttttttggtcaatgatccctgtttgcttcagcttgtttgctgcctgaaacgccatgacggctttttttgtgctttcattgtaatagccgtcttcccggccggggacaaacccgagtcctttcagcaggaactgcgcccgcttaatttcattgttgttcatatccggcttgaggggttctttcagctgtaaaggccccgccgagaaatatgcaggctgcgtgactggaacggtcggctgaatgccctgcttatggatccaatttcctttaggtgtcagccatttgtacagcgtcagcttaatattgctaccgtctcccatcggcaccgcctgctggacggttccctttccaaaggaaggatcgccaaccacgtcgtagccctcggcttcttttaatgcgcctgcaagaatttccgaagccgaagcgctgcccttgtccgtgatcacgctcacagggtatggttttttctcttttaattttgagaagtattgttttttatttccgtttctttcggcgatttgtatatacggatgatcttttgtcacaaaatgttttaaaatgtcttccacgctttgcaagtacccgcccggatttcctcttacatccaaaacgagcccttttattccctttttctcaagctttttcagttcagcagtaaaatcttttgccgtatgttcggaaaaggaagatattgcgatatagccgacaggtttatcctgtactttctttatggaagcaaacaccgtttccagcgggatttcatcgcgcttaatcgtaaatgtcagctggtctttcattccgggtcggtgaactttcagtgtaaccgtcgatccctttttgcctctgatctttaatacggcgtcattcaaatccattccgctcatggaatcgccgtcgatgctgatgatttcatcgttcggctttaatccggctttctctgccggagactgtttaaaaggagaaacgataatgatttttctgtcttccattccgatttctgcaccgattccttcaaaagaggaatcaagggaatctgaaaaccgctttgccgtctgtttatccatatagaccgagtatgggtcattcaatgttgaaagcatgccctgtatggctccttccaacagtttttccctgtcgacctgctccacatattcatttgaaatcaggtcatatgctttctcaattttctccaattcgtttctagcggtgcttttggctgcagcttcttcagccgctgatgcttttgaaacgacatcatgtaacggaatcgggccggcgcctgttaccaagccgcataacaggctgagcgcaatgatgagccgcacaatcttctgattcatcctatacctcctcttctgcctgcactatgttttgttgcttgatgtagtatgcgccaaaaccgcccgtatcatgtaatcgattttccattccacagcaaaaaaagctgccggagtgctggcagctttcgcttatatggtcctcacgcgcttgatgatttcttctgtcacatcatccgtcgtacttgaaccgccgatatcaggcgttaagtagccgctctttagaacgtcttcaatcacgtcaagcaatcttgcaccgagttcttcttccccgaaatgatcgagcatcatttttgccgtccaaatttggccgatcggattggcgattccttttccgatgatgtccggagcagagccgtgcacaggctcaaacatagatggatatttgccgtttacattaatgttggcggccggcgccacacctatgcttcccataatcgccgccccgatatcggtcaaaatatcgccgaataaattgctggcaacaatgacgtcaagcttctctggcctcgttacaaaaaaggccgacagcgcgtcaatgtgctgcgaatctgcggtaatatcggggtagtcttttgccgtgttctcaaagacttcatcccaaaaaggcattgaataaacgattccgttcgactttgttgcgcttgtgacatgctttttccgcttagccgccaactcaaaagcaaagcgcatcgccctctccgccccttttcttgaaaaaacggcattttgaatggcgatttcatcttcatccctgaagattctgcctccgatcgagctgtattccccttcactgttttccctgacgacaagcagatcgaaatcttttgggttggccagcggagacttgattccttgcaaatatttcgcaggtctaatgttgatgacctgttcaaattcgcggcggattttaatgagcagcccccacagggaaatatggtcggggacaagcttgctgtttcctacagccccaagaaagatgctgtcgaactctttcagctgctccaagccgtcatcaggcatcatttccccgtgttccaaataatactcacagctgtatggaaactccgtaaaccgaaatgagagtcccccgtgaacatccgaaaccgctttcaaaactcgttgtgcagcaggtacgacttctttccctaccccgtcaccgggtatgctggcaatgttgaatactttcattggatcatcccctatttcaaattgtcgactgtcgacagttgtcactttcattctataccttgtgttattttctgacaagaataaattttgagaaaaatccagtttgaataacaaaaagccgattcagtccatctccggacgaatcggctttcattttaaagcggtatataattggccggatcaacagcattggatttcgcgttgttccaaaggcctttatgaatttcaaagtgaagatgctgcccgtaggattggcctgtatttcccatcgttccgatcacttgtccctgttcaacacgctggcctgtctgcactttaattgaagacatgtgagcgtagaccgtctgatatgtttgcccgttgatgttatgggtaataaacacaacattgccgtagctggacgagtaatgggcgttatagaccgttccggcggcggccgcataaatcggaacgcctgaaccgcgcttggcgatgtctacgccgaagtgatttccgagcgaacgctttccgaacccggaagtaaatgtgccggaagcagggcggataaagcctgagctgcttggtgccgacggtttagatgaggaagcttccgattggccgcttgaagcctggcggctcgcttcagcttcctgctttttgcgatgcgcctcttcggctttgatcgcttcatcctggcgctttaaaatttctgcttcattttcgagtgaaccaagttcttcatgtgcatgatctttatcttgcttcacttttttcatgacatttgctttctctttttgctgcttgtcgagcgtcttttttaaatcttccaggtctttgagcgctttttcaaggctttcaagatccttgctcagcttagtttccttttcctcgacaagctgaagatcgcgtttttgctcttccatcaggtctttatcagcttctacaattgtcgaaaccgcacccgcgcggctgatgaaatccccgaagcttttcgagccgagaagcacatctatgtattgaacagaaccgccgttttcctgcattgagcgaacacggtctttcaatattttattgcgtttctcaatcttttctttaagcttttttatttgctttttcagctcttcgatgcttttctttgttttatcgatttcttcatttttcttttccagcttttcattcgtgtccgtcatcttacggtcaattttctcgatctcgcttctcaggcttgcttcctttgattcaagctctgaaagctcctgtttcgttttttcgagttttgactcgttttcagattttttgctttgaacgtcgctcttttttttctccaagtcttcataagctaaagcatggttgctttttaaggggatcagcactgccgacgatccgagcacagcggtcagccccagcgtcataagctttcttttcaaccttggttcctccttgccttcagaatcaagggagcccggcgctttgcaggcatcccagctttaaacatgatacaaccggcgaaagcgccggtttaaacttttaagaatttgcgaatcgacatcaagcttccccatacaccgataacggctccgatcagcaccaggatcgctgaaatctggaagacgaacggattgtacggcaagagctgtatgaaagtgccttgaactttcggagcgatccactgaacggcatgatgatacgttccgagcaaaatagcgatcggaatgatagaaccgcatacacccaagagcaaaccttcaatgaaaaatggccagcgaatgaaccagtttgtcgcacctacaagtttcataatctcgatttctttgcgtctcgcaaaaatcgtaattttgatcgtattagaaattaaaaacatcgccgtaaacagcaggccgatgaccaatgcaatcccgatgactttggcgacattgctgattttaaacaagcggtctacctgctcctgtccgtatgtcaccttatagacattggtcagcttctcaagcttcttggcagctttcggtgtgtcttgagggtcttttgtttttacgacaaatgcatcgttcagcgggttttcctgctcgaacatcgcaaagaatttcccgtcttccccaaagctgtctttcaggtttttgagttcttcatctttagatgagtatttgacactgctgatttccggtattttctttatttctttttccaatgtatttttttgatcctggttggccgttaagtcaaccagcactttgacttcgacttcttgttcggcttttaatgtcatattgtatacgttcagcatgatgaccatgaacacgccgaccaagataagtgtaactgttacagcactgatggatgcgaaagtcatccacgcgtttctcccgagagattttaagctctcgcgcaaatgccgtccgagagttctaatcataagaaccatactcccctctagcttcatcacgcacaatgaccccgtcttcgattgcgatgacccgtttcttcatggtgtttacgatttctttgttatgagtcgccataacgactgttgttccgcggttgttgatctcttcgagcgtcttcatgatttcccaagacgtctcagggtcaaggtttcccgtcggctcgtcagcgatcacgacatcagggtcgttgacgattgaccgcgcaattgaaacccgttgctgttctcctccggacagctgatcaggaaattgccttgctttgtgcttcagctggacaagatcaagcacttcaagcactttttttctgatcacctctgggcgctccccgatgacctctaaagcaaatgcaacattttcaaacaccgtcagcttcggcagcagtttaaagtcttggaatacaacgccgattttccttctgataaaaggaatctctttttctttgagctgcgccaaatttttattgtttatgacaatcttccctttggaaggcttttcttcgcggtaaatcattttaatgaaggttgattttcctgctccgctcggtcctacaacataaacaaattccccgggatatatagagatgcttattccgttcagcgccgagaccccgttggaataagtcttatatacatcttttatttcgatcatgtaatcacctaatcttttatgtttatacggtcatactcttcgaaagggcctgtcgttttgtgtcccctgccaatttcacgataaatggtattaattcaagccctttttcaacaacacccattatacgtcaagattagacaaaatgatattacagttttgtttcaatgccgacctaagttataggaaaaacgcaaaatcagccaaaaaatttgtactttgggccttatttaagacaaaagaacccgttaattccgttttcccaataggcaaaaagaccttttcaacaaaaaaagaacctttttcacctgaacgtgaagaaggttcttttcgcctcctgactggcaaggcatgcttactttttctctgaaagccacttcgcgaccgcttcagcttctttttcgtctacaagattgccaggcattccgccgcggccgttgactacaatgtccttaatttcgctttccttatacttgccgccaacttccttcaaactcggagcggaaccgccggccaaatccttaccatggcagcctgtgcagttttgctggtaaatctcttccccgtcggttgcagttgcttgcccgcctgtatttttctctttgctttcgttgttattgccgccgcaggcagccagcacaaaagaaacagccataaacagagtaaacagcttcattttcattttttcaagtcagctcctttaacaagtcaacctttattataacgtcgattatgcgcgtttaaaaccctcgccaagcacctctgaagcatccatcgcaatgacaaatgcagactcatcaatgtgttttacgagttgtttcagctttgtgaactcggtctggccgaccacgcacatcaaaataggccgctcatcatctgtatagcctccgaccgctgatattttcgtaatccccctgtcgattttattcagtaccgcatgtcgaacttcctcttcccggttcgtaatgatcatcgccattttggaacggttcaatccgacctggatgacatcgatggttttgcttgatatataaacgccaagcatagcataaagtccctgttcgatgttaaaaacaaacatcgcggacaggacgatcgttccgtcaatcagcgccaaacatttgccttgcgacagcccggtgtacttatgaatgatttgagcggccagcgcagtgccgcctgtcgagccccttccgagaaagaccatcccgatcccgactccgatgccgacaccgccgaaaatggcggccaagagcggattctctgtcgccggagcaatgtcccgcgtcacgtatacgacaaacgggagaaaaacagacccgacaagcgtcttgatgccgaattttcctccgagtaccagaaccccggcaataaataaaggaatattaaatgcccattgcacataggcggcttcaaagccgaacgattgcaaaatggtgctgatgccgctgactccgccggctgcaatccggttgggaagcaaaaacatattaaatgtcacagcgacgacggctgatccaaacaggatatagccgtagtcacgcagcaccgtaaacaattgatatctcgttttgtccatattcatgtctgtcatcctccgcacgattcattaccaatcgagagtatagcatttagcatactgtaagtaaataacagccaaataacgtattaattgaataaagcggcagagggacaaagcttcttacggcttaggctgtacatatccaggcggatttacccacacaaaaaaagacacatctcacaatatggatggtcttttttcaatttaggaaagcttggaacgcaaatatgcgtcgatgaaagagtcaatgtctccgtccatgaccgcctgcacgttccccatttccgtgttcgttctatgatccttcactagggaatacggatggaaaacgtatgagcggatctggcttccccagccgatttctttttgttcgccgcgaatttcgtcaagctgtgcctgctgctcttcgattctgcgctgatacagcttcgacttcagcattttcatggcacgttcgcggtttttaatttgcgagcgttccgtctggcaagtgacgatgacgcctgtcggcaggtgggtgatcctgacggcggagtctgtcgtattgacgtgctggccgccggcgccgcttgccctgtacgtatcgactttaatatcttccgtgcggatctcaatgtcgatttcttcgttgaattcaggcatgacatcacaagacacaaacgacgtgtgcctgcgccctgatgagtcgaacggagaaattctgacgagcctgtgcacacctttctcggcttttaaatagccgtatgcattgtggcctttgatcaggagagtgacagacttgattcccgcttcatcccctgggaggtaatcaagggtttccaccttaaatccgcggcgctctgcccacctggtgtacattctgagaagcattgaaccccaatcctgtgattctgtgccgccggctcccgggtgaagctcaaggatcgcattgtttttatcatacggctcgcttaacaacagctgcagctcaaattcgttaaattgcttcgttaagcttttcagctcgctgaccagttcattttgcaggtcttggtcaggatcttcttttaaaagatcgtgtgtcatttgcagttcttcatgagactcgcttaaatttttgtacgtgttgacatagtcttttaacgcgttcgcttcattaatgatcgtctgcgctttctgctgatctccccaaaagtcggggtcagccatctgctcgtctagttcgctgattcttgcttcctttgtttcgaggtcaaagagaccccctgaagtccgctaaccgagtagccatattttcaagttcctgtctgatttctgccaattccattattctttcacctcatcatatatttcagccggttcaaaataaaaagaggcgtgcacctctttttattctgttcttccgcagcagtttttatatttttttccgcttccgcagtagcaaggatcattgcgtccgatatccaccgctttgcggaccggttttttcttcgcttgtttttcctcatcgccttctttcggctgatgggctgtcgtctgtccttgaatgacctcttcgcgctcaaggttgttttcgatttcagccttcatgacgaatttggctacatcatcttcaatcgccgcgatcatgttttcaaacattgcaaagccttccatctgatactcgcggagcgggtttgtctgagcataagcgcgcagatgaattccttgccgcagctgatccatcgcatcgatgtgatccatccatttcgtatccacttcgcggagaacgatgactttctcaaattcgcgcatttgttcagagccgtaccgctcttctttctcatcgtatttcgttttgatgcggtcgtaaatgagctctgtaatctcctcgggctcttttccgaaaatgtcgcttttctccactccaccttcatcaaggaaattcgcatttacaagctccacaaggccgtcaagattccactcttcaggcagatcttccttcggcgtatatgaagcaacagcccgctcgagtgaagctttaatcatattttcgacgatggagcggaggttatcggaatcgatgacctcaaagcgctgtttatagatgacttcgcgctgctggcggagcacgtcatcgtattgcagaagctgcttacgggcatcaaagttgttgccttccacacgcttctgtgaagattcgaccgctcttgaaaccatcttgctctgtatcggcgtcgaatcgtccattccgaagcggtcaagcatcgccatcgtccgctctgcgccgaagcgtttcattaattcatcttccatggacagataaaattgggtgataccagggtccccctgacggcctgaacgtccgcgcagctggttgtcaatccgccttgattcatggcgttccgtaccgatgacggccagtccgccaagctcttttacaccttcgccaagcttgatgtccgttccgcggcccgccatgttggtcgcgatggtgaccgcgcctttttgcccggcatcttcgataatctgagcttcccgctcatggtttttcgcgttcaacacttgatgcgggattcctttatttttaaggagccttgatatcaattcagatgtttcaaccgcaaccgtaccgacaagtaccggctgtccgaccatatagcgctgggcgacatcctctgcaacagctttaaattttccttccatggtccggtaaattaaatccggtcggtcatcgcgggcaatcggcttgttggtcggaatcgtaacaacctgcatgttgtagatgttgcggaattcttcttcttccgtttttgcggtacccgtcattccggccaatttttcatacattcggaaatagttctggaaggtgatcgtcgcgagcgtcatgctctcattttggatctcaaggccttccttcgcttcaatggcctggtgaagtccgtcgctgtagcggcggcctttcatcaaacggcctgtaaaagagtcgacgataacgacctgaccgtcttcgacgacgtagtcgacgtctttatgcatcgccgcatgggctttcagcgcctgggcaatatgatggtttaaggcgacatggcggacgtcaaacaagttttcgatgccaaatgccttttcagcttttgtcatcccctcttcagtcagctgaacgccttttgttttcacatcgtatgtgtagtcctgatccgcttttagcgtgcggacaaacgcattggcctgaacataaagcttggtggatttggccgcttgtccagaaatgatgagcggcgttcttgcttcatcgatcaaaatggagtcgacttcatcgatgaccgcaaaatgaagcgggcgctgaaccatctgctctttataaagcaccatgttgtcgcgcaagtagtcaaagccaagctcattattcgtagaatacgtaatatctgctgcataggcttcacgcttctcgtcttttgacaggctgttcaggtttaggccgaccgtcagcccgagaaactcaaagattttccccatctcttcagcgtcgcggctcgccaggtattcgttgaccgtcacgacgtgaacgcctttccctgacagagcgttcaagtaaacgggcattgtggaagtcagcgttttaccttcccccgttttcatttcggcgatattcccttcatgaagggcgacgccccccatcagctgaaccttaaacggaaacatgcctgtcacgcgccgggaagcttccctgacaacggcaaacgcttcaaccaaaagatcgtcaaccgtttcgcctttttcaaggcgctctttgaactcgatcgtcttttgcttcaaagcttcgtctgaaagcttctctatatctgccttgagcgcatcaatctcgttcgctttcttttcataacggctgagcgtgcgttttgtcggatcaaacactttatttaaaattccaagcatagaataacgctcctctttaatttccttgtttaagcatgagtaaacagtaatttttatatatgcaatatcatatcataccttttgtcatttccaaacaatttaccgcgggggaacggaaaaaatcccctctgcggaagatccgggaggggactcgatatatttattcgttcggctcgatcaaaccgtattttccatcgtttcttcggtagaccacattggtcagattggtttcggcgttcgtgaatacaaagaagctgtgtccaagcatattcatttgtaaaatcgcttcttcattatccatcggctttaaattaaagcgcttttgacggacaacctgcggctgttcatcctcaatgtcttcctgcacggccgttccgatgccgtttccttctgcaaaaacatgcttcgaagaacctttttcgcggaatttccggttaacttttgttttatgcttgcgtatttgacgttccagtttgttcgttgcgagatcgattgcattgtacatatcttcgtggtgaacttccgcacggagagagaggtctgtcattggaattgtcacttccacctttgattcctgatcattgtagaattttaagttgacgtgaacaatcgcatcaacgttattttcaaaataacgctcaagctttccaatcttcttctcgacgtgttctcttaacgctggtgttacctcaatattttctcctctgacgttgaactccatcaaaagaacgcctcctttatattaaggatatgtaaatatatttcgtcttttccctgctgaattcctgcataaacgtaaaaattatgtgaaaaatccgtgaattttgacgaagtttgtctcctgccatctgagcccctttattaaatcttaaatatattcacatgcggataaaataagaacaaaaaataacggcatacacctgcagaatcctgacagatgtatgccattaatggatgacataaggtttcatgcattggtggatcgttttcatccattcccgataaagcggtaaaaagtgatggatcaagtcatgctgaaattcagcagacggataattgtagtagatcaagctgtcaaactcacggaagactctgtcaaaaaaacgaatcgaagatttggcacagcttgtctccaaaatcgacagcaaaacagcgtgcgacgaatccaactgaaaaaaagcatagattaaatcgttaaaaatccgctctccttctgtcttcgccaaatcttgattcgcttctattaaatagcaaaacccctcttcaatcgtaaacaaaagctgataataagtcgttaagagcatgtaatcgtcggtgcttgtcaaagcgatcacctatttgcgcttgtcataatatgtgccgtcaatcgtcatgttggcgtacggattgatataggaatgatgcatggcacgcttctgcttcgcctgaagcagctcctgcttgacagcctgctgcagcctttcagttcggccatgatcaatggctccatatccgtcacctgctgcagctgccgcttttccgtctcagaaagaggcggcttgatctcgcggatcaagccatcgcgttttttaagaaaatcttcaattgcctgaaccagctcatcgctttccggggcgccttttatttgagcgagcatatgttttgtttcgctgtagagcagctcaatcttttccattatgccagtccgcccgatccgaaccggccctgccgttcaatttgaagcgcctgcttccaggcatcgcgtaaatctttgacatacccttcgacttccgccacgatatctttgtcattgttaatgtttgcttcaatcaggcggcggtggatatactcgtacatcgcccccatcgaagcggccaattcgactttccggtcaagggtgatattgagctcctgtataatgttttgagctttgacaaggttcgtatttttcgtttccatatcctcttgttcaatcgcctgtttcgccagcttcataaatttaaggcagccgtcaaatagcataagcgtcaattctccaggagtcgccatgttgattgaattttgctgataagctgcatacggattgtttaaagccattgttgatcctccaaattacaattattgtccaagcaattgcgccaagtatgtcgattgttcattcattttttgaatcgctttttccatcgccgtgaactttgtataatagcgattttcgatttgtgtcaggcggttattcatggacgaaatatcagattcaactgtattcaagtttttcccgattgtaaattgattgtttgccatagctgaatttccggctttatcttcaatctgcttcttcgtatcggtcaaaaccgtctgaaggcgtctcatgatgcctttttcattgtaattttccgtgctgctcgttcccgccataaagaggtttgccacactgtcagggtcttctttaattttcgctttcagcttttcttcgttgatctctaaatgaccgcgctgactgtatacgcttgatgtcgtaattccaaactgagtgagctgcagcgattcgccgttcacagagacattcgaataaaaatctgtcctcatttgattggtggcgccgcttaaaatcgtgtcgccccttaacaatccgcttttcgctttttcttcccacagctcaatttgcttttccgtcatatcttttttctgttcttctgtcagcggcgtatagtcgcggtatttcttttccgtgagcttgccgttgaccatatcgatcagttcgttgtactgtgtgacaaagtctttaatcttttcataaatcccgtcaacatcagtcgctacatcaagcgaaacggggctgtttgtcgtattcttcaactgatatgtcacattattaacggtaaagttgttcgttgtcttctcaatctgcaatccgttgatgacaacttcggcgttttggccggcttggctggctgtcagcttgttgtcggcatcaagcgcaaatccgagctgattggacataaagctcgccgtcgcatcatcagctgcctgtatgctgccccctgcgccggttgcttttgatgtgaaagcgatcgtttctacatattcagaaccgttataaatcttttctttcatagcggttacgcccaaatttgatttgttgactttggaaacgatgtcatccagcgtatccgtgctgctgacgctgatttcaacttttttcgcagtcgtttctccaggtgctgtcacttggaaagttagcgtttgatcgctcccggtataccctgaaaggctggaagatttataggtggccgcagtcgccagcttgttgacttggatcgtgcctgacgccgcattcgtggtgcctgttgccgtaaccgccgactcgtcagagcttgtcacctttttcgcgccgtacgtgctgggacggagcataaggttgatggattcctgcaaatctttaattttcgtattgatttcacgatagctgtcgcgctgccattccaaagtctgtttcttttgagtaagcttatcaagcgggacgcgctccgtcttcattaatttgctgacaatgtcgtctatatccatacctgaagctaatcctgatattctgatcgccatttctttaacactcctgttctatgtagttttatcgacaattaaccccataaattccgccatcgccgcataaaaatcgagccactcctttggcggaatctcgcggacgacttcctctgtccgattgtccacgaccttcacataatactctcccaatttttcgtgaagcacaaactgtaggtgcacctgcgacggctccaaaaggttgtttgcgccttgtacggttttttcaagctgagcaaatgtaaattctgcagcgtccgtctgctgcgggcgttccacagcttcatactgtttattcaacatctgtgttttgtaagcatcaataatgggttctaaagatgacaatctattgatcgacaatttttaccatcccctatgctatgatctaaaacttatatcggctaagggcgaatgagattaaatatctttatggaaaaaaattatgagaaaagacaaagtggtttaattaaaaaaaagaatccctgcaaaggattcttggacaaatgtaaaaaaagaccttggcaaaggccaagatctttttaaaattaacgaagcaactgaagaacgttttgcggctgttggttcgcttgagcaagcatagcttgagaagcttgagaaagaatgttgttctttgtgaactcgctcatttctttagccatgtcaacgtcgcggatacgagactcagcagctgtcaagttttcagaagaagcaccaaggttgttgattgtgtgctctagacggttttgtaccgcaccaagtttagcacgttgtgcagatacttggttgatcgctgaatcaacgattttaagttgagtatcaaaacctacatctgttgcagttgctgcattatcagcaaatttagttacatcgatatctttaactgattggttggttactagagttctgcccgtagtatctgcaggatctttgactcctaatgcatcagtgctcattttttcaatgttaacagaaatttgttgtgttgcgttagctccaatttggaaaactaaagatttttcacctgcagctgggtttgctggatctgctggtgctttgaaagtaccatccaacaattttttaccgttgaattccgtacgttctgagatgccgtcaatttcgtcttttaatgctttgatctcgtcttggatagctgttaaatcctcagtttgttgtgttccagtgtttccagcttgaacaactagttcacgaacacgttgaaggattgagtgagtctcagtcaatgcaccttcagctgtttggataagagagatgccgtcttgagcgttcttagaagccatttcaagaccgcggatttgtcctctcattttttcagagattgcaagacctgctgcgtcatctccggcacggttgatgcgaagaccagaagaaagcttctccatgttcttttggcttgcgccgttgtttgctgacagacggttcagcgtgttaagcgctgcaatgttgtggttgattctcattgtgtatttcctccttgaaatgtgtttgattgcacgtccatgtgcatgtttgaagcattcaggctgtccttcctgctacatattttatatcggaggtgccttgaaattgtttatagcaaaaataaaaaaatcctcactttttttgtgaggataatttcgcaagcaaatcgtttgagatggaagcggcccggctgttttcttcctggatcgccaaatagatttccttgcggtgaatttcgatatgcttcggcgcgtcgatgccgattttcacctgatctccgtcaacggatatgattttcacttcgatatcgtctccgatttgaatcgcttcattgagcttgcgggataagactagcatgcttcccctcctatcggctgctttgtcagataagaagagtcatgcaaaatcacttgcttggcaagcatctttctgcggttcaccactatcggcgccatcaaattggccgttgatttctcgaatggctcttcgatcgttaaaatcgccattacttcaacgtcttcggcagattcgatttcaagaagttcaaccgtcgtttcatcaagatcaaagccataatctttgaaaaagacgaacggactggcgacaatgaatgccagctcttccgactgcaccgactgaaggacgacgaacggcgaatcctcggaaagcggcaggatgacgaacttcttctcccctgtaaatccaggcaggccgtttttaaacacgattgtctggtcttcttgaatttgcgtttctccgtgatactttgttttaatgatcatcattcacgatcctttgctgaattacttttgttttgggtattccacatctatttttacctccggatattggagcatgtcaaccttcacactgcccggcgtatagttaacaaccggtttattcggcgttgcttcgatgataggcttgcgcggcgtcgctctaatgttcactttagccggttcgtatgcgattttcaccctgtcaaatgacggcgtaaaatgaacgccgatttgaatcggttcaggctcgctgttccgcctcgcctggtctgcaagcggattgccttcgatttcgatccgcatcatttcgtctccttcttcagcggtccgtgccattccggcgagccaatcctgatagccctgctgcgccccttcttcaatccttttaaatatatgctttctttctaagtcttcccaagcttttgtctggtcaatcgtgagctttgaaggggtggttgtaatcttcagttcggccggcggctgctcgattttcaagtcagcgcgcggctgttccattttcaaatctggcggcgtcgttgttaaaccgatgcggccggggatattttgcatgatcagcctaggcatctccattatgatatcctccttttgctgaaaaaaagcaactcggatagagttgcttttatcttaaaaagtcaaccagtgtcggctgaacgattttcgcatttacggcaagtgcagctctgtgaaccgattgctgtgtaataaattcagtaatgatctcctcaagctcaacatcttcgttgtctgacaatacctttgtcgccgtctcttcctgttcgctcagccgcgcattgatcaattcgagccggttgtagcgcgctccgatatcagaccgctcattgctcatctgattggagaactggtcaatgtctgaaagggcgttttccattccttccattgttcccgcttttaaggcattttcgagagactcaatcatttcaaagacgttttgtccgctgcttgattgtccgccgaaagccgaaatcggatttgagtttacatttaaggttgcgtttggcgaaacattgatgagaacgtcagagctgcttgtatagttttcaaaattgtatgtgtaagtaccatcggcgttttttgtgatcggagcgacgtcagagttcgttccgttaaaaaggtagcggccgttgacctgcgtattggcgatctgaatcagctggtctttcagttggccgatttcgaccccgatcgcatttaattcatccttgccgtttgtactgttttgagccttaacggtcagctccctgattttcgccatgatatcaatgccttctgtaatgttcgtttccgtgttttcaagccatgtaaaagcttgcgaggcattgctttgatattgtttaacctgggacagctgtgtattgtacttcaggcttttcatcgcgacgacgggatcgtcggatgcctttgtgatcttttttcccgaagaaatctgggattgaagcttatccagttttccatagcttgaattgatgtagcgcaaagaattttttgcaatcatcccttgggttacccgcatgaatctctacctaccttcccacgacacccatgccgttaataatcttatcgaggacttcgtcctgcagcgtaatcattctcgcagccgcgttataagcatgctggaattggatcatgttcgacatttcttcgtctaatgatacggcgctaacagactgcctgttcaattcagcagtgtttacaagcgtttctgtatttttggccagtctgtttgtttcctgagcttttacgcccatttcaccgatgatgcctgcgtaatagtctaaaacggtcgtcgttttgtcaccgatttgaattttcttggtgaagacattagcgagatttgtcgcgttggcgttgtcgctcgcttcaccattcagcgatgcggcgactttatcgccttttgaattcatgatctcatcggctactttgattttgccggcggctccctttgcaggctcagcctctcctccggtaaattcaaagaaaatgcctcccggttctcccgatgaagtaaacccgctttgatggactgcattaaactctttcgcaaaagcaagcgccatcgtatccagatctgcgagcatttcgggatacaaacctttttcttcaccgtttgacatatatccgtaagattcgattaaaccgagcagggaccctttgctagtaaacgaatcgatgccgatgtccgtcccgccgagggaaacgcccgtcacaaggcctgtatcgttgtcgtaattcactttgacagtttcagtcgtgaagtttggcccgtcaagaaccttgcccagagactggccgtttacgtcaaggacttctattgacacaatgccttcagcggttgcgagtggattgccgccggttttcgcatagctgactttgatattaaccattgaagacagttcatcaaggagctgatcacgcttatcgtacaaatcgttcgggagatagccgttcggctcgactttggcgatttgctcgttcaagctgttcagctgggacaaaagcgagttaatcgtcatcacattttgatcaatctggtcgcctaaatttgattgaacggttgtcagcgattcatacagagtgttaaatgtatcggcgaccgcctgccctttttgcgcaacaacagaagcagcgctcggttcgtgggcgttgttcgtcaattcctgaatggaattccagaatgaattcagaactttgtttagtccggtgtcgttcagttcattcataatcccttccatttggttaaaagcgtccacttttgcattgtaatagccggcctttgtattctgcgtcctgtattgatagtccagaaagctgtccctaaccctttcaaccgaaccgatttcaacgcctgtacccatctggcctgcaagtccgacagagtctcttgatacggacggataaggggttgatgctttaaatgtaacacgctgtcttgaatacccttcggtattggcgttggatatattgtttgctgtcacgctcagagctgattgctgcgcggacaagcctctttttgcgatttccagccctaaaaaagttggatttgtcatctttttcactccgttctaagcttttgaatcgaataaagaaagccgtttcaccccgcctgtctggtttggctgctgctcttttccgtaattcgaaccgccttcattcggaaggagcatatcaaatgtaagcgagataaattgaagcgactgaaaagtcagctgcttgttcaaatcgttcacatccttcaaacgggtgacgagctgtgagagcttggcatacagctgttccagcacctttttctcgccgcccgcagctttgctgatacatgcgctgatcgtcgcgtccgagctgccgatacagcttttagttgcttcaatgcgggactgctccgtttgttcaatggcctgcacatacttttgttctttcgtcacgatttctgaaagtgcctttatttcgttcgtcttcagcgcctccgttttttgttccgacagagacagcagatgttcatgcagcacgcataagcgctccagctcttcaatcacccgtttcactgaactgacttcctccttttattgctgtttataaaaattgaccattttttcagctatgcctttgccgtcaactttgtacgttccattctccacggctgctttcagctgggcaattttctcctgacgctccttcattaaatcagggcctttttgcagctcctttgctttcgcggaaatctcaactttgtcttccggctgggctgctccctgtgaagaagctgtttgtttttcaaatgatttatgataaggattaacaggttgtgttccatattggttgatcttcatgggattcctctcactttccgccatagttatctatgatcatactcattttatcgtctgagcttcaagttagtttagggaatcagtcatttttgggcttaaaggtatagtacgtgcctttagaactattatttctctctctttcaagctgctccagctggtctaattgactcatttgcgatgccaaatcctgctcgcatgacatgcaataacgtccttcccgaataagcgtgccgcacctttcgcacggatagccgagattcgggaaattagagatttgaatgcgtttctgtctaataaacttcaatattaactcttcttcgacacctgttttttctacgatctgaaacatcgtggactgccggttttcctgttttttcagaaatttataaacaatttcatacgcgcgctcttcttctttcaagcatgaagcgcaaacggtttgaaaactgcttttcataaacaatgcgttacatcttggacaattcgccaattgactcataaactttgacccctatccttaaattctattttttatatcggcagggaagaaaaatgatttagcttctaattaatgtatatgatgatacagattttgcttctccggatgtcatcaggcaatcagcggcatgatgaagggtcgctcctgtcgtatacaagtcgtcaatcaatatgacatccagattctttactgaccccttttcggttctaaaaacggtttttggcttaattcgctctttcctgctttttttggattgtttttcattttcgattctgatcaagggatgaataacgggtatttgtaataaggaagcaagacgctccgcctgattaaatcccctctccgctttacgttcttcactgagaggtatcggaactaaaacagacgggctgcggcggaagtattgttgaaaagcgctgataaatgaaggggcaaaagcgaagaccagttcagcatcacctctgaacttaaaacgggcaaggacttctttcatgaaagtattgtagagataaacagagcggttttgcctcaaaagagagcgggttaacggattggcctcccattttgcgcagtcaccgcacagctcttcgctcccctgtggccgtccgcacttagggcatacggttcctttgatctcgataaagttctctttacattccctgcatattttctcttctgatcgtaaaaagaaaaaagaatgccatgagagagaatgtaaaagaggcgctgcacaaattaaacaattcagtttattccctccctcttcgattgcttgcgcaaagcgggttttcattcacctttctggcagcttcagccaaggtgacaagcattgatgtattcttttgtttgtcaacgagctctgcttttatgtaagccagcttcgactgatctgttacatattgcggttttactgcatttaaagccaaggcgagcacatcctccctgcacctgctgcacgtacagctcatgtgcagctgatcgatatactgatcaaacaactcttccaaaacagcttctttggcgttgactagcatccggcaccgctcctcattttatattcataggtatactttaccatgaatatcagactagtcaatcaacatttcctttttagacattttattcatgttttgaatatgacgtcgtgccgcattcatcgactttgtcctgccgtaatgaaagaaacagacgtctccatctgtgtgctcgggatgcctgccggctcttcccgccatttggacgagggcgctttcggtaaaaaccgccgactctgcccccaatactccaacctgcgcttttttgacggtcactcctctttccaaaatcgttgttgtcacgagcacctcaagcttactttccctaaaccggttcactttttcatttctgtcagggtcatcggcataaactccttcagcgcgaaatgtttcctttttcagcacactgaccacagatttaagaacagggacagagggaacgaataaaaaaaccggttgctgcagttcttggtgcttaaaaagccattttttgaggcgaaaaggaacttttcttcgtttcaaactctttttccaatttccgcaccaaatcaatgtaggttcaggcaaggggctgcggtggaatctcgcgggaatacggacggtgtccagctttccgctctcagccctttttttcatatctgctgaaggcgtggcagttaaatagatgtgagcgctttgccgttttgccgattttttaacagcgtattgcagcgtgttatcaatagaatacggaaaagcatccacctcatctatgatgatcacgtcaaatgcttctttatagcggagcagctggtgggtagttgaaatgataagcggcgagagattcccaacgtctgagcttcctccgtacaaagcggcaatttccacccctggaaaggcttggcgaaaccgcggagcaagctcgagtacgacatcggttctcggagtagcgatacatactgtcaagccgttgttcagcgcgaattcgatcccttgaaagagaagttctgttttccccgacccgcaaaccgcccagaccaacagttcttcttttcttcgtatagcattgataatggatttggccgctttctcctgacctgctgaaagcgcgcctttccactccgtatgaacaggcgcccatttatggctgacatgcatgtgccaagtcaacagaggcgtacaatcgctcaccctgcccatcatgacgcaggatcggcagtacacgcagcatttactgcaccgatagcaaggataccgggcgaaaaatgagcgttcgtgctggccgcacctcaaacaaataaagcctttcttcgtttttttaataccttcctccgtttttatcaagccttcttggatatgccaatcaacgacggattcacgaaaaggaagttcgcttttcagaaggtggcgctgctccaaacatgaccgcaattcacgggtatagaatgccggttgttcgatgtgaatcacctccaatctgccatttagtatctatcatccatggtttcttgtaaaacagtcaaaatctaaaaatctcccttcaaaacagttgaaaaaaaaatctccgttttgcaaaacggagattggcttttatactgtataccaggcgatacccatcgctccttcaccaaggtgagtgccgatcacaggcccgaaatagcttttataaaattcgacatgtgcatattgcttcgacaattcttcgattatttgatcggcttcttcttcacggttggcatgaatcacaaccgctctcagcggctttcctttctcggcatcttcgccaaaaagctcaaataaacggttcatcgctttttttctcgtccggattttctcgtagggaacgatcagcttgttctcaaaatgcaagatcggctttacttttaaaaggcttccgacaaaagcctgggcgccgctcagacgtcctcccctttgcaaatgtgaaaggtcgtcaaccataaaataagccctcatcgaggttttcatatgatccaagtggcggatgatttcctcaggagccgctcctttttccgccatctcagccgcctcgatcgcataaaaaccctgagccatgcagctgatttccgaatcaaacggatacactttaattccttcaagcataccgcttgctgatacagcgctgttgaatgttccgctgatgccgctggaaaggtggatgctgatgaccgcgtcatatgtttcaccgagtttttcatagagagaaatcaactcgccgtaggcgggctgggaagtcgtcgggagattttcgtgggcttttacttctttgtaatagtccttccagctcatatcgatctcttccctgtatgaagtctctccaaagatcacattgagaggtatcatatgaatattgtagcggtcacgcaggtctttaggtatatatgccgtactgtctgttactactgctgttttcatgaaataaaccttccttatgaaagatactcttttctattctaaaagaaaaagcagcttttttcattataaagtttaattttctgccaaaagaaaagacctgccttatggcaagtccatctttatctcatttctacccagccgtttttaatggctacaacaacagcctgcgttctgtcgtttacattcattttttgaaggatgttgctgacatggtttttaaccgttttttcactgataaataatgattcgccgattccgcggttgctttttccatccgccagcatctgcagtacctcgcattcccttcttgtgagaatgtgaagaggtctccggatttccggatacacctcatgctgagcgtgagatgatacaccgcttgttgcaagacggcggaattcattcacaagattgtgtgtaaccttaggatgcagataagatccgccttcagctactactttcacggcttcgatcagcgtatcggcatccatttctttcagcagatagccccgggctcctgtttttaatgcatgtgtaacatagttttcgtcatcatggatggataaaataataacctttgattccggatacaagtcgaccagttgttttgtcgcttctactccgttcacattcggcatattaatatccatgataacaacatcaggatggtagtgctcgacaatgcgagccgcttcatctccgtcgtctccttcggccactacctcaaaggtaggttcgaaatccaaaatccgtttgacaccttcacggaataactgatgatcgtcaataattacaatatttactttagtcacaagctacgcctccccattctcattgttaaacacaccgcttttatggtcaatatgtcttttgtctctattttacaattatctttacaaagacagtggaactttaatcaatataaatgtcccaagacctattttcgaatcgattgtcattgagccttcgagcaaatcgactctttctttcatacctagcagaccgaaagatttgttcttcttgccttttacttcttttaagtcaaagccgtttccattgtctttgataatcagcgtcacaaaatcttttgtcacttctactttaacatgaatttcagttgattcggagtgttttaaggcgtttgtcaccgcttcctgtgcaagccggaatagtgcaacctcaaaccgcggtgctattcttctttcttcggattctccgatgcattggaaatgaatctttgcttttccatgataatcttcgatcgtgttcaagtattttctgagcgtcggtatcaatcccaaatcgtctaaagccatcggccttaaatcataaatgattcttctgacttcataaagagcatttctgacgttttgccggaggtttttaatttcctgaaagccttcttctgttcctttgtctctgaagatgcgttcgatcagttcagatctcatcataacgttggccagcatttgcgcaggaccgtcgtgaatttcccttgagaccctttttctttcttcctcctgggcttcgataatccgcagtccgaaatcctgcttggcctgcgcatcttcaaggagaacgccgacctggcgcagatcctgatttaagtagtttaagacgacggtaatctgactgacaagcccttctgaacgctcgatgatttcctgaagccccaaaaggcgccgttccagatcatcacgcttctctctcagctgcttttcccgctgctggatcattgtcagttcaacctgcagtttgtgggctttttcataagcttcgcgaatctcttcttcactgaatttatgaaagtttctgctgacctctgacaagcggttccgcgcatggcgggcatgcacttccagcctgtctccaagatcgatgacttcgttgacctgctgtttaatctgtttcagctcttctaccaagccttcgtattgctggcgggactgctctccgatttgaaagacttcatccttgctcccgtcaaccgtttttaacatcttcataatgattgaatctaaaactttggagtccattttggaaacgctcacccattttccctccgtaacagcattgtcatttagttttatcataaatttcattgaactgaaattcgtgtcgaattataatgaaagaatgcgtattctggtttttttatggttaccgatccatttctatttaatcataacaaaatacgcgccaaaattctaagtctgttcgatttttaggagaacagccgcaggcttgtcaggaggtaagcaggcatgctgcaaagctatctgactgttgcaggtgaagggacccatgaaatcgtgattgaaaaatcccggtttatatgccacttgagccgcgtcagtactgaagaagaagcacagaactttatcaaccacataaaaaagcagcattggaatgcgacgcataattgctcggcttacgtcataggagaaaatgatcaaattcaaaaagcgaatgacgacggagaaccgagcgggacagcgggcgtaccgatgcttgaagttttgaagaaacgcaaccttaaagatacatgcgccgttgtgacgagatatttcggcggcattaaactcggcgcaggaagattgataagggcttacggaaaatccgtgtcagaggggctgaaccatgtcggcgttgtcgaacgaaagctgatgcgggtcatgcacaccactgtgaactatacatggatcggcaagcttgaaaacgagcttcgcgagtccccttatcaaataaaagacgttcactatgcagacgatgtcgaatttgaaacgtatgtcaaggaaagcgaaaaacaggcatttacggaatggataaccgaattaacaaatggcaagagtgagaatagagaaggcattcaagtctatttggaagaagcttttaataattaaaggagaatcatcttatggctgagcgtattaaagtgaaagtgcggaaaaaaaagaataaaaagagaaggctgattaaacggtttatagtccttatgctgctcgcacttctcgcagtcggcggagtgggcatatataaaattataaacacgatttccgcggctgacggcacttatgatgagcttgaacgcggagagaagtcgaagctcagggacgatgttgttgatattcaaaaaaagccgttctcgattctttttatgggggttgaagattattcgacaaacggcgagcacggccggacggattccctgattgtcgtgacgctcgatcctaaaaagaagtcgatgaaaatgctgagcattccgcgggacacaagggttcatttggccagcgacacaaccggcacaaaaacaaaaattaatgcggcctatgcaaaaggcggcaaggatgaaacaattgagacggttgaggatttcctcggaatcccgatcgactactatgcaacggtcgattttgacgggtttaaagatgtcatcgatgaaatcggcggaatcgatgtcgatgtgccgtttgactttagcgaaaaaagcgatgtctccaaatcgaagagaatctattttaaaaaaggaaatatgcatctaaatggtgaggaagctcttgcctacgcaaggatgagaaaacaggataagcgtggagacttcgggagaaacgacagacagaagcaaattttaaaagccgctcttgatcaaatctcaaaaccgcaaaacctcgctaaaattgatacaattgcccaaaaagcaagcaaaaacattcagacgaattttagaatcacgcaggcgctggcgcttcaacaaatttacagcggctttgccggcgatgatatcaaaacattaaacatcacaggacaggatcttacgattgcaaatgtttactactttgagcctgaccagcaaaacctggaaaacgtgcaaaatgaattgacccatcatttgtacccggactcagctgccgattcgagcggaacatcgtctgaatcttccgcaaccgctgacggtgcggacagctcagctgaatcgtctgctgcttcttattgatcggctctgttgaatgttaaattcataaatgaataaattgaaggggaactctttatatatttagggttcccctttctttttaagctagcgtaacttactatttgaacaaggcaaatgattgatcatactatgctttaaataattatactgtttttcgctggtatctgagaatgcctcgtctctatttgagggaatatccatatacaggatgtcttctttgaattgagaaaccgttaaatcatatcttttaccattgacaaaattataaaaatgccacccttcaggcagctttgttttctttatttctccacctaatatatcatttacgactagcgcggttacgccgcattgtcccttggcagggttatccttactccattttgaacttgaatctgaagaccaggatttatacaatgctttcactatttgttcgatttgtccaaggtaatgatcatccataaataaccctccttttcataaagttttagttattcagccattattaaaaacccgcttatgatacttccggaaatgcggtaaaaataaaacccctggaaaccaggggttttttgcgttcattaattcctcttcaccatccgcctgtaaaacttcgtaaaaggcttgtactgctcatttacaaggcctgtcacctctgcgatgatctgcatgaacagtattaagccgaagatgatgaagatggacacccatagggttgcggtttttaaaagaatggcgctcaggctgaagacgacgccgattaaataaatgacgataacggctttccgatgggacaggccgaaggccatcagcctgtggtgaatatgcgatttatcgggagccgaaatcggctgcttgtttaaaatccgcctgatgatcgcaaatgtcgtgtcaaatatcggcactcctaatataataatcgggatgacgacgctgaacagagtcacgcttttatacagccccagcagcgacagaaccgagatcacatagcccaaaaacagcgagcccgtgtctcccataaaaattttcgccgggtggaagttgtagaacagaaagccgaccgtgcttccgatgactaccagcgacaaagagaagatcaagattttatcggcagaaaacgccatgacggcaatcgtcgagaggccgatgacggatatacccgcagccagtccgtccaatccgtcgattaaattgatggcattggtgatcccgacgatccacaaaatcgtcaacgggtatgcgagccaccccaaatcaaagcgaagatcccaaaacggaatcgataaaaattccattttcaagcctgtactgacgatgatgcaggctactaatacttgtacgataaatttaattctcgcgcttaaattgtatttgtcatctacaatgcctaaaatgacgatcataaaagcaccgagtgtaattgctgttattctgttttcataaaggccgccggcaaacgaaccggtcaatactcctataaaaatggctaaaccgcccattctcggcattactttatcatgtatctttcgtttatccggctgatccacgaccccggatttgattgctagacgtttgacaagcggagtaataattaaaacagtaatgagagagacaaaaaacgcaattacagtgcgttcataagacataaggaagtctcctttttaaatgaagtctggtcgtataaaagatcataccttttcattatacaatttcattatttattataacaagctccagccaaaagaaacatcacgaattaatatcccccgccgcaaattatgcatccttattcaagttcaatttatcaagcatcattaaaaatagatgatgccagtctctttcacgtgcgatctttctgcgcagttccacatgggaaacatcatcatgcgcaagctccagctcttcacaaaccgctgtaaattcagcggggtcgtttcctgttaaatgacggtaaacgtgttcctgttcaaccttttccgttgaagggaggttcatacctgcgacaggctttccggcagccaaaaattcaaacagctttaaaggaaataccgcattgttatatggcgacggtttatacggcatgataccgatatccactacattcatataagctggtacttctgacggcgcagcggggcccgtccagatgacattatcttcttcaagaagcgctttaaaatcttcgtctccgtttgtcccgtcaggaccgacaaataaaaatgtccactctttttttgttctggcagcttctttgacgagcttaaaatcgagcttcggcttgattcctccgataaagccgaggacggttccttcccttcccttcaatacatccgctttttgcatattttctgcaaacaagctgtactccacaccgttttcgattgtaaaaaccggctttgtctctccttgaagccggtctgctacattttgttgcaagtattcggaagtgcaaaaaatcgtatcagcagctttgatgattctgccttcagcttcaaaaatgaccttttgcctgaatcctgagacaaggctttggctaccgctgatcggggccgcccacaggtcgctgcagtcatagatgacctgatcccattgataaagcgacgacagcagcggaaagccggggaaggtgtaccataagcacaccttttctccctgaacgtcttctttcagccggtcaagcagcggcttcagcttgctttgatagaaaacatctttgtagcgggcaaacctgaatattttctttttcaaaaaatctttgactgcaaattgcttgattccgttgtcaagcaatgtaaaagtctcacgggaaggattttcagacggacaaacccaaatgacttccttcgtctccttgcggcctgctaaaaactcagcaaggcggtgccttctgtatcttagctgatcctgcccccattcacctgtcgctactatgacgtgtatgaattgatctgctttcactttcaatcaccttttctgtcaatgccgttataatcttttcattactgcgttcttagcgtaatggaaaaagcaccatgtcgctttcatcaagtgaagtcgttcgatttccctgtatacgtaccaggtttttcgcgccgccttccacttgtttctggagatcgatgtttcaacgatgcggtattccgcgaggggttcgttcagtccatatgccttgaacccccgctttaatacggacagccatgtcgccaaatcctggcgggttctaatattcggcatccggatatcacccgtttgttctctgtcaatcatcaccgtcaagcagccgatgatcgtattttttaatacatcatcatatgtaaggcttacgggtgcatgaatggttttatgaagcggttcgccgtcttggctgatcagctcgtatgccgtaaatgagaaagcatgctgatgctttctcatgaaggcgagctgcttatccagcttttctgctttccaaacatcatcgctgtccaaaaaggcgacatagcgcccttcggctttgctgagcgccgcatttcgcgccgctgcagcaccttgattctctttcagaaaaatggcatggatccgctcatcatcttcttcatagcgcttcaaaatgtctcttgtcccatctgttgagcaatcatcggcaatgatcatttcccagtcggaaaacgtctgatttaagacggactgaatggttttttcgataaattcctccgcgttataggaaggcgtaatgacagagattaaaggtttttgcctcgtcatggtcctgatccacatccccaattaaaaatttaacgttctctgaaaacttccggaatgacaatgataaaaaatgacagcgctaaaccgatcagtacgcccagcaccgctcttttcttaggcgacatgccggcagcctggttatcaagcacgatcaacggctcaatttcttcagcagccttcatatcaagcttgcttgtttcaagctcatacaaaaaccgctgtttgtcaactttggaatcagcgctgactgtttcgtcttcaagcgccttaatattcttttcaatgacttcttctctttttgagaacagcgccttatcgcctttcatataggcatctttaatttttcctaaagtatccaaagtttcctgtttatcaggccctgtgtagcttaagttgaaaagtgaatccgttctgatttcaatcgccagatcgtctttcaattgcgccagatcctcttccggcatatccgggaaaatgtcctttaaaaaagcttcgtttttcaacagcagcggcacttgctttgcattgttgtacttcgcttctccatagttcccggttgatatcgttacagtagccgtgtaattagatggagcaacgcttcccttcggcataaaatagccgacaagaccaagaataagaggaagcgcaataatcgccacaataaactttttcactctaccagcaatacgtttgattaaattcatcacatgaatttctccctgtttttaaattcgattttcaaaaatcacctatactgttcggtttcatccgttccgcagactctaaaggtattaaccgtcgcaatcacaagcgcgaggaacacccaatggaaatataaattcgagacggaactcggactgatgcttgacacaaggaaggcgacgagcgcggctgtcaaaccttcaataagaagctttggccgtcttccaagcgatcttttataatatctgtaaagcacggttattaaataaatgtacatcgttaaataaccgagcatcatcaccactccaaaattcgtcatgatctcaacgagccagttatgaacctccacgacccggtccgtatcgaacagtgcatgatgctccaaataatatggcacattgccggcgccgacgccaaatccgtaagtatccagcacataatgcccggcgtttttcaacaaattcgccctggcgacattggatggcagcggctcgctgaaatcgtgtgcggtttgcggagccaaaaagtatgtataaaaagctccggtaatctttcctgcaaacagtgtgacaaaagcgatacatcctgcagctgcggcgatgagcgcccattttttaagcaccttcggcagcaaaatgaacacataaacggcaaggccggctatgacccccaggatgctggctcttgatccagtcaggaaaatcaagtatgccgaacagaacgcaaggagcagccccgctatttttaagtagctgtttttaatgtttttgaaaaaagataaataaaagaaaaagctgatggacagaaatgtcgcaaagtcattctggttgaaaaaaacggatgtcggatagtgctgtttatagtgcggcccgttataaagggtcgagctcggcaggtggtttaacgtaaagtgattgtaaaacccgatgaccattaaaaatacggtcatgacaagccatatgtaataaaacgcgagaatacgatccattttttgaaaaaacatgacaaccagaaaaacaaaaaacattcccattgccaataggaacagatattttatgccatcagtggcagacttgacccatagcagcgaaatcagtccatagcagaaccaaaacgcgaaaaacatcagaatgcctttgacatgcacctgcttccacttttcaaggtgctggctgcctttcaacatttccgctatgaataagaatcctgccagaatcagaagtattcgatatggaaacaggctgaaaaagcccaatttaatcgcaaaaaaagcattgttggcaaaagttgcagcgatgagcagatataatacgggcatcagcaattgctcggacgacaaatacttccggagcacaacgatcacagccagcgcaatcaaaattagacacgccagcaagattttttttgcattggactgggccaatacaacgaatgctaaccctgcggtcaatgcggcgagccaaaccagaacattgaccgcggaacgtttgagactcatttttccccctccttccgcttctttctggaaaagggctgccgacatcagccagcagccagtgatttacgtattcatttcttttttataatatgaaatggtcttttccagtccttcagcaagcggcatttttggttcccagtttaagattttctttgtttcttcattacacagtgtgctgtggcggatatcccccggccgttcatcttgataaatcggagaaagctcagagttcgtcgcttttttcatctctgtaaacagctcattgaccgtgatggaaaagccgtttgaaacatttaaacaaacgtttgattgagcttttagcgcctttacgttggcagaagctacatcaccgacataaataaaatcgcgtgattgttctccgtctccaaaaattaccggagccttgccgctggtcagcaaatcggagaaaatcgatacaacgccgccctctccttttgcatcctggcgcggcccgtacacgttgctgtaccgcaaaatgcaatactcggttccatatagatcataagccagttttaaatagttctccactgtaagcttcgtcagcccgtagggtgagcctgggtttgtttggtgacgggtgtcgacaggcaggtaatccggatttccataaacagccgctgatgatgcaaagacgatctttttcacattgcattcaccagctgctttaatgatatggagcgatcctctgatattgatgttttcatcatttaaaaaatcgctgacagactccgctacgcttacttgtgcagctaaatgaacaatataatcgggatcaatgcttttgatgacgtcgatgacttccggcttcgtgatatcctgctcataaaagtcaattgggagaccgtcaatgttggagcggtgtcccgtagttaaattatcaagaattgaaacccggtaattttcttttagaagctgttcagcaatatgcgagccgataaatccgcatccgcctgtcactagtactttttccattgttatccccccgttgtttatacgttggtcaggattccttctccctgtacttccggccgtccgattgaatggtagatcatgccttcgtttctcatttgttcaatttcaaatatatttcttccatcgattaagacggggtttttcaaagcagacttaagtttggcaatatccatgttctgtacttccggccactccgtcaatatgacgcacgcatccgtatcctgaatcgtctcatacagatcttcgctgtaaacggcttgatcgccgagaagcttttctgcttcaggtacagcaatcggatcaaacgctttgactttagcaccgaggcttctcagcatcggaatgacatccagagacggcgccgagcgcatatcgttagtattcggcttgaatgccagcccaagaaccgaaatggtcatgccgtttaaatcgccgaacacatcaaggagcttttgcacaatgtgggcgcgctgcttttgattcgtctcgatgacagcttcaatcaatttaaaaggataaccgactgacttcgcgatttgcaataaagccatcgtgtctttagggaagcaagagccgccaaagccgattccggcttttaaaaatttactgccgattctgctgtcgagtccgacgccttcagacaccttggatacatcagctccgaccctttcgcaaatattcgcgatatcattaatgaacgagatctttgtagccaaaaatgcatttgcagcgtatttaatcatttctgcactttcaaggttagacttgacgattttcgtttgaaatggcttatgaagctcttcaataatggcagcagccttttcgcttgtcgcgccgatgactgctctttccatattcatcgtatcgtaaatagctgttccttcacgaaggaattccggattcgacacgacgtcgaaagggaattccccttttgaattgcgttctataatggcttgtacgagctttcctgttccaacagggacagtgcttttgttgacgatgactttatagccgttcaggtgcttcccgatcatttcggcaacggatttaacaaatgtcagatccgcttcccctgtttccgacatcggtgtaccgactgcaatataaataatctcagcttcttcaatcgcttttggaatatcagtagagaaaaataagcgattttcgtttacgtttttatccacaagttcttttaggccgttttcataaatcggcatcactccggctgagagtcctcttattttttcagcatcaatatcgcagcagacaaccgagtttcccacttcggcaaaacaagttccagacaccagcccgacatatcccgttccaatgacagcgattcttttcaacattatcattcccttctttcagctgacccttcaaatccaatagcttgatttaggtaatgatctttatctctttctattgaaaaaatctgggtttttcgttttcccaatccttatttttattagcttagacgcaaataaatgggtttaaacagtattatattcaacattcatacgcatattaaccgacagaccccaacttaatttttgttcttgacaacatccccatacacatccagcagctttccggcatttttaaaggcgtcataatcctcgtgcaccgtttgatacagctcttcagcgatggcttcttgccaattgccgccttccaaatatcccttgacagcttctgttatgctggaagccgagcgcggcttgatcagaaggtgttcatgctttccgaataaagacggaacccccccgaccgccgtacaaagcaccggaaccttgagagcgagcgcttcaatgacaacagtcggcatcccttcagaatacgaagggagcacaaacagatctgatgcagccagatattctgatatctcatggtttgcgacctgccccgtcaatactgctttttcaccggcgatttgacggatgttctgcttctccggtccgtcgccgatgaatacagctctgtagctgtcatcaagctgcctgaccgcttctgccagctcggctactccctttcccttcaccaagcggccgacgaacgtcagcaactttttgtcttgcggcaggccgagtttctccctcaattcaagtgttgaagcggagggcttttgaaaccggtccaggttgactccaataggaagcaccgagctttcagcaccggtcatttctttcgttttggctttcagcgcttcgctgacagccaatacttttgctgcggaatgcacagctgtttcaaatgctcgaaaagcgcctttgctgtaatggggataaatattgacatcgcttccgtgcaacgtcagaacataaggaaccttcagcttctgtgaaacaacggcagcggcacccccggatggcatcgcgaaatgggcatggataagatccggcgcaagcccgtgcttctcgatcgtcctcaatacagactttgcgatccggcgatgcggctgagcccattttagctgtccaggcaaagccgtatacggcggcctgtaaaccgggatgccttttctttcttcatattccgggactgttcgcacttgacggtatttttttttcagcagcctgagaggagcaggattcacaggcaatggacatatgaccgtcacatcaacgccctgcatctgcagcgcctgaacctgtgtttcatgaaaaacgccttctcccggcctttgactgcttggataaacgctggtaatccaaagaaccttcaatgatgaaccgccctttctgctgtcatcttcctaattgggccctcatagcccgccgataaaatttgccgaccagaaaaccgtaaaaaatcccgctgatcccgacggaaactgccagctgaagcatggcgccgtgaagcagatgtctgctgccgacgctcaagacaagagccagcaatgccatgagcagcgtcaaggccagcggttttccaacggttctgaaatattcgcccagcttcagctggatgacatatttgagcagccatctgccgataaagaaattgaccaggctgatcgctgcatatgtccaggcggtgatcgtcaaatcattcgttaataccgccgcgtaaagagacagcccataaaggagcatgatcccgctgtcccaataaaatgccaggtctgctcgccccttcgccagcaaaaccgatccgttcggattcatcagaaccctgagcagcccgacaatagcgaggatgttcagaaccggtacggcctgcagccatttttctccgaagacgacttcaacaaataaatctgaaacagtcgtcagtccgatcaggagcgggaatgaaatcagcgcgagaagctttgtcatatttaaaaagccttcgcgcagcgtttggttgtccccttgattctttgagaagacaggaaacgctacccttgttacgatcggattgatttttaatacgggaatcgtaataatctgatacgccaggttatagattcccaatgcttccgcaccgagaaaccgcccgattaaaatcatgtcgatattggcgccaagcctgtttacaagccttgaagcaagctgaaacgcgccgaacgagaaaaattctttcacttcccccaatgcaaagacgaaagaaggacgccatttttttaaatatacagcaaaaaacatgatgcctttaaccgaattaagaaaaacttgtgacaatgcataggccacaatcggatccatcagaaaaaccaaaacgagcaggagcacaaaagacaaaacggtgactcccgcttctattttgctcagcacattaaacttcagatctttttgcagcatatattgatactgctggccgaccggggcgattaaaaacatgacggccaaaatccgcactagaaaaacaagttcgtcccgctgataaaagtctgcgatgaacggactcaggaaaaagaggccgataaacaaaaggatgcccgttaggatattcagccaatacaaggtcgataattggcgttcactgatgttctccttttgaattaaagcggccccgaatcccatatcgagtacaatttgtgtgaaaatcgttacggtggtcagcattccgaccaaaccgaattcggcaattgtcatgatattgccgagcagtgcaaactgtataatttgaatgaccgtgacgatcaaagttgaaacacttgtccattttgcaccgcttaatatttgtttcgtaatggtagacatagcatattcctaacttcctcgtattatctggctccttcgccagtcaatactactttaatcgttttcagcataaccttcaaatcgagaagaaacgttaaattccgaatgtaatacagatcgtgcaccaatttttctctcggactgatatcatagcctccgttcacctgcgcaagtcccgttaaacccggcttaacgattaagcggtttttaaatcccggaatttcgtggtgaaactgagcggtaaacatcggtctttcaggccttggccccacaatgctcatgtctccggccagcacattgatcaactgcggaagttcatcgattcttgttcttcttataaaagacccgactgcagtgatgcgcggatcatccttctgagcccatttcgcaccggatttttctgcgtcaattctcatagaacgcagcttgatcaccttgaaatgcttcccgtcttttccgacgcgttcctgccggtataacggagaacccggtgtttcgatacagattaatatacaaaacagcagaataaacggcagtgtaagagcgagcccaatcaaggaaaggacgatatccattatccgtttcatatataaataacgtactgcttttttagatagagcacaggaataagtttgctggcttgaatattcattgtacattcttaaacttttgtcgatactcactagcatacacctcgattagtatgttactgtttgatctattcgtcagtgtagcatacgaacgtaaacacaatgtaaaggagttattaaaattagtaaattcgttgattttttgttaaaaatgcaccgcctccgttttatctttaatttcaccaaaaatatcatactatataataaagacaaaacaaaggcagcataggcaatttttcgaaaaacgagttttctgtttatattttaatagtaagcaacgattccgtcgtaaatcgctttagcgcctttttctttgtaagtcgagcttttgagttttgtcgcatcgcttacattgctgataaacgcaagttcaacaaggcagcttggcatttttgattccctgatgacatggaagttgccgatctttacaccgcggttttttgtattcaatgcaacatagagacggttttgaatctcggttgccagccgtttgctgttggcagattcatatgttgtataatagtaggtttctgttccggaagcagctggcgttgccgagtttgcatggatgctgacaaacaaatccgcatgatttgactgcgcttttgacacgcgctgtgcgagcgtcaggtaagtgtcgttcgttctcgccataattggcagagcaccgccgtttgatagtttcgtattaattaattttgcaacatcaaggttcacgcttttctcatataaaccgttgccgacggcaccgctgtctgtacctccgtgccctgcatcaatgaagatttttttgccgacgatcggattcttcagctgtgacacgacattggattgaagagaaaccgttccgccaagcacagtaaacgtcgtcatgtttttggaaccgatcacttctcttgtcggtgtcggcaaagatgatgcattcgtgaacatcatcggacggttttgcttagccgccagaacagatcctgttaatccgtcggcatacgcatagccgttgctgatgattgcattcttggcagaagaataatatttcttgacgacattggccgcgacttcatagcggttgctgccgccgatccgcgtcggagaagcaagctgtttgtaaacgctgctggagatgctgacttcaccgcctacgacaatggtcgatgttgttcctttgctcttcatcgcattttttgtcgctgtcggtatggaattcgacgatgttaaaagaatcgggatgccgtttctcgcggcatatgcgccgatcgcaaggctgtcagcataggccgtcccgttggcgatgacagctttcgaattgctcggcagcttattcgcaatattcgccgcaacctcgtagcgattcgctccgccgatgcgttcgacagatgacacaccaagctttttgatctcgcttacgacaccgttttgaacgctgacggttccgccgattacgatcactttgctaggttttaattgactgattcggtttttagtggccgttggcagtttagacgcttccgttaatagaacaggcgcgttgtttcgataggcaaatggagtcgctgaaaggacgtctgcatatgcctttccatttgcaacaatcacagtgcttgcacttgtccacccctgcttggaaacgttcaccgcaacctcatatcggtttgcaccgtctaatcttgtgacagagttggccgcaaatacattaggcacaaacaaaaagaaccctaacaacaacataggtacagctttaagaaaaaccctcaaaaaaataacctccaaaaatgtaaatgttatgttttcccctgaacatgaacagaggaggcactgctgcctcctgttcaaactctattaatagcttgatagagtcgtatttggatagtagaaacttaaaatcttcttgtaatcgtgcccggcagcagctctggcatttgctccgtactgactcatgccgatgccgtgtccgaatcctttaccgctgagagtaaaagcgttcgtattgctggatacagaagcatacgtgctcttcatattcatgccgcccagcatcgatcttaattgagtcgtcgtcacggaaatcgtcgctgttttttctgaaagttttccgtttgatagaacatagccatttgatttttctttaacaaagtaagaaaacttcacctctgctgttttcggccgctgaccggcagtttttgcgctgctcagggtcaggcttgagattttcgtaatcttaatagattctgcactaggatatttattggtaataaaccagcttttcagtccagacaaataggcggagttcgtttcatttgtcgtattccaccatgtgccagggctgctcaggtttaagccgctggtattgatctgcgtcctattcaaggaaatcgaccagctgttttgcgggtcatatgtatccgctttggcaattaaatatggcacactgccgccccatacctctgcgcttgcttccgtatatcccccgttgcttgacgagtaaacggctgaaatcaaattgccgttatattttaaaacttgtccttttgtggcatttacaacgctggatgtcttcgaattccagtcgtatcctccgtatacttgaaacgcctgcgtatcggccactacttttcctgcggaaccgaccgaataagttctcgccgccaccgcttgggcttttaacgcttccgtctgccagcttgccggcatttcgtgcggcacaacaccttttaaataatcttcgaacggaatgttttcgtttatcggccgaacatatttgcttgattcaatcgtaaacttcatcttgcctaaataaggccttccgttgatgctgatggaatttgacgtcgaatattttttaggtgatgccgtaaatgacgttccaagcgttttgacggctctattatttttatagagcacaagctttccgctcgacacgttaacagagtatccgtctccggtaaacatatctgccaggctatttttcaatgaatccgtgatcgaggtggtccccccaagcaaagcaaaagactgtgttccttttttcgcgactacatctgcaacaggagtcggcaggctgcccgcttggacaagcagcaaaggatgcttttgtttggcagcaaggacggaaccggccagcgcatccgcaaaagtcgttccattagacatgaaaacctttgatgcgttcatgttaagcgtgttgacaatgttcgctgacacttcgtatctgttcgctccgccgatgcgggtaacagccgcttttttctttaatgtgttttcaacgcctgtgctgacactcaacggaccgccgacgatcgtaaccttgctcggaatattgtaatcgcttcggattgtattattccctgagagcagtatcggataaccgttcattgccgcataaggcgcgatagacagagcgtcggaaaagactaagccggtggcaacaatcgcttggctgtaggaccccatccggctcgcgatgtttttggacacatcatagcggttggcgccgccgatgcggtcaattgccccatactttttcagcgtgttttcaacatttttggaaacgctcgttgttcccccgataattaagatattatcaggcttcatcttggcaatttgagtttcggttttcgccgtcagcgtacccgcatccgttaatagaatcggcgcatcgtacttctttgcaagcggagttgcagaaagcgcgtccgcaaaagcgtcccgattgacaaccacgacagtgctcgggttcgtccatccggcagatgcgacattgtttgccacatcgaagcgggtcgccccgccgtaccgctctgtcgcggcgattcccgagcccgggatttcgtatgcgccggtaatgtcgacatcaacgcttgatttattgcccaaataattgcttaactttaccgaaatggttttgtcggcagcctgggcagattgtgtaaacatcagagctgcggcagttactgacgacagaagcagaagcttcatctttttcaaaacgttatgtacccccttgattcagctctttattttgtttcgatgcttttcagctccaaaacgccattttcaccttttgtatattggacttcgacttttttgccttcttcaatggaattgactttgtcctgaagatcttcatcgacttgaagcgttgtttctttgccgtcaatgttcaccgcaattgtgtggctgtcagccaaccccgcgaatgaaccttctttagtgacggtttcttcagaggccgcatttttattgtctgagcttgacttgtcctccgattggcccgaagtgccgcaggctgacaacaaaagcagcattgataatgttagaactatgagttttttcatcttcttcacctctccctttttatcgacaaattccaacagattctttaattatagcgaaaaattttgcagattgattggtttttttgaaacatttttctaatgatttcgtctatccaaaaggacacatataaatttttgttgttttcgaattttaagaaacttataatcaaagtagactattaaaaggtgagggctatatgagagctgaaaagaggaagaaaaagaaaaaaattctatatacaattatcgctttgattggcattttcgttctcagcacaggcagttatgcctattacttatggcataaagcggcatctactgtagcgaacattcatgaaaatattaacaaatcaaaaaaacgcgattcagctgttgacattgataaccatgacccgttttccgtgcttctcatgggtgtcgatgaacgggacggtgataaggggcgcgcagactccctcatctatatgacggtgaatccgaaaacgaaaacgactgaaatggtcagcatcccgagggatacgtatactgaaattatcggcaaaggcaagatggataaaatcaaccactcctacgcattcggcggcgttcagatgacggtagacacggttgagaacttcctcgatgttcctgtcgactactttatcaaagtcaatatggaaagcttcagggatgtcgtagatacgctcggcggcattactgtaaacagtacattcgctttcaactacgacggatattcattcggcaaaggcgagattacgctgaacggaaaagaagcgctcgcttatacgagaatgaggaaagaggacccgaacggcgacttcgggcgccagaacaggcagcgtcaagtcatcgaaggtatcattaacaaaggcgccaatatatcatccatcacgaaattcggagatatgttcaaagtgatcgaaaacaacgttaaaacgaatctcacgttcgacgatatgtgggatatccaatccggctataaagaagcccgctcaaaagtcattcagcatgagctgaaaggcgacggcacaaaaatcaacggaatctattattacaaagccgacgaaagttccctttccgacattacagccgaactgaaagaaagccttaataaataaaaaagcttcctgaaaaggaagctttcatattgttgacaaaatcccaaaacggttttggttttggttttgggattttgtcatcttttcagcgtgattgaaaacccttgcagtctaggaaggccgagcatcggagcgcagcgaatgttggaattcgtgagcaccgacgcgcaggcctgacaacgaatgcgagggtttgtcgacaccgctgaaagcttcctgaaaaggaagcttttttatttatctttaaacacatcaggccgcgcgcttcggtatccgtaccgataaagcagcgcctccgcaattcgccgcgaagcctgtccgtccccgtacgggtttgaagccctggacatttttcgatattcatcttgatcggtcaacagctgtttagtcagctggtaaatcttatcttcatccgtgcctgccagtttaagcgtcccggcctggacgccttcgggccgttccgtcgtatcgcgaagcacgaggaccggctttcctagcgacggcgcttcttcctgcacccctccagagtcggtgaggatgaagtgagcttcagctgcaaagttgtgaaaatcgatgacttcgagcggctctatcaggtggactttattcaaatcgctgaaatgctttgcagccgcttcacgaacagcgggattgagatgaacgggataaacgacctggacgccgtcgaactcttcgacgatccgcctgatcgctttaaacatgttttccatcggcttccctaaattttcccggcggtgggcggtaagcaagatcatcttatcatttccgattttttcaagaacggggtgtgaatagccgtcccttactgttgtgcgaagtgcatcgattgcagtatttccagtgatgaaaatcgtctcaggatctttattttcgcggagcagattctgttcggcctgctctgtcggcgcaaaatgaagatcggcaaccgatcccgtcagctgcctgttcagctcttctggaaacggcgagtatttgtttccggtcctgagccccgcctctacatggccgacggaaatctggtgataataagcggcaagactccccgcaaatgtcgttgtcgtatcaccgtggacaagcacaatatccggtttgatagactgaaacagctcgtccagcttcacaagcgcattagacgtaatttcagccagcgtttgcctttctttcatgatattcaaatcaaaatcaggctttatgttaaaagcttcaagcacctggtcaagcatttgcctgtgctgggctgtaaccgtcacataagactcaatttcgggatattttcttaattctagcacgagcggagccatttttatggcttcagggcgcgtgccgaatactgtcatgacttttagtttcttcatttttctatcacctgttttctgtatgaacagcttttttaagaatcgtctgctgaatcgattgattaccgctttgcccgtgttttctcgttggaattaatcccgcccatcgattgcttatggacgatattctcatcataaaacatccgttgatcaaaccgcaaaccatcctgttgaagaatgagatttcccttcattatataacatctttgcgctttatacctgtttagacttgtttaagaattgtttttcttatatgatgagtttgtaattgtaatttttcggggtatatcatacatatattcagcatactctccgcttttctaagcgtattttttctggctgagtagaaaacacagtttaaggaaggtgtattgaattgaagaaagttcgtaaagcgatcattcccgcagcgggccttggaacacgtttcctccctgcaacgaaagcgatgccaaaggaaatgcttccaatcgtagataagccaaccattcaatatattattgaagaagccgttgaagccggcattgaagacattatcatcgtaaccggtaaaagcaaacgagcgattgaagatcatttcgatttctcgccggagctcgaacgcaacttggaggaaaaaggaaaaactgaactccttgaaaaagtgaaaaaagcgtcaaatctcgctgatatccactatattcgccaaaaagaaccaaaaggactcggacatgccgtttggtgcgcccgcaactttatcggagacgagccgttcgcagtgctccttggagacgacattgtccaagcggaaaaacctggccttcgccagctgatggacgagtacgaaaagactctctcatccgtaatcggcgttcagcaggtgcctgaagaccaaacgcaccgctacgggatcattgatcctttgacaaatgaagggcgcctataccaggtcaaaaactttgttgaaaaaccaaaaccgggcacagcaccgtctaaccttgcgattttgggacgctatgtctttactcctgaaattttcatgtacttagataaacagcaaatcggcgcaggcggagagatccagctgacagatgcgattcagaagttaaacgaaatccagcgcgtattcgcttatgacttcgaaggcaaacgctatgacgttggagaaaaactcggttttatccagacaactctcgaatttgccatgcaggacgacgaactgaaggattcgctgattccatttatgcaggaccttctggcaaaagaagaagtttaataaaaaagctattggatcgatatccaatagctttttataatgccatctgcaaaatgacgcgcctttccttttaaacaaacatcgctccggcagccaatacgaccaggatggacaaacctgcaatcggaatgatatttgccaaagatttttgtttattcttgtctttttcgagatgagccagatcttcttcggacaagacctgtttgcggctggctaactgctcttttttatatttgtctttctcttttttggaaagctttttaaaccagctgataaattctttatattcctttacgaccgtctttgtgtcatcaaacatgcgaagctcgccattatcgatccaggcgacccgatcgcaaattttctcaatttgaccgattgaatggctgacaaagaatatggttttcccttgatttttaaactcggtaattctgtcgacacatttatcatagaaggtttgatcacctactgataacgcttcgtcaataattaaaatatcgggatcgatatgcactgagatcgcaaagccgagccgggatttcattccgctggaatagcttttgaccggctgattgataaactcgccgatttctgcgaattcaacgatgctgtcatacatctcatcgatttctttatttgtgagccccatcattaagcacttgagacgaatgttgtctctgcccgtcagcgcattgtttaatcctgcggaaatcgcaatcagggaaggctgcccgttcatttcgatttcaccgcttgtcggcggaatgatttttgccagcaggttggacatcgtcgattttcccgatccgttaatccctacaaatccgatcgtctccccttcgtacacgtcaaaggagacattccgaacagcaaaaaaacctttatccttattcggaaaaaacagccctttaattttatccgattgtttttcataaagctgatactgttttgaaacatttcgaaacgaaacttttagtttcatcgttaaaatctccttacgtattaaagaaagtcaacaaacctgtccctgaatttcatatgcaggacagatcctacagtcaagagcaataatgtgaaagcccagaaatacaacgtatatgttatatcttcgaagaaccagcttccgccgagaaagctgtttctaaatccgtcgataatataaaaaagcggattcagcttaatcacgttcaacaatgccgggtgcttgtcccccagctgcgtagagatatcccaaaaaatcggcagcaggaaaaacaacagccttgtcaccgattgcagcagaaactgataatccctgaccagtacactgatcgttgaattaaacaaactgaatgcgaacataaaaacaatcatgcaaaacaaatagtaaatatattcaagccattgaagatttggataaatgccaaacgcaagcagcacaatgacataaatcgccatcatcacaaaatagctgaacaggttagccgcaatcgccactgaaggaagagagctgattggaaaattcattttggccaccatgttgattcgcttatatacactgtttgaaccatcaagaatcgtcgggctgataaaaaaccagggaatcaaaccggcaagcatccatatgatgaaaggcacttcgccgacccccgtaatcatctcactgctctttctgattccgatcccaaatacaaaccaataagccagcatctgaatgagcggattcaaaaactgccataacacgcccaaataattcatttgatattttgattttgtttcgtaagctgccaaacgcaagattaaaggaaacgatgttacttgttctttcagtattttcactaatgcattcattctaatcttccttaagggattaagatttgggctacaaaagaaccctgattaaaagcactgctctttattgtaacagatgatcagttttttttcacttttgggggcccaatttagatctcacaaaagcttcaaactacggaaccactttaccgattcagtgatactaaaaagcaaatgttgaggcatttgcctcaacattttctgttagttcaaaactttgtagaaggtatccatagcttttttattatactcattataatcaaaagcttgcataacagtattaatctctgttcttactgcttttaaaccattttcaagaccggctatactatcatctactaaggttccgtatctgccgttttctaaaactgttctattggcaataatgtcagttgccaatattctcattcctaaagtcatggcctctaataataccattggttgtccttcataatgggaagacagtacaaaacagtcgcacattttcatgaaaccaaacggattttccagttgtcccatcagatagacgtaatcttgaagttccaaactgtccactattttttggagatctttccttaaaggaccatcccctaaaatataaagcctgctatcaggataactctgaatatgagtatggaaagcttttattagattatcttgccctttttcaggggagagtctgcccatattaacaaagttgtagttacattcagatggataaggaacaagagtcttacctacttttattccaggaggctcaattacatttaaagatttgcgtcctatccaccccaacactttattatttaagactgctttgcaataagtgccttcttgtgtaagagcttcttcaacaatttccacttcttgttcattgaatttttgatagtcctctataggtgtacatccaggtaaatcaaaaggtttattatatataaagtcagcatcgcttaagttcacaatcgcattgtatttcacttctctgcttcttgcaatgacaggctcttctataatattaaaagctctagagtccaaccatccaattgcttttccatctgcatagaaccggtagtattccccttcttttgtcttatggctttttttgacaatgacaatggtatcgttaaattcttcagcagttgatatttctttacacccgttattaggataggctttggtccagattgtataattttcgccatttgtaatagtcgcgaataaattcatctttatttcttctaatgttctgttctccagcccctgaataatctttgagtgttttttataatttttgcgcttaattttggctttttcattctttatcgcagattgcttttctgtatcctctggatgtgactgatactcttttacaattttcaatgctgaattatcaatccaccctattaatatatcattaatatatattctgctgtagaaagaatgttgagttctgacttctttatctacctcaacgataatccctttatattgtttgctggaagatactttttgtacatctaaagttttataaggtttattccagatgtcgtttccattagggtgttgaatgactgccagtttattgactttcctctcaagtaaaatgctgtctggcaataactcaaaagcctctaggttcagccacccaataatactgtcatctatagtaaatttataaaaaacttttccatcattcgtatgagcttctcgtattatggtgacttctttattttcaaattccttagccggtgttaatttttgattcactttatcaaacagtgaattgataatgaagaagccttcgacatttacaatctttgcccttgctttaaaacttttattggctatgatttcttcatggttctgttcagcgattgctaatttctcagtatccttttcttttaaatgatcgatcccgagaattttttcaggattaatagagttcattatatagtcaaatttgtcctcatcagcatatatagcaagattctttttatttaactccatcgttccctttgaaacacttactagcttatcgaatttattgtaaatagagaataatcctctcagattaattttgtgcggacgacgcccattaaccaatctttcactatctgacaagaggtcattgtgcatatagcaaatcttcttttttgcatctgcacaaactaaatacttggcccagtataagctgtacccgctgaaatcaattacataatcaaatttagattttccaaaaagccttttatgttctcttaaatatgcatcctctgggtacaacttcttttcaagtttaccgttagctcccctattgtgcaccagcttatctttatatacatcaaacaacgtgtaaactggtaaaccaggcttaaatatgaacctaacatttttattcactttgttgatattgtttagaacctctcttgagtggggagttttcataaaacagcttacatcatatttatcaaagtcaatattattcattaaattaaggaaagaagatgtaatgccgttatttttcattcctcctggatagatcaagatcttttctttctttttatccagatctctaattacattcaattgtcccttgtttttgaagattttctcaactactcttttcgtaacatttccgtcgtcgtgattcgtaaatttcactttattcttttcataatttgtttgaaattctgatttcacttgatgaatattgccaattgcttcgactaattcccttacattgtataggacaggacctggaagatcttcattgttaatatattttcctcgttgtttattgtagtcatcggcatcccacatataaaacaaaatcggccgatcagtgacaagaaaatcaaaaaatatgctggaatagtcagttattaatatgtcgacagtacttaacaactggttagtatcaataaagtcaggtatcagtttcccttttaactctgaaactttagaagcctcactatataaaaacgggtgaactttaattaacacattataatcactgccgattttctcctctaaataattcatatcagaaataatttgaaaaacgtcgttttttacttttgatacactattccctttccatgttggagcgtataagatcgtttgcttatcatttgagatcagtaaacttaagtcttttaaataacttttaaactcttcggggctcgtgttaagggttaaatcaatccttggatagccttcttcaatgatctcaccgctgtacagcccttctaacttatagctgttcaaaaacatattggtagtatgcttatttggactcagcaggtaatctgcacttataaagtttctaagtacgttttgtgaatgggctggatttcctggaatatcaaatcccatgcttttcagtggcgttccatgccatgtgtttatatatacttgttcttctttgcatataaaaaatgactgtaacgtagagttattgattagatacttggcagtagccaaatattgcaggtatttatctgaatttcttttaacaaactcaacattcggcatatctttatacttggagataactggctcgagcgcttcaaaatctgcaatagtccaaatatgcttataatggttgaattctggattttttatcaaatagtcaaatattgcaaaaggactgtcagtgatactcttcccatcacggctttcgtataaaattgtgttgtccacaacattcaattttttataaaatttagcgtacttattgtttcttctatgatttctttttttgagatagttctcaatagggtctttaataaattttatttttcttttcaaaacttttttgttcattatttttcttgtctccttcaggattacatacgtattcttttattataagaagttttatttgtaatttagtctaattgttcaatgtactcggcaatcattattttgatttcggaactttttcattttataaaaaatgatattccgagtgattgttaatggcaagaaaaaaagaagtaacatacatcacttctaaaaaaaatgttaccattccaaactaattacaattgaaattttaacattcttgtaaaaattattaaacctgtttttattctacaagatctgttgatttcacaacatctccagatactatgttaaatctttgactgttgattatttttatgataaaaattataatagcataagtttgcttaaaagttaagaccatttaggcgatttagaataccacttttgtaacatttcacttgaacactttttattctcatagggaatattggatattccagcataatctatcatcgaaaacgcttaaatttttccttctgaaaacttcgccttctttctttattgttatcagaagatattttacaaaaaagccattacataaagcaatggcttttttgtatttatttaaataccgtttttacaactttttcagttgaattgcccgtctccaggtaacaaaacttttcataaaaaggctcaaaaatgtcaggcagacgatagtcagatgtctctgtttccttgattttctcaattacttcctcagtcgttttgaccaacggtcctggtgcttcttgttcaaagtcaaaataaaagccgcgcagcttgtcacgataggtttcaatgtctggaacgaagaaaatcatcggacgcttcaaatttgcgaaatcaaagaatactgaagagtaatctgtaattaacaaatcagataccatataaagttcgcgaatatcttcgtatgatgagaaatcatatgcgaatcctttgtacggcgataggtcaaagttttccgcgactaaatagtgcattcttaaaacgatgacataattatcgccgatctcctctcgcagcttttccaaattcaaatcaaggtcgaatttgtattttccttttttatagaactgatcgtcccgccatgtcggtgcatataaaatgacctttttatcttcggggatattcatttttctctttatggccttcatcgtttccgggcggttgtccgtatacagaaagtcattcctcggatagccggactcaatcattgttttgttaaattgaaaagcgcgggcaaagatttcggttgaatagcgattcggggagattaaatagtcccacttcgatgcttctttagtgaaattttgcttgtacttctcagtgttggtgcccggcatgtgcacttcttccatatcgacggcaagccttttcagcggagtcccgtgccatgtctgcacatatgtcgtgtgctttggttttgggatccacaaaggaagccggctgtttacaacccaatattcggcccttgccatggcgaacagccacttcagcgtgaatcggtgaatataagggacatttttttcttcaaaaatttctgtataactcggatttacactccatattaagttgtattccggatgatgttccttcatatattcgtaaattgctctcggattgcagctgtactgcttaccggcaaagctttcaaaaatgacggttttctttttaacaggcagtttgccggccagtccaaaagtaaaatagtatgctctcttcaccatgcccgaaatctttttctttgctttattcttgcctttgcggatgactgacatcagcctttttccttttcctttggcaaaataaaccgcacgggttttgatcgtatagtcattcattcttagacgcataccccgttttcgcttctgcggataaatgtgaaaacgagccggtcctttttttgtgtcaacaattgaaaaactttctatatcatctataagcttgaatgccctgctttttatagcgatttcctcccctgttgcagcatcttcacctacgtattctatataaaacttaaagaaagcaggcatcctgttctcctcgtacagctttttcagatcgatttccgcctcaaatccaacggcatgatcagaagaatcagctgacaaatcgacgcgctgaacgccttttaaagggaaattgaaaaccctttctttatcgttttggctaatttcctttaaaaccagctttctgctttttacgattgaacgttcttcagcatccagcagaaaagtatagcctccgatcattagttttccgtcggagcttaacttaatgctgtccggttcagccactgcttttcttcgtaaaacatcaagagcgaagtggccttttcgggtcttatacggaagataaatgaactgattggctcgatccttatgccaagacagctctatcggttttgatgctgtgtatatcctctttttgcattgatttttttcattattttcataaagtacataaaaatcgatgaccgtttcgtctatcatcaggttagatagggtatctaaagatatttccgctgcttttaactgctctgaatcgcttattttgttacaagttgcacgcatctcttttttcgtattgcggttaactgccaaaacatcgagatgatcaagagagacagaactttcgaacacaaaatagaggcgagaatcattaatttttatttcccgcagctgaaattctatcggaattgcactatccataaaatcagtctactcctctttttttattcaaaagcaaagctgttcatacttattatattaaaatgactcgtatacgaaacaaaaagcacttcttatttttttaagaagtactttttgaatttttattaagctgagccgacattaaaggttcgcgatttcctctttgattttcgtcgtggaaatcccttcggttctcggaaggtaaacaacctcgcagtaatccttcaggaagtcgaatttcccttcccagtcatcccccatgacaaatacatcgatgtcatgatcgatcacatcttgtaccttttgatcccagtttttttccgggatgacttcgtctacgtagcggatcgtttcaagaatcagcttgcggtgctcatagctgtgatatgcttttttctgcttttgaagattgaattcgtcagtcgaaatcgctacgacgagataatcccccaattgttttgcccgttccaataacttgatatgtccccaatgtaataaatcaaacgttccatatgtgatgactttcttcattgtcatgcgctctcctttctaatcttaaggcgaaaagctatattgatatatcaaaaacactcgataagttacattcattccacaggtctttactgatcattcattatagcacatcgcctatcaaacgttaagtattctttaaggttaatgcaattccaaattttatctaaaaaaatcgaaccttttctgaataagacgtaaaaaatcttaatctaatgtaaagatattgttaagcttttatgaatgatctatgctaaaatatacgttagacctcctgaatttatgggctggtctcttaaacttcgactttcatacattcgtatatacttacacttcttaaaccggaaggaggaaaaaaactatgctgcaaacggaaacggttcatcatcttgcatatgttaacggggatttgcccggatttttgaatcatcttgaaaaatcctttatcgaccgcaatgagggggcatttatcgcaacggtaaaccctgagatcgggtatgcggctgcaaaagacaaggattattttaaaacagtttcatctgctgactttatcctgccggacggaatcggcatcgtcctgacgtcaaggctgatcaacagcagattaaaatcgaggatcgcggggtacgatgtatttatcaaccttctcagcttggctgaccgcaaaaagaaaagggtctttttatacggggccaaacaggaggttattcaagctgttgcagatcggctttcaaccgaatatcccggaattgagctggccggatactcacacggctatgtcaaagacaaaggcgaagttgcgaagcaaatcgcggctgccaagccggacatggtttttgtcgctctcggatatcctcatcaggaaaagtttatttatgaacataagcatctatttcctcaggcgattgcgatcggcatcggcgggagcttcgacgtgttcagcggaaaagtgaaaagagcgccgaaaatgttcatcaagctgaatcttgaatggatgtaccgcctgctgaccaatccgacaaggtggaagcgcatgctgaacatcccgaaatatgtcttctccgttctgaaagaggaaagagttcaaaaacagcggcactactatccggagcagatcaaagagcaatctaaaatcgatttgtagaaaagagtttgggtaacgaatgaatatacgttctttattggttatggtttactcggccagtctcgctttgaccggttttattttcagattggtaaaagcgcgcgacagagctgtattgcttgtttcctttccggataatgcgcgcgcgctgcttgatgagtatgtcagcagcagccggccgtttgaaatggaagtcctctatacaaggcacgccgtttcccttgcagatgaatatccttccgttcgatcgcaagtgatcaacgagaaaaatccgattcatctcataaaagccgtataccgaatgttcaggtgtaaattcgtgttgacggataattattttctgctgacaagtgttttgaataaacgccctcagacgacatgcattcaaatttggcatgcgtccggcgctttgaagaagttcggactcgaagatatcggaaaccgctatcgatccgccggcgatatcaaacggtttaaaaaagtgtatcgttcatttgatcatatcgttgtcggctcggaaaaaatggcggatattttcaagcggtcattcggcttgggagatgaccgttttttgcggacgggtgttccgttaactgatgagtattttcatgccggaagacaaacagcggaccgtccggaccaaaaggttattctgtatgcgccgacatacagggactattgtttgacgtccgttcgtctccctttctctaaggagcagctctccggggaactgcagggagaatttttgctgctggtcaaactgcatccggccgtgcgggaacagattgcttttgaagagcacgaagggctgatcaaagacgtatcagacgttccgttaaaggatttgctgatggaaagcgacatcctgatttccgactactcgtcggtcgcctttgagtacgctttgttaaataaaccgattttgtttttcacgtatgatatggcagagtataatgaaaaacgcggactgatcgatgattttgaagcagtcattcccggcaaagcctgcatggacagcgaaatgctgctgaaagaaatcaaagaaatgtccgatacaaaggaagagatcaagaagtttgcggaagagtggcatcaatattcaacaggtgatgccagcatgcgcctgttgaactttatgagcgagcatatgacggcaaatgaaaaaagaccggccggttcctaatggaacacggccggtctttttatgatgattaccgataaaccggcacatcatagtacagcgtatattgatcgagcaatgtatacagactgtacattctccccacctgcttataagcccatccgacatctgtcgcatattggtgaagggcattcggagaccatctcattttatagagggtgtcctgtttgtaagtcgggtggtgaatgtatttttcaccgatgaatttggctccgcccataatggcggcctcaggtgtgaaccacccttgttcataggcgtattttgcgccgtagtaaagcgggttgctgtcgtaagccccgacgccgtacatattgtaaacctttttgccgttgaacatcgttcctttagccaactcggaagttccgttgcccgtctcaaggagcgagtgtgaaatgaggtacagttcattgatgctgtatgctctcgccgcgtcgatgaacgcttgccctttgcctgtcaaaatccctttattataaaggatttttgcattgacctcggcagcattcaatctggccgtttgcgacagttttaaaaattggaagtatgccgagctgtcttgtgtgaaattttccggattgacatatttctcgacttcatccctgctggcatttcgccaattcattctgatttttgcccagccgttttcctgggagatgatgttgactttatcccctttttgcagctgtccgatgatgttgccgcctgtcacaagggggcttgacctgatattcagcagatcagccgtgacggtttggttcgccgtattgatgtagctcaatgaaacataagccggcgcatccgtttgcgggctgactttcatctgtttatcgatcatctggctgagcgtgattccgtagtcagtcgttgtgatttgcgggccgtttttcactttgacgacattcaccggccagccgtaattcgttttgatccgattggcggcagcatccgcacggtctttccctgtaaattgttcattgatcgagatatgaaacaggctgaccgtctttgtttggtaagttgcgctgacattgttcttcttaaagacattcaagcccttgtcgagatctgctttgcttgtgattcgacctgtcgtcacccggtactgcctgtagccgtactcacccgtttgttcaatcttgcccggtatattccgcttgctgaaaaatccgagcgcctgctgtaattgttccgtgccgatcagagcttccgaactcagtttgtagcggctgtaatattggccggtcttcacggcctctgcgtgaatgcctgtttctttaaagaaattgagcgcctgcgtcactttgttctgttcgtatacggattccgttgtcagctgatagtggctgtacactttttttcctgttgatccggccgttcccgccgcaccgtttttcttaaagaattcaagccctttattgattcgcgcttgaacggcggtttcagcagacgcaatccggaagcggctgacggtcgtgctgccggtgctttgcgcagaagcctgaatatttttgtttttaaaaaaccggatgccatcgtttgctttcttttgatctgaaagcgggacggaaacgattctgaaagatgtctgctttttccccgcctttgcagcagtataacgccacgttttctttttgaaaaaggcgtcgatttttttgaggttttgactgtctacgcttttcatgcttacgatccagaagcgtgtaccttttaccttttccgtgcttgaggcgagaccggttttctttttaatttgtccggcggcatttttcgcgctcttttcgtcattaaaatatcccgatttcacattgtatagctgtgccggctgaccggcggcttcatatgcccctttgactttgagctctttttcaaactgcttcagcaggtttttcgcgtttgtttcgccttgtatcgaacttgtcgcaattttatatttaggctgttgtttctttacggtctctatcgttcctttaagggccgtttctttttcaaactggacaagcaggcttttcgctttgctctcatctgcgatttctgcagaataaatcttgacgatcgcttgtcccgctccgtatggtgcatacgacgctttgaggccggtcgctttttgaaaacgatcgaggatggctttcgtgttgtcttcgccttcgattcctccggtggcaaccttcacgtatgcttccctgttccctgcaagtgtataggttgctttcagaccggtttctttttcaaattggagcgcccattccttggctttttcttcaccggcaaattcctttgataccgctttggaaaacggttctttttttccaatcggaccataggacgccttcaaaccggtttctttttcaaactgcaaaagcagattttttgctctgctctccccttcgacaccttctgatgtcaaaacgtatgttgtgccgtttttccctgaaggtttgacctcggctttccatcccgtgtcctttttcagttgttcggctgctttgagcgcttcgctttcgctattaaactcttttgctgtttcaattttgtagacggaagtatcggtatatgctgctaaagcaggaattgccgggactgccgtatgtacgagcaaaatgattgcagcaaaaataacggtttttctaatgtttttcacattctttactcccctcgcctatgagcctcccaatttctaaaacttgctttctctttttatcggcgagccggattatttttttacaataaaaaagcttaacggcctttttttgcagaccgtcaagctttttatatgtgtgacacgattagttcacatgttccttctattgtaaagtcattggtttccgccggcaggataaaatttgtccctttgctgatcggaaataattcgccgccctgagtgagctttccttctccttcaatcacgctgcacaggaggaaaggggcatcctgggtcagctcagcggcaccgtcgatctcccatttatatacggagaaatattcggcttcaacaaatgtcttaatggtaatgcctttttgagtttctgtcgattcgtcaacatagctgtctacatgcggtactgttgtgacattgatcgcctgtgtcaggtgaagttcgcgcttttctccgttttgatcggtccggtcataatcatataccctgtacgtcgtatcggagctctgctgtgtctccaaaacgaccgtcccctcgcaaagagcgtgaatcgtgccgcttggcacataataaaaatcgcccggtttgattttgatccgccttaacaggttgtcccaatcaccgctgttgatcatggtgaccagttcagtccgcgttctcgccgtgtggccgtaaacgatctctgctccttctttgcaatcgatgatataccagcattctgtcttaccgagttccccgttttcgtgctctcctgcataatagtcatccgggtggacttgaacggaaaggtcttgattggcatcaagtattttcgttaacagcgggaaacggtccccctctgcacctccaaacaattcacggtgttcgtcccaaagctcggcaagcgtttttcctttgtaaggacctgaagcaacgatgttcggaccgtttggatgggcggaaatggcccagcattcacctgtcaaatcggagggaatgtcatagccgaatgactcgcgcaaagccgttcccccccagattctctctttaaactcaggctgcagaaatatcggtgattgagtcatgctgccatctcctcccttaattcacgatagtcttatgtaaataaaacgctttcttttattgatagacatgtatgttgaaatataaaccttttcatattcattatgacgttatctcgatagaagtcaatgccggaaaggaaaaacagaagccctcttcaggcttctgcttgtgatgatgcaagctcaataatccgctggtttgagcttcctctgtaaaggagcgtcaagtccctttttttgagttcgaacgggccgtctaccaggacatcgcaataggccagcaaggcgctgtgcttttcattcttcaagatttgttcgtacgtatagccgctgtaaagccagatgtccttttcggaatgctgcttaattttttctgacagctcgatcagttcgcctgcatgcaaaagcggctcccctcctgaataggtgacgtttgtaagcgggtttttcataatttcctcgaatacttcgtctacactcatatcaaatccgttattgatattccagctttgtttattatggcagccttcacacatatgcgggcagcccgctaaaaacacgactgttctcagtccttctccgtctacgatgctgtcatggataatattcatcactttcatagatgcttcactctgtccttttcttcttgtcttttcgccgaattccactttgacatatctccgactaaatatcctgtaatccgtctgattcgttcgatcaaagcctcatcccggtttttgcactgcgggcattcattatctatgattccggtaaatccgcacgccttgcagtggtcgacaggatggttgatcgaggcgtagcccatgcctgaccggcgcatggcggtcacaagcatgtccatcgctttaatgttttttttcgggtctccgtccagctcgatgtagctgatgtgccctccattgcacattaagtggaacggcgcttcttttctgatcttttcgaccgcagtcagcttatagtgaacagggatgtgaaacgaattcgtatagtacacccggtctgtgacattgcggatcgaaccgaactccactttgtcttttttgacaaatttccctgaaagcccttctgccggcgtagcgatcaaggaaaagttcaatttgtgtttttctgtggcttcatcggccttatctctcatcgactggacgatttttttgccgagttcaaacgactcctcgctttctccgtgatgttttccggtcaatgcagtcaaagcttcagccagcccgataaatccgatgctcaatgttccgtgctttagcacatcctcgagcgtgtcctcaggttcaagcttctcgctttcatgccagatgccttgtgaatacaggaatttaaagtcctttgctcttttcttgcattgaaaggcgtaccgttcaagcagctgttgaatcgttaaatccatgtagcggtttaacaaggcaaaaaactgttcaacgttttcgctgagcagcgctattttcacaatgttgatcgaggtgaatgacaaattccctctgccgacgctgttttcttttccatgaatattggacatgacgcgcgttctgcatcccatataagcgatttcgctttccggcgttccgtcataaaaaggtttgttcacgggcgagtcgataaagctgaagttcggaaacagcctttcagcgctcgtttccaatgcaagccggtacaagtcatagttagggtctgtttgatcaacgttcacgccttctttcattttgaagatctgaatcggaaaaatcggcgtctcacctttgccgaggcctgcttttgtcgccttaagaatatttttgatcaaaaggcggccttcccttgacgtatccgtgccgtaattaatggaaacaaacggcacctgtccgccgcccctcgaatgcatgctgttggcgttatgtataaatgcttcgcacgcttggtaagttgtgttgtccgtttcttcccacgctctttcccttatctcttcttctgtcaaagttgtcgggtattgtttgattttcgcaagatgcttttcgtacgttttgcggacgtaaggcgccaggtcgtaatcgaacattgggaatgactggccgccatgctgcatattttgattcgattgaaaaatgatagatgcgagtgacaatgcgctcataatgtccttcggttccctgagggagccgtggccagtgtggaatcccttctttaacagccggcccaatggtatctgacagcaagtcgttgtcccgctcggcatatagtctaaatcgtgagggtatataaagttgtcatcgactgctttcttgatttccggcgacattaagtaatggagcgcataatgtctggaactctcggatgcaaaccggctcatttgccccatcggggagcggccgtctacgttggcattttcctgcataatatcgtgatttccatacccgacgatatcatgaaatgtttctgtcaattgcaataatccctgttctttaaagcctgttgtcatcctaatctctcctaaaaagtagcatatatagtgtttgttcatccaacagacactatatattgatattagcacagattatgttcgtcaaatttagcaatttggtgacgtttcaaaaacggtcataaaaaaacgccccggacaaatgtcccggtgcgcctgcggcaacattacttgtaatcaatcgtcatttgtttcggagattttctttgtttcgtccgtttttcgatccagacggttgcaagcggcgtcagaagcgaggtgacaatgacgcttgtcgcgatgatcgcggttgctgaatcagctaccggcgcaaacacggggtttgcatcggcaagtgcatacgggacggctaccgcagccccggccgttgatgacgccgctactcccgcgacaccgtctcctcttgcgacaaagcggtccagcaagtatagagatgcacccgagagaatgacgactgatacgccgacaacaatgcctaaaaggccggattgaatcaacatgttaaaatcaagcgtgtttccaagtgaaaatgcgaagaacggaatgatcgccggtacgacttttccgaacaaatcgcgcaattcagggtcaaggttaccgagaatgcagccgagtaaaaacgggatgacggttgcagccagcgtctcccaaggaaatgccgcaagccctgtcacaccgaaagtgaccatcgtcataaacgggcctgattccgtgctgataaaggcaaaagcaccggcgtcttcctttcttcccatgtgattcattaacgccaaatacagaccgccgttcgtttcattcataacggctacgatcgccagcacggacagtccggcaaaaaacccgctttgaatgccttcgtctggaatgaactgcgctgcgatcaaacccaataatgcggcaaagccgactttgccgatcagaagcgtcagccccttcctcgcaatatatccggaagaacgaaaatctattgtcgcgccaacgcaaaagataaatactcctaaaatcggcagcgttccggtaatcagggcgcctgtaaatccgccgaaaaactctgcggttcccggtgcaaatgtattcagcgttgcgcccagaaagagcggaatgatcatcatgccgcccggcacacgttcaatcgttgctttaattttcatcatttttttctcccattctagaaattaatgaaaaagcaaagctgtcgatcttgcaaaacctgaagtctttaccacgctgcgcacgctttatttctgctgagcccgccgctgaaagatgcgctggagatccgcttctgacactttgttcagctggcttcccacacctactgccaatgctccggcatcaagccacttctccacatcgccgggatggattcctccggttggtatgaaccgaaccttcggaaaaggaccggcgaggttcttcatgtaaggaatcccggatgttccccctggaaacagcttaagaacccgaaaaccctttgagaccgcttccataatttcgcttggcgttaatacgccgggaataaaaaatgtatgcaatgatgcggcctcctcagccagtgattccgaaaaacccgggctgacgataaattttgaccccgctgccgcggcttccctcgcctgttcgctttcaaccaccgttcccgctccgacaagaagaccgtcttttcccgcaaatttttcaatcagctcagacgctcccggcgtcgtatatgtgatttcaatcgcagtaatccctttgtcgatcagtctgtgaatggtctcctcagcagcctccttaccgtctgcgcggacgactgcgatcagcccggcctcgcccagctgctcttgcacttttccgatcatagacatttccattacggtcaacctcctattttttggttgtttttctctccagccataaaagctttcaattgatcccttgacggcagaccgtccatatcccccggagccatgacggccagcgctccgatcgcattggccctctgaactgcttcttccagcggaagtccgtctaaaaggccgctgatcatggcgacggcaaaaccgtcgccagcgccaacagtatcaacaaccttctccacctgataacccggcacataaccttctttttccgatgtcctgtaataagccccttcttttccaagcttgatgacaatcaccttgaccccctgcattacataatgtttagcgatatcctcgggagaattgcagcctgtcaggagttttccttcattgatccccggcagaaaccagtctgcctgcgcggcgatttcattaattgtatgaaccattgtctgctgatccggccaaagctggaagcggagattcgggtcaaacgaaatcgtcttcccgtcttttttcatctggtgaacggcgtggcgggcgaagcccctcatttcccttgaaagtgcaggaggtatgcccgtcacatgcatatgtttggcttgcttgaaatactctgccgggtagtcatcaatgctcatcgtgcttgcggctgatccgctccgataatatgtgacatcagggtctccgctttcaacctttgacttgagcagtatgcccgtctgccggtctgcggtgcgtttgacttcagaaatgtcgacgccttcttttttcaattcatttaaaataaaggttccaagcgaatcggcgccgaccttgctcatccagccgacccgaaaacccaggcgcgacagtccgacggcaacgtttgtttccgctccggcaagagctttggaaaacgaagacgcctcatgcagtccgcctgcttcatttgcgtaaaacatagccatcgattctccgaaggtcatcacatcaagcgacatgatttcactctcctttcaaaatggtaccggtttcaaaagcagttgcgggaaaacactctcccctaagttttcgggtccatgagtgtttccgtttgacaagttctacagcgactgtctgagaacaagctccgcctcaagctgaatcgtctgcggggcgctttcgtctccttcaatccgtttgatgatccgctccatggcgaccctgcccatttcatgcgacggctgggcgatggtcgtaatgcccggaccgatcaatttataccattctgtatcatcaaatccggcaattccgacatcttccggaattgaaatgccaagctcataaaggcagctgatgattttcagcatcagaagcccgttgtttccaagaatggcttttttcccttctttcatttccaaaaagcttttgacggactgtaatagagattctttgtctttgacgtcagcctcatatacgagaggggtaccgccggcgtttcgttccagcgcgatttctgtataggcggaggccctttcctcccttggactgattcccttaatcggttcggtaaacagaccgacctgggcatagcctttgtcatacatgagattgacgatttgacttgtcacttcgcggttgttcgttgtgactgcatcgatcttgagcccgggcactttccggtcaacgagcacaatcgatacatcctggctgattaaatccaagagcacatcgttgttccttcccgtcgtattaataatcagcccttcaatgtaatgcgcgttcagcttgtgcagcatctccctttctttctcaggactgttgtccgtgttgcagaccatgatgctgtatccgtactgatcgcaaacctcttccacccctctcaaggtggctactgaaaacgggtttgtaatatcggcgaccaaaaatccgataactttgctttttttcaccttcagcccctgtgccatctggcttgggcggtaattgagctcctcgatcgcttttttgatgcttttcacctttttcggtgaaatggcatcaatcttcccgttgatataacgggaaaccgttgattttgatacgcctgcatgtgcggcgacttcgttgatggttactttcgctgtttgcttatccttcattcaagtactcctataaccttatgatttgaaaccgatttcaaaaactttataccaccagcatatcacatcatttaaaatttggaagagtcttttttaatatttcagcattgtcctttacaatattcagaaaaaagtgaaaagactgttgacgctttccattatttactttaaaattcatgtttgaaaccgttaccaaaaacttttggcacttcattcaagtcagtctaaaaacgtccaattcaaggaggagaaggtatggaaaatcgttattctgttcatccagaacaagcgaaacgattcacaaccgcagagcttcgcgagcattttttaatagagtcattgtttgttgaaaacaaactgaatatgttttattcgcatgaagacagggtcgtgatcggcggagccgttccagtaaaggagtccatagcgctcgatgccggcgattttttaaaaacggactatttcctagaacggcgcgaaatcgggattgtgaatgtcggcaagcccggtgcggttaaagtcggtgatgaagaatacgtactggagcacaaagactttctgtatatcggcctgggaaataaagacgttttcttctcaagcttgaatgaaggcggggccaaattttatttcatctcggcgacggcacaccaaaagtatccggtgcaaaaagcttctctttcagagctcccatacgatcatttaggagaagaagcctcttcaaatgttcgtaatctatacaaagtgattcatgcagacggcattcaaagctgccagctgatgatgggcattacgtttcttgaacctaataacacatggaacacaatgcctgcgcatgtccacgaccggcggatggaggtttacctgtatcttgatcttgctgaggatgcaaaggtgtttcatttcatgggcgaaccgacggagacccggcatcttgtcgtcgggaacgaacaggctgtcatttcacccgcgtggtctgtccactcgggctccggcacatccaactactgctttatatgggcgatggccggagaaaactacacatttaaggacatggatgctgtcccgatgaatgtcattcggtaaggacgtgaacgtgagatgggatatcttgaatcgtatttttcacttgaaggcaaaacggcgcttgtcacaggcccgggaacgggaatcggcaaagggattgccgaagcgctggcaaaagcgggagcggatatcatcggcacttcgcatacgagcggacttgatgaaacaaagcggctgatcgaagaagccggcagaacgtttacttcttatcagcttgatatgggcaaccttgacgaggtcgaggcttttgcaaaagaggtgcctgaccgccatcaaattgatattctcgttaacaacgccgggacgatccgcagagaaaaagcggctgatttttcccgggagaactgggaagcggtgatcaatgtcaatttgaacagcttatttttgctgacgcaggctatcggccggcagatgattgagcgaaagcaagggaaaatcatcaatattgcctctcttctttcatttcaaggaggcattcttgtccctgcatatacggcaagcaaacatgcagtagccggattgacgaagtcttttgccaatgaatgggcggcttataatgtccaggtcaatgcgattgcgccgggctatatcgcgacgaacaatacaaagcagatccgcgacgatcaaaaccgcaatgccgaaatcttaaaacggattccggccgagcgctggggtcagccggatgacattgccggcgccgccgtattcctttcgtcgccggcatccgattatgtgaatggacatgtgttagccgtcgatggcggatggctggcaaggtaatgcgaggaaaaggctgccggtagctcggcagcctttatcatcgctatggcttcaaaattactttaatgcaatcatcttcatggtcgttgaacaaatgataagcgcggccggcttcttcaagcggaagctggtgcgtaatgatttccttcggatcaaattgattctcttcgatcttcttgtaaatctccggcatcaaatggatgaccggagcctgccccatttttagcgtaacatttctggaaaagaatgcgccgagcggaaacatattgtaattgcttccatatacccccgtaatctgtacggttccgcactttctgaccgcctttgtagaaatttgaatcggtccgagcgtgccgccctgaagcttcagtttttgctccagatactcaagcggagattttttgccgtccatccctacgcagtcgatcacgacatccgccccgccttttgtaatctcctttaaatgctcgcccatatcaggatattttgtaaagtcaaatacttcaacgcggtttaatgcctcagcctgctttaggcggtagtccaagtagtctactgcaatgacccgcttcgccccttccatccaggcaaacttctgcgccattaatccaaccggcccgcagccgagcacaatgacagtgtccccttttttgacgcctgcgtgaagcacgctccaatacgcggttgggaggacatctgataaaaacagaagcgactcgtcctccatctcgcatgattcaggaatgacaaacggcgtgaaattgccaaacggcacttttaaatattcagcctgtccgccagggtgattcccgaatttttccgagtagccaaaatacccgcctgaatcataatggggattggcattgtcgcactggctttccagcttgttttcgcaataaaagcaatgtccgcaggcaacggtaaacgggatgacaacccggtctccttttttcacttttgttacatcaggtcctgtttcttctacaattcccatcggttcatggccgagctggaagccttttggaagagggaaattcccttgataaagatggagatccgaaccgcaaatcgcggtagaagtaattctgacaacgatatcatcgcttttttcaattttggcatcctccacctggctgacttcaacatgctgaggcccttgaaacgttacggctttcaaatcgtcacactcccattatcgttcagttgactttagtgtgagataaacccgggttcttattcagttttttaaacaaacgtttcattaaccgtcatgtagaacggccatgattcatacatagaagaaaacggaggtgttgggatgctgctgcaaatactggtcggaggactggttgttttcattattttttttctcgtgtttcgggcaatcagaacgggcaatctgccgcgccatgacgattcgcagccaggagacggagagaacagagatcagccatgatcggccggcctcttcacacaaaaaaggatggggccttgcccatccttttgcctatcgttcaaccggctgtgtgtcagttgccgtgattccgcggtgcttgtcccgcaaatcctgctcgatctcttccagactttttccttttgtttctgttactttaaagaagacgaacaggaaggccgcgattccaatggccgcatagcacagaaacaggtaactgatgcccatcgcttccatgaggaccggaaaactcaaagtcacaattaagttccctgcatggagcattaaagtcgatactccggttcctatccctctgacatgaagggggaacagctcaggcagcatcacccagacgatcggcccccagctgacggcaaatacgacgatgaacacacctaagcagatgacagtcgtccatgccgcaccagaggtattgccgaaaaagagattagaaaaagaaagcacgatcaaactgatgaccattccggcatttccaaataataaaagcggcttccggccaatcctgtcaatgaagcggatcgccacaagcgtcatcaggacattgaccgttccaatgccgactgtccctaaaatggccgccgaatcttcaaatccgacattcgtaaacgtttttggggcatagtaaataatcgtgttggttccaataaattgctgcagaaatgccagtccgacccctgcgattaacgccgggcgcacccacggttccagcagctctttcaagcccccctggtcctgcttttccgcttccttaatttctttgacttcctgatcgacccgctctcctcctctcatctttgacaaaacccgccttgctttctcttcttttccttttgttaagagccagcgcgggctttccggcatgaaaaagataccgattaaaaggccgattgacggaataagggtcaatcccagcatccagcgccatgcgcctgcatcactaaatgcatagttgatcaaataagagagcagaatcccgatcgtaatcatcagctgatttaatgaagaaagcgcgccccgggattccttcggagcaagctctgaaaggtacaaaggaacgatggtcgttgaacagccgactgcaaggccgagcacgatcctgaaagccaccatatattccgtgcttggcgccagggccgttccgagccccccgatgcaatacagcacagccgctgacataatcgcccttcttcggccgaagcggtctgtcagcctgcctgacaaacccgatccgaaaatcgccccgattaatattgcgctgacaaccagcccttctgtaaaggcattgagcccaagttcatctttcataaacaaaatcgccccggaaatgacgcctgtatcataaccgtagagcacaccgcccaaggctccaaaaaaataaagccaggcattcgatctttttcccttcatcccagtatatcctcctccaaggctcgtcttttataacctttaaccttgtcttgctttcttcaaacctctagaaactcggagtaccattaaaaggaatttaaaaatatgaaacattttatctgttatatcgtcttattataggcggcaaaatgattagtcccgcggaatttccagagaatccccatatgcaaaacagcaaatatattgtaaaatccaagattgggaaactattttttattaaaatttagacttattcaacaattgtacgtttcaatataaataaaagaggagcttatacatgctacgatcgcagcgaacgaagaaaaagagactaagaaaatgggtgaaatactcactgtttttcattgctttaatcctgacggcgacggcagccgcaggcggctatgcgtactataaagtggcgaacgcctccaaagatgcgcaagtcaccctttccagaggtgaacagtccgtcaagcggattaaagagttcaaccctaaaaaagataacttctccatcctgttgatggggattgatgcccgtcccggacaaagcatggacaaagaacgaagcgatgcgatggttcttgccacgttcaacagaaaagacaaatcggtgaaactattgagcatcccgcgggattcctatgtcaacatccccggacgcggctacgataaaataacgcatgcccactcattaggcgggcgcgaccttagtacagaaaccgtcgaaaacctgctcgacattccggttgattacgtcatggaagccaatttttcagctttcaaggaagtagttgatgaactcggcggtgtaccgatcacgatcaaagaagactatattgtccggcagattaaaaaggatacgaaaggcaaagtcaaccttcaaacaggcgagcagacgctgggcggagaagaagccctcgcttatgtaagaacgagaaaagccgatacggacttgaagcgcggcgagcgccagatggaagtcatcaaatcgattatcaacaaatccaaatcgcttacttccattccggcttacgacgatatccttgatacagtcggaaagaacgtatcgatgaacttgtcgctgaatgatgcaatcggactgatcccgtttatgacgtccattcaaacggtcgatacccttcaattgaaagggagcgattatcaaccgggcaaagtctactatttccagcttgatcaggaaaacctcaacgaaattaagcaggaattaaaacagcagttagatgtataattagaaaaaggatgaatcatattcatcctttttctgttttaatgaaactcaatatttactattgaaaaaatctaaatttaggtttagccttttacataacatgtctttttagggaatactgccgaagagagctgtttttcgcctcccgaaaaacggcaaactgctcttacaggaggttatctttacataatgagattaattgcgatcgatttagacgggactcttttaaataccgaaagcaaaatatccgcagaaaaccgggccgctatcaaaaaggcgctcatttcagactgcatcgtaaccatttgcacgggacgggccacatttgacgtaaaagcgcttctgaacgatttggatattccgattatcgctgcaaacgggggaacggtccacgatttcaactataaactcctaagcagaacgctaatggacaaggaagcgggaaaaaaggccgcccaatacttaacagatcatcaaatctattttgaggtttatacggacgatgcgctgctttctccttttgacggagaacagaaacttaaagcagagctcgatatcgtcacaagcgccaaccctgatgaagacagggatacgctttggcaaggcgcactgactcagtttaaacaattcggcatcaaacccgtccccgacattcgcgagatttttaacggagacgaacatatttataagctgttgtgcttctcatttgatatggaaaagctgaagaaagcaaaagatgatctttctgcctttccaaaactgggactcacttcttccggaagacatatcatcgagattctgcctgatgaatccggcaaaggccgcgctttaaaagagctggcccgccactatggaatcgagaaaaaagacatctacgcgatcggcgacagcccgaacgatctgtcaatgtttgaggaagccggccatcggatcgcgatgggcaatgcaatcgatgagctaaagcatatcagcacctttatcacgaaaagcaatgacgaaaacggcgtcgcttatttcattaacaaactgctggaaaatgaatatcaataaataagaaaaccgctcgagtccatcttcgagcggtttttttgctgtttctgctactcaattctgacgcttccggcgtatttatctttccaataggcgctcgtctccatatctgctgtcgttacaccggcagacaaggtgacaagaacgacctggccgtttccgatatagatggcgggattcataacagtggttcctttaaagaagacgatgtctccaggctcaagctcctgtttggtaattttcttacccgtgctgtattgtttgtcagcatacctcggaagctccactcctgccgccgttttgtagacatattggataaacccagccgtatcaaagccttctttaggcgatgtgccgcctttttgataaccgacttcgccgatatgcctgatggcttcggatacaatcggattttttggcagggacatgttgtcaaaacgtctgactcctgtgaacttcttctgccaataggaagccgacaagtaggatatcgtcactttatttgaacggctcgcatggataaaccgcccgcccccggcatagatgccgttatgggatattcccggtttgtacgtattgctgaaaaacaaaacatcacccggccggatatcttcaagcttcaccttttgaccgacagcccattgctgttcagccgaccttggcaaataaacgccgagcacctctctgaagacgtattgggtcaaccccgaacagtcaaatccgagatccggagagttgcctccaaatacataaggaacaccgacatagctttttgctttttgaacgacaggatccatcgaaatctcaggctcttttgtgatccttttcgctttaaaataccccgagctccagtaagagctgccttcaagctttgtcacgacaaccccgtttgattttgtgctgtggatgatttgatcatttcccaaatagatggcgacatgggtcggtccgtccgattccagctcggcattcttgaaaaagacaaggtcccccttttcgagctgctgacggccgacactgctcccaagagtcgattgttcctttaccgttctcggaagcgtaatatcgagcgattgaaacacatattgcacaaagcctgacgagtcaaaccccgttttcggcttctctccgccgtagctgtatttcgcaccctcaagctgtctggcagtttccgctattttctcgccgatcgtatcggcgcgtacatcattatgattcgttaaaaataaagacatccaaagcaccgcaattccacaaaacaaaaccaactttttgtttgccgctttttttatcaattgatctgttcctcctcttctttcctctttcatcgtcattcaactgggatatttaaaggactttttttgcatgtacagcagcgtcatagcgagaagaaacgctcagcacagcatgatcagctttttcacctaagcgcggattaaaaagatgaagggaaatattctaaagaggtcatgaacatgaggtgcggttcccatcccgaattggtaaggtgatgcattttcaaattttgcttcagtcgaaatttgtcagtttttattcccttcaaaagaatacaataaacatgaaccccaaaaccatgtatatatcctcctgattttctataaaactttatacactgaccggttaagaaaattgtcgtgtttccctttcaaaccggccgcttttcacaggtcttttataaccgggatcagcacacaaaaaagagagcgccggcggcactctcttttgcactgttattgcttgttttctgttgtttgatcctgctgattcactttttggatctccgtagagattttagctttttcatcgtttgacaattcatcagaatacttgaaagcagacatgaatgcaatgatcaaaactaaacctacgaacggccaaatggctctgacaaatttcatttgttcaccactccgtttttattatttttcagcttgtccgcatgatcgacttcaaacgttaattttccgttctcttctttccagtcgaggtttgttccttttgtcaattgacggaagatcgcttttcgttttaagaagtcgctcttgcctaaaggcgtcggcgttgcttcgcgaatgttgagaggcgttacctcaaagcgccctttgccgtcattcattaaatggtattgtacaagcgcgctgtcccgtgttcttgaccagccctgatcaaatacaaagttgccgaggctgtagaaaatcacagtaccgttatacacttcgatcggttcgagaacatggggatgagcgccgatgatgacatctgctccggcatctgcaatcgccttggccagatccttctgtctgtcgttcggttcattgtcatattcttgtccccagtgcacatggacaaggacaagatccgcttttttcgatgcttccgcaatcattggaataaagattttcggactgagcggcagcactccgcctctgttctttttggctgtaaagttctttgtgtagacgtctgtaaaaccgagcgttgcaatttttacgccgttcacattctgataggatacgtgctgtttcgcgtcttcaagattatttcctgctccgacaagctccagattctcatttgaaaatttattgagcgtatccttcaaaccgtcttccccgtagtccatcgcatggttgttggcaaaattcagtacgctgaagttcagctttttcaatgtttcgactgattcttgattcgtttgcagatggatgttcttttctgcctcttgatagtcctttgcattggttacagggttttcaaagtttcctgtgataaaatctgacacattaaagtacggcttcacatttttgaagacactttccgaaccgtgcaagtttgtcactttttctacgtttcttcccatcatgatatcgccaacaaaagtagctgtaagcttggcatcttcttttttgtccatttgcgaaggagttttggcgcttccgacccaagtaaagacaaacattaaacagaaaataacgggcaatacgataaagacgtgcttgtttgttttctttttctcctgcttcgtcaacttcagcagtttttcctgaaagttcagttgttttttcatcgatttgacacacctaactttagattagatagtaagcatacataatgacgaatgttgctccgctcaataaaagcgtacttccaagcgtaatcgttaatccctgtctttgaatggtattggcgatcagccccggcacgatgattccgattcccctgaattcggcaatctcaaacggcatcaccggatatataaaatcaaaaccgattttcaaaagaattcccgtaatcagcattgctgcgaattttctgcgtccgtatagaatcataattttggaaagtccgaatttcacgatgacatacgtcagcaaactgacaaaaagaacgagcagcatgaaaatcggctgattgaagacaagtcccaaataacccggtacgacgaggccggctggtacaattcccgttttctctgcaaaaatcaaactgagtaagactcctaaaatgagggcgatatataaatctgatccaaacattgtgttttcttcctcctagctaacgagctgcttaatcttgtaatcttgtattttttcaatgagaggctccgctgctccgtggatatttccgactccgtaaataacgcggccctcaagcttgtttttcagcatgaacatgatttcttccgttgatttgtgctcaaaatcaaacagcttgtccgcaggaattttgcctgcttcatatgctttgacgatcggctctgttgtttctccaatcagcacaagttcacttgcttcaatataaggaaggacatcttccgcaaactgctgtgttctgtctaccctgtcggcgcggcagttcataatgacgatcggctgatccgtaggatagcctatttcttttacacgcttccaaatgtttaaagtggaagctgcgtcattggccgcaaaaccgttgacgaaatgtccgggattcttggcgttcatcagcggcagaattctcatggctcccggatcaggcggcgcattcagcatgcctttaaaggcggtttcttcgtcaatgcccaacgcttgagctacaccgagcgcaagagacgcattatcagggaataccatgtactcaaactgtctgaggtattcatctgttattttagaattgtctgcgacgatgacttttgtgttcctttcttttgcaatttgcttaaagaaatcggtatactcactatcagtaataaccaaatgtccattataaggaatggttgctgtgaatgcttctgcgatttcatccaaagtcggtcccatcacatccatgtgatcctccagcacgttcacgatcacgccgatattagcctgaagcaattcttcctgaaagatgatttggtaatcaggattaacggccatgcactcactgacaatcgcattggcccctctttccaccgtttctttcataacctccttctgctctccgatattcggcccttgcggctttcttttgatcggcttctcttccggtgtgtcccaataaatcatccttgcgtctgtcccggttgtttttcctactgttttgtagcctgcttcgattaatatccctgttgttaatcttgtcaccgtggactttccgcgtataccgttgatgttcactcggacaggcagcgcatcgatattttgctggtggcgccttttttcataaatgccgatcccaacaacgatcacacaggctaatagcattacccacattgtttgtctacatctccttcttggaatctgatatgtaaattcattcatcagtatataggttcactatgaaatcacaatcggcattatgtaacagaagacgacgaaattttccgtgacaaagatcacctcgcccgagtcattaatgcctatctttttattgatatttttggaaatcgaaagttcttaattcctatcagatttttgtcagcgttttaagtatgcgctttcaaaattcgacattatgatttttgtacttttctccctatttcagatgaaaggttgaaggatggattcaggatctcttttttcccccggccgcaatcccctttaaatgggctgtcagccgggatgtctcttttcttttagtattttcgctcttttcgaacaggttaaaaagtcaccaatgttccctcttcaaaacaaatccgtcctatgacaatcagaccatctatcaaaaaatgaaaatctcttttagcataaagcgggattcattgacaaatccaaatattttgtgagtcgttcgatccaccttatttcttcagattttaggttaaaatcctaggatttaaaaagccattaatttttttcaatgataattcatcaaactttaacatttttaatttttcttactattctcattgttactgtattcgccattaaacgcccctatatatgtctcgatatcccagcccggtctaaaatttcagtgttcatccatttttttattgtgattttaaatggatcgtgataatctttatgtaaacggttacacaaatagagaggagaaggcttttttggctacgattaaagacgtcgcacttgctgcaaaagtatctgtcgctacggtttcccgggtattaaatgagacgggatacgttcatgaagacacgagggcgcgcgtgctgaaagcgatggaagaactgaattaccacccgaatgaagtagccaggtctctctataaaagggagtccagactgatcggactgctgctgccggatatcacaaacccgttctttcctcagcttgcccgcggcgttgaagatgagatccaccgcctcggctttcggctcatatttggaaacagcgatgaaaatctggaaaaagagcttgattatatgcagacgtttaaacaaaatcatgtggtcggagtcatttcagcgaccaattatccggatgcgccaaattatcaagacttgtccatgccgatcgtctttcttgaccggacgggcgagaatgcgccggctgtatttgcggacagccgcgaaggaggcagaatcgcagcggctgagatgatcaagaggaacgcgaaacggattacgctgattaaaggaccggctcaccttcagactgcaagagaccgtttcaacggagcgctggacgtgctaagcggagccgatatcgattttcacgtcatgaaaaccgagacattttcatttccggaagcccaaaaacgggcggcggagctgtttggcacatatccggaaacagacggcgtgatcgcaagcaatgacattgtggcgacagccgttttgcatgaagccttaaaacggaagatcaaagttcccgatgaactgcagattatcggctttgatgacataccgcaaagcgaattgcttttcccctctttatcaacgatcaggcagcccgcctatgaaatgggaaaagaagctgcaaaactgctgcttagattaatgaaaaatgaatatattgaacaatcggcagttcagatgccggttgcctttattgaaagacaaacgacaagaaaggcggaatgacaatgagtaaaatatgcgtgatcggcagctcttcgatggatttagtcgtgacatcgcccaagcggccggccgccggagaaacggtgcttggcgaatcttttaaaacggttccgggcggaaagggggccaaccaagcggtagccgcggcccggcttggcgccgaggtccatatgatcggctgcgtcggcgatgatcattacgggaaagccatcctcgacaattttcaagccaatggtgtcttgacagactatgtggaaccggttacaggtcaggaaagcggaaccgcacatatcgttctcgcagacggcgacaacagcatcatcgtcgtcaaaggggcaaatgaccacgtcactcctgaatatgttcaaaaagcgctgcctgcaattaaacaggctgatatcattctgattcagcaagaaattccggaggaaaccgtcgattatgtcagcggactgtgcagctctctcggcattcctctcctgctgaatccggcaccagcccgtccgctacgcccggaaacggtcgaacacgcggcctacatcacgccaaacgagcatgaagcttcggtactgtttcagggcatgtcccgggaggaaacgttaaagcgctatccggagaagctgttcatcacagaagggaaaaacggcgtccgctatcacaatggtctggaagaacgtgtcgttccttcattccctgtcaatgcgattgatacgacgggcgccggagacaccttcaatgcgggatttgccgtcgcgctttccgaaggacaaagcatcgaatctgccttgcgctttgcgaaccgggcggcttccctgtcggttctgaaattcggcgcacaaggcggcatgccaaaacgggatgaagtggagcgtgaactgtcatgaaaaaacacggaatattaaacagccatatcgcaaaattgctggccgatctcgggcataccgataccatcgtcatcgcggacgccggtctgcccgttccgcccggcgtccccaaaatcgatctcgcactgacattgggtacgcccggatttcgagaggttacaaagctcatcgccgatgaaatggttgtcgaaaaagtgacggcagcccaagaaatagaaagcgtcaatcccggtcaagccgcatttttaaaagcggaattttcaaaccaaaagattgactatatcccgcacgaagcattcaaaaaggcaacgagccaggcgaaagcggtcattcgcacaggggaagcaacgccttatgcaaattgcatcttgcacgcgggagtgatcttttagatgtttacattctacatctggaaagaagggatagcccatgcatattaaaatgaaggacatttttaaagcctttggccaaaaccaggtgctgtccggcgtttccttcgagcttcaagaaggtgaagtccacgctttaatgggagaaaacggcgccggaaagtcgacactcatgaatctgttgactggacttcacaagctggacagcggaacgatcgagatcgacggaaaagaaacgtatttttcagatccaaaggaagccgaacagaacggaatcgcctttatccatcaggagctgaacatttggcctgaaatgaccgttttggaaaatctgtttatcggcagagagctttcttccaaacttggatttttaaacaacaagaaaatgaaagcgctagcaaaagagcagcttgaaaggctcggtgtctcaatttctcttgaaaaagaagccggagactgttccgtcggccagcagcaaatgatcgaaatcgcaaaagcccttatgacagacgcgaaagtgatcatcatggatgaaccgacggcagcgttgacagaaagagaaattgaaaaactgttcggcgtcattagagcattaaagaaaaacggcgtctccatcgtctatatatcccaccgcatggaagaaatcttcacgatttgcgacaggatcacggtgatgcgcgatggaaaaacggtggacacgaaacggattcccgacaccgactttcatgaagtggtgaaaaagatggtcggacgggagctgaccgaacgctatcctgaaagacagccaaatccgggacgcgtcgtcctcgaagtcaagcaggcatccaaaaaaggagtcttccaaaatatcagcttttccgtccgctccggcgaaatcgtcgggatttcaggactgatgggtgccgggcgcaccgagctgatgagagcggttttcgggctcgatccgcttgactcgggagacattttcatcgaaggcaaaaaagcggcgctcaaaaaaccgagcgatgccgttcaaaagggaatcggctttattaccgagaaccgcaaggatgaaggacttgtgctcgacacgtccatcagagaaaatatcgcccttccgaatctcgccagcttttcgccgaaaggatggattgacaaaaaaagcgagcaggaatttgtcgatcttctgatcaagcggctgacgatcaaaacggaatcgccggaaacccacgcgcgaaacctttcaggaggaaaccagcaaaaagtggtcattgccaaatggatcggcatcggccctaaagtgctgattttggatgagccgaccagaggcgtcgatgtcggcgcgaaaagggagatttatcagctgatgaacgagctgacagaccgcggcgtcgcgatcgtcatggtctcttcagagctccccgagattctcgggatgagcgaccgcgtccttgtaatccatgaaggaacgctaagcggagagctatcaagaaatgatgccacgcaagaacgaattatgacactcgctacaggaggacggtaacatgaaaactcaaccggctgtgaaaaaaagccttaatgttgattctgtaatgcaaaagctcggtccgtttctcggcctgatcattctcgtcgtcatcgtatcattgttaaatccgagctttttagaaccgttaaatattttaaacttgttaagacaagtcgccattaatgcgctgatcgcgtttggcatgacctttgtcattttaaccggcggcatcgatctttccgtcggagcgattttggcgctgtcaagcgcattgatcgccggaatgatcgccggcggcatcgatcctgttttcgccgtcatcatcggctgcctgatcggagccctgctcggcttggtcaacgggctgttaatcacgaaaggtaaaatggccccgttcatcgcaacacttgccacaatgacgattttccgcggattgacgatggtttatacagacggcaatccgattacagggctcggcaaccactacggcttccagcttttcggacgcggttactttttaggcatccccgtccctgcgattacaatggcagccgcctttatcatcctctgggtgatccttcacaaaacgcctttcggccgccgcacatatgcaatcggcggaaatgaaaaagcggccttgatctcgggcattaaagttccgcgcgtcaaaatgatgatttattctcttgcaggcctattatccgcgttggctggagccatcttgacgtcacggctaaactcagcccagccgacggcaggcacttcctatgaactcgacgccatagccgcagtcgtattaggcggcacaagccttgccggaggaagaggacgaattgccggcacactcatcggcgtcctgatcatcggaacgttgaataacggcttgaacctgcttggcgtctcttcctttttccaaatggtcgtcaaaggtgtcgtcattttgatcgcagtcctgctggaccgcaagaaatccgcttaaggagggctatactgatgaaaaaaacattaacggttttcaccgcattggcgcttctgtttctgtccgcctgctcgctggagccgccggaatgggcaaagccgaataaagaaaaaggaacggatattaaaatcggtttatctgtctcaactttgaaaaatccgtttttcgtttcattaaagaacggagttgtcaaagaagccaaaaaacaagggatagaagtgattgtcgtcgatgcacaggacgattcggcaaagcagacgaatgatgtcgaagatcttctgcagcaaggcgttgacgctttattgatcaacccggcggactcctccgccatctcaactgcagtccaatcggccaattcgcttggcattccggtcgtcacccttgaccgctccgccgaaaacggaaaagtagaaacgctcgtcgcttcagataacgtaaaaggcggacaaatggcagcggactttattgtggagcagctcggcaaaggcgcaaaagtggctgagcttgaaggcgtccccggcgcatcggcaacaagggaacggggctcagggtttcataagaccgctgatgacaagctgaatgtgatcgccaagcaaacagccgactttgaccggacaaaagggttgaacgtcatggagaacctccttcaaggaaaccctgatattcaagcggttttcgcacataatgacgaaatggcgctcggcgcgattgaagcgatcagaagctcagggaaagagattcttgtcgtcggcttcgacggcaatgaagatgcggttaaagcggttcaggccggagacatgtcggcaacgatcgcccagcagcctgaattgatcggcaagctcgccgtacaagcggcccgcgatattttgaacggcaaaaaagttgaaaaaacgatacccgcaccgctcaaactggaaacgaaaaagtaactgtgaaatcagacctcttgatacatggaggtctgattttttttggccacctccataaaagcccttgccgcccggctcaaatggcatttttcaggataagcaaacacaagcgtccgggactgatcggcctgcaaaggaacatagacgatcctgactgaccctttccgcaaaacggcgcgccgaattccggtcctcatcatgcgcaccattgctgtgcaacatgtttaaggaaggttagcgaaagcaaaaaagcccccttttcaaagagggctttttcatttactcgggattgccttcggccgcttcaattccggctgcaagatcgtgtttattgaaatccgcttgaaagaaatcttgcgtattcggcaatctgaggttcatattgagtttttgagaaatttgcaccgtgcattcttcgatttcataatcgaaaacgtgtccgccgacattgcggtcttcatctataaagtgaagatggaagccggaaactgcgattccgttggcatattgcggtgtccaaaagccgacgatcgtccccgtaatatcattaaaatcaaagatcggctgtgattttaccgcatcaaccatcggcacatacggtttttcctgaagttcaactgttctcgttttgactttcttaaaggttccgtccatgcgaatcgcgtaaaacaggttttcactcggcatgatccgtttcatttcttcttcgaacgcctcaagcggcatccgctgcttgatttcgtgatagatatccggccggaagaaagccagcgagcaaaatggagaacaatcgcttccttgaactgggtaggcttttccatcggaacggagacggtaaaactcaccgtcaaaaccgatcagctcgccgtcgagccggttgaacgttccgatcccgaagtctccgtgctccttcgcttcggacatataaaaatccccgtcgtaaattccgtccaataaagataccatcgttgagacctgatagacttgatcgaggttcttatcaacgggctgaattattttttgtttgcttgcacttttcattttcctcttttcactcccttgattttgttcgttgtgactggacatgctgtgatcaagattgcttagaggcttctttattaaaatgttcctcaaatttttttggaaaacgctgatcggccaaatgaatgttgtcgctgtaatcgaccggaatatcaatgacaacaggcccctctgcatcaagaccagctttaagcacctctgccaattcgtcaggtgaattgacccttaaaccttttgcaccaaagctttcagcatattttacaatatcgattccgccgaagtcgactccggacgtccgcttgtatttcatctcctgctggaacgcaaccatatcgtatgtgctgtcattccagacaatgtgaacgatcggcgcttttaatctgaccgctgtctcaagctccatcgcggagaacaggaagcccccgtccccggaaacagacacgactttctgtcccggattgaccagcgttgctgcaatcgcccacggcaaagccaccccaagcgtctgcatgccgttggaaatcagcagtccatgcggacggtaggtgcggaaatatctagacatccaaatcgcatgggagccgatgtcgcaagtcaccgttatgtcatcgctcagcagttcacgcaaatcgcgaacgatttgcagcggatgaacaagatcagtttttgtttctttaggaggttcgctttgctcctccagtgctttcttcaagtaatcaaggacaggtgcaaaggactcgtcgatggaaaccggcagagagtcatgttcaatatggtttaacgtctctgcgatatcgccgatcaactcgatttcgggctgatagtcatgatcgatatcggcttgtatttcgtcaagatgaatcacgcttcgttcgccttttccattccaaaagaccggatcgtattcaatcggatcatagccgaccgtcaaaacgacatccgctttttccaatagcatgtctccgggctgattgcggaatagtccgatccggccgaagtactggtcttccaaatcgtgagacagcgtacccgctgcttggtatgtttcaacaaacggcagtttcactttccttagcagacgccgaaccgcttcaatcgcttcaggtcttccgcctttcatcccgacaagcacgacaggaaggttcgcattgtgaattttggcgatggccgcgctgatttgttcgtccgaagccgcgcccagcttcggcgccggcatggttttcaccggcttggcagttgccggaccggccgtaacgtcctgcggaaagctgagaaacgctgcgccagcctgtccagaagccgccgctctgaatgcattggttacagcctcaggtatgttgttcgcatcttccacttctgcgctatatttcgtaatcggctgaaacaacgccgcattatccatcgattgatgagtttttttgagacgatccgctctttttacagcacccgccagggcaacaaccggatctccttctgtattggctgttacaagaccggtcgctaaattagacgctcccggacctgaagtcaccaggcaaacaccgggctttccagtcaatcgtccgactgccgccgccataaatgctgcattctgctcgtgacggcaaacgatcaattcaggccccttgtctttcaatacgtcaaacaccgcatcgattttcgctcccggaataccgaaaacatgagtgacaccttgctgaatgagactatccaccacaagctctgctcctcttacagtaagagtttcatttttagcggctacattattcaaagccctcactcctccattttcattcatttacaatgaatttttaataaaattattgtattattaaatatacatcttgtggaaattgttttccaatacttctttgtcttacaattaatatgtaaaacgactgaaatcgcattcagaaaggaatgagtgattaatggagctgcgccatcttcgttattttatggttgttgccgaagaactgcatttcggaaaagcagctcttcggctgaacatgactcagcctccgctcagccagcagattaaacagctagaaagtgaaataggcgtcaccttgctgaagaggtcaaaaagagccgtcaggctgacggcggcaggcggggtctttttaaaacaaatcaaggaaggactttcccagattgatcaggcagtcgacatggctcagcggacggcccgcggggagctgggaagactcgtgatcggctttgtcggctccgcaacatacgagatcatgcctcccatcatcagggaataccgaaaccggttcccgtccgtgcagatcgatcttcgggagctttcaacccccaatcagatcgatgcactgctaaacgggcatattgacatcggggtgctgcatcccccgttgggaaacgacgaactgaagtcatacacggtaaaaaaaagccattgtgtccttgcacttccaaaacaccacccgttgacagaaaaagcccgggtacatttgaaggatcttgaaaaagaatcgctgatcgtcattgccaaagaagcgtggccctctttatacacggaattcaatttcttgtgtgaaaaagccggatttatccccaacatcgcccaggaagctacagaataccaaatggtgatcggcctcgtatcggccggaatgggaatcgccgtcgtgcctacggcggctaaacgattatttaaccttgatgttgtatacaaagaaatcgaagactttccccttcgcgccgaatggattaccgcacatcgaaaggacaaccgcaatccggcacttaagcatttcatcgaaatctcagatcaacactcatagccgtatagaaaaaaccccgtggacaaatcctccttgttcacggggttttttcctcatatagacgtttgcaagttttgaaaacgcagttaaatgccgattgctgccccatcgcttctcggatcgctcccccctctcaggaagccttgatcgtcaatctcaatgattccggcatgacccatcaccccgtcaaattcaccgacaacggttacgtgatgcccatgctttcgcagttttgcaatcacttcaggcgccactctgctttctattcttacaccttccacccgctctccccatgttctgccccatacccatctcggttcatgaacagctgtttgcggatccatcccgtaatctaccattctcgtaataagagccgtctgcgtctgcggctgtccttctcccccttgcccttgcgttccgtaaaggaatttcggcttgccgcctctaaacgccatggcgggcatcagcgtatgaaaagttctttttcccggctccagcgtattgacatggtcgggatcaagcgagaaaaacgccactctgttctgcaaaatgacgccggtatctccagctgtcacacctgagccgaattcgaaatacaaactttgaataaacgaaacagcattcccgtcttcatctactgctgctgcataagatgtatcgctgccgagcggccggctctccgcctgaagcgccggcagtccgatttttgcggccagctcccgggcatactctttgtccagcaggcgtccaagcggaatgtgtgagaattccgggtcagtcaatactttgttgcagtcggaaaaacttaatttcaatgcttcgataagcagatgataatactcgaaagaaccgtgctcgatcatgccaaagtcgtagttttccaaaatgttcaatgtcataagaccggtaaatccttgtgaattcggaggcatttgatagatcgcatatcctctgtatgtggaggaaagcggagacacccattcccctcgatgcagcccgaaatcttcaaggttcaagatgcccccgttgttttggagataggctgctaaagcttgggcaatttcccctttataaaaggtgtctcttcctttctcagcgatcaacgtcaaagtgcgcgcgagctctttctgcacaaaacgctcacctggagagggcggttttcctcccggaagataaatatctgcagtgatcggcatacaggaaagccattcagcgtttttcaccgtgttttgacattgatcaggcgagaccgggaaccccttttctgcatacataatcgccggcttcagcacctctcgaagcgatagacggccgtacgcagccagtatttcggcccagctgtccaccatccccggcacggtaatcgcactccttgggcccctgaccggaatggcgctctctcctttatactgatcccggtccgctttccgccccgaccgcccgctgccattgtaccctttgatctccccgcttccattgtgatacatcagccaaaaggcatcccctccgagtcctgtcatatgcggatagacaacagctaggcacgcgcttactgcaacagcggcgtcaaacgcgttcccccccttctccatgatgatgctgcctgcaagcgaagcgagataatgaggactgacaaccatttgtttcgaaccgatcttcagcttctccatagctcattccttcctttcaagcattcatttgtcctttgaagtatagtggcccgttaaaagaggcgctactttcagggaagaaaaactaacgcccttttttcaataagtattaaaaaaacgttaaaatgattcatatcgaaacccttattatgatacaatttacaaaatgttcatttatagtgtgattgacaagcaatttcgaatgataatgaccaaacagaaaggaagggatatttgtgagcctcgactaccatatgccaaatttaattctcgatgaaacggataaaaaaatcctttcgatcttgcatgaggaaggaagaatctcttatacggatttaggaaagcgtgtgggactctcaagagttgccgtacagacgcggatcaacaacttgattgaagaaggcatcattgaaaaattcacagccgtcatcaatccagtcaaggtcgggattcacgtatcggtgtttttcaacgttgaagtcgaaccccaatatttagaggctgttgccgttgctttggaaaaggagcccgccgtgacaagcctctatcatatgacagggccgagcaagctgcatatgcacggcattttcgcaaatgatcaggagatggaggaatttttgacgaagcgcctgtaccccctgaaaggcgtggtgagcgtcgactgccagatgctgattaaacgttataagagccgaatgggaatgaagctttaactgaataggaggaaacgcaaaatgaagcacccttaccgggaactgatcatcgcaatgacaagaacgggaatattgggctttggcggcggcccatctgttatcccgctgatccgtcatgaagccgtttctaagttcaaatggatcgatgatgatgaattcggggaaattttggcgattgccaatgcgctgcccgggccgatcgctacgaaaatgtcggcatatttaggtcataaagtaaaaggcgttcctggtgctgtcgttgctacagcagcccatatcatgccgacatgcgccgcgatggccgccttgttcgcagccgttaatgtgctcagccactcaaaaatcgtaagcggcatgatcggcgctgtcacccctgtcatcgccgtcatgctcggcatcatggcttacgaatttgggcaaaaagcattgaaaggcttcggcttgctgaccggcgtgcttttctttattcttgcgtttttgggtcttcaagtgttttccatccaccccggcatcattgtcatcctgtttttaacgtatggcgcgttccattttaaattaaaaagaaaagcggcccgagaaaaggataaaggagtgtccgcttcatgatcatcttttatctgttttgggccttctttattgcaaacttattgggctacggaggcgggccagcttcaattccgcttaattttgaagaagttgttcagcattttcactggctgtcaaaagaggaattttcaaacatgcttgcgcttgcaaatgcgctgccaggcccgatcgccacaaaaattgcagcttatgtcggctacagcgtgctcggatggcccggtgttttcattgctcttgccgcaactgtgcttccctcggccatcgcgctcgttttgctgctcaagctgatcggccgctaccgccagtcgcaggtcgtcaaaggaatgaccttgtcggttcagccggttatagccgtgatgatgcttcttttaacatgggaaatcagcggcgacgcgatccattcgatcggcatggttcaatcacttgtcatcgcgctgatctctttagtcgccttgacgaagttccgcgtccatccggctttcctgatcgtggcggccttcgcttacggcgggcttgtcattccgctgctgtagagagggacgtccggccgctttttatcaaatgacattaaaaatcagcgccgcataaccggtgctgacattttggctggggggcctttgtgaacaactttcacagcaggcccaacagctttttctttttgacgggacgcggtgtttctttatgaatctcccggttttccaggagcaggcccgcgttttctgtaaacacgttcaagaaatcgcggccgtaatcgttttctactgtatcaaaaaagaaagatcgggtcgtgaggttgtgggcgtctgatgcgataaagtggatgaggttcgcttcaagaaagcggcgggcgagccgtttgacgcttctgccgaaacggcctgcaagacttgaacatgtcagctgggcgcaggcgccgtttttgacgaggcggtacagcagatcgggattctccatcaattcaaggttccgctcggggtgtgcgatgatcggaatgtaaccatttaattggagatcgaacagcaccttttcggcataacgtgggacatggtggtaaggaagttcaatcagcaaatactttgtgccggcgaggctgagcagtctgccgcgctcaagatcgcgcttcaattcgccgtacaggcggatttcctgcccgggggtaatgagaaccgggatgttttccttttgcattctcgtctttaaacccgaaacagctgcaaggatggcttcttttggatgttcgtatacaccgtttcggtggtgcggtgtggcgataatcgtatgaatcccctggagggcggcttgtttagccatttctaaactgtcattcatacatgctgctccatcatcaacgcccgcaagaatgtggcaatgaatatcgatcatatgcgacctccccgtgttttcccgtttcagaatgtatggtctttgccgacaaagctttccagcttcctggcctgtccttttttcggttttacatacagaatatttcccaacacgtgaacattcagatctttttagatgtcttcttcatttcgaacggtatttttcaaaagctcgagcaaaaatgctagcccagcgccaaacagaaggccgaaccctgtaaaaagagcgatgttgaacttcttgttcgggctgacgggaacaggtgaatgatcgggattggctttcgcaacaaggctgatttcggcattttcacccataatatcgccaatgtctctttgaaatacggcggcgactgtattcgcgatatacgccgccttggaataatccttgtcagtcgcggagatactgacaatctgcgattcattttcgctgataaccgtgattttttgcttcaggtcttcagccgtttccgaaaggttaagttcgtctttaaccttatttaaaatgatcgggcttttcataatgacgttgtatgtgttgataagttcaaggttggtctggatgtcggtgaagttcgacgtttgacggccgttgatgaggatttgggcggatgcctgatagacgggtttgagccaataaaagttgacggcagcgctggacaaagcagccgcaatggtgatcagtgcgatcagaacgaatctttttttcaaaacgatgaacacatctttaaagccgatatgatctctcataaaagcccccttctacgattcgcgtatttatttaaattttcagcaaattaaacacctacctttgattatacatggttatttcgtttccgaaagaaatgaatcctgacaaataacgggagataccggggaaaccgcgtctttatatggtattaaatatcgacttttgcaggatctgcgcacttcttgctgaacgaaaaagtgtgcaaaccgcagtttgcacaccttttacgtcgtatatccatttttgatatgaagaatgagatcttcaagaagttctttcgtcgttatgtctttcgatttttcaccaacgtcatacgcatgcataagaattctcaaaaattcttcctgattcaattccttgtcatccatatccttttcctttcagcttccataaattaaaacatttctgattatatttcaaattatatgatgtaaagaatcgatttgccatagtctattacattattcgacagccatccgtttttatgtccttttcctgagaaaatcttttttggacggattgattaagctataatagagagattggaaactttttaaaagtcattcggttaggagcgatagacatgcttcaagacatgatctcaaaaacggttgtgatggatgcagctgaacagtttaagcatgtactgccgtgcacagaagaaaacattcagctcatgaaaaaagcccttattttatacagacaggattccgtctatcgggtcaagccgatgagcgggcatacggtcagcgcttacgtccaggacgttgtcccggtaaaggtcttcatcgacctcgccgacgttaaaaaaagcagctgttcctgccctgctcaaaacatgtgccgtcatgtgcttgccgtttacttatatctatatgcacaatatgatcgattgggaacatttacggagttttggaaggaagcgcaaaaacgccgcgaaaaccgggagattctcggacagcttcagcgcggaatgaagccccgcagccacacgctcgatcaatggacctcctttttcaatacggagttcagacgctgggaggagcatacgcctaaaaaccagcaaacgatgcaatacctttactacgggtatttttcagctttaaaaaagcggacgcctgcggagccggagctgaaaaaaatgtatcaaatccacgcggctcttgcgacatggcttgctatgcattcactcgtcgagaaagggcgcatcgatcctgaaaaagatttttactcgctgaatccttatatcgaacagctgatggatacgatctacagctcgatcgatgaactgaaaacatatgcgctatcgttctcccttgacccgtttttagaaaaaacccccggcgtgattcgggaactgctgctcaagaaagatattttccagtatgaaaggctgcggattttcggggagatctggagtgcgcttctatcccggccaaactggctgaagcgggagctcgatgtgctgaacaatctggagccttcgcctgaaatacaattcggcaggctgcatcttgaatttctgctgaaaaacgatgatgtgattcttgatcaagccggatcgttttcaccggagattcttccgtatacgtttcaatggctcagtgtcatgaccgccaaaaaggactggaagcgcctgaaaaaatggtatgaacaccttgagcagctggcggccggcttctgcagactggataaaccgtaccgggaaatacgcgatgtactaagcgaattcttcctgtttctaagcgattacagcaaaaacgcaaaagaagagcatgtatttgaacggtattgcaaagagtgccttccttatacatttactgaatacagccattttttatataacaaaaaccgctttacggagtggatggagatccacagccttgtcggtttttcaatctctgagatagggcagaacgccttgaaagacattgcggcagcggctcctgaagcattgatcccttcctatcacagagaaatttccgggctggttgaacaaaaaaaccgctcaagctacaaagaagccgtcaaacaattaaaaaagctgcgcaccctttataaaaaagcgaaaaaacaggatgtctggaaccggtttatggagcagttttcagcccgctataaacggctgagagccttccaggaggagcttaagaaaggaaagttgatcgatggcgagtcttaaggaaatcgtaatacatgtcgaacagtcagaagactatacatttattttatcttgtcatgacggggatcatcagtttcttacgcgaaatgaaatggaaaggcatttgtttcagtggcacgaatcgtctttttacggaacatttctcgaggaagccggtttagatacccctgcggttctgctgtccccgtggatggcggtcgaatttctcggcaaaaactcatttaattcattcagcgacatcatccttactgaggaaactgaacctttgatgaaaacggcttccaccatttatgagtttatcgcagatgaagactttcttcccgactatgaagcatggaagcaggaaatgctgcgctggaaagataaagaagggattttggaaggctatacagccgaatggttttcacacgctgtcgaagactacatcaactacaatgacgaattaaaagcaaaatgggaatcgattgtcgcacattcccccgcagtcaccacatttcagggacattttcttgatgaagacgattttcttgaaacgattggctggcatgaaaaccctgtgccgtttaccgtcggactccgcttaaatgaacctgactttgacggagacgattggaaaatcgaactgtttttgcgcgacaaaaaaagcggagccattcagttctttgaaggcttgaacaggctgaaaaaatcgtggcaggcatacgctgataaaatcgaccgagaacaagacaggttccgccaaatcgtgccctggctgacgatcgaatcggggacgtcgcttttaacggaagaggaagcatggatcttcctgtccgaagctagcgaaacacttgtcagcatggggattgaaattctgctgccgtcatggtggcaaatcgtgagagacagcaatatgctgctgaaagcaaaagtgtcatcggctccccgcggcgagtcttttgtcggaatgaatgcattgatggacttcaactggcgttttgccaccaatggaattgaactcacagaggaagaattcgagcagcttgtcgccaataaaagacggcttgtcaatatacgcgggcagtggatcaaaatcgacccgaattttatcaaacaaatgaaaaagctgatggagcgggcagaaacagaggggcttcatatgtctgacatcctggcgcgcgagctgacagagcggagcgaaacccgcgaggatgatgatctgttcgatgcttccgcattcagcgatgtacggtttgaactgtcctatcagctgaaaaacatgatcagaaagctgagccagcgcgatgatctcccgtcatacccggtcagcaaatattttcacgggacgctcagagcttatcaggaagacggtttgaactggctgatctttctcagaaactgcggcttcggcgcctgcctggcagatgatatggggctcggaaagaccattcagatgatcgcctatttcgcctatttaaaagaacagggacaacaaacgccgtctcttatcattgcgccgacttccgtcctcgggaactggcagcgcgaactcgagaccttcgcgcccggcctgacggcagcgctccactacgggccaaaacgccctaaaggtgaagcgtttcagacatcttacaaagatgcggatatcgtcttgacgtcatacggcctcgcccaatccgactttgacgatctcagcagcgtcgcctggaactgcatctgccttgacgaggcccaaaacattaaaaatgcgcacacgaaacaatcccgttcaatcagaaagctgaaaggactgcatcatatcgcgctcagcgggactccgatggaaaaccgcctgacggagctgtggtcaatctacgatttcatgaacaaaggctatctcggaagccttggcagcttccataagcgttttgtcctgccaatcgaaaaagaccgcgacgaaaaacggatcgaacagcttcagcagctgatcaaaccgtttttattaagacggacaaagcaggacaaagaagtcgcgctcaatctgcctgagaaacaggaggaaaaagagttcgttccgctctccgcagaacaggcttcactatatgaacagcttgtcaaagatacgtttgaacatatgtcaagcctcgccggaatgcagcgcaaagctctaatcttaagcatgctcggcaagctcaaacaaatctgcggccaccctgccctttacttaaaagagaccgggagcgagctccttaacggaaggtcagtcaagctcgaaaaactgctggagctgacgaagacgattcgcgaaagcgatgaaagctgcttgattttcacccaatatctcgggatgggagatatgatgaagcgcctgctcgagaagtcattcggcgaaccggtcaagtttctgaacggcagcttatccaagcttgaacgggacaaaatggtggagcagtttcaaaacaaggaatttccgattttgatcttatcattaaaagccgggggcacaggcctcaatttgacggccgccaatcacgtcatccattatgacagatggtggaatcccgcggttgaaaatcaagcgacagaccgcgcctacagaattggacagaaacggttcgtccacgttcataaactgatcaccaccggcacaattgaagaaaaaatcgaccaaatgctcgaatcgaagcaatcgctgaacgatcaaatcatccaaagcgaaaattggatcaccgagctttctgagcatgaacttgaggagttatttaccctgaacgcttcggctattacaggttaaataaaacagctgtctgcgatagacagctgttttttgtgtttatgccccttaatgacagtcccaattaaaaaatcccgcgctgattgttcgaattgcccgcggaatcgggccattttttcgggtagttggaacggctgtttcattcttatcactctccttttaagcgggtgatcctattatttcaaattcaatcaatagttaaataggaatagtaacaaaaacaaccatcgccaacaaagaatcaaaagtcataatcatcgaggtcaaaccatattaaaaaaggccgccgacaatgtcggcggcccgcggaccaataacatccgctgcttaaccgcactccttcaatcgttacgctgccgtgtaccggcatcacgccgatttgaaaggatgtacgaattaaaccggtttgacttgctgttcaatcagctgatgcaggatgtgagcaacgccattttcatcattagtgagcgtcacctcatcagccatctctttaatgtctccgcgcgcattgcccatggcaaagcttttccccgcgatcttcagcatcgaaaaatcattgaggctgtctccaacggcagctgtttcctgaagggaaatgccgagcttgtgtgaaagcttctccaatgccagcccttttgacgcctgaagatgctcaatttcaaagttgtgctcggctgaagtgacaagcgtaatatcttgtgcatcttcaaattgcctccagcccgtttccagcttttccttatgaaaagaaaaagctaatatgttatatacattaacatcctttccggctaaaaacagatcggtataggagctgatgtatgcgtatccgttttggctgagctgctgttcagccgcgagttccagccttgataggtctgcctcaggatttgcgcttttcaagcggtccagctcaatgtcaagcagctcgcggccgttttgcggcgtgaagattgcttcatcgctgaacacctcataatagtagttattttcttcaagccatcgaagaattccttctgcccgtttccgatcaagcggcaccgaatggtaaaggctgccttcaggatcatgaatcaccgctccgttggcactgataatccatgttttaatacctgtcggctcaaatatcgtttgaacatcaaaggatgctctccccgtggcaactactacttcaatcccgtgttcccgcgcttttttaatcgcatcgatattttcctttgagatcttgctttcactgtttaacagcgtcccgtctaaatcgaccgcaatcattttcatctgctgtattcccccttaagtatcgtgatgttcagccacaagcagctccacatcgtgttcatcaagcagcttctgaaacggtttcgacggcagccggtctgtaatgagaaggtcaatgtcactgagttcagcgtatcggtaaaaatccgttctcccgattttcgaatggtcggcaagcgctatgacttgcttcgcttgggaaatcattttccgcttcaccattccgtcctcctcatgggcgattgtaagcccatgttcagaaacccccaccacgccgatcagcgctttatcaacatgatagcatgacagcttttcaatgacagaggcgccgtacaaaaaccggtgctctttttgaagctttcctccaagcaggcggatgtcagccccttttcttgaggaaagaacgtccgcaaggttaatcgaattggtgatgatcgtgcaattgacatccggcaaatgctctgcgcatgattggactgtcgtggaagcgtccaaaataatgcggtcgccttctctgattaaagaagcggctgcttttccgatcatgcttttttcttcggaaaccatgcccagcctgcccgaatagtctttgacctcatcatgaacggtgggcagaatcgccccgccccttgtcctgataatggcgccttgctcttgcagtttaaccagatcccgccttgccgtatctcttgaaactccgaataaagaacaaatttgttcaacggaaatccgtttatgctcttttaaatagtcgatgatggaaattagcctttcctcttggtacactggatcattccttctttgcgcaagtaaagttcatcatttataagtgattataagcaattacgccgaataaatcaagagtatataagtaatgataagcaaaaataaagcctaaggccggtttcccgtccctcaggctcgtactttaaaatgaaaatgttccatattgagagtgccaaatctcacgaaacgcatggatatcacgatctacagccggatgatcagccaaacggcttataagctcagggctgattgtcgcctcatggctccccgcttccatgacggcaagaatttgacggttatgtttaaagcttgccgcaagcactttgcaatttaaacagtatgtgttgaataagccgacaatcgttttgacaacgccagcgccattaccatactcttgatcaatgcgattgacatacggcgcgacataggaggcgccggcttttgccgccagtacagcctgtgcagcggtataaaccgttgtcccggtggtctggatattttcagccgcaagctttctgatcgcgtaaagcccttgagtcgtcaccggaattttcacagacacgtttccatctagccagttatagagtgccttcgcctgatcgaccatatcccgccaatggtcggcgatcacttgggcatggagaggcagatgctcgggaagaagccgccgaatatcttgaatctgctgtttaaaaggcttgttctcccttgcgatcagtgccgggtttgtcgtgacgccgccagcgggaaatgaatcaagcaatctttcaatctccggtatatgcactgaatcaatcagcatgttcatcatcgcgtccccctcttgttttaatgcatgacctgccccccggttacattgatcgattgacccgtcatataagatgcttggtcagaggcgtaaaataagatggcattggcgatgtcatcatacgtacagccccgtcctagaggcactttttcggtgtacacgcgctctacttcgctctctggaatgccgagctttttcgcgtattgcgggatcaagctttggaacatcggcgattttaacaagtttcccggcataatgctgttcacccgaatgttgtgttcggcaagatcaagcgcgaggctttgcgtgagaccgacccctccaaatttagaagctgaataagctgtattatgcttgctgccgacttttcccgatttggaattgatttgaatgattgacccgcttccctgctcaatcatgacctttgacgtttccctcgcgcaaagaaaatacccggtcaaattgacctcgatggtccgttcccagtcttcaagttcaaaatccgtgattttattgcttttggcgattcccgcactgtacaccatcacatcgattttattgaattcgtccgtgaccctgccgatcatttttttcacatcggcttcctttgtaaaatccgcttgaatccacagcgatttgaccccgtattgaccggctgcatgatctgccgtcctttcggcgttctcgccgttgatgtctgcgaccgcgatgtcatatcccgcctctgccatccggtaggacagcgcttctccgagactttggccgccgccgcatatcaatgccacttttcctttattcatctccatattgcacccgctccttatgagaatcttttaacttgaatacagtctcctgctgaaacctccggcagttgttcttttcgttcaaggtacagtgttcccggcagttcggctgaaactgatccgtcaaattttagcgtaatatgcccgagattcgccaagttttgacgaacggctccgccaacggctgtaattttgtaggactcgccgcccagtatgagctcatcgccttcattgaagtcgccttctacaggctttatatcaattgataaacaataatctttcaattcatccggagcaccttcaccaaataatatgagcatcttttcatctgaaaacgccgctgcttgagctccgattctgtttatttttgtttcataaagcatgaccattattctccctccttaagaaaaccctcagctgtcatacatgccaaagctggccagccaagcaataaaaacggttggcgcccccgtgagaaaacgcgaatacagcaccgacggcaccccgacttcaaccgtttcgacttccgcttccgcaagacccagaccgactggaacaaagtcggcagcggcttgtgaattgattgcaaataacgcaggcagcgccaaattcggcggaatgtttcctttgccaatctcaacgccgatcagagaaccgacaacttgtgcaatcaccgcccccggtccaaggaacggggaaagcagtggaaatgaacaaacaagcgagattagtagcaacccgggcagtgagcctgcaaatggtgataaatatttggcaaaaatgtctccgatgcctgactctttaatgatgccgatcaatagagccacaaaagccatgaacggaagaattgttttgataacggtttcaatcgcttcccgtccagcttgataaaatgtgctgacgatcgatcccatggccatcccgattttcgccatcatccctttcggcgactgctgttcactaatctttttctctgtgctataatggttttgtttattttgtatttgtttttcttctggaatattagactgttcaggctcctccacagctcccagcagtttaatattctctttttttactccggaaacatatatatcttctgtaatatgggcggcaagcggcccgcttttcccggtcgccatcacattgatcgtcggaattcgcttttgcgggtaaagtccgcagcgcagcgtccctccgcagtcgatgatcacagcggccatttcgctttcgggtactgtcgttttaaagccgtcgaccagggtgcaccccgtcagctcagctaaatgatccgcaaaatcgggtttgtttccgccggtgacgtacacgattttatttctctcttcatcaggcgtgatcaccagaggtccgccaaaccctccaggcccttttgaaacttcaaccgaacgataggaactcatctcctaaaccgcctttcttatttaagatcaatcgaatctttcaaggcaatgccctgctgtttcgcgacataagccgttgtcatatccgttacccagcccctgagaaagtttgtcacaatcccgactaaaagatagcggagagcaagctccgtcgtttcatgcccgagcgttgtaatccctgcggcaatcccaaggaaaacaaacagctcgcccggattcacgtgtgggaaaagtccgttatgcgtgtggcacgaataggatgcagccgcataatagctcggtttgtatttttcaggcaagaacctgccaagcgacagcgtcattggatttgcgagcatgaacgtaccgatgacaggcaaaaccatgtatctggtcaatggattttttcccgacttcctcgcaagcgcttctacgcgcttttctcctatcaggcgtatcagagcattcatggcgacaagcagcataatcaataaaggaacgatgtctgtaagcataccgacaaacacttctccgccatgcctgaataagtccataaacttttccgcaagccatgttacgtttttcatatttcacctctttttttgatttgaaagctcatcagtttttgaagccgtgttttcttctgcggaacatcaccccctttcgtgatgatgtcgaatgttctcaaggcatcttcaattgcaagacgtgtgaggcggtcgtgccgggcaagctccgcttgtccgatcttcagcaaatactttccttcaaacccttttaaaggtctgattcttgaaaagacggtgacaccttgcatttttgatgccttcaaaattttgttgcgtttgtcgatgacaaacaggacgaccgttccggctctgagtaagccggtcttccttccgaccgcgactctccctatacgcctgtacgcggcgaacgttcgattgaaatgcctgatttgccaaaaacctaaaacgctctggagaagccatgcagctccaagggcgatgataaagtaaatgatcatgattgatttctcacctcctcggcaatttctctggctgtttcggcagttgtcactaaaacattaatatagcggccttttgcagccccgataatcgaaggaactttttcatgggattcggcaagacctatggaatattccaaatcctttaacctgttgatgtctatcgcgatggttctgtcatgaatctctgtttctactaaagctcccgaacgatcaaagaaacgcgagcatatatctccgactgcatgtttttcttcaaggcgctcgatatcctgatcgccgtaaaatccggtccagatcatatttgaagaactaagcggcgccccgattccgacggctgccacagtaaggccgttccacagcctttctatttttttgaaatagtgggacttgacgatttcctccttcgtttcttttttttcgacaacggctgccgcatctatgaagtaaggcgtgcctccaaagtcacccgcaatgctgtagacgatgctgttcacgtgatatttcgtatccatggcgcccggaccgccgaccagcggcacgaatgaagcgctccgttttttgacgccgtgaaactccccgatcattcccgccatcgtcgtcccccatgcgaagcctaccgtatccccgtctttcacgactcgttttaagatttcggctccggctttgccgacgagtttcttcttgtcttcagctgtttgttccggttttgcatcacatatgtacacttctttaagcccgagcagctgttcgagctcccgttccaaatcatagtgtgtcccgacatggtcatcgatcgtgattttaacgattcctgcctcacgcgcttttttcagcatacgtccgacggttgttctgtatatccctgttgcttttgcaatctggctctgtgtcatatcctcttcgtagtacattttgcagactttgatcagaaggcgtttatcatccctcatttccataagatcaccctttacctttgcgcatttgtgcaaacattggtcatttgttgttgtattcgcttacattatacatacggaatttttggacgtcaatttaaatttgtctattttttgtctaaaataaaaaaaccggtcattcaaaaccggccataaaaggggataaacaaggggatattgattgattctttttgagaaaggagtttatagaaggaatcttaggtttaagcatcagccggctcatgcgctttccggctttctcccaaaaatctgactgaccgggcgacaacttctgtaataaaggtgcgttcgccttctgaattgacgtattggcgggtctggattcttccgctcagcccgatgatggagcctttttcgcaatattcggctgtgttcacggcagttttgcgccatagagtgcaattgacaaagtccgcttctacttcgcctgctgcgttcttgaaaggcctgctgacagccagcgtcacatttgcaacagggacaccgtcagatgtataccgcagttcgggatcttttgtcaaacgcccgacgagcatgatctcattaaacatttcgtccctcccttcctgttcgggtatccccagtttataagagaacagattttaagcaaaatcctcataaaagaaaaataaacccggaaaaaaacccgggctcatgtcataatttttgcttttttcttccactaatcataaaaatcatttcatttttatttgagaaatacgtatttttcagaaactgaaaaaaaacaggagatgacagccaccgctctgagtatacgcggacatatgagcccccgtcccaagcatacagacggaatgacaactctttctgtttaagcgttacttgaaattcgtatatttccattccgtccttcgtttcatagcgaaacatgatgccttcatttgcatatgtgctgatttcgtgctttttgttaccggctgaaaagcaaatcataggcatatattgacggcagtcagcagctgaattgcttgcgatcacaaatacttcctttaagtaaaaatggttcataagtcacctcctgctcaatatcacctaaagtataaataaaaataaagcattataaaatactttttgcaaaatttaaaatatgaatatgctcctattgcagaaacaaaccagggtcaagagttctcccaagcgaatgtgctataatggttatacaactatggaagcttgtgaggtgatactaatgaaaacctttaggcttattgatttaaaaattgtccgccaggatgacacttcaaagcggcttgaggagttcccgctgatcgacggccttatcattaataaggaagacggagaaaaccactggatggttgaagggctggtttctaaagaataccggtattttttcgaatatctccttcaggaaggcaaagaagtgaaagcatatgtaacgatcacgaaaaaaagcaaccgcccagcacagctgttagcgaaggtcaaaaacatcacggtgctcggcgagcatgtttccgtcttattggacggcaaaatggtcagctcaaagctgaggaaaggctccgacaagattttggaagatttaatgaaagaaggatattccggagatcggcttcttgaagcatttaagcaaaatatataaaaaaggctgtcttcgccggacagccttttcatttatagctctaagaacggtttgtctgctcttttaacaaatcccgtatttccttaagcaattcttcctgaggatcaggagcagctttttcttcttcggcatccttcttcttcagcttagagatatagcggataaatagaaaaatggaaaacgaaataataaagaaattgacgatcgactgaatgaatagcccatatttaatttcggcatcaacaaatgtgaacgacagcgcggaaaaatccaggcctccaagcagaagaccgaggagcggcatcatcaaatcattgacaagcgaagttacgatttttccaaaggcgcctccgatgatgacaccaattgcaagatcgattacatttccccgaatcgcaaaacttttaaattctttccacatgaatgatcaccttttcgctttcatgataaaaaaacaaatgggcttttacgaaaacccattgtgtttacattattcctgcttttcaccaagagaaaacatcaattcggcttcacacacgacttctccgtccacttttgcgactccttttcctttgccgatggaaccgcggaaacgaagcacttcaagctcaagatggagctgatcgcccggtttcacctgctttttgaagcggcagctgtcaattcccgcaaaaaacgcgagccttccgcggttttcttccttcatcaaaagcgccaccgcacctacttgcgcaagcgcttcaacaattaaaacaccaggcatcaccggataatccggaaagtgtccgttaaaaaactcttcatttactgtcacatttttataacccgcggcccgttttccttcctctacttctgtcacacggtctaccagcagaaagggatagcggtggggaatgatttctttaatttgctgagcatcaagcattgccttgacatctcctttttcgaaaaatatgtatagaatgatatgtcagtgccttattctgtacatctggaagtatattatgaaacggaatctttttcaacaaaagatgaggcacaaccggtttaaaacgatgaaagtgaaaataaaaagagcctgaaccaaacgtcgtttggccggctcctgttttgctgtgctaacgtactgaattgatcagccccatcatttgatcgcccatcgtgatggcgcgggaattcatttgatatgacctctgcgaagagatcagatcggtcatttccttcgatacgtcgacatttgatgattcaaggaatccctgttttagagaaatgtcctgccgcccggctccgttcaggttgataagagccgttgctctcaattcatcgctgacagaaaaaaggttgcttccttcttctgttagagcctgaggtttgacagcccggacgatccccaggttaaaacgcagtggcgcttctccctgattgtctgacgaaacggtgacacttcccgattcatcgactttgatgtgtttatagcgctggttgaagcggatggcatttccgttttcatcaaggacggcatgtccttctttcgtcacaagctgcatctggttggcgttccccgccgcaggcgtaaggtaaaatgccccgtctcttgtatattgcacttccccgccgacattgacctggaagtactgataaggagaagtcagtgcaatatcaagatcgcggcccgtctccttaaggcttccctgcttatgcgtcagccggtcggtcatgacggctccgacgccgaggcgaagtcctggcggcgtctttctgcttgcagctacttcattatttttctcgtttacctgttcaatctgctgcctgatcagctccgaaaagctcgtgtttttcgccttatatcccgttgtatcggtatttgcaagattatggctgatattatcaatttgtttttgcagttcaaacattgtgtttgaagccgtgatcatggatctaagcatcgtttttccacatcctccatttacgctgatcgcgatcggtcatttatccgatccttccaatctcattggccgccttttccatgcttttatcataagcctgaagaactttttggttggcttcaaacgagcggtaggcagcggtcatttccgtataggctctcgtcacgtcgacattcgaccgttcggtcatcccctgcttgacagaataagtgacttcaggattgccgactgcgcttggcagcgcctcaccgttttcagtacgatacagatcatcgccttctcttgctaaatttctcgtatcgagcgcgattctgacatcgatcctccccagattttggccgttttcagtcaccgttccgtcctcagcgacttgaaaattctcgcttcccaccgtgatcggccggttttccgttgaaaggacgagtcggccgtttattgtcaattgattattttcatttaaagaaaaacggctgcttcttgaatagcgtacatccccattttcaagccggaccgcgtagaaaagcgccgctttatcgtttgtttcgccgttgaccggaacttcggcttcgctgattgcaatatctgtcggctcattcgtgctttgcagatcgccttgagaaaattgaggcttcagttcctgcatataaacccctgtattgattgaaccgattggcgtctgtgttgaaaacgaacgcgaagcgctgccggctttgaaagaatcagactcaatccggctcaaaagcatttccgggaaagaacgtattgatccttggtcttctttatatcccggcgtatttgcattcgcgatattattcgtcagcatctctgtgcggcgctgctgggtgatcattgctgaagttgctgtataaagtccttttaacatcatttcacctcaaaataagtgtcatgctccagagtttcctatcgaaaaaacctcttttgcgaaatgcttgcaatttatatttgctaatacagaacgtttgttctataatggtattcaaacatactactctttttatcggcagccgttcagctcctttaaagcatttcacataaaaaaacctcattctcaaaaagaatgaggcttctgatcagctcagtttgcgcttgggaagcttgtccatgttatcaagcatgacacccgtaccgactgccacacaatccatcggattttcagcaacgagaacaggcactttcagctcttcggcaagaagctggtcaagaccgtttaacaatgcgccgcctcctgtaatgataacgcctctgtcgataatgtcggctgacagctcaggcggcgttctttcgagcacctgcttggcagcctgtacaatgacagatacagattcgcgcagcgcttcctccacctctttgctcgttaccgtaatggttctcggcaatcctgtgaccatgtcgcggccgcggatggaaatttcctcgtgacgtgcgtctgggaaaacagttgcgactttaatcttaatatcttcggctgtccgttcgcctatgagcagcttgtactcgcgtttgatgtagttcaagatttcaagatcaaacttgtccccagccattttaatagaagaggcggtgacaatatcgcccattgagatgactgcgatatctgtcgttccaccgccgatatcaactaccatgtttccgcttggctggaaaatatccattcccgctccgattgcggccaccttaggttcttcctccaaatatacatgctttccgccgcttttttcggcagcttctctaatggccttctgctccacagaagtaatatttgtcgggcagcaaatcagcatgcgcggctttgagaaaagaccttttacattcagcttgttaatgaaatgcttcagcatggcttctgttacttcaaaatcggcaatgacgccgtcttttaatggacgtatcgcaacaatattcccaggtgtacgtcctaccattctccttgcttcttcaccgacagcgagcactttcccattgtttttgtcaagagcaacgactgatggttcatttaagacaataccttttcctttgacatggatcagcacattcgctgtaccaaggtcaataccaatatcccttgcaaacatctatctatatcctcctcgaaatctgtttcacagcaatgtccacattctgccctaattatatattttatcataaatattagaaaaaaaagagagcttattaaagttcttcataaaatttttgtggctttttacggaggataccgggaaattctgataaacgctgctcgtttctgagccattattccttattgcacgggttctctttcaaagatttcctctttcttgtattttagttttgttgcttctccgccccgcaaatgtctgattgatttatgataatcaagaatttcttttacttcattggccaggtcaggattaatttcaggcagcctttctgtcaaatccttgtgaacggtacttttggaaacaccaaactccttcgctatcacacgaaccgtttttttcgtctccacgatgtacttccctatcttgattgttcgctctttgatgtaatcgtgcacaccactcgacctccctaaaatggatgtgagaagtgtgaaatgagatccgtcttgtgaaaaaattcgctatttgcgcagcttcttcgttttatgcttttccaagtagaattttgaaatactcccacgatccctcacctcaaacactctctttgttaggtttgtatcagtgtattagcatttaaatgggattatgctaaaaactcaaggaggacaaggggtttctcttataattttatttcgggcttcaaaaattttaactttacactaatcttgacttccggtaaaatgaataaagtttattatttacctaggtaactattttgaaggagtccgggaatggaacatatcaatcgaaagattattcaccagctcaatcaaagcactcggatggttgctaaaaaaacgaatgaacagctcgaagcgtacggcctttacggttcacagtggtcgatcctatattgtcttcacacctacggaccgatgacgcagaaagacatatggacttatttgcacgtcgaagcgccgactgtgacaagaaccgtcagccgcctcgaaaaaaacggctgggtcgaacggatacagggcgatgacaaacgggaaaaagtcgtcaagatgacagaagaagccaaaattaaatatgatgacattcaattaaaaatgaaagaatttgaagaggaaatgctttccgtatttgaagaacgggataaaaaaatattccaaaggctgttaagtcaattgttagaaggacaccaggaggagttgtagcctatgaagcaagctgaacccatttggaccagggattttatcatggtcgttttgattaatttgtttatattcgtctatttttacgcactattgaccgtgcttccggtctatgcgatgcaggagctcggcggctccgagtcagagggcggccttttgatcagcggcttcatgctgtccgcgatttttgcaaggccgttttcgggagctgttattgagcgttttggcaaaaagagaatggcactcatcagcgtcgtgctgtttactttggcatcatttctttatatcttcattcacgatatctacctgctgcttggcattcgctttttccaaggcatttggttcagcatcatcaccacggtgacgagtgcaattgcagccgatttaattccgccggcccgccgcggggaagggctgggctattttgctatgtcgatgaatttggcggttgtcatcggcccgtttatcgccttgaacctgctggataaaatgagtttttccgatctgtttattttattttcaggaatcgtcactgtagccatcctctgtacggcactggtgcggattcctaaaggaaacgacatccgttcagctgtgttcaggctgtcattttccaacatgtttgaaaagggcgcgattcggattgcaacggtcggcttgttcgtgtcgttttgttattcaagcgtgatttccttcatctctgtttatgccaaatccctcggccttattgaagcaagcagctatttctttatggtgttcgcggtgacaatgatgatcacgcggccgtttacgggaaaactgtatgataaagtcggcccgggagtcgtcatttatccgtccattatcattttttgcgccgggcttttcctgcttgctttacaaacagcagtgcgatgcttttgctatccggagctgtcatcggcatcggctacggatctatcacaccgtgccttcagaccttggcgatccagtcttcgccgcctcaccggagcggctatgcaacagcgacttattttacgctgtttgataccggcatcgcagtcggatcctatgttttcgggttggttgtggcacaagccggtttttcaaacatttatttattctcaggcgttttcgtgctcatcaacctgtttctgtatacatggagccaaaaacctgcatccgcaaaggagaagcgggatatatcaatggctgaataagccgttcaacctcgccgggccgggaacgcccggctcttttcatgcaggctgatacagctcgatctgttatttaatgaaacttttgcaaaatgaaatacgtctcctaactgtctgcccaaaaactactactctattaaaaaggtgattttttgaactattggctttttacacgcattcatcaattagcaaaccacaacgacatcctggatggcgccatgattttgattacagaaaaagcgatttatatgtatgcgctcattttgcttttgatctggatattcggaaaccgttcttataaaataaccgttcttcaggccggtgtgacgggtattttcggattggcggcaaattatttgctgtcattggtttactatgagccgaggccatttgtcgctcatcatgtggacgtattgattcaccatgctgccgacgcctcatttcccagcgatcatacaaccggggcgttagccatttcgatcgctttttggctttatcatcggaaaattggaagctgcctgattgctttcgggttattgacgggcttttcccgtatttgggtcggacaccactaccctgttgacgtattgggcagcattttggtcgctttattcgtatcacttgttatgtttagattctccacgtatgtgcagccgctttttgaacggatcatttcactctatgaatcgatcttgcggaaattgcggaaagcggtatccagaacggtataagaaaacacccgaatcatgagattcgggtgtttttttatttccttaaccttttaaggcttcggttaacggcggaacaatttgttttttgcgcgatacaacgcctttcagtgtcgctgtgttgtctgccaatgtgacattgaacgctttttccactgcttgtgcagcttgtcctgaagcgacgacaaccgagtcgtttgttaaaatgtcagttacgacaaacacaaataaatccaaccctttttcagataccgcttttgcaagttctgcgtcaacttcctctttgcgggagagaacgtcgtttgtgtcgacagtgttaacctgcgcgatctctactttatggcttcccatcgtaaactcttttgcgtccagagaaagaagctgaggaatcgtctttgcgctcaaatcagctccggctttcagcatatctagtccatagctgtcagcatcaacgccggcaatcgcagccaattcttttgcagctttgacatcttcttccgtgcatgtcggggatttgaataagagggaatctgagatgatcgccgacagcatcagccccgcaatatcttttttaatttcaacgccgttttctttatagagcttgtttaagatcgttgccgtgcagcctacaggctctgcgcggtaatacagagggtcgctcgtttcaaagttggcgatccggtggtggtcgatgacttcaagcacgcgaacctggtccaagtcatcgacgctctgctggcgctcattatggtcaaccaaaatcacgctgtctgtttcattcgcgacagtgttcacaaggcggggtacttctgcattgaatttcttaagcgcgtattcggtttcgccgttgatttcgccgaggcggacaggctctgcgtccatgccgagctccttttttaattcggcatatgcaatcgctgaacaaatcgtatccgtatccggatttttgtggccaaaaataagtactttactcatgatataactccttactgttgtttttatagtaagcttacctgacaataaaaaaatctgcaaatctgtcacttattttaatatttacgaagtgttttgtcattttaaaaaataaaaaaagagccgttcggctctttttattctccatagtcaggtgtattgtggcttcgttttggagcgggcttcaagaccggtttttctccatatgcgacagggccgctctcatagtgaaattccgctccgtccggcgccttccctatcagccactcaaactgtgcgctttcttctccatccgaaaaattgtataaagagtgcgaaacttcttctttttcatattctggcggaacggtaccgggcacgatgacgccttctttttcttccagctctttgatcgcggcaatccactggttttggtgcatcgtatctcttgccaaaagaaaaccgagcatatcttgtacgcctttgtcatccgtcatttcgtacagccgtgcgacttgcagtctgccttgcgattcagcgttgacatttgcgcgcaggtcggccagaaggttgccgctcgctacaatatagcctgcattccaaggaacgccggtgctgttttcaggcatggcccccagacctgaaacgattgcgtgatgagggttcattccgcccataatggcgccgatgacaggatcgtctgctgctttttcctgctcgtaaaccggagcgtcttcaagcagccgtgcaatcatcgtcgcaatcatttcgacgtgtccgatttcttctgccgccgtatccatcagcaaatctttatacttttcatttccccgcgtattccaccctgaaaaaggtattgcatcgccacagatatttctccgtactggccgccgagtatctcctgcattttctttgcgaagacagggtcgggtctttcaggtttggcagggtactgcagcactttcgtatgcttgaacaaatcagatcactcctccgttttttgtatcctcgtttttgatttagccgaaaagggaaatcataaaaccgtacaacaggttcgggatgtgcttaaaacaggtcaaaattcgaaccaaaggagagctgttctatgataaaaaatacttctcaccgcccttttccactgcctgaaggaccgtggatgatgacgcaaacatggaatcatgtattatttgcccattgggctgtcgatcctgaagccattcgcggacaaataccggcggccttggaattggagacattcaacggaaaagcgtggatcggcatcttgccttttctgctgacaaatatgcgtccccgttttttgccgccctttcctttcatcagcagatttcccgagctgaatgtccggacatatgtagcatataaaggcgtcccgggcatttattttttcagtcttgacgccgcttcgcgcttggccgtcgccggcgcgcgctcaatgttccacttgccttatttttacgccgggatgcgctttgcacaacataaagaccgctttcagctgacaagcaggagaaaacgttcacaagcagagttttatgcagaatatcaaccggtttcggagcctttctcagctgataaaggaacgcttgaatactggcttgctgaaaggtaccgtttgtacaccacgcataaaaacgagctctattatgaagatatccaccattcagagtggcagctgcagcaggctgaagctgatatttttccgggtccgctcacaagcgcaaacgatctcacactcccagacaccgcgccccttcttcattatgcaaaaaggcagcacgtcttattttggccgctgaaaaagtgggaaagtgaagaaacataaaaaaggaagagctaaaaacgctcttccttcaacctgtttaagccggttttgaaatttcgcttaaagcttctcccgctttctcatccgcatgtgagacggagagatcccccaaagcaacgattccgacaagacggtcatcttcaacaatcggcagcctgcgaatttggtgttccgccatcagatcaccagcctcttcagcagacatatccgggcgccctgtcaccatctgtgtgctcatgatatcccgagcagccgcatctgtttcattttcagctacacatctgataacaatatcccggtctgaaacgatccccgtcaattttccgttctcgcagaccggaattgaacctacattgtaatcacgcatcttaccggcaatttccgcaatcggggcagaaggctcgcagcattcagcattggttgtcatgatgtccttcagtttcattcggaattcctcctttatgatggggttattatgtgcttttccgatataccgcgggcttaaacctatttaaaagagcccttccttttcatatatcgttttttatccctcaataaatcgccggtccagcctttctttttcaaataccaatacacaagggcggtcgaaacggcgattaaaataagcgaaaataaatagccgtactttaaagagagttcaggcatgacttcgaagttcattccccacagggcgccgaaagccgtcatcggcgtaaagatcgtcgtaaaaatcgtcagcgctttaaaaatttcattgcctctgtgggatgtcaccacttcctcggaatgaagcaaataattgatttcattcgcatactctttgatcaatgacatgcctctgtcgatttcgtaaaacgtcctgcgctgttcgatttcgtcaaacgatttggttaaaaaagtttctttaaggcccattgcaacctttttcatcgataaaattaaacttcttatgaccaggagttcgtgacgccgcttatgaatcagttcaatgatgcttttattgttgtcatgatgaaatccccaccttacttttccaaggtgaacttcaaagtgctcaagttccttcaaatacattctcatcagttcgcccagcaggaccaggaacacttcaggggcgtctttgcatcgctttaagtgttgatcgatcggccttctgtttgcctcttcaaattgcgagatatctaaattcattgtgaaaaaatagtctttcgttaagtaaaaatgaaatgctgtccggttttgttgaacttccgcttcctggtcgtaaatatatgaaccgtagatcgcttccttgccttgaacggcagcattgatatcaaggcaattgatgttggccgagggaacgccttgaaaccagtttcggcattccggccaatgatcgggctggatcagcccttgtgctgttgttttttcgtgaggcccaagctgataccatgtccagccctctccctgaaaaactctcatacttgtctcctcctcttccggcccactcgttttatatttctttgcccgccctccgcgtaaataaacatgatgtttgccgcgctgcggcacgtggtatgaagccagtatgagtttttcatagaaaaggaggtggcgccttctttactgagaaggcggggcattggagttattgaagctgattgcagtagcaggattaatcgcatttacgggctttttcgtcgcggtcgaattcgccatcgtcaaagtaaggcggacaaagatcgaccaattgatcattcagaaaaaaaagggcgctcttgccgcaaaagaagtgacctcgcaccttgacgaatacttgtcagcctgccagcttggaatcaccgtgacggcattgggcttgggctggcttggtgaaccgacgatgcagaccttgctgcatccccttttctcaaaaatcggcttgaacgagtcgattacacatattctttcatttttggccgcttttttatcagttacttatctcaatgttgtcgtcggagagctggcgccaaaaacgatcgccattcaaaaagcggagaccgttacgctggtttttgcacagccgatgatctggttttgtagaatcatgtttccttttatatggctgctcaatcattcagcccgcatgatcacaagtctgttcggcctgaagccgaccggtgaacacgaattggcctattcggaggaagaactgcgaacgcttttatctgaaagctatcgaagcggggagattaaccaaaatgaattgaaatatgtaaacaatatttttaaattcgacgaacgtacggcaaaagaaattatggtgccgcgcaatgaaatgaccgtcttatctcttgacgacagtttaaaaaaagcgaagcagcttatcaaagaaacgaagcacacccgcttccccgtcatggaggaagacaaagatcacatcaccggaatgatcaatataaaagaactgctgctggcggagcttgcaggggaattttctttagaaacaaaatcgctaaagccatatatccatccggttatccatgtgattgaaacgattcccgtctaccagctgtttgtcaaaatgcagaaagagcatacacatatggcgattctcgtagatgagtatggcggaacatcgggtcttgtgacggttgaggatattgtcgaggaaatcgtcggcgacattcgcgatgaattcgatactgaagaagtatctgctgttcagaaactcgaagatgaccattatatcctaaacgcgaaagtactggtcagcgacgtaaacaacctgcttggaattcatttatcagatgaggagattgatacaatcggcggctggatgctgacgcagaatattgagagcaagcccggaacgacgatcgaaagtgaaggataccgttttaaagtaaaagaaatggacggacatcgaatcgttgcagttgaggttgaaaaaaccgcttaatcccccttctgtcggatatttcagcctctccctgtccgcttttctccccaaaaaccatgtaaggaaatctgacatgttcatcatgatatctcccttttgtcactataatgaaagaaacagagatctgctctcaatctaaatgactacggaggaatgaaacatgcagatgggggatacagtatttatgttcttttgcgctttgctcgtgtggctgatgacgccgggcatcgctttattttacggaggccttgtaaggagcaaaaatgtgctcagcaccgttatgcacagtttatcttcaattgccatcgtttctatcatatggattttgttcggctattcactcgctttcgctcccggaaacccattgatcgggggtttggattggatcggactgcacggtgtcggttttgaacccaatgccgattattcggagacgatcccgcatacgctttatatgatgttccaattgacatttgccgtcctgacgactgcgattatttccggaagctttgcggagcgcatgcgctttccggcctttattcttttctcggtgctctgggcggttttcgtttattcgcctgtcgcccactgggtatggggcggaggctggcttgacgagctgggagctattgattttgccggcggaaacgtcgttcacatttcttccggggtagccggtctggtcgttgcgattgttctcggcaagcggaaaaatatgagcgacaccgcccctcacaacctccttctgaccctgctcggggcgactttgatctggttcggatggttcggtttcaatgtcggaagcgcgctgacgatcgatgaagtcgccatgaccgcttttatcaacacgaatacggctgcggccgcggggctgatcggctggattttggcagaatggctgattaataagaagccgacgatgctcggcgccgtctcgggagcgattgcgggactcgtcgcgattacgcctggcgcaggttttgtcacgccattctcatccgtatggatcgggcttatcggaggaatcgtctgtttctggggggggttttcgctcaagaaaaaattcgggtacgatgatgcgctcgatgccttcggacttcacgggctcggcgggacatggggcggaatcgcgacaggtttgttcgcgacgacatctgtcaacgcagacggtgccaacgggcttttttacggagacaccagtctcctttggaaacagctgattgcgattgctgcaacatatttgtttgtcgcaatcgtcacatacgctattattaagatagtcagtatcttttttaaactccgtgcctcagaggatgaagaatcattgggcctcgatcttacgctgcacggcgaaaaagcgtatcaagattaatttgtcaggagtgatggtatgagcggtcaaatgtataaagtggaaattgtaacccgtcctacaaactttgaaaagctgaaaacggagctggccaaaatcggggtaacgtccattacgttttacaatgtacacggatgcggcctgcaaaaagggcatactgagctttaccgcggggtcaaacgcgaaagcaatgtgtatgaaaggttaaaagtcgaaatagtcgtcagcaaagtgcctgtcgaaaaggtggccgagacggcgcaaaacgtcctgaaaaccggggaacccggtgacggcaagatcttcatatacgaaattaaaaacaccatcaacatccgcacaggcgaggaaggtcctgacgctttataaaaaagatcgaagctcccggctggagttaagccgggagcttttctaatgttacaaaacagcatcaataacaccgtatgccttcgcttcgtccgcatccataaagtaatcgcgttccatgtcggcttttagtttttcaatgggctggcccgttcgttcgtgaaagaagcgctcgattttttccctcagtttgatgatccgcttcgctgaaatctccatgtctgtcgcctgtcctttgacgccgccgagcggctgatggatcatgatttcgctgtttttgagtgcataccgtttgccttttgctccgccggcgaggagaatcgctcccatggaagcggccattccgacgcatatcgtgcggacatcaggcttcacataatccatcgtatccaaaattgcatatcccgcggaagttgatccgcccgggctgttgatatagatcgaaatgtctttttcattgtcttcagctgacaaaaacagcaattgggcggtgacccgattggcgaggtcatcgttgaattcagaaccgatcataatgatccggtcttttaaaagtctggaaaaaatatcgtacgatctttcaccggcagccgttttctcaatgacgtaaggaatggtgttcatagcatttttcctcctaggcagcgcacctcatcatgctgatgcaagacggctgtgaagcgtcgaaacgccatgtctgtttggcaaattcgagcagatcatcggggttgtgatgcaatatcgcccgaacaagcagaccgatgtgttcgtcatccccgtccgccggctccttttgcagaacctccggagaaagcctttttaatcgctgacgcgatctaaataaaagcgacttgacggatgattcgggcttaccgagcgtctcggcgatttcgtgcagctgaaaggaaaacacatctttgagcagaaaaatcgttaattgcttcggtgttaaaataccggaaagctgtttcagcaggtgctcgaagtcatcggccgccttcatgcgctctgcccgcccgtcttccagattatcttcagacagaaagctttcgcgcttcctttttctgagcaggtcaatccatttatgctttgcaaccgtcttttgataagcatgtgacgcgtctgttcgattgatttccattaacttgaggattgtatcctggactaaatcctcggcatcccatttatcgcctgtcattctcaggcaatacttcatcagcgcttgctgttctaattcattcatgaatgcattcacactccttaaaagaggcctcttacttaataaacggctggctccgccgatttgatacgggtttttttatgattgtaacaaaaaaggcgcctatcgcatttgataggcgccctgagggaagcgtgccttatgactggcttgaatcgtcagactgggttccgtcttgattttctgacccttcagacgaatcttcccgcttggttttgtcgtcttttccatctgtttgatctttcgctttgtcttctgtttttgacttttcttcaacagaaggctgagcaggttctttcacttcagacgcttgttcctccattgctttttcaatgctggagaccggcttgtccatgaagttcagcgggtttagcgcaacaccgtctttgcggatttcaaaatgcacatggtttccgccttcttcattgtaaaggtttttgcctgcttttccgatgacttgattttgttcaatcttgtcaccttgtttgacgcttacttcagaaagagactgatacacagttgataaaccatcttcatgttcaacttcaacaacgtagcccagtacagggtcttttgcagctttgatgaccgtaccgcttagagatgcggaaacatcaaatgtttttccgtctttctcagccaagtcgatacctttgctcatgctgtacgtgttattatagtttacaagtgctgcttctttctcttctttagttgcgtcagtttcaaaaaactttttaacgacggaaacattttcagaatcagcaaccggcattgcgacattttcgactggtttgcctacttctaccgcatcatcccggttatcataggctgatttcttgccatcgtctgcaagctggtcttttacatcgttgttagaagccgattgataccatagaacggcggttaatacaacgacggcacttgtcaaatagatggccggaaatacccagcgtttacgaaaaaattgttgcagctttgtgattttggaagtacgattcttttcttcctctttcataactcatcacctcagcaacattctgaacacttttcagaaaatatatacatttacaaaaaacttttttcaatttattttgcaccggctgtttcgtttttatgtaaaaccgccctgaaaatctgaaaaatgaccggtatgcatgataacggaaaaaacgctgaagatataacatatgaagaaaggatagagagaatgaaattacgaatcgccaatcgggaagaccttcccgcagtagtcgatatttacaactccaccattgcgtcgcgaatggtgacggcagatacagaacccgtcacgcctgaagaaaggctgaactggtttttgagccataccgaagaaaggcctctttatattgcagaaaatgaaaaacgggatatcgtcggctggatcagctttgaatcattttacgggagacccgcctacgccaaaaccgccgaagtcagcatttaccttcatgaagaccaccgcggcaaaggggcgggttctgcggtgcttgaaaaagcgcttgaagctgctccaaagcttggaatccgttctttaatggcgtttattttcgctcacaatgaaccgagcatgaagcttttcaaaaaatacggcttcaccgagtggggacactttcccggaatcgccgagatggacggaatccggtacgacttaaaaatattaggaaaagaattgaatgaagcctgatcatcatgacaaaaaaagagctgtcatgcagctcttttttccatcaatcattcagccagcctgcgccttctgatctcttcttcatttaaaaattccaaaaagcttctcattacagtaaacggctcttctttgaccgcccgaacgtagcggcttttccgttcatcggaaagcacttcgcttgtttgcatccgttccaatatatacttcatcaccgattgctgaacatttcttttttggtatgacgactctctgaacagcgccatgccgaatgctgcacctgcggcagcgcagccgatttttatcattgaatcggttccataagctgcctgcccccaaaaagaggaaagataaacaaatgaagcaagaagcagcggaatcgcgataaaaagaaaaatcagccttttctttaagaacggcgccgccacgcgcttgaggttatccatttcctctttcataaaggccggcatttgatggaaacgttccatatccataatcaatccctcccgttttggttaaagaggcgttggtccgctaattaaatcacgctttttatatgtatatcgtaacttagatccaacatgttttacagttttttgccttcctccctttttctttagaaactttccggccgccgccccgtataacatgagatagttgcttgaaaggggagtaactgttataaatggaatgtataaaaacaaatccgtcttgtgaggttcaatatggatattattaaaaatatcagtatcacatcgatatttctcggttttatattagttttaaatacgcttttggcaatcgttgtgatctttagagaacgccgggatgcaagctcctcctgggcctggctcttggtgctcttctttattcccgttctcggctttatcctttatttgctcttcggccacaatttgagcaggaatcacctttttcaatgggaagaccgaaagaagatcgggattgaaaaaatattggaacagcagctgaccaagctgaaaaaccgcgagtttgaatttcgcaataaagcgacggcggacagcaaagacttgatttatatgcacattttgaataaccacgccgtttttacagaagacaatgcggtcgagctgttaacggacggacgccagaaattcgacaggctgcttcgcgatattgaaaacgccaaagaccatattcatcttcaatattatatttataaaggcgatgagatcggcaaaaagctccgggatgcgctcatcaaaaaagcaaaagaaggcgttgaagtccgcgttttgtatgatgaattaggatcaagaagcctcaggaaaagctttttcaaagagctgaaaaaagcgggaggatttgtcgaagtctttttcccgtcgcgctttaaatttatcaatttgcgcatgaattaccgcaaccaccgcaagctcgtcattatcgacggcgtcatcggctatgtcggaggatttaatgtcggagacgaatatctcggtctgaacccggcctttggctattggcgggacacgcacctcagaatcaaaggaacagcggtccactcgattcaaacgcgttttatcctggattggaatcaggcctcgcaccatcacgacattacatatatgccaaaccattttcctgacatcgactcccacggaaacatcggcatgcaaatcgtcaccagcggccccgattcagaatgggagcagattaaaaacggctatattaaaatgatatcaacggcaaagcggtccattcttattcagacgccttattttataccggacgcaagcctgctcgatgccctcaggatcgcttgtctgtccggcgttgacgtcaggatcatgattcctaacaaacccgaccatccgtttgtgtactgggcaacctattcttacatcggcgaacttttaaaagcaggcgcctccgtatttatttacgacaacggttttatccatgcgaaaacgattgtagtagatgaggaaatttcatcggtcggcacggcaaatattgatatgcgcagcttcaagctcaattttgaagtgaatgcatttttatatgatgaggaaattgcgagaagccttgtcctatcatttgaaaaagatctgcaagtgtcaagggagctgacctttgaggaatatttaaacagaagcaaatcgatccgcttcaaagaagccatttcgatcctgctgtcgccgattttatagcgcacaattcatgctgttaaaaaaatcctcccggaaacgggaggatttttgttttactcaccagaagctgccgcacctttgggtgctgaagcatgcttgtccatttgacggcctgtgtcagcgtccttgagcttgagtgcgatgaaaagcgcagccatgaggaaaccggctgcacagagcaaagctgtccggtaagctgataaatcaggctctatgcctgcgctgggctggctgagcacagcaaggacgcacgacatgacagcaactccaaaggcagatccgagccggttttgcacattaaacagcgttgttgcccggcccattgaggatgatgaaatgttggcaaaacaaacaacctgcgccgcaccaaccgcgtgccccaagaaaaagcccgctaaaaacagcagcagcctgagaagccaaagatttgacccatatccggtcaggctcagcagcccaaacagcacagcagcgcctaacagcgcaacggaaatgacccgcctcgggccaagctttgccaacgacctcggcatcagctgggacgccagcatcaagcctaatgcttcgggaaacgtaatcagcgcagtatctgtcgcagagtagccgagtgcttcctgacacaacagcggaaatatatagagcatgccaagcagtccgcctgctgtcagaagcgaaatgacgctcatcattccaaaaacccggtccttcaataagcgaagttcaatcaacggatgctcagccttcagttcgacaaaaacgaggattgcgaggagcatcattcccccggcccctgctgcaagcacatccggagagccgaatccacgcgcaggcccctggctgagtgcaaaaaccgccaacgccattcccggcgccgccaaaaggaatccaagccaatcaaatctgcccgcttccggctccaaatgttcatgaagatacaacaggccaaacagcagaatgatcattccgatcggaatattaatgtaaaaaatccagcgccatgacagctgatctgtcagaaacccgctgatgatcggcccaaccgcaggcgcgacggcaattggaagaacgaggactctcgaaattttggcccgttcatgcggaggaaacgtcctgaacaagatcgccattcccaccggcgtaatcaacccgccgccggccccctggatcacgcgaaatgcgtttaacgccaccagattgtcagcgattccgcataaggcggatgcagctgtaaatatcgaaagcgcggctaggaaaacacgctttgtcccaaagcggtccccaagccagccggctgcgggaagacagaccgccaagctgactaagtatccgatgttaactgtgcctgcagcagacggcaatgtttgaaattcggtcatgatggcaggcaatgccatgttgatgacactcgcatccatcgcagccataaacatggctgttacatatacaatgctgacaaccgtcctttgattgaacggccttctattcattgctgaccgccgtgtacttctgcagccagcttgatgctgttcggcgagagatcggtccaattcgagctgatatagtcgatacaggcgctgcggctcgcttccccgcagacgacctcccaccctgccggaatatgaatgaaggccggccagagtgaatactggccatcctgattcattaaaacgacatatgtgccgtgttcattttcaaaaggatttgtcatcgctatctctccctacttatccgtatcttttttcaagtcgtccagcttttccgaaacccgacgtccgatttcggccagcggctccggctggcacaaatctttatgccggcaatccatatcatgaatatcaatgtttccgttcaaataaggtagccatgactccggatcgatcggatcaaaccattccggtatcacggttgatttgaaaaacagaatatcgccatgaaagacgcggggcttatattcgcttaaaatccggacggaattcacatacgtctcctttaagttcaagatcgcagcctcgtccaggctggcaagcgcactgccgtcgcggcgcagaatatcgatcgcactggaaaggttcagcggtgccccgtcaaggctgtccgggtcgtatcctcccaatgccaagagggcaatcaatgcttcctgctcatcaggcgcatctttaattggaaggaagtgattcgggtaagcatcaagcatgacaagaagcgatatgtcttccccttgttcctgcagctgagttgcgatcgcatgaacaacattgcctccgagggaccagccgagcagacgataagggcctgttggctgaatcgtacgaatgtgccgaatataatcagcagccatgtcgtcgagcgtatcaggtagctcttcctgccttgcgatcccgcgggcttgaaggccgtatatcgggtattccttgccgagtgccgtcattaaaccggcataacaccagctgaggcctccggccgggtgcacacagaacaggggatcttgactgcctccggttctcagcggaagcattacatccagcgcactttgcctgccgccggattcaagccgttcagcaagtccgctgactgtaggcgcttcaagcaggtcgccgatgccgagttcgactccgagcgcttcacgaatgcggctcatcagctgtacggcgagaagagaatgcccgccaagttcgaagaatccgtcatcaataccgactctcggcgcattgaggatttctgaaaaaagatcgcacaggatttcttcctgcggtgttcttgggccccgccctttaacagccgcggcaaagtcaggctcaggcagcgcttttcggtcaagtttgccatttggagtcaatggcagctctgaaatttttacaaatgcggaaggcaccatgtactccggcagagtgcctgcggcaaaccgtcgcagctcagccggatcggtttcttcttcagacgccgggacaacgtaggcgatcagacgcttgtccccgggctggccttcccttacgaccacagcggcttgattcactctatgatggcggacaagcaccgcttctatctcgccgagttcgattctgaagccgcggatcttgatctgctggtcggcccgccccatataatccagagagccgtcctggcgcctgcgggcaagatcgccggtgcggtacatccgggttcccggcggaccaaacggatcagcgacaaagcggtctgctgtcaaatcgggtctgcccaagtaaccccgtgcgagaccgcccccggacacatacatctctccggtgacgcccgggggcaccggttcaagatactcatcaagcacatatacacctaaatcgggaatcccctggccgatcaggctgttcgcttgaagtgccgcagtctgctgatcgagagaaatatagctgacatgcaccgtcgtttctgtaattccatacatattaatcagccgcgggaaatgatccggatggcgttcataccaatcttcaagcctcttcagctcgagcgcttcccctccaaaaatgataaagcgcaaggaaaggagctttcctgtctcagcattgtcccggtcagcctgcatcaattgataaaatgctgaaggagtctgattgagcacagtcactccctcgcgaacgagaagattgagaaattcggccggcgagcggctgattgtatgaggcaccacgataagccggcccccattgagaagtgctccccaaatttcccataccgaaaagtcaaatgcgtaagaatgaaacatcgtccaaacatcgtcagcgccgaaatggaaccattggtcagtcgctccgaacagccgcacgacattttgatgcggaacaacgactcctttcggcttgccggtcgaaccggatgtgtaaatgacatacgccgggtgaagaggcagcaaaggcgcggtgcggtcggcatcacacggattcgcagcagcgcatcctttcagttcctcttgtatacaaggatcatcgagtacaatcctttcaacagatccgggaacagaaagatttgattctaccgctgaactcgttacgatgcagacaggatgggcatcattcaacataaacgctatcctttccgccgggtagtccggatctaggggcacatatgccgcgccagccttcagcactgcaagcaatccgacaaccatatccaaagatcttggcagcgccagggcagcaaattgttcggggccgacccctttggcgatcaggagatgagcaagccggttagcgcgtttattaagctcgccgtatgtgagcgcattattttcacatataaccgcaacagcttccggatcctttgccgcctgcttttcaaacaaaacgggcaaagatgaacaaggtatgctgttggacgatttgctccaatcagccagcatgttttcccgttcggccggaaggagaatatcgagtttttcgatcggctgatcagggtcgtctgctgctgaatccagcagcctgacaagccgttctgccaatgtttgaaccgtatttcgctcaaataaatctgtgctgtattcaagaaatccgccgatacctgcgggtgttccgtccgcttttcgatgttcgcgaagctcaatcgtcaaatcaaacttggctgctccgacgctgcgaatttcaatgtctgacttgaggccggaaaggtcaagctcaggttcaggcgtattttgaaaggcaagcataatttggaacagcggatgtctcgctcttgacctgcgcggattaagcacttcaacaagacgctcgaacggaaggtcctgatgctcatacgctgcaaggtttacttttctgactctgttcagaagctcccgaaaactcggattacccgatgtatctgttcgaagcacaagcgtattaacaaacaatccgacaatttcgcctaaagcatcatcgtttcttcccgctatcgggctgccgagcggaatatcatggcctgctccgagccgtgtcagtagtgcggcaagagccgactgcaaaatcataaacatgctgactccggtgctgcgggacaaatcgaacaggcggccgtgcagctgttcgtcaatgctgagatcaatcgtaccgcctctgtagctagattccgacggacgcgggtgatcagtcggaagctccagctgatcaggcagatgttccaatgccttcgaccaatattcgagctgtttggcaatcagactgtccggattgttctcactgccaagcagatattcctgccatacggcatagtcggcatattgtatagaaagcggctcccaaacaggtgcctcaccttgcagacgcgcattataggcggtttccaaatcacgggtcagcggcattaaagaccagccgtcgccgatcatatggtgcaaaagcagaagaagcacaaatttgtccggtccgagtacgaatagctgggcgcgaaacggaggctccttttctaaatggtaacggtgccggacggcctcagccaggactttttccaactcatgttcgctgacatgggatacagtgagttcgggacgcgattgatcctcttccaatatcagctggtgtgttgtcccttgctgatccgggaaaattgttcgaagcggctcatgtcttgttgccacatcacccagagcagctgccagcgccttttggtccaaatctccagttaaatgaacgacaaccggaatattataggtcgggctcggtccttccaaacagtgcaaaaaccataggcgccgctgtgcgaaggacagcggaatctccttgcggcgctctcttttgcgcaatgccggacgggcgctctgcgcctgatcaagctgtttggcaagtccggcggctgtgggctcatcgaataaacggccgattccgagttcgacgccgagcatttcccgaatgcggccgacgagcctgcctgccagaagggaatgtccgccgaggtcaaaaaagctgtcatcaatactgactcgcggcacccccagcacctcagcaaataaatcacacaaaatttcctcttgcggagtcctcggctcgcgtccgcctgtatgcatactcaccgccggagccggcagggatttgcggtcaagctttccgttcggcgtaagcggcagttcatcaagtatgacaaatgcagacggaatcatatagtcgggcagtgtctcaccaacgaagcggcgaagctcggcaggatcaaggctttctcccgaagcgggaacggcatacgcgaataaacgcgggtcaccgggctggtcttcacgaacgatagcagcagcttgtttaacaaccggatgatttgcaagcaccgcttctatttctcccatttcaattcggaacccccgaattttgacttgatggtctgcacggccgatataatcaagcgacccgtcttcgcgccagcgcacgatgtcgcctgtccggtacatccgcgatccaggcggcccgtatggattcgcaataaagcgctcagccgtgagagcatgtcggttcaagtagccgcgcgctacccctgttcctgccacataaagttctccagccgttcccggaggcactggctgtaatccggcgtccaggacataaagctgcgtattccaaatcgcacagccgattcccggaggttccgtacagttgccttccagcgcagcggctgtagaccaaattgttgtttccgtcggtccataaaggttcgttaaagaacacgcgagctgctgcaattgccgggccaggctggattgcaaagcttcgccgccgacaagcgcacgaagacctttgagcttttccggggcgctcgaggccaatgcatgccagagggtcggtgtagcctgcattattgtaatttcgtatgtttcaatcattttggccaattcggacggatcttgtaccgtttccttctcggcaagaacgactgctgatccgctgatcagcggcaaataaatttcgagtgctgagatgtcgaatgcaattgtagtgacggccagcagccggtcatcttgattaagcgcgaacatgtcctgcattgacagcaaaaaattgaataagctttcagcttgtacgaccacgcctttaggtctgccggttgatcccgacgtataaatcatatatgccggctggttgccggaatgctgttcgccgggattttcttcagaacagccggacattttctccataacagtttgttcatcgaggattaacttcggcatttgcgaaccgatcgtgtcttgcgcttccttgctggtcataacaagcagcggctgtgcatcgttgagcatatactcgatcctgtcagccggataatcgggatctataggtaaataagccgctccagctttgagaacggcgagcatgctgacaaccatttccgctgaccgcggcaacgccaaggcaataaatgtctcgggtttcgccccctgatcgatcagcaagtgagccagttgattagccttttgatttaattcggaataagtgagaaccttatcattgcaaacgactgccggagattcaggacactcctttgccatcctttcaaatcgctgcggaagactctctttgggaagcccgtgttctgtttgattccattcaatcaatatttgagcgcgttcttcagggagaagaatgtccaacgtccccaccggctgagtttgttcgcaaacggcaatcgttttcagaagagtaagaaaacgattgccgtgatcttcaagttcatccgcatgataaacagcagggtttgcatccatgtttacttttagcccgccaccgtccggacggccgtaaatgttgattgacaaatcgtccacaggtcccgtggcaagattatgcacgatgccttgacagccggcaaaattcaagcggttctcaaaaggcatcaaattaagctgcggaccgaacagccgctggttttcgccaagcagcttgagatcccggcgcaattcttcgtggcggtaatgctgatggcgccgcagcttcatcatctcacccgagatttgcttgactagctctcctatgctcatttgcggctgcatgccaattcgaagcgggaggagattcatgaccattcccggaatatgaagagcggctgacccgaggcggcacatcatcggcatcccgagaacgacgtcatttgcccctgtcagacggtgaacatatattgctgctgctgccatcacggtttcgtgccaagttgcccccattctgctcgcggcagacagaagacgatcagcatcctcacttggcaggtgttcagacctgcgaagaaaacttgaagaggtacgcggcgccctttcggcaaggctgaccacctccggttcatcgctgaaacgcccaagccaaaatcgccgatcttcctgatactgttctgatgcacggtaagccgtttcctccgcgagaatcaaatcgagggagccaaaggctccgctctggtcgatcgatttgttctgcatcaatgcggtatatatttttgacagccgctcggcgatcaatgtaaagctgaacccgtctgttgcgatatggtgagttcgctgataccagaagtaatgatcttgcgccgctttaaaaagcgcttctgtaaaaagcgggccgcgagtcagatcaaccggacgggcaaggtcatccatcatccagcttttagccgcctgttccggatcggtttctgatctgacatcaatgtaatgtagcggaaaatctgttgacggaacgatctcttgccatggtccgtcttgatcttctccaaatctggcatgaaatgattcagcttctttaatgacatggcgcagcgctttttcgaaaagctcctgatcaagcgggcctttaatttcaacgtattcagctgtattgtagatcggattttccggatcaagctgctgagcaaaccaaatgccggcttgcgctcctgataatggctttcggttatgttgacattcaggcatttaggtgacctccttcattgatagtctgcatttggcaaaggtgcttctttagaggaggacaacagtctccaccagttttcaatcgaagggtcctccgcaagctctacaaacgacacctcccgccccgctcggcgccagcgctctgcgagactcatgattctcacggaatcaattccccggtagatcaaattttcgctgtcgcttatcttttccggcgattcaagaagaagcgatgccacctgttcgcgaatagtctgttttgtcagtgcatgagagctttcttttgcgtgttcatggctttcgccatctttcagtcggctcagaagctgttccgcagtaattgtgacactgcaacggtcagctgcgtatgtgatggccatttcatgatgctttaatgagaaatccgccaccgcatctccgacaaaaaatgtttcaatatcttgcataaaagcatcacatgccgtcatcaggcagccgatatgggcatagattccggtgattatgagctgatcccgcccctgctcctccagcacgcctaaaaggttggtttttctgaaggcattgtacctccacttggtcaaaacaatgtcgccttcattcggtttcagctcatccacgatcttctgctcatcgggatcaggaccgattccgggtccccaaaagtcttggagaagcccccgttcttccggtgtctgggcgccgggttgagccgtgaaaataaccggcatgccgagctcggcacatcgcttccgaagcttcttgatattagccagcagatctgtgaccggagactcgccgtaacggtaagcgttgagaaaatattgctgcatatcgtggatcagaagcgccgcacgcttcggatgaggagtccatgacaccttgtttttcggcatatttgatgcttctggcatttggtacggtaagatggcaggaatggccatcaaatcacatcctctcattttttatcatctgacattctcagctgcagacattttttcagcaatcgccgcacgcagctcttttttgctgacttttcctacgcctgtctgcgggaaatcttcaaccatttctacccggtcgggtattttgtaggctgcaaggcccctttctctcaaaaacgattgcaactcagcctgagccggtgcagcgccgcgagggataatatatgcacacgccctttcgccgagaaattgatccggcatcgagacaaccgccgcatcgagtacccccggatgtgcgagcagatggttttccacttcttccgcggcaaccttctcaccgcctctgttgatctggtctttagctcgtccttcaacaatcaaatagcctgatgaattgactttaaccaagtctcccgtacggtaaaacccgtcttcagtgaacgctttggcattgtgctcctcagctttgtaatagccgcgaatcgtatatggacctcttgtcagcagctctcctgtctgtccgggtccaagttcgcgtcctttttcgtccacaattttaatctcgtcaaacggagacattggcctgccttgtgtgtgaacgatcgtgtcttcaggatcatcaagtctggtatagttgaccagaccttctgccatgccataaacctgctgcagtttgcagccaaacaccgatgaaacgcgtctggcagcttcggcgctgaatttcgctccgccgacttgaaggacctggaggcttgacaagtcgtcccggcgcgccgaagcagcatcaagccagattaacgcaagcggcggtacgagtcccgtgatcgttaccctctccttatcgatcagagggaaggtttcatccgggctgcctcctgatgcaaggacgactcggcctcccgcgtacagcgtaccgagcactcccggcgagctgagcggataattgtgagcgatcggaagagccgcaagatatacgctgttgtgatcgagcctgcaaatctctgcgctgaccctcaagctgtatatataatcatcatgcgtcctcgggatcagcttggacagacctgtgcttccccccgacaactgaagaaaggcgacatcttctggatagacgttttgcggaggtgccggctgatcataaaggcttgccagcgcttcaaactcctccggttccccggcgacaatgacatgacggagcccttgcagcttctcctttacctgtctcgccagcttgcggtagtcaaactttgcgtgacgatcgggaataatgtaggcagcagcttcagaaaactcgcaaaaatacgtgatctcgctatgccgatgcgatggaagcgcaaaaacaggcagagctccgatccggaagagcgcaaagcaaacttcaaaaaactcgatgatattcggcagctggacaacgacgcgatcattttttttgatccccagctttaaaagaccgccagccaaagaatcggctctcctgtctaactcacgatagcttaaatggatatctccgtatgtaagggcaatgcggcttccgtatttttcggcccgctccctcagcatttttccaaaagtttcgcctcgccagcatccctccttccgatatttatccgcaaactccttcggccatgtcgtgcatcctttcagcatctctatccctccgttactcactgttcattcccatcgcaagaagcattgtccgaaactttgcagacgtttcggcaagttcgtcttcaggcttcgacccggcgacaattccggcacctgcgtacagtcgaagcgcgtgttcctccgcctcggcacagcgaatcgttacaacccattctccgtcaccgtccgcgtcgcaccagccgaccatacctgtgaaaaacccgcggtcaaacggctcaatctgtttaatcgcttctttcgccgcattcgtcggcgtgccgcagacagcgggcgtcggatgaagggcggcggcaagctccaatgatgatacagagaggtctgtaagctctccctttaattccgttgaaagatgccacatcgtcggcgtgctgatgagcgacggttccggcacctccagcttccggcaaaacggcctgagcgcggaagcaaccgcttcgacaacgaccgcatgttcgtgacggtctttaggcgaagcaagcagttcagccgcccgtcttcgatcttcttcgggatcatcgctccgaggtcttgaacctgctaaaggatttgccgtaacgcggaacccggaccgtgatacaagcagttcgggactcgcgcctatcaaagtggtgcgaggcgcttcagatgactgcccggttaaatcaacggcaaagttgtacccgcttgtattgcggcgggcaagatttcgcagcaattgaccgatatcgactttgatcggcgaggtcagctgcaatgaccgggaaaggacgatcttgctgtattctcctgctgctatacctgccaatccttgtctgactccggccatatacgcttccgggcttggaatctgctggacatcataggggtgcagggcaggttcaggcacctctttatcgtcttcttcacatgtcagcggccccgcatgccacgcttcgaccggcacggttaactgcgccggctttgcatcgtcaaatggcacagctccaactacaatcggattttcctgcccgttctccctggcttttttcagaacttccgcagtccgctgagcaaggctttgctcttcggtttgagaaacagaagcaaaaacaccttccgccagaatggtccgctcaggggaagagaaaaagaatgaagcaccggcctgatattcctttaacagctgatctgcaagcgcttctgacacgacatgacgttctatcatcatcaaaacctcctttagattgaatcaggctccaagcgttgctccgccatcgacgcgcaaatcgtgcatcgtaatatgacgagccccgtcagacagcaaaaatactacagcatctgcaatgtcagccggcgaagccaattttccgagcgggattcccgttttgaatgtttcaagtgatccttcaatgacgccttgcgcagcttcctcacactgccatagcgaccgctgcatcggggtatccgttgatccgggcgatatgatattgcagcggatattgtactcggcaagttcaaggccgaggcatttcgtaaacattaaagcggccgccttggaggccgcgtaggcggccatgtgcatccgcggcacagctgccgcatttgatccgacagtcacgatcgctccagtcctgcgcggtaccatccggcgggcgacggcacgcgatacgttaaaaaccccggtggagttgacattgaacgtcttctcccaatcttcatcactcaacgaatggatcagacccgttctgagcacgccggctacattgacaagcatgtctatcggaccgatctcgcgttcaatatcggcgataagctggtcaactgcggcactgtcgcccacatccgcggcaaaacctgaaccctgcagtcctttttgttcaagttcgtcttcaagttcaagcagcccttttcgattttgatcagccgctgcaacaaacaccccgcgtccagcaagcgccagggccacttctttgccgattccttgcgaagccccagtcaccaaagcaaccttgcctttcacttttatcatttcctttcttaaagccggcagcgcccgagtctcaaaaagtcactgccggctaaaattccaattgataatgataatcattatcgtttaaaaatataatataccaataactgctaacggtcaaatcgttttcgattgtttatccgtatcaatgcgcttggtatattatcagttatctattctcatgctttttcaaagctcggggcgccggaagcgccccgctatcaatcaggcttgaaggcaaaccgcagcgctctgctgattaacacaggcagaaccgatatatgaccttcccctttaaattcatggtactccgcgcgaaccccctgactttccaaagcggccaagcggtcggccagcctttttgcattgtcgttcatcccgcttttatgcgtcttttcgagttctccggccccaagcaatacctttacatcgccatcagcttcctgcaacttcgaaacaaagtcatgctctttatcaaaaaatgacggatgccaatggatggacggactgccggcgatatatgtctgaaatagatccggttttgtaaacagggtctgcaggacaaaaagtccgcctagggaatgaccgaaaatcgcctgccttttcacatcaatcgtgaattcctgttcgatctccggctttaactgctgttcgatgaaggacagaaaagctttcgccccgcctggttccggccagtctgctccatcgggcctcatgggcagctcagcgcccgattccggcagagtaaaatcataataccgcccccggtcaaagggagcgtcggtctcgtaaccgatgccgacaataacagccgtccctacaccggttttatcgggacggcgcgactgcatccgcaacgcctccaccatcgttccaaacacggaattggcatcaagcagataaatcacgggatatcctgcgggcggctgttccccaaatggtttcgcaataaaaatccgatatgtgcggctcccatccagtgaacgcatgcaccgctgttctgtccccggtatcgcaaccgggatgcattcagcagcattgacagactgctgaagtttttcttgagccatatcattctcccttcccctctttgatgagctaaaaaacagtctaatgaacagtctttttttgtttgaaaagtaaaaataagaagtacggcacaccgaaaatggcgagaatgatacccgcaggcacctcggacggctggaacagcagctttccggcaaaatcggcgcacaatacgagaaacatcccgatcaatccgcttaacagcaatgagtggcggtgcaggacgccggcgagcctccgcgagatgtgcggagcaatcaggccgacaaatgccatgctccccgaaatagccacacaggcgctgataatgccgacacaagccgtgagcagcaccaccttttcaatattcgcggatacgccgagactcttcaccgtatcttcatgaaagcgaatggtatcgagcaggccggacttcatcagcagaaatggaataagaacaagcagccacggcagtgccgcttgaatatacgtccaattcgccgaccagatgcttccgtttttccaaaccgtggccatttcgtggtcattcggattcatcttcaatgacaggtaaagcgaaacagcgctgaaccctgaattaatcgcgattccaacgagaataatcctgcccgaatccaagttgccggcgtgccaggcaaagataaaaatgaatattgcagccaaaatgcccccgatcaagccgaagaatggcatccccattgcagcgagcaggcttgtcgtttcggtctggccttgaaagatcagcatgtagccgacgatcgccgcccccgcacctgcattaatccccaggattcccgggtcggccagtccgttccttgtcatcgcctggatgacggaaccggcaatgccgaacccaagacccacgagtgccgccgtcacaatccttggaagacgcagctcaaacaggagaatggcgtattgctcattcgggttgatgtgaagcaatgttgataacagctcagccggatgtacggcaaacgatcctactgttatgctgagataacagattgtgagaatcagcacaataaaaacagcatagatgactgcaacctttttaggcacgctgctcccctccttttctcttgatcaaataaaggaagaaaggaacgccgatcaccgaagtaacgacttcaatcggtgtctcaaacggatagttgatcagccggctgagaagatcggccagcgtcaaaaaaacgccgccgagaacgcaggagcacgggatcagccggctgtaatccgatccgacgagaaaacgcgtaatgtgcggcacgaccagtccgacaaaagcaatttttcccgccatggcgacagagcagcctgtcagaacgacgaccgctgccatcgctgtccatttgacggcctgctttttctggccgaggctttcggaaatgtcatcgcccaatgataaagctgtcacttttttgctgagagagagcgccagaatgatgccgatcacaaaaaacggcacggcatacttcagcagctcgggattcaattgatgcagcctcgcgctgtaccagaagctgacgtcctgggaaatttgaaagtaaatcgatatcgccgcagacagactgctgagcagcatgcttgttaccgtcccgattatggcaagttgaaccggcataaaaccgtttggaatcaccgaggcgaggccgaagacaaggccggcgccgacggctgatccgataaacgaatagcccatcatctccagagaggatgaacccggaatcaccaccatcaacagcgtgatcacaaacgctgacccgtcggaaacgcccataatcgacggggaagccaagtaatttcgggtgacaccctgcataagcgcaccggacaccgccagcgccgctccgattaaaagagcgccgacagcgcgcggaagacgggaatgccaaatgatttgatgatctgtgttgcctggatcaaaatgcagcagcgccgaaaaaatcacctcgggctcaagctgttttgcaccgtaacataccgacagaaaaacagacagcagtatggcaaacggagcggcgatcataatgatgcgggtcatttgctttgaatgcatagctcaatgaaccttttctatttgttctgcgccaatttctcagctgcagcctttaaaaattcaaccttgctccatgccgttccgccctgcgcaagcgggtctacagcattgacaaatacacggtcatttttcactgcagaaatgcttttccaaattggatttttctctagatctttcagcgcattcggattgtcggcattctcatcgtctgagaattggacaaacatatagtccggattcatttcactcagtttttctaaagaaaccaactcctgggcttttgccgccttgacttcttttggagctgtgaagccgagctcaccgtataatgtggaattgaagaatacgtcttccggatagataaagatattgccttttctgattctgacaacgagcgcttttgtatcttttgccgttttctcaagctttgttttagcttccttgaggtcggcttcataatcggaaataatctgcttcgctttatcttctttgcctgtcagttcagccagcagctttaaattgtctttccagtttgaagaaacatgggaaacaggaatcgtcgtcgcgatgttatccagttttttcaccactttatcaggaaatttcgttgaagccaggatgacatccggtttcagctcaaggattttctccaggttcggctccattttttcgccgacagcggttgctttgtcagtaatgctcttaaacagatccgggaactttccggagaaggaaatggcaccggctgggtgaacatccagaagcttggcatcttccatcgattccacgcttcccgtaatgacgatttgttcggccgggatcttcaccttgtatgtatgatcgaggtactcgatgctcttctcagctgacgctgtgctcttgccatcgccgccagccttttctttgctgttcccgcatcccgctgcgccaagcgcgagaaggagaataaatagaaatattgatatttttctcatctgactgagaccccctgatttaattgataactattatcaattaaaattataggtaagcctcttcgataacaccatggataatatccggcaattaaaatggattttttccggacagcagccgaaccgcctggcggatgattcgttcatggctgcatgcggaatattcccgccaaggatcagaattcacctgatacacccggtgatgccgcaccgctttcaaatcctgccaagcagccgactgctgaagctccctgtagaatgccagcgtctccggctctttaaaaatgaaaatcataatgatatccggctgataggctgcgattgtttcgatcgacacggcccggtcagtcggttcttccagcgacacagccgattcaaagccaaggtcgccgaaaaatacatcttgaacagaacggttatgcgccagataaatctcgtgtttatgcaagcgcaaaaacaaaaagcttcggcgtccgcagatcggataaagcgcctctttcgcggtctcggtgagacgctggtaagacagcagccatttgtgagcctccgcttcttcgtccaaatgggatgcggtcagcataaaatgcctcctccattgttcctgtgaaggcaaaaagaagacatccgcgatcgactggagctgttcccgttcctcgtgagacacgctgtccatgctgataatgagctccgggtcagccgatgacaatgtccgcaggttttcttcccacggctcgtgaaagcggtatgcgctcagatggaccggaatatctgccgcgtaatgcttatagtaatatgatgtccacttcggatgcagggaagcggcgtaaggaatgaggtgaagcggtatcagctgtccgatcgtgttctggccgtaggcagccagctttctgcgcctttttttcatataaacggtcggggataagcctgtatgcttcttaaacgtcctgctgaaataaaattcatcctgatatccgatttggcttgaaatttccctcagcttgtagctcgcttttgccatcagctgcttcgctttcgtcatccgcgtctcagtgataaactctgtcacgctttgaccgtacagctttttgaacgtttcgctgtagtgcttcgcgctgattccggccatttgcgcgagttgatcaagcgtcaggtgtgcatctgaatgctcctcaatatactcctttgtttttcctatggctgatgcggtgttttcgggatgagtcagtttggccgaatagatatcgtacagaagctgctgcagatctgcttggcatttcagctcctggagcgctgaagatgccggccataaggcggaaagttcctgaagacgggaggccagatttccgacaggatggacattcatcatctgaaggtcggaaaaagcgtcagggtcggtgtctgcttgaagcgtcaggcggcggtcttcatagcagtagggctgcagcctgatgagataaacgctgatttcctctgacgaagctgtgattccgaatgtttcataaggcggaacgatatacagcgtttctttttggaggggtctgcctgatgcttgtatatcgattctgccttcacccttcaaatgaaagatcaaaacgaaagagtctgcgagctgctgttcatccggaagatcgccgggctttcttatatgatcaatttgcaagagacgatagaaataagaagatttcatagaaaaaccgcctttcttaacccagtgatattacaaaaaataaaaatgcccctaaaacaatatggtaaattggttgcggggtgcttgtccggcacaaaataccagtttgcaaggtgcatttcacatcacttatagctgatatgcttcttacgatttactataacacagtcacttttattgtggaataatgtatccaaagagaccatctgcccaatccgcactttaaaatataataaaaaatcaatacttatcatttcaatatccttttacctagtgtataactatagagaaattactatatttacagggaaggcgtgacttcttattttggaaatgacagacagcatgaaaaaatcgcttgatgcgattgcaaaatggggaaaaataaccggagtttttatgattatcgccggaggcatctatgcctttttcggaatttctttgcttatcatcggagccgctccaggtgtgctgatgattttttcaggaatctatcttcttaaatcggcaaacgccgctcagaaaatgagtcatgacatgccgcaagaaccgcatgaagccttgcttgataactatgtgaagtttatgaaatggcaatttttctacttactatcgaatattgtgatcttcattttatgcataatcgtttttttcttcctgatctttttaggtgttctagccgattcttacagcgggtatgatccttattattacgaatgatgatcaaaagcctgtctcggatcaatttccgagacaggcttttattattgagcttctccgacaacagtgaaacgctcattgacatgctcgcctttttcagcctcgtccaccactgcaatggcgtagtctgcatagctgatgtagctttctccggcggtgtttacgattaagttttcctgacctttttgataagaacctgttcgctttccttccggattaaaaaatgccgccgggctgatgaacgtccatttcagtccatctgtttctttcaaatcctgaaggttctgcccctgatttttagccgtcggcaagtattctttaggaaactcaggcgtatcgtacagctgggttgttttttcctcatcgacataaaggctgcctgcaccgcctacgacgattaatcttgtttcaggaacctgcttaaacagttcaatcagctttcttccagcttcaacatggagatgctcctgccctggggccgcgccgaatgcattgacgacaacatccagtcctttgatgtctgccgctgtcaggttgaaaatgtctttttcaatgacagctgcatcgctgttcgccatttttgacgcacttctgacaattgccgtcacttcgtgtcctctttctgatgcttcttttaaaatcatgctgcccgctttaccgcttgcaccgataataccgattttcataatcgcttcctccaataatttgattatttgtaacaagatttgttacatgttgatgatgaaacatcatctcttgtttaaaagagatgagttaagacgtctttaagagacttgctggccaattcgttctccatcgcctgctgaacgctgtgaaacgtttgatcaagcgttgtttgaatttgtcttccaaccggacagtttggattcggcttgtcatgaatcgcaaataattcctcatgcggctgaaccgcgcggtaaatatcaagcagagatatatcttcgggatctcttttcaggcttgccccggccactcccggccgcgacgtcagaataccggcttttttgagctggctgatcatgcgcctgattacaaccgggttcgtattaacgctcccggcgatcatttccgaagattcccgcgggtttgcggcgattaaagacaatatatgaatggccactgaaagacgggtgttcaccatatgttttcaccaccgatgtaattattatagttacaggtcacgtttttgtcaactcttatcatatccttaatgatcgcaagaataaataaaaattttttcaaaccctcacgtctcacttcggaactttttcacagtctctttcgtatctactgatgaaaggagtgtttttcaatgaaggagataacagaaggaaaagcagctttggatagccggcttgagccgaatgaagagatcagatctattattctttgcgcttataacgcgagactgtctgcacgttacactccgtacagaggcgtgcttgccgccactgacaggcggttcatgttttattcctccctgtttggctccccttttcatcttgacatccgctatgatgccgtcacctcgtttcgccgcgaaaaagggctggtaacaagaggcgatcatctcgtcgtgatgaacaacggggatcgggaagcatttcaatattttagcggctgtgatcctttagagacattcgtcgaagccgttcgaaagctaaagaaactgcctgaagacatcattcattctgaaaaacgccggctccgggatgtgcccgcagccggctgctcagttattaatatcgtacttctctccatacctcagcactttataaattgccattccatcagaaagatgattttcggaatacctcacgggaatcaaagcaaaaaatacataataggttgaaaaataaacaaattggtagaaaaaaatattttcgggtatgatgtctttgataatcagcagattgataataaatatagacattaagttaaacagcgatccgccggcataaatcatcgcattcgtgaaacggttatcgtattttaaatccccgtatttgcagaaggaatccatgaagtagacacttctgatttgaacagggccgattttcagcaattttttgcccatcccgatttcaagcgaagatttcccgccgaacaacaccgccatggcgctgtggcccaagacatgaagcaccgacacggcaggaaaaacgatcaagaacgaccagaggaatttgacaatatcctgcagtccgaacattcaatcatcctttctgtttcaggcaatgttttttaagaaaatttccgcttttcccccgtatcaaacctgtcaatatgcaaaacaagcagacctcagcatgaaaaaaaccgcccatctactctatggacggccttctcaggagcagtcaattatcctccaatataggacatttcaacctttttccgcggaaccgcttttgcaagagcgcggtcgagagaatattggtcatcgcgattccgccagacggtgccgatcgcctccgccagctcctgatcggtctgcccgcttctgatcaaggttcttaaatcaaacccgcttgatgcgaaaagacatgtgaaaagctcgcctttcgccgatagtcttgctctgttgcatgtggtgcaaaaagcatcggatacagaagagataaaaccgatttctcctgagccgtccaggtatcggtatcgttttgcgacttctccttcgtagttcgggtcgatcggttcaatcggcatatcttcattgatgatccggatgatatccgctttggccaccactgactgacggttccattcatttgtgttcccgacatccataaactcaataaaccgcaaaatatggcctttttctttgaaatagcgggccatcggcaaaatatccttctcattgacccctttctggacgaccatgttgatcttgacgccgagtccggcctttttcgccgcttcaattccggccagcaccttgctgacggaaacgcctcttccgttgatcgatttgaaacgctcatcatccagggaatccaggctgaccgttacacgtttcagccccgcttttttcagcttgtcagcgtaaaccggcagcaaaacgccgttcgttgtcatcgcaatatcgcgaatccctttgatccctgcaagcttcccgactaattccggcatatcttttctcatcagcggctctccgccggtgagacggattttttctaccccgaactgatgaacaaacagcttggccaatcgttcaagctcttcaaaggacaacagttcgccttttggcaaaaacggataatcctgcccaaagatttctgcaggcatgcaatacgtacatcttaagttgcagcggtcggtgacagaaattcttaaatcccgaagcggccggcttttctgatccaaaacttgttcactgttggtgttcacgcctgttgcctccttttatgaaaactgaattcgctcgtgatgcgtgtatacattgaatgaccggtttctcgcaaaaccaatcgtcatgatattcagctcctctgccatctgaatggccagctcggtcggcgccgacttggaaatgaccgcggaaaccccgattttcgcggctttaagcagcacttccgaagaaattctgccgctgaatacgatcagcttatcgcgcacaggaacctgatgaagcaaacaatatccgtacaatttatcaagcgcattatgccttccgatatcagatctgactgcaatcagcttgtctgtgctgcacaaagcggcattatgaacgccccccgtatggtgaaaaagcttgctgcttttctgcatgtcgcgcatcagcttcaaacagttctctggcgtaatggtcacgccgtcaatcgctgtttttgcggttttgacgtcctgctggaaataaaaatgcctcccttttccgcagcaggagccgatcacccgctttgtgtaatccttcagctgcagcttttttgtgctgacaaggtcgacatatgcgaacccgaggctttcatctattgtaaaccttttaatctcatttttaaatcggatcaccccttcagatgcgagaaatccgatcaccagttcttccaggctgtccggcgagcaaacaagcgtgacaaattcctcgccgttcaccatgacagtcagggggaattccgtcgccatctgatcttcttgctgcaccagctctccattatcataacggaaaatttttcggcttgttgtgatgtttttccccatgaataactccgcccctttgtttcttactatatctattactatactcgtctatcatgccgtttcacaaccgtcaggtcaaatttggaagcttcatcttgttgatagcttgaaaacatgatattattttttaaaagttcaaaaaatattcacttttcaaacagactgcccttcttcgcagcaacttcggaaaccgctttcaaacaatcgctccccagcagccttctgtctttattacagcctttttccacagggggttatcacatgaaaaaagcgaaaaacaggtggctcattgctttatgtgctgtaggcattcatttgtcaatcgggtcggtatacgcatggagcgtctttacaaacccgctcgctgaaaccttcggctggagcctcagccagatcagtctgacgttcagcatcgctattttatttctcgggctttcagccgcatttttgggacacttcgtcgaaaaacacggccccaaaaaagcaggcatgctcgccgcacttttcttcggagctggcgtgacgttttccggcttcgccgttcagatcggctcccttcccctgctttatttgttttatggagtcttcggagggatcggactcggcgtcggctatattacacccgtatcttcgcttgttaaatggtttcctgaccgccgcggcttggccacagggcttgccattatgggcttcggatttgcggctttgatcagcagcccgatcatgcaaaagctgatctcagcggtcggtatagccaacaccttttttattctcggcatctgctactttcttgtgatgatgctctcttcgctttacctcgccccgcctgaagaaggctggcagcctgaaggattttcaaccggaaaaagcggaagagcacaaagcgctgatatttcccagctgacggcaaatgaagcgattaaaacgaaacgcttttattatttatggctgatgctttttattaatgttacgtgcggaatcgccatcatatcaatcgcttcaccgctggcgcaggaaagtgcgggcatgtccgccgccgcggccgccgcgctcgtcggcgttttgggcgcatttaacggtttagggcgcatcggctgggcctctgtatctgattacatcggacggccgaatacgtataccgtctttttcgccatacagctgatcgccttcccgcttttgccgttcatttccgacaaggccgccttctctgttttgatggcattgatctatacgtgctatggcggagggtttgccgcaattccggcttatatcggggatttgttcggaacaaagcagctcggtgcgatccacggatacattttaacggcttgggcggcggcagggcttgcaggcccgatgttctcttcttgggtacgcgatgcaacagggagctacagccatagcctgacggtgtttgcggcactgttcgccatcgccctgttcatttcgatattcattagaacggacattaaacagttgcggaaaaaagcggcggttcatgtctcaaactcgctaaaaggatgatctgcagtatccgctggaaaggagagaagggaatgggaaaaacaaagcatcaaggtccgatgaagctgaataaaaagcccgcgccaaaactgtgggcgtcttgggcgccgatgggactcggaaaggtaaagccgaagcatatcagagatacgatgaaaacagcgtgggacaataaagacaaccttccgtacgcctacagaattttgacgcaaggcgtgtgcgacggctgtgcgctcggtgtgtccggactccgcgatcagacgctcacaggccctcatttatgcacgacgcggctgaacgtcctgcgcttaaatacaatgcctgcgatcgaggacaaatggctgtccgccgacatcgaacagctgcgaaagctggacagcaccgagctgagaaagcttggacgcatcccctatccgctgtcgagaaaaaatggtgaacgatcgttctcgagaatttcgtgggatgaagcgctcagccgaatcgcggacaaaatcaaatcgattgataaacggcagctcgccttttatttaacagccagaggcataacgaatgaggtgtactatacggccgcaaaagcggcgcggtttatcggcacaaacaacattgacaacgcctcgcggatctgccactcgccaagcaaaacggctttaaaaaggtcccttggcatcggcgcctcaagctgcagctaccgagactggatcggaacggatgtcctcgtcttctgggggtctgtcgctgccaataatcagccggtgtcaacaaaatacatgtatgccgccaaaaaagcgggaacgaaaatcattatgatcaatccgtaccgggagccatcgatggagaaatactggattccatcgatacctgagagcgcccttttcggcaccaaaatcaccgatgatgtttaccaagtcaatatcggcggcgacattgcctttatgaacggggtgatgaagcactggtttgaaatggagcgggaggcaccaggttcaagcattgaccgcgcctttatcgatgcacacacaaacgggttcactgagcttaaacagcacatcgaaaaacaaaattggaagacgcttgaagagtcatccggcatatcaaaagagagaatgaaagaattcgccgtcttgctggcccgggcgaaaaccggcgttttcatttggagcatggggcttacacagcaccgttttgcgaccgacaacatttcacaggtggcaaatctcgcccttttacaaggattcatcggcagaaagcattgcggcgttatgccgatcagagggcacagcggtgtgcagggctctggagaaatgggtgccgatcctttcgtcctcccaggcggtgattttgacgaggaaaatgccgcacggatcgagaaggtttggggcttccgcttaccgacttggcaaggcgatacgatcggccagacgatcgaaaacatgctgctgccgagcggaagcgaaagaaaagtaaaagtgttttatacaagcggaggaaactttttggagacgatgccgaaccctgattttatcaaaaaagcattgcaggaagttgaagtgagagtccatcaggacatcatcttcaatacctctaccctggtcgatgccaaagaggaagtcatcattctccctgcgatgacaaggtatgaacagcctggcggaggaacctcgaccagtacggaacggatggtatacttcagccccgaaattaaaggaccgcgcatcggagaagcccgttcagaatgggaaatttatgtagatctcgccaaacgggtccggcccgaagacaaagaactgatccattttgacggcgctgcggaaatccgtgaagaaatcgctgctgccaaccggaattatgacgggattcagcatttaaaaaaacgcggagatgtctttcaatggggcggcgcctggctttgtgaaggcggtgtttgtccgacggcagacggcaggggcaacctgatccctgtcgatcttcctgaaaacagacaaacggaaggacgctttctcgttacgacaaggcgcggaaaacagttcaactcgatgatttatagtgaaaaagatcctttcaacgctgcagatcgccgggatgtcatgatcaatccaaaagatgccgaggagctttatattcaagatggagaagcgatcgttctattcaaccgctacggaactttccaagggcgggcaaaatatgccggcgtacaacgcggaaacacggcagtctactggccggaaggaaatgtgctgatccctaaaggcgtatacgaaaaccatgcccgtattccggaatacaacacggcggtcatgattgaaaaggcggagattttccattcgagaaaagatccgcgctatgcagaaaaacgaatcgaagaactcgaaatgtcgaccgattagcttaacagtcgggacggctctgctgccgtcccgttctcgtatggagttactgagacagttttacgccttcttctttccatacctttttaaaatcagaagctgagtcggcttcaatcaattttccgccgccggcgtcagctacttttttaagctttgctttttctttcacggtttttacatccagcccaacaatgttgacgatcgttttaatgttggatttgcgcagatcttttgctgcctgaacaggatcccctccgcatgtttcttcaccgtctgtcacgatgtagacataattcttcccatctttatcggcaagatcatcttttacatcataaagagattttgcaatcggagaccagcctgtaggcttgattccgcttaaagcgttttcgaatgaattgaaagaaaacggctgcagatcatagacggtttcagtcgtaccgcaggatacttcttttcctgagtttttattgttgcctttatgtccgaaaacattcagcatgacattcgcatcgcttgaaagcaggtcggcaaaatcggttacggattctttggcaatatcaaattttctttctccttcaaccttttgtgccatgctgccgcttgcgtcaagcacaactgcaacattgacatcttttttgctgttgtccgcatttccgttttcagccgcaaaagctgctgccggcgccaatgacaaaagcatggtgaacgttgtcaacagagcaaacctctttttcaactttctcactttcctttccgcatttgttttttcggaccgatcttccgcatgagatcaagtccaccaacatcgtaaaagaaggcttgatagaaataaataggccggatctccttttcaaattcacaaattcttcataatccttacgataatcgatcgacgcattcacttaagacctatcaaaaaagtctgctaaaaggccgatttcatcccaataaagctaccgttacgacaaataacccctccaaaggacgcagcagggttcaacgctctgacacaataacttaatatttgtaaagtatttttcttgacttttgacaatcttttcatcacaaaaggaaagctgcggaaacatgtccacagcttttttccagtttatttagaaagctcaattgcttcctgagtaaaaattcttttgatgtcatttttagtttttgcctggaaatattcaccgccgccagctgctgcgatactggtcaattgtccgtggaagtctccttcataatcaaagccgatcacgttgacaaccgcattggatttgcgcagttctgttgcgacttttaccggattgcctccgcatgtttcctcaccgtctgtcagcagatagacgacgtttttcccgttgttgtccagctggtcaagcgcgttttttgcatcttgcagcgcgtttgcgattggtgtccatccggtcggtccgatgccgtttaaggaattgcggaagctttgctcgtcatacgtttggaagccgtacacccctctgattgcattgcaggactgcacttttccggaatttttattgtttccctctgaaccgaaaactctcatgagcacgtttgcattttcaagcttggaaccaaagctgaacacttcatttttggcaagctcgtattttgagaccccgccgatctttttagccatgctgccgcttgcatcaagcataatcgcaacgttgggcgcatcttcggcaactgttacctcctgttttttctcagctgcaaaagcaggcgaaccaagactgagaaccatagcggtcaaaatgcccaatgtcatcttcttcttcatttctccctttcccctttctgaaataaagtcgttaacacattattatcgtagaagaacaccagggagaaataaatagggcatgtctccttttcctcgttattcaattcatcatacaacaagtatataaaatagactttataacctgtgacccctattgttgatacggcgtttgcggccttttgacgctgttcagcaagccctccggcacatgtttttagaaatatttgtataataatttagcgtgcatcaaattcatgggaatgccaaatttcgatgatattcaaaaagacgccgccaagaggcagacgtcttttgttttattttttcgccatgtatttatttaaaaattcatctgcattggatacggctgttcctttgtaataatacttgacgatgtcttctgctttcttgccgtctttcgccatataatgcgcaccgtattggctcattcccactccatgtccaaatccccttgtcgtgactgtaatctgattcccgtcgcgtttccaatcaaagtctgccgatttgaggccgagcttttcgcgaatatctcttccctcaagcttctttccattgatgacggcagtcgctacgcgttttcccggcgttctttcggtgatctctccgatgctgtttgaaccgggcagcttgacaccgagcttttgttcaaattcagcgacagtaaacgttttatggttcaggaatttcggcgattttgtgtcccaggagcttttcacgctttgcaggtacggaatatcacttgtccaataagctccggcattctcggtgtacccgttgctcgtcgagaagaacgaagcatcaataggcttatgctcataggttaaaattttgccttgcgtactggctacagcttcggtcacctttttgattttccaatcgtaatccttcttccacagcctgcggagctcctctttgtttttatacacctggaacatctgcgtatgatcgaccagcgagcctttcggcgactgtacagcttgctctgacaccatttgcctcacaatgtatgtgcgggctgccagcgcttgtgcttttaaagcttcgatatcaaaatctgccggcatttccgaggcaacgacaccgatgacatactcttcaagcggaatgtcttcaactttccggtcagccgttctgtagaccggaattgaaacgggagactcttttaaggtgactttctttttttcctcgtgttgctgagcgtgtttctctgttttaattgcccccggtcccccgtgaaaagggaggacaagcagtgttggtatgagtaaaatcagcgtgcagattcctgctagtacaattatgagctgtttcaaatcagtgcccccatttctgttttgtctctttcattttatgggcggggacaagctaatatgactgtactttttcaactgctgctacgtattttaaaagcaattcttgtgcataatgatagatatgggaggcatactgatatagaatacttgaaacgcaaaaatcagtatgccgtatgacatactgatttcaggttgatttatgcatttaaatcggatacaacttctttattttcaatatgaactgcttcttcatcgttaacgcgctcaatatcagcgccgagaccggcaagtttttggtggaagttgacatatccacggtctaaatgttttaattcggttacgcgtgtatgaccgtcagcaacaaggccagcaaggataagagctgcgccggcgcgaagatccgttgcggcaacttcagcgccttgaagctgcacaggaccattaatgatgacagaacggccttcgattttaatatctccgttcatacggcggaattcttccgcgtgcatgaagcggttctcaaagacggtttctgtgatcatgctggttccatttgcgcgcatcaaaagagccatcatctgtgactgcatatcagtcgggaaacctggatgtggcattgtttttaaatcaataggcttcaattcagaaggaccgatgatccgaagaccgtctccttcttccaagatttgaacgcccatttcttccattttcgcaattaaagatgttaagtgctcaggaaccgctccctttaccagtacgttcccttcggtaatcgccgcggcaaccatgaacgttcccgcctctatccggtcaggaataatcgtatgttttgccccatgaagcgccttaacgccttcaattttaatggtgcctgtaccggcaccccgaattttaccgcccattgcattgatatagttagccagatcaacgatttcaggctctttagcagcattttcgagagttgtcgtgccctcagccaaagctgcagccataatcaggttttcagttgctccgacactagggaaatcaaggtaaattttcgctccttgaaggcggccttctacagtcgcttcaataaagccgtttccgaccttaatttttgcccccattgcttcaaagcctttcagatgctgatcgatcggtcttgaaccgattgcacatcctccaggcaaagccactctcgaatggcctgtgcgagcaagaagcggacccatcaccaatacggatgcgcgcattttacgaacatattcgaacggagcttccgtagacaaagtgcgagatgcatcaaccgttactgtattattttcaaaatgtacacttgcgcctaaatgacgtaacacttcgttaatcgtatatacatcggagagcgtaggcacatcacatattacgcttttttcttcactggctaataaagatgcagcgataactggtaaaacggcattttttgctccttcaactttgactgtgccgtttaactttcgaccgccgcggacgatgattttttccaaggtattcccctccgcgtcccaatttctctatattaatattcagtcgtgacgattggtgtgccaaccgtgacggtaagtttttcgcccattcccgcatttctaagcgagacttgcaaattcatacggtgtttttctgtcttgatggattctttccactcgttagtgtaagcagaaatagaaacgaaatttggttcaattaaatcttcaactgactttgcatcaaattcatgtactagctcatttgcttttttttgcaaaacaacattcatcataccatttaaatggccctttagacaagtaaaaattgcggtcttttctcgcattatgtcgaatgcatcccgttcaaactgcttatatgtagcattccagttttcccgtggtcccgcgcctttttgctcatacaataaatacgaaacaagtctctggtttttgtgggtggataccaaatgtattttggaattgatatgattttttttgtcctgaaaaacacctgtcgctttaactgtatcgtcgtcttcccgcgttaaagtccattcatattgtcgatgctgtttcttgaaatgtttcagttttgcaaaaaaatctttttcacttagggtaagctgtttttttgtatgcatggtccactcttcaagctcgacatcatggcggctcaaaccttccgccagctgttcaagcggcgtattgcccgctgcttcaagcgattgaaagacatgaacaattaaaaataaaaccacactaaaaataagggcattaaccgtttgttttgtcttcattctgcatcatcctctcctactctccattgttgacggatcgcaggaaaagcatacgtggaaaaacaaggtctccggtgattttgcagaacgcggtgttacccatattcgtccattcccataaattctttttcttttactcaatcatgaaaataaattttgaagctgtctggaataataaagatagtccaagaaaaaattgctgacggtggagccgacggcgattgtaatgatgatcattaacaccctcgcctgaatgacttttcctttcctgataagcggatcaatattgaccgccagaagagcccaccaagtcaatgcaataaaaaaaagatgaacgatgatactgacagcagcctgttgtccgatctcttccattattgatgacgcctccttacgttcagccggtttggtgcttccggccagcctcgtctcttctgccgtaggataaaggaatgttgctggtcatttcaagtcattttaacagttttgatgttgcatgttaagtcgttcatgatagaactttttcccatagatggagtgatcctctgttgcctgaggggcttgtgttttaggagcttacttgaatgtcttacgtcctctttttggtggaagagaacatagcttactattttgtattatagatagattcatactaaaaaggcgaacaatttgtgaacatttttcaacattttcaattctgtttgatcttgaatataaaagacccttcccatccttaaatatgggaaggatccttatctctatctcgcaacatccaaccggttaatcgcgcgttttaaagcaagctctgcccgaataatgtcaacatctggagtttgcttttgcaaacgttcctcggcacgccgttttgcggccaaggcgcgttctttgtcaatttgttcagatgtttccgccgtctgggccagaatggtgacatggtcagggcggacttccactatccccccgctgacggcaaccagctcagtttgaccgtcttttttcagacggactgcagcaatttttagcggagcaaccgtcggaatatggccgggtaaaataccaagctcaccgctctctgctctaacgcttaccatttctatatccgcatcgtatactgggccgtcgggagtaacgatattgacttttaaggtcttcatgcttttaccctcctaggaccagattatacttctacacccatttctttcgctttttcgacaacttcttcgattcggccgacaaggcggaaagcgtcctcaggaaggtgatcatacttaccttcaaggatttctttgaagccttttaccgtttctttgacaggtacgtaagaacctttttgtcctgtaaactgttcagctacgtggaagttttgcgacaggaagaattgtacgcggcgcgcacggctgacgacaagcttatcttcgtctgacaactcatccattccgagcatcgcgatgatatcctgaagctctttgtagcgctgcaggatctgctgaacgctgcgcgccacttcatagtgctcttctccgacgatttcaggcgaaagcgcacgggaagtggatgcaagcggatcgaccgcaggataaatccccatttccgacagcttacgctcaaggttcgtcgtcgcatccaagtgagcgaacgtcgtagccggcgccgggtcagtatagtcatcggcaggaacgtagatcgcctgaatcgatgttacagatccgacatttgttgatgtgatccgttcctgaagctgacccatttcggtcgcaagcgtcggctgataaccaaccgctgacggcatgcgtccaagaagtgcagatacttcagatcctgcttgagtgaatcggaagatgttatcgataaagaacaatacgtcctggccttctttatcacggaaatgctcggccattgtaagtccggtcaaggcaacgcgcatccgcgcaccaggcggctcgttcatctgaccgaagaccattgccgttttgccgataacgccggaatctttcatttcatagtaaaggtcgtttccttcacgcgtacgctcgccgacacctgcgaatacagagataccgccgtgctcttgagcgatgttgttgatcagctcctgaatcaaaacggtttttccaactcccgctcctccgaaaagaccgatctttccgcctttgatatatggagcgagcaagtcgacgactttaatacccgtctctaagatttcaacctctgttgatagctgatcaaattttggagcttctctgtgaatcggatctttggcagcatcagccggaagcggctcatccaaatcgatattttccccgagtacattaaatacgcggccgagtgttacgtttccgaccggaacggagatcggctctcccaggtcgatggcttccattccgcgtgtaacaccgtcagttgaagccattgcaattgtacgaactgaatcatcacccaagtgaagcgctacttcaagggtaagatcgatgtccacttcattctcgttctgcgctttatgtgtaactttaatcgcattatatatttcaggcaagtgaccgtcttcaaaacgaacatctacgaccggccctaatacctggctaacgcgtccttttttcatctctatccctcctgacaaactttttctattctaaagcagctgcaccgccgacaatttccgtaatttcctgcgtgatggatgcctgacgggcacggttgtatgacagttcaagatcggcgataatctcttttgcattgtctgtcgcatttctcatcgccgtcattctcgcagcatgttcgctcgctttgctgtcaagaagcgcgccaaaaatcaagctttccgcatactggggaaggagcacttccagaatctcttcttcatccggttcaaactcaaatgacgtctttttcttgttaggcgcaatatctgtcaaaggcagcagctttttctccgttacctcctgggaaatcgcgctgacaaaatggttgtagaacagatacagttcatcaaaggtttcgtcaatatacatttgcaccgtgctgttcgccaaatctttgatttctgaaaacgtcacttcgtccctgatccccgtcatttcagaaatgacaggaattccgcgctttttaaagaaatcgcgccccattcttccgaccgcgatgaccgcatactcatctttggattgatggcgttcctgaatcctttgatacgctttgcggagtacgtttgcattgaacgcccccgccaagccgcggtcagctgtgatgacaaggtacccggtccgcttcactgggcggcttgacatcatcgggtgtttgccggtgtatccgactgcgatatcggcaacgacttcctgcattttttccatataaggaacaaacgatttcgctttgttttcagcccggttcagctttgaagcagaaaccatttcctgggctttcgtaatttgactcatttttttatttgaagcaatcctggatttaatatcccgtaatgaggccaaaaggtttcaccacctttttgttttcaaattccttcgcattgacgtgaaaaagagagaaaaagatagcctttttctcactttttattgtttagttgcttggcgcgaacgtacgtttaaagccttcgattgcacccttcatgtcctcatcggcaggaaggtttcctgtctgggcgattgaatcgagcagatctttatgattttggtcaagatacataaagagctcttcttcaaaacgtttgatatcctcaacaggcacatcatcaaggaagcctcttgtcagagcatagagaatcgcaacctgcttttcaacgcgaagcggtttgtgcagatcctgtttaagtacttcaaccgtacgggcaccgcgattcagcttcgcctgtgtcgctttatccaaatctgagccgaattgtgcgaatgcttcaagctcacggtatgatgccaaatcaaggcgcagcgtaccggcaactttcttcatcgctttgatttgcgcggacccgccgacacgggatacagacaatcccgggttgaccgcaggacgcacgccagagaagaacaaatcagactgcaggaagatttgtccgtcagtgatcgaaatgacgtttgtcggaatgtacgccgaaatgtcgcctgcttgcgtttcaacgaacggaagtgccgttaaagatcctccgcctttggcgtcgctcaattttgcagcgcgttcaagcaaacgggagtgaagatagaatacatccccagggaatgcttcacgaccaggaggacggcgaagaagcaaggacagttcacgatatgcggtagcctgttttgaaaggtcgtcatacacaaccagcacgtgcttgccgttgtacatgaattcctctcccatcgcaacccctgcatacggcgcgaggtacaatagaggggcaggctgtgaagcggaagccgtcacaacgatcgtatagtcaagggcgccgtgtttgcgaagcgtttcgacaacgccgcggactgtcgattctttctgaccgatcgcgacatagatacaaatcatatcctggtctttctgattcagaattgtatcgatcgcaatcgacgttttacccgtttgacggtcaccgataatcagctcacgctggccgcggccgatcggaattaaagcatcgattgatttgatccccgtttgaagcggctcgtgtacggatttacgatccataactccaggagccgggctttcgatcggacgggttttgcttgtgagaaccgggcccattccgtcaacaggctggccgagcgggttgacaacgcggccgagcagctcttcgccgacagggacttccatgatccggccggttcttttaacttcgtcaccttcacggatgtctttgtaaggtcccaaaataacgatacctacatttgattcttcaaggttctgagctaagcccagcacaccgtttgaaaattcgacaagctcacctgccatacagttatcaaggccgtgtacgcgtgcgataccgtcaccgacctgaattaccgtacctacgtcgtgaacttctatttcagactgatagttttcaatttgctgttttatgagagtgctaatttcttcagctttgatgctcacttaggtttcaccccttctttcgattttcgcctgctaattgacgttctatccggtcaagctttcctcttacactgccgtcataaatgcggttcccgatgcggattttcacaccgccgatcagatccggattcacttcgtttctgacgcgcagtgaagcggcgcctgcttcttttgcaaacacttgagaaaaagaggaaatttcctcttcgctgagcggttttacagagtatacgatcgcatcttccgtcccgcggaaccggttcgccattttgacatattcgtccgcgagatccgggacgattgacgtgcggctgcggtcaacgagaagataaagcgtatgtaagactgcagtcgaaacggatccgaacgagtcttttaaaatctgctttttcttttcagcgggcactttaggatgacccagaacggcattgaggtctttatgctcaataaatatcttcttaacgacggtcagctcttcttctatttcattgaccagcttggattcaagggcaatgtcaaacagagcggctgcgtagcgtttggagacagctgattggctcatcggctttctcctacttctttaagatagtcttggatcaatttttcctgggcttgttcgtccagctctttttcgattactttagaagcgatcatcacagacaatgatgcaacctgctcgcgcagcgcggtgacagcctggtctctttctttgacgatctcgcttctggctgattctttcatgcgttctgcttcctggcgcgcagccttgatgatttcatccttttgctgttcacccagttttttcgcgttttcaatcagagactgggattcttcgcgtgcttctttcaaaagcgcctgctgctcctcaatgagcttcttcgcttcttcattctttttctcggcagaggagatctctccggtaatgtagtcttcacgctctttcattatatttaatagcggccctaaagcgtatttcttcaagagcgctaacaaaatcagcatggcaacaagctggaacagcattgttccggcgttaaaccctactcctgcacccataacctgtggtaaaaaagacatcgaatacggcaactcccttcttgcagattatctctccgaggccatcgaaaaatgttctccctcttttttcaggagggtgattcttccggccgttatgacagttcaagcaaccataaagcaatggcgaaggcctcttgcagtgatcttcgccatttaccagttttatattcgcttttagctgaagaacgctaagaacgcgataacaacagcgataatcggaagggcctcaaccaatgctaccccgatgaacataagggttctcaattcttttccagcctcaggctgacgagcgattccttctactgtacgcgatacgataagtccgttaccaatacctgcaccaagtgcacctaatccaattgcgattgcagctgctattaaactcatgaaaaagttcctcctttaaattgttatccttagcggatatgtcttatttttagtgttcatgacttactttgtgagacatgtaaaccattgttaacatcgtgaagatgaatgcctggattgtacctacgaacaagctgaacgcctgccatacgatcatcggcacaaccgctccaatggttccaaccagccccaggaaaatgctttgagaatagaagttggttgccagtccggcaagaaggccgagcagaatttcgccggcgaaaatattaccgtaaagacgcaatcccaatgttaatgtgttcgcaaattcttcaatgattttgagcggcactaaatatggaattggtctgaagaaatctttggtatactcccccaaccctttccttttcactccgtagtaatgagtgaggcctactaccatgacggcgagggttaaagtaaccgccggatcggccgtaggggatttccaccataattcgtggcctactgttatggaaaacggaaggccgagcatgttggcaacaaatatgtacatcagcagggttatgccaagggcgagaaagtctctgccgactttaagatccattgtgctgccgataatattgcgaacaaagtcgacaatccactccataaagttctgagctttcgtcggccggatcgcgagtgttcttgtggtcagcaccgctatcagaaagacgatgatgcttgtcacagtaatcattagaatgctagttaaatcaaaattgaggcctaagaaattaacaattctagattcgtgattcaaagggttttcacctctcttccattgatgaacgttttagctggataaaggaatctatcataatgacaggataaattgtcatcaaccccacaatgacgcctgccaaatgaatatattcagggtatttataagcaatggccgccgcgataatggcgttgcacaatctggaagcagtcccgagagaacggatcattttgccctttgccactgctttatcgaaggcctgcatccttttggccagcagccagagattgaaatagctgaaaacagtgccggtaatcaggcctaaaaaaattgcctgatatggcagaaatccatagcctaacacgcagactgctaaaatatataggacatatttttgttgcctacggaatgaaagactcgcatcggtcatcaaatacgctcctgatgtgaaaattttaaatctatcttacgattacggtaaactaggcggtctgaccattttacagaacgtagtgttctgctcaagacttcacacagtccgaaaattcttgggccggtgatctgtctgtcgcctgcaaatatggggttttcaaaggattttaacagaggactggtcattatgataaccgctatgaaaaccttatcataatagcctattttagcatacaatagcccccctgaggtgtcaatctgtttaaagttaaaaaactattcataatcacagcagctctcacaaaatgttcacaaattcgcctcatttaagacgcacacatgtttaattatggtataaaacacaaaaaaagaaaaccctttttcaggattttcttacattatttcgttccgaacatgcggtctccggcgtcgcccaatccgggaacgatatatcctttttcatttagtttttcatccagagcggcaatgtaaatgtcaacgtcaggatgatgcttctgcacttcgtctacaccttccggggcagcgatcagacacataaagcggatattttttgcgccgcgttttttcaagctgttcagcgcctctaccgccgaacctccggttgccagcatcggatcgacgacgatgaattcgcgttcttcaacatcggatggaagcttgacataatattcaacaggcttcaatgtttcaggatcacggtaaagcccgacatgtccgacttttgcagcaggaatcagcttcaaaattccgtctaccattccaagccctgctctcagaatcggaacaaccccgagtttttttccggcgatgacgtttgactttgccatttgcacaggagtctctacattcacttcctccagcggcaggtctcgcgtaatctcaaatgccatcagcgttgcaacctcatcaacaagctctctgaattctttcgttccggtctttacgtcccggatgtatgtaagcttatgctgtataagagggtgatcaaacacatatacctttcccatatccgtcttcagctccttttttcacacacttctattgattctacataaaaaaacagcttgtttcaacaaaaatcaggagacaattttatgaaaaaagccgccccttttcggagcggcgcaaatatcttagtaatcaagcccggtatacaacgggaatctgtttgtcagcgcttctacacgctgttttgcttcttcaagtttcgcttcgtcttcatggtttttaagggcaagcgcaatgatcgctcccacttcttcgatcgcttccagatcaaagccgcggctcgtcacagctgctgtaccgacgcggattccgctcgtaacgaaaggtttttcaggatcataaggaatcgcgtttttgttgacggtgatgccgacttcatcaagtacattttcagccacttttccggtaatgccgagagagcgcaggtcgaccagcacaagatggttatccgttccgccggatacgagctcgataccctcttttttcaatgtttcagccaagcgcttcgcattgttgatgacattttgggcatatgttttgaattcgtcctttaaagcttcgccaaaggaaacagcctttgcagcgatcacgtgcattaacggtccgccttgaattccagggaagatcgacttgtcaatttgtttcgcaaactcttcacggcaaagaatcatgccgccgcgcggtccgcgaagcgttttatgagttgtcgtcgtcacaaagtcagcgtaaggaacaggattcgggtgaagacctgctgctacaagtccggcgatatgcgccatgtccaccatcacataggctccgacttcatcagcgatttcgcggaactttttaaaatcgatggtgcgcggatatgcgcttgctccggccacgatcagcttaggcttatgtttgagcgccttttcacggacatcttcgtaatcaatatactgcgtctctttatcaacgccgtattcaacgaagttgtactgaacaccgctgaagttgacagggctgccgtgcgttaaatgtccgccgtgagcaaggttcattcccaacacagtgtcaccgtgctccaaaatcgtgaagtataccgccatgttcgcttgtgcgccggaatgcggctgaacgttgacgtgctcggcgccgaaaatctgcttggcgcggtcgcgcgcgatatcctctgccacgtctacatgctcacaaccgccgtagtagcgtttaccaggatatccttccgcatatttattagttaaaaccgagccttgagcttccataaccgcttcgcttacaaagttttcagaagcgatcagctcaatcttcgactgttgacgtttccgctcatcttgaatggcgctaaaaacttgttcatcttgcgcaggtaaatgtttcatcagcgagatcctctcctatctgtttccatttcgttaattataccatctcattgtacacggtttttcatgcaaatgtaagagattatttttaaaattcgttttttattattggaaaaaccgaatattaaacgaatagacaaatcatatagttcgatatatcatttgtttaaaaaattattctaataaagaaaaaagcctgtccggctcttccccccgcttcttccgctactccgcttcatagacggcgcggacgcctccaatcagcttcggccttgtccgcgcaagcgtcacgtgcgcttcgcctagctgtttttgagagacgcggacaggaacggcaacaggctttaaatgcattcctataaacgtgtcgccgatgtcgatccccgcatcggcctctatttgttcaacaagaacaggagccttcatatgtttataggcatatgaagccatcgatccccccgctttcgggacaggaatggcgaaaacaacgggaagacggtatgctttcgccgtttcttcctcgacaaccaacgccctgtttaaatgttcgcagcactgaaaagcgagggcgattcctgttctgtccctgagctcttccagtcctttgtagaccgcttcagcgatttgttcgcttcccgaagtgccgatgcgccttccggccacctcgcttgtgctgcagccgatgacgacgatgtggccttcgcgcaaattcgcttgctgatgaaattcatctaatatagaacgccatgtctgttcaagatttttcatgattgacgacaccctttattcatgcttgtcttcataatcggcgatttttccgatgcggacggcgtgccgcccggctgaaaactcagtcgtaagccaaacctttgcaatctctctcgctaaaccagggccgatgacccgttcacccatcgcaagaacattcgtgtcattgtgctctcttgtcattttggcgctgaaaacgtcgtggacaagggcgcagcggatgccttttactttattggcggaaatgctcatgccgattcctgttccgcatattaaaatgcctctgtcggcttccccgttcgccactttttgcgcgaccggaaacgcataatccgggtagtccacagatcctgaaccgcattcgcagccgtaatcttcgtattcgatgttcaattcgtccatcaatgccataatttcttttctgatattgattccgccgtgatctgatgcaatgattactttcattggaatgactcctcctcgtttaatgtgccgccaaaagtctcgcagaaaccgttaagccagcatacagccgttatatacttctgattgatcatgtctattgtacccgctgccgcttgatttgcaaacgctccttagccagcttctattcctgagatttcttcgcaagcatttccgccaattttctcagcagctgctccagctcatctctcgttctttgatagtcgctgagagaaccgccgaacgggtcaataatgtccccgccatctccattaacatactctttcagcgtatagatcttatcttggctctttgaaaattcatgtactgccagctgcttgtgctgctctgtcatcgtcagaacaagatcagcccattccaccttctcctcggaaagctgtgaagatgtatgattcagagcgatgtttttttcaaaaagcgcttcgacagcatataaagaagcttttccgttttcaggagcaaacaacccggcagatttgacggagacatccagatttttttcggcagccgcagatttaaagagcgcttcggccatcgggctgcggcacgtatttccagtacagacaaataatatgttcaatcttgttcactcctttgtttcatattataaaggattcagacggaaaataataaaatccgctccagaaatcaaaaaagaggggatctccccctctttttctaagttccattatgttatgcaaaacagaaaaaagattttcccatctttcaattaaatgggcagcaaaagcttcagaccgaagctcagcaagatggctcctccgagcgcttcgctgtaggcgccgagccacgtttgaaccttttttccaagcagaaggcccgcccaagttaacaccatgctgaacaaaccgaacagaaagatcgttaatatcggtttcgttccgtagaggccgaggctgagaccgactgaaaagctgtcaaggctgacgccgacggcaaaaacgaacaagccgaagccgtgcggagagatgatctgctccccgcttttattaaaagatgcgacaatcatctgaatgcccagcaccaataaaagagctcccccaatatatcccgccagcgcaccaagcgcacccgaaagaaactgtcccgcaatcattccgccaagcggcatgatgacatggaacaatccaataatgacgccgatttgaaaaacctggttccttttcagcttggccattcccattccaagaccgactgaaaaggcatccatgccgagtgcaaaagccatcatcgaaagcgtcaggatttcgcctattaacacatcaacattcatgcaattcccccttggacacgccagcttttctagcttatgcacgtccaaaggcagatagaacacccccgcttaggctacgcttcgattacgcggtggccggccgctttcaacagccggttcataatcgcccggcccactccttcctcaggaaaagactccgcaaaaataaaatcgagacgttcttcatcaaagctgcggagaacgtcatacaaaccggcggcaaccgtttcaagtcggtctcttctgccgcagatgcggacggcatcggcctgatagacatcggcccgttcctctgtcgtaaggacaccgactttcatcccgtctttctgatattggtcgatcagccgttgaatatcctcaactcccccgttcacaatagcaagaggtgcttccggtgcataatgcgtatatttcatcccgggagacataggcgcctttttttcgtcggtgaggccctggtcaatcaagacggggccggccgcttcttcgagctgctcttttgtgacgccgcccggcctcaaaatgaccggaatttcaccggtgcatgaaacaactgttgattcaacccctactcctgtagggccgccgtcaacgacacccgcaatccgtccattcaaatcgttgacgacatgctcggctttcgtcggactcggttttccggacagatttgcgctcggggcagccaccggaacgccggcctgtctaatcagctcaagcgccacaggatgatcaggcattctaaccgcgaccgtgtcgagccccgccgtcacccttgtggataacaccccgggcttgcacggcagcacaagggtcagcggcccgggccaaaaacgcttcatcagcatttcggcctgaggcgaatcaacttccgcaaattctgcaagctgttcaatttcagcgatgtggacaatgagcggattgtcgctcggccgccctttcgcttcgtatattttagctactgcttcgctgtgtttggcgtttgcaccaagaccgtaaacagtctctgtcggaaaagcaaccgtttcattttgctgaagcagtcttgccgcctgtgcaatttgtggacagtttgtggacaaatcgcgttttacatccacagtccatacttttgttttcattaacatcaaaactcccttaacaaaacactaaaaacgttaataattcatgtaaatcatgttgaaagtataaaagatgaaagaaaagaaaacaagcgttgtccacattttgtggataacgcttttgaatccgtggatatctctgtgtataagttaatggctaatttgacgttttctccattaaaaccgctccgtttacgttcagtgagtctgaaacatgctcggattcatccagctcatcaggaattgccgcagcttgtttaaaaccgagcacttcaaggaaatccatcgatgttcgcttattggctactaaataaagggtttggattcctcgcttttcgcacaatacctgcatgctttgaaacaaggaaacgatgtggccttggctgagcttgtcagacacgacaagcgagcgcagcagtccttttttgttttcaaattcctccattccgaggcaggcgacgatttcatcgggagggtcttccatcatgataaactggctcttcgcttcctcaagacccttatggcttgtccccgccttttttaaaaatgcttcgatcgcattcatgtctttcgtttccgctaacctcaattggtagaacatcttttcaccccgttttttaacttctctatccaatctatgagggcgacagtaaaatatacctttatttggaataatgccagctattcatttttcaattttgattagcaggaaccaacgctttgaatgagtatgcaaatgaacgctgtactggtgataagacagtttctcttctgccggcaatgtgattggcacatcagaaaggggcaaaaggtgtatatccgaaaagctgtatttcccctgaaccgttttggaaaattatatcatattcaaaagcttcaataaccatcatgaaaaaacaaacagtaaaaaaccgccctgcacacgaaagcaaggcggtccttttaagaaaaaagcccggtaatccattcgacaagaaaaaatttcacttctttgtcttctttatctttatctatgccagataccgtttcatccgccgcgtctgttttttcttcccggcggtcttctccggcagcggtttgttcgtcttcaggcgactttacggcttccccattggaaaaatcaagaaagcaaagtggcggaaacaggacgcaccaccagttggctccctctcccttgcctaatgtaattaaaacagcctcatattctccggccggatacactatattgccgtatagctttgtcggaaatgaaacacgatcaaaacggacagacacggattgccgaacattttcgcgtttcatgacatccatggcaacctcttggatttcaggcagcttcgacctgatgacttgtctcgcttcctcaaccgaggtcaggttttccacccatttcgtaatttgtttattgacctcatccctgattttgcgtttgacgctctggtcgctcccgttgtcgctgtttgccaaaatccgcagccgaatcgcttcatcaggaatcacggcaggctgcccgcctgatgattgggcagtctcttccgtcgtgagatttgcaagcgctcctattaataaaagaaaaatatacatacaggcaatgtttgatttcttcattttccccaccgttcctctcgttcttcaaccttttctagcaatattatggtcaaagatggaacggtttaaacggctgctgaaaaaaatcctactaagcttgtaatctcttcctaataaatctacatatccaaatgactctgcttgtttttttgcaggccggataaaaaaatcaccgcgctgatcgccagcagcaagccccccaatccgccgaacagcaaaaacgggaagacagcggctgcgcttgcatcaatcgcccagccgatcaagaatgaaagaagcgctcctcccagacttgcggacgaaatgaagagactcgtgatttcctctgtaaaaggctttccagccaacgaggcaagagtgacggcgcacggaaaaatgccggctgccgacagcccgatgaaaaatacgaggagcagctgtgtttgatgaaccggaaaccacgcgagaatcaaaagcaaaacagtcaaggctccggcgctgaagatcagaaagccaacggaagttatgcgtccgccaaaaatacttgtcaataaacgtccgcataccattcccgtccaaaaaaacgtgacgctgatcacgctgatttcttcagcccctttttccagcatcagcgccggcaaaaagtttgcgaaattggtctcgatacccgcatacacaaaagcgaatatgagaaagaggaaaatgtttttttctttccttccggtttcaaatatggctgatacagtcggtttttcctgataagccatctgaccggaagcagtgccgggggtttttctgcgcaaataaaccacccacatacacgcgagcacaaaaacgaagataaataaagcatacaaggggaaatgccaggcatatcgttccgtaaggatataaataagaaaaggaaacagcagcgcgcctaatccgaaaaaaacctctaaaatattcatccctttcgcatttttatcttgcgcaatcacatacgcccccatcgtcgtttctaaagtacccgcgccaaagccgagcaaaaatcccatgatgacaaaaaagatgaacatatcaaaaaggaaaacacctaaaagcgtaacgagaataagaagaaggccaaacgtcaatacagccgtatgagaggtgcgtctgacaaacatcggcgcaagcaggacgccgtttagaaaaccggtgaattggaaaaagatcaggaaggatagatcatgaagatcccgttgatattcttgaatgatgtacggtgacaggctccccagcagaatatggataacccctactagaaaataaaacgaacagccgaatagaaatatttttttcattagactcactccttcgttgcagaccataaaacccttgcggcttgggtggcacagccggcaagggtctttcgcaatgctagtttgcttgttttgaaagggacagctgctgacctttattgaaaaattcatttaagtagaactgcgtcttgtatccatcttcaaaagtggcaagagatgcaaaattgcgatcccgaattccgttcatccattggatcagctgaactctgaaggaatcggcccatccgtaaaattcattttcagggtctgtcagccacgtgtccggcattgttatcatctgctccgtcaatccggccctcagcaaaaactgatttttctgccgtgaatgatagtaaaatacgccgttttggccgttgacctcgatgctgaagccgcactcatccgattttgtgcattttgacgtaatcatattgacaaacacatgattttcaagctggccgtatacttctgaatgatcatcaacatatacctgtttttgttctttttctttgacgaccgtcatcattttgacttttaaactgtccagtttaaacgggctgtcgaacaaatagagtatgagatcgattaaatgcacgcccaaatctcctaatgccccgctcgttttgttgcttttcgaatgatcgcgccaagtatatttttttcttctcaaggcgctgtttttcttaaaatggacattgatggacaaaatatctccaagttcattgccggatatcatatcttttaggcgcttaacgaatgtgagatggcggtaattgaagcccatgatcggaatataagcggattgagacgccctgcttttcatctcctccgcttcttccattgagacagccatcggtttttcacacaatacatacttccctgcagccatcgcttcaagcgcatgttctatatggcaaaagttcggcgatgaaacgatgactgccgtcgactgattcaacagctcctgcatactggtaaaggcagttcctccgtattcaaacgcacatttacgagaggcaagcgagttgatatcaaaaaacccggaaagctcggcacctttgactgttgaaagagctttcgcatgggcttttgcaattcctccggctcctataattccgattttcatctaaggacactccttatcgtttgatatgggcttttagcacttctaaaattccagccgtatagctgccttctgtcatacgggaatggagcgacttggcttctgctgtcgcattccccaccagataaccatgtccggtttttttaagcatatccacatcgtttccgctgtcgccgaaagcaaatgaattctctctctctatcgcgaatttatccaatataaaatccacaatgtacggtttgcctgtccgcaaggggataaagtccacatcatagctgttttccggatcgcctgccaaagggttgcagcgattgatatttactcctattccatgctctcttgcaagccgcctgatggcttcaagcgccctcttatctatgctctcatccaacgatttatagtaatagttgattttatagcgggaaaagccatgctgagtctgaggcacaagcgcaatctcatattttttagagagagtctgcttgatttcttcgaccagatcatgggagaaatttgattcttgcaatcgggcttcccaatctttatcagagacttggccttcttcagagaaataagtgatttcagtgccaaggtcaccggcgacaaaatgcggaagatatcgaaagcctccccgcttcatttttgcaagaacggatgacaggctgctcccggtcacccagccgagcaaaatcttgtgatcaagatggtgcgaatgaataaatgtttcaaggtccatgagcgcttttctcgattcatcggtgatgctgtgggcgaaatatgtctcatcaaaatcgcaaaatacggcgtacttcggcttgtttacttgctgcaaggtgtgaaaagaaagtgtttcatgatacgacatcaattaaggcctccattactttgtcttgttcttctacggtgagccccggatagagaggaagctgaagcatttgtttatgcactgattcagtgaccggcagtgatgtgtgccgataattggcttttacaagtggtgtgttttgatgatgggataaaatcgggtagtatatatctgaaatttaagcatcatatctttgacttggtcacgatttccgtttagtattttaattgtaaacaaatgccatacatgatcatcggtcatttgaggcaatttgatcagacctctgtcttcatactgctgcaaatgcgcaatataacgatctgctaaatataagcgcttcagattatttaaagaaagatatttcatccttgccagtccaatagcggcttgcagattatcaatcttagcgttaaagccgtagtcagccgcctttttatttttttgattcagttcaaagccgtgatacatatattccatgcatgcggatgcaaatgatggatcatccgtcacaattgcgccggcttttccgcaagtgccgagatttttatacggattgaagcttaatatggagcaaaggctgttttttcccagatcggaaacgccgatcgcctggcaggcgtcttcaataatcgggatgccgtatttatcagcggtttttgcaatggcttccatgtcaggcagctttccataaaggtgtacaggcaaaatgcatttcgttttcaaagtgacacatgcttcaatttctgaaggatccatgcaaaatgtaacagggtcaatatcgcagaaaatcggagtgcctccagctgcgagcacggcgttttccgttgcagcaaagctgtttgcaggcataatgacttcatcaccttgtccaacacccgcagccttcagcgcgacaatcatggcatcggttccgctggatgaagccatgacatgctttttgctcaaaaaagcagctatttcagcttcaaatacgccaacataaaaaccgcttgtaaattgcccggtcggcagcacgtctttcaccgcatgaaccacgtcatctacttcttcttctgtgatcagtcgatgaagcggcataaagtcaactctggagggcggggaatccattctgttcagcaaattggcggttatgtcgaattgatcctgctgcaatgtctcttttaatttttgattggccagtgtgtcgtctatacggcattcaccagcgagctttccttccttcaaatcattcagaaggacaaatagctgtttgctcgtgcaagtcatgttttcgtttgcggttttcatcaatttcaccccatttttattattttgggaaattgtcatatttcatgacatatcttaaatgatggaatcgataccataacaactctttttttcaggaagtgactttatgcctacgattgacgaaattgcaaaattaagtaatgtgtcaaaaacaactgtttcaagagtactgaacgatcatccctatgtatctgaagaaaaaaggaagcgggttttggaagtcatcgaaaaattggactacatcccgaacacgtctgcacgaaagctcagatccaacaaaacgatgtttctcgcagtgtctgtcccacacgcggaccaccccttcttcgctcagcttatgaagcatatgtccgctgaagcgctgaaacaccaatacaaagtcattgtgtttcagacgttttatcaaaagcagaatgaactgaaagtactggagctgctcaagaggaaagaagtcgacggcgttatgctatgcagcattgaaaatgaatgggaagacatcaaaaaatacgtcaaatacggtcccgtggttatggcaaatgaattccacgccgaagcggacgtgccggtgatctgctatgacgaattcgaagccggatataaaggaacggagctttttattcaaaaagggcatcatttaatggccttttgctgtgacacgatacacagcaaggcccagattatgagaaaagaagggtttatgaaagcattgtctgatgcaggtttgcgtttccaggagaagtggatgttcagccacgcatttaccattcatgacggcttccgcattatggaccagatccacaacatgtccgaaaagccgaccgccatttttacgggaaacgaccaagtggccgcaggaattattaaaagggcccgatattatcaatatgaagtgccaaagcagcttgcagtgcttggatatgacaatcaatcgatctgtgaggtgaccgatccggaaatcacgacaatcgatatacctgttgaagagctggctcaaaaagccgtatgtgcaatggtaaaccttctgaatggggaaagcggcttacagagggatgttgtgacactgtcccctgcattaaaaataagacaatctgtttagtatatatattaatcttgaactattttttattttattcagataaaaattttgttaaaaaatggtaaagcacgccgccagaacggtcaaggctgcggttcctattttccaccgggaatttgagccgccccccttttgttcgacacacttaacaattggaggcgcagttttctaatggctaaatttacagctgaggaactaaagggtaatttgcggggaatgaagggcataaacggatcaagatcaaatgaaaaggcatgagcctggtacaataccggaatcatgccagttaaactgtttcatgacattttattgtctaacttttggagtcacttttaactatgttgttcaattaccgcgcagacgatgcggtcttttccattaagatctttcttcacccgcacgtcagcatcaggaaagaaccggtgaaacatgtctttaacggcattcccctgagtccagccgatttcaaacaccaccagtgcctgatctgcgatgacagatggaatttccttcatgaaacgcttataaaactgcaatccgtcagcaccgtccgttaaagccccggcgggttcatggagacggacgacatctgacagcgtcctcatgtcttcctcggatatataaggtggattcgaaacgatgacatcagctttcttctgtcgcgcgataagcggttcaagcaaatcaccgcagaggaaatccactttcgccccaagccggtcagcgttgtgtcttgcggtacttaaagcttgttccgaaatatccgtcgccgtgacggaaaaacgcgggctctcaagcgcaagggtcactgcaatcgccccgcttcctgtaccgacatcgacagctttaagacgatctatcccgtgaaaaactctttccgcttcggaaaggacagcttcaacgacttcctctgtttcaggacgcggaatcagaacgttttcatttaccgaaaattcccttccgtaaaaggactcttttccggtgatatattgaacaggcactccttgatgatgaagctcgacagattttttaaacctcgcaaaatcagactctgatatgacatcatggaagcttgacaacagtttgctgcggtcgatgttcagctgatctgtaagcaaaatttccgcggcattccggtctcttcccgcttccgtcaaataagaagaagcccacctgagggcttcaaaaattgttttcatgtttagctctccgcctgctgaagcttgcttgcctgatcctctacaatcagggcgtcaatcacttcatcaagcttgccttcaaggatttggtcgagcttttggatcgtcaagccgatcctgtgatcggtaacgcggttttgcggaaagttatacgtgcggatgcgctcagagcggtctcctgttccgacggcggatttccggttttgatcatattcagcctgagcttcctgctgaaatttgtcgtaaattcgcgcgcgcagaaccttcatcgctttttctttgtttttgatctgagatttctcatcctggcaagacacgacaacacctgtcggaaggtgggtcagacggacggctgacatcgtcgtattgacgctttgccctcccggaccgctcgatgcgaaggtgtcgacgcgaatgtctttttcatgtatatcgacttctacctcttccgcttcaggcaggcaggctaccgttgccgtggatgtatggatgcgcccgccggattcggtctctggaacgcgctgtacgcggtgtgcgccgttctcatacttcagccttgagtatgcgccgttcccattgatcataaaaatgatctctttatatccgcctgtacctgtcatattcgcttccatcacttctgttttccagccttggagctctgcgtagcggctgtacatgcggtaaaggttgccggcaaataaagcggcctcttctccgcccgctgcgccgcggatttccatgataacgtttttgtcatcattcggatctttagggatcagcaataccttcagctgatctgtgagcgactcgatttcttcctgcagttcggaaatctcctctttcaccatctcgcgcatgtcggagtcaagcttttcttcaagcatcgctttagcatcgctcagctgttccgacgcgctacgataacgtctgtatacttcaactgtttcctgtaaatcagattgttctttcgaatattctctaagcttcttcggatcgttgacaacctccggatcgcttaatagttcatttaatttttcgtaccggtcctctatcgattttaaacggtctaacacgctattcacctctgtttgctgtgcgtaacattctaattatagtatagggactcttccccgtcaaaacaacttcgccgttatcggcagcagccgcgtctttttgctatacttttaagaaaaaaggagcttgactcaatgctggaatcgattcatcacatcgccatcatatgctcggattatgaagcatccaaaacattctatgccgacaagctcggacttgagattctgagcgaaacgtacagaaaggatcgggaatcatataaactggacctctcattaaacggccgctatgtcatcgaactgttttcttttccggatccgcccgcacgccttaccagacccgaagctgccggactccgccatttagctttcacggtggccgatcttgaccagaccgtcaaggagctcaagcaaaaaggcatcactgctgaaccgatccgcaccgatcccgggacgggcaagcgctatacgttcttccccgacccggacggcctgcctttagagctttacgaagcatagcaacggctgcaccctctggggaaaaaccgctttctttgccgaatcccttcttcttttgtctaacaggaaggaggccttttcattcaggtcgaataccctttttaatgaacagttacaggttaaaaggaggtatcttatgaatactgctgatgcggcaaatgaactgggggtttcaaccaaaacggtgcagcgttgggtcaagcagctgcaactgcccgcttcccgaaatgagcttggccactactttttcacggaagacgatatcgccattttaaaagaagtaaaagagcagttgaaaaacggtacgcctatgcaggatgtcacggtcaaacgcccgaaaaaaaccttcttcatcaagaaaaacgaaatgattcaaacgaaagagcctgcaccgcaattgaatgagcggctcgaagaaaggctgcagcgttttttagagcatgaacagcttgaacgcgagctgctccaaaagaaaatcgccgagctggaaagaaagctggagcaaaaagcggacgatgtcgtctcctatcagcttctgcagcaaaggcgcgaactggaagaagaacggcagcagatcaagcatctcgaacagaaaatcagccaattggaaagcatgaaccgtcaggaaaaagatacagccggcagaagagaagaaaaaaaaccaaagagcaaattgaaatcgatcttctctttttaaagcgcaaaaaagcttgcaaggccataaacggcttcttgcaagcttttttcttacttatgctgtaattgcaatcaatatcggcagcgaaataatcgacagcaccgcactgatcacaaacgcggatgccgtttccgcttcctggctttcaaagtttgtagcaatcatggccgccacggcagaaccagggaatgccacgagcagaaccgcttttgtcatgtcggcagaagaaaggccgacgaccatcgcgatcacaaacattaaagcaggctgagcagcgacttttaataaagcgatgctcaaagcaggcatgctgaatttaattttgcggattccgacagtcaccccgactgcgaaaagggcgatacctgaagtcgtatttccgagcatatcaagcattttctgcggcaattcagggatttgcagaccgaataatacaagaatgatacttgcaagcggtgcaaaagcgagcggttcagacaaaccgtgtaaaattgattttcctgttaccttccaaatgctgtctgtcgtttccgtttgttttttagaagaacggccgacggttccgacgatgatcgcaagaggatcaagcatcgcatttacgacaattcccgtaatcgcgattggaatcgcaacttcctgcatgccgaacaggctgcccaatacaggaatacccataaaggcgaatgtcggctgtgctgagttcaatgagaacattgaagcatctgttaaatcgtatttaaacaaaaatcgtaaaagaagcaaaataataacgtaaaatccaacgataccgactaccaatgaaatcataagcggaatctggctgtaaaacttatcttttggcgttgataaaatgcttgatacaaagtgggccggaagcgcgtatttcgtaacgagcgtgcttaccccttttgcagatttagcatcatagcttccaaagtgacccgcgaaccatcccagcgcaataacaaaaaatattggcgcaaggaggattaaaatatttaaaaagtccaagactgtttcctcctctatgttgtccctttcaggggacaaattaacggcggctgataaacgcgggaagccctgttgccagccgccgatcccattttttcatatttgattggtgcagcccggtgacaaaacatccgcacccgggctgccgtttctttttatcgtttcctcagaacctaatattagtcttgttttgcaacaattgttttatactccggacgccacatggcttcgcggacagccttttcgacatcttcaggctgaacttgggccacgccgtctttaatggcagcttttacaacgtcgatcgccacttgaacggatacgtcttgcaggtcgtcgattttcggcagaagacctgcacccggcttttcatgatccaccatgttcgcgaccgcgttggcagatgcagcaaacatgccgtttgtgatgactttcgctttcgcaacgattgtacccaggcctaatccagggaatacaaaagcgttattggattgtccgatttcgtgtttcacgccattgtactcaacagcttcaaacgggcttcccgtcgccacaagcgcttttccgtccgtccatttgaacaagtcttcaggaacagcttcggccagatgtgtcggatttgacatcggcagaatcacaggacgctcagtatgagccgccatctctttgatgatttcttcactaaaggcgccggcaacacctgatgtaccaatcaggatcgtaggcttcacttgacggatgacttcctcaaaggaaatctctcccttttcattgcgtttccaatctttcacttcttccgtatcgcgcaaatacggttcttggaaatccatgatttgatccatgcctgtcgttaataatcctctgtaatcgactgtccagaatgcacggttggcttcttcttctgaaagcccttcaagcaccatggtgtcgcggatttggtcagcgattcctataccagcagaaccaggtccgaagatgacgacccggtggtctttcaaagacgtgccggtctttttgacagctgctaaaatcgcagccagcgtgatagcccctgttccttgaatatcatcattaaatgttgcaattttatggttatatttactcatgatattgcgggcatttttatttccgaaatcttcccagtgtagaagcgcgttagggaaaagcttcaatgctgtttcgacataagcgtcgataaattgttcatagcgctcgccttctacacgcggatgacggtttccgatatagagcggatcgtttagcagtttttcattattcgttccgacatccagtacgaccgggataacgcggctcggatcgattcccgctgccgccgtatatactgcaagcttaccaatcgcaatattgatgcctccgacgccccagtcgccgatccccaaaatgctttcggaatctgtagcgacgatcaaatcgatgtcatcagcagacgcctgcaggtttttaaaagccgtttcgattccgtccatatcatcgattgacaagtaaacgccgtgcggtctgcggtattcgtggctgtattcctgaatcgcttcgccgacagtaggcgtatagacaaccggaagcatttcacgcaggtggttttgcaataatttatagaaaagcacttcgtttctgttttgcagatcgttcaaatatacgttttggcgaagtctgtcaggttgacgggaaaattgttcgtaagcccgttccgcctgctgatcaaggctgagaacagtcggcggcagaagtccttctagaccgaggttctttctttcttcaagagaaaatgcaacacctttatttagcgttggaatggaaagaacgtctttaccccgcaaagaagtctccaaatgtccttccttcgttcttctcatgttgttcacactaattaccttctttcttaaaatgttaatgaagtgaaataaatacggtaaacaatatagaatatttgcctttttacacatgtagatttgtcaaatatgtaacgcgcgttttttgacaaaaaactgaacatttcctaaaacctatttactttttactgactacagtaagtcattttatgcctgcttttgtcaaaattcaagcgatgaaaattagttaattttttcgtattcttaattaagttttttaattacattaattcccgcaaaaaggattcaataaaaaaaacacttgtttttaccaagtgttttcgagtgaaaatctatatgtttttccgatttcatttcggctttccaggcacttcatggtggtggcggcagcgcgcttcatatgcttcggaggcccccaccaaaatgaccggatcgtcataagaagcaggttttccattgatcagcctctgcgtgcggctggctggggatccgcagacagagcacacggcttgcagcttggtcaccgtttccgctaaagccatcagatcgggcacgacgccgaaaggctcgccccggaaatccaaatcaaggcctgctgcaatcacacggtagccctgatcagccagagaagttaacgtgccgacaatcgtttcgtcaaaaaactgcacttcatcgacgccgatgacatccgtttctttgcttatgtattgaaaaatttcttccggagatgcgatggcatggcacacaatggatgtcccattatgcgatacaaccgattcgctgctgtagcgattatcaatggctggtttaaacactttgacttcctgcttcgcaaacgtcgcccttttgatccggcggatgagctcctctgatttgcccgaaaacatgcttccgcatatgagttcaagccagccgctttgcttcatgatgtacatccaactaactcctctccagcaattattgcaagtaaaaaacaggcaagaagaatccctgcctgtttatcatatctattattacttaagaccgtattttttgttaaagcgatcaacacgaccatcagcagaagcgaatttttggcggccagtgtagaacggatggcattcagaacaaatctcaacgcgtacctcttcttttactgaacctgtttcaaattcgtttccacaagcgcatttgactgttgcttttttgaactcaggatgaattcctgctttcatgtctgtcatctccttccgccctgaatccaattcggaaacagagttattattccggggcaaaacctccggaacgcacatgatagaattataacagcgattcggacgttttgcaaactaaagttttaaatcagcgccttgcagcagacatattggcttgtttccattcctggatcagaatatcgaaaaactcctgattcgttttcgtctttttcatttttctcatgaatttctcgacgaagtcaggcgtgtcagacatcgttttccggattgaccacagacgatcaaggtgctctttcggaacgagaagctcttctttacgcgtacccgaacggcgaatatcaatggcaggaaagattcttctttccgcaagagaacggtcaagatgaagctccatgttccctgttcctttaaattcctcatagatgacgtcatccatccgcgagcccgtgtcgacgagagcggtcgccaggatcgttaagctgccgccctcttcaatgttgcgggctgctccaaagaaacgctttggacggtggaaagcgccgggatcgattcccccggacaacgttctgccgctcggcggaatgacaaggttataggcgcgggcaagccttgtaatgctgtccattaaaatgataacgtcctttttatgctcaacaagcctcattgcacgttccaatacaagctcggccaccttgatatggttttcaggaacttcgtcaaacgttgagctgacaacgtctcctgcaaccgaacgttcgatgtcggtcacttcctcaggtctttcatcgataagaagcacgatcagctccgcttccggatgattggttgtgatgctgttcgcgatctctttcaagagcatggttttacccgctttaggcggagcgacgatcagaccgcgctgtccaaagccgaccggcgccatcatgtccatgatccgtgttgacaggtgattcggcttcgtttcaagcaccatctggcgatctggataaagaggcgttaatgccggaaagtgcacgcgttcttttgctgattcaggatcgtcgccgttaaccgcttcaacgtgcagcaggccgtaataccgttcgttttcttttggagggcggacctttccggacactttatcaccgtttctcaaatcaaaacggcggatttgtgaggcggaaatatagatatcctctgaactaggcgagtagttgatcggtctgagaaagccgaacccttcggactggatgatttccaatacgccttccatgaacagcagatcttcctgttcggcgtttgctttcagaatggcaaaaatcagttccttttttgtcagtttgctgtaataagagactttataatgccttgcaagctcatacagctcttttaatttcatattttccaaagatgaaatggatacatctttcactaagaacaccactcttttctaatcgaataatttactttgtctcatcaatttcacgaaagacgattaatgtatactgccgattcgttttaccggcaacgcttctacccatatatatcgacgtattgaaaaggattataagtatgagtcgagaaagaagcgaggacttaacaagagaagataatcgcatatctgatagatgcggcaggattttggttctctctaggaaccagcatgtgcagaaaatttcgcagcactctttagttttacctcatttgtcgtacatattcaacttcatttatgatttgacatgaaattgatagagatgaccctgttttgaaaaatgccttgacatgaagaagaaaagccgttagctattgtatcagagtatgaaccttgattcaattcgtgaagtgaaatacaagggaaaagcgggtcgtttatatccccgcttttccttttccttatggccggatgactaggttaggttttttcttgagactgtgtcttccgtccacaaaccgtaccgtaccggattttgccctcatgactacgctgtgggtcgttccaacagatcctttgaattgcacgcctttcaggagctctccgtctgtgacgccagttgcggcgaaaatcgcatcgtctcctttgacgaggtcttccatgcggagcactttgcccgtatcaagccccatcttttcacagcgtctcagttcttcctcactttgaggaagaagctttccgtgaatttcccctccgagagctttgagtgcaacagccgagagtacgccttccggagcgcctcctgagccgaataaaatatcgacgcctgtatgatcaaaagcggtgttaatcgcaccggccacgtccccgtcattgatcagcttgattctggcgcctgcttcgcgaagctcatggatgattttctcatgccgcggacggttcaaaatcgtggctacaacatcttccacatctttattctttgcttttgccacagctttcaagttatcaatcacaggcgcttcaatatcgatgcagcctacagcttcaggacctacagcgattttatccatatacatgtcaggcgcattcagcaggtttccgtgatcagccaccgcaatgactgcgagagcgttccatccgccgctagcgacgatgttcgtcccttcgagagggtctactgctacgtctactcgagggccgtagccgttgccgagcttttctccaatataaagcatcggcgcttcgtccatttccccttctccgattaccaccgttcccttcataggaatggtgtcaaacacatccctcatggcgcttgtcgcagcgtcgtcggcttcgtcttttttacctcttcccatccagcgcgctgactttagcgcagccgcttctgtcacacgaacaagttccatcgataagcttctttccattcctatctaatctcctctcacccatatgaaatcgttttatgttttatctataacagcatttgtcgatcacgagttttgcagctgttcaatttcctggtctgtcaatttttcgcgccagacagtggccccgagctttgtcagcttttcttcaagctgactgtagcctctgtcaaggtgctccaaaccggtgatttccgtgacaccttccgccattagaccggcaacaacgagacatgctcccgcccgaagatcactcgctttcaccttggcgccctgcaaaggagctggcccggtaatgatcgccgatcttccttcaaccttcatcgacgcacccatgcgtctcagctcgtcaatatgtttgaagcgagcggagtaaatggtgtcagtgacaacgctcgtcccgtttgccttcgttaaaagcgatgtcatcggctgctgcagatcggtcggaaagccggggtatacgagcgttttcaaatcgaccggtttcagctctttctgtccgccgaccattaaaatctgctcgctgctttcttcgattcgaacccccatttcgcggagcttggcgattaacgattccaaatgcgtcggaattacattatcaatcagcacttcttgtcccatggaagcagctgcaatcatgaaagtgccggcttcgatccggtccggaataatcgagtgtctgcacccgtgaagcgattcaacgccttcgatgcggatgacgtccgtaccggcgccttttatttttgctcccatgcttgttaaaagagtggcaacatcgataatctcaggttctttcgcagcgttttcaattacggttctgcctttggcaagcacggcggcaagcatgatgttgatcgttgctccaacactgacgacatcaagataaatgcgcgcgccttttaattcctccgcacgcagatagatcgcaccctgttcgtttgtcacttcggctccgagcgcctcaaaacctttgatatgctgatcaatcggtctcggaccaaggtggcagccgcctggaaggccgatgaccgctttcttaaagcgtcctagcatcgcgcccattaagtaataagaagcccgaagctgtttcacttttccattcggcaaaggcatgctgatcatcggcgcaggatcaacgaccatttctcccttttcaaagtgaacgtttccgccgatctctctcagcagatcgcgaagcgtcaaaatgtctgaaatatggggaaggccttcaagcgtaaccgtcgaatcagccaaaatcgtcgcaggtatgagagcgacagcgctgtttttcgctccgcttatatgtactgtgccattgagaggatcgccgccagctatatttaacttttccatgatcgtctccttccttaaagaagatagctaatggagcgcttcataatgagatttccttcaaactcaaaataaatggttcatttcaaaatctatccaattaaaagagaaagaatacaacacatttcaaatttatcgggaagaaaagtagcgaagcagactgcggcaaggttctcttctgcaaaacattcatttctctttgtaagacaaaatggtgacaaacggagggagcccctccacttgccacccacatgaagcaattatttattccagtcagccaaaaactgttcgatccctttatcagtaagcgggtgctttgtaagctggtgaatgactttgagaggcatcgtgccgatatgagctcccctgagcgcggcctcagtcacatgctgcgcatggcggatggacgcggcgatgatttgcgtgtccaaaccgtgcacatcgaaaatttgtttaatttcactgatcaagtcgaggccgttgtggccgatatcgtcaaggcgtcccaggaacggggaaacatacgtagctcctgctcttgcggcaagaagcgcctgatttgcgctgaagatcagtgtgacgttcgttttaattccgagatcggttaatgctttaacagctttcaggccgtcaggcgtcatcggaattttcaccgtaatattcggcgcgattttcgcaagctcttttccttcttcaatcatctcttcagccttcagagaaataacctcggcgctgactgacccagaaaccacttcggtaatttcacgcagacggtcatgaaacgaaatgttttcttttgctactaaactaggatttgtcgtaactcccgcaagcacgccgagagcgtgcgcctctttaatttcgtctaaatttgcagtatcaataaaaaacagcatattgataaaacctcctgtcatgaaaatgtctgaactgtggaacttgtttgcgctttccggatgatatggataaaaccgcctgtcgctatcaggcggcttttttgactgaacgggaagcaaaagagcctcatgccgtcacatggcatgtgttaacagcacttccctctaaaacaccagaaaaacatcctgtttccccggctttgcgggaaaacagatgcttttccaatcgtcattatgctttgtttgaagaaccaaattcgcgcattttgccgataactgtttctttgatagcttcgcgtgcaggtccgaggtatttgcgcggatcatactcttcaggcttcgcagccagcgtttcgcgaacagctttcgcggaagcgatttggttttcagtgttgacgttgatttttgccgtacctaaagaaatagctttcttaatgtcggcagtcggaatgcctgtaccgccgtgaagtacgagcggaagaccagttgtatttccgatttcttccatttctttaaatccaaggtttggttcgcctttgtaaggaccgtgaacagaacctaatgcaggagcaaggcagtcgattcctgtgcgctcaacaagctcttggcactctttaggatccgcgtagatgacgccatctgcaattacgtcgtcttcctgtccgcctacagttccaagctcagcttcaactgatacgccgtggaaatgagcgagctcaacaacttttgaagtcgtcgcaacgttttcctcgaaaggatggtgagaagcgtcgatcataacggaagtgaatcccgcatgaatcgcttttgcacaagattcaaagcttgaaccgtggtctaagtgaatcgcaacaggcactgttacgttgtattcttccatcagcgctttaaccattgcaacaacggttttaaaaccgcccatatagcgtcccgcaccttctgatacaccgaggataacaggagatttctcttcttcagcggcttgtaaaatcgcttgagtgaactcaaggttatttaagttaaattgtccgacagcatatccgttttcttttgctttattcaacatttccgtcattgatactaaaggcatgtcgaaagtcctccttatgtagcctgatttgcttttgcgaaaaaagcctccacacctacctagcatgaccagaaaaatccgccatatgtaaaatgttttgttttttaaaaaacgttagacagcttttctctacttatatagaataacaattaatcaacaaatcggcaacattgtgactgtgacaacatcaaaaacttttccgctatccgttggactttatgggcagatacgttttgacggcatcgcggatttcgtcgatgtcaaaaggcttagcaaagtgtgtcagggctccgagctccttcgattcctggatcatgtcgagctctccgcaggccgtcatgatgatgacgcggatcccctcgtctatgatcttcattctttttaaaatttcaattccgtccattccggggattttcatatcgagcagaacgaggtcggggcgctggtttttcacaatgtcaagcgcttgaatcccgtttgcggcctggaaggttttgtacccttctttattgaaaacttcattcagcagaacccgaatcccgtactggtcgtctacgattaaaatcttctcattcatgatttacacctctatatttataattttcgccaaaattaagcagtagtttatctattctgttttgtttttctcttttcctttaattaaaatatttaagtttgcgacatatttagaggatttttcccattattctcttttgttatataatgatagtcagtaaaaaaggaggagtcaccttgcttaaaattttcaccactcaattgacgggaatcttcaaccggattcaagagggcgaggcccaatcgatagaggacggcgcccgcttgttggctcaggcggtcatcagtgatcattcggtttatgtatacggaaaaaatgaattggaaggcattttgaaagaagcgatgtacagttctgaaccgttcccctcagtcaaaccgctgcagaaggacgaagaaaactggcccgattttgaaatgacggacaaagtgctgatgttctgcgccggttcagcggatgacgaagaactgaaaatggcggaaaaactgtatgaaaaaggaatcggacttgttgtcgtctccccttcgggaaaagacggcgtcccgatcgcatccttcgccgatgtccatatcgattcaaagctgagaatgccgcttcttcccgatgaagacggaacaaggtacggatttccgtccctgatggtcagcctctatatttatcatgccctatcctttacattaaaggaaatcctccaggaataccaataaaacagggttgcctaaaggaaattagtgacgtgaggccggcctaatgaatatagtaccagtttcgggccgccattatcatcagaaagagccaaaaaaagcccgccggcgtgatttgccggcaggctttttcttttttacagcttttccgaagtctttagcgaagcatgtacgaagtctctgaacagagcctgaggtcttgtcggtcttgacgtaaattcaggatggaactgagacgcgacaaaccatggatggtctttaagctcgataatttctacgagacggccgtcagggcttgtcccggaaaatacaaaaccggcttcttccatctgctgtctgaactcattgttgaattcgtagcggtggcggtggcgttcatacaccacttcattttcatatgcctgatatgctttcgatccttcttgaagcttgcacggataaagtccgaggcgcagtgttccgccgaggtcttcaatgtccttttgttcagggagaaggtcgataatcggatacggtgtagacggatcgatttcggctgagtgcgctccttcaaggccgagcacgtttctcgcgtattcaatcgatgccacctgcattccgaggcaaatgccgaagaacggaatcttttgttcgcgggcatatttgactgtcgtgattttcccttcaacaccgcggtctccgaatccgcccggaacaagaataccgtccgcattttgaacaagatcggcaacgttgtcttccgtcacttcttccgcattgatccatttaacttgaatgtctgcatcaaacgcataacccgcatggcgaagcgattctacaactgaaatgtaagcatccgggagctcaacgtatttaccgaccaaagcgattgttaccgttttggacagatttttcacctttttgacgagttctttccactcttccatatcggcttctctgcaatccagcttcaagtggctgcaaaccaggctgtccaggccttgtttttgaaggtcgagaggaatggagtagagcgtatccgcatctccagcctcgatgacggctttaggatcaatgtcgcagaagagcgcgattttatctttcatgtcctgagaaatcggcatttctgttctcacgacgatgacatttggctgaatgccgaggctgcgcagttcttttacgctgtgctgagtcggctttgttttcatttctcccgccgctttaagatatggaacaagcgtacaatggatgtacatcacattgtcgcggccgacatcgctcttgatctggcggatcgcttcaagaaatggcagcgattcgatgtcaccgacggttccgccgatttcagtgattacgacatcagcgtgcgtttcttttccggcgcggaatacacggtctttaatttcatttgtgatatgaggtattacctgtacggttccgcctaaataatcgcctctgcgctcttttttcagcaccgtggaatagatttttcctgttgtcacgttgctgtatttatttaaattgatgtcgataaagcgctcataatggccgaggtcaagatccgtttccgcaccgtcgtcggttacaaacacttcaccgtgctgatacgggctcatcgtacccgggtctacgttgatatacgggtcaaatttttgaatggtgacattcaaacctctgttcttcagcaggcggccgagcgaagacgccgtaattccttttccaagcgaggatacaactcctccggttacaaagatatattttgtcatttctgtacccctctcttcgattaacgcttatttcttaaaatgctctttttatgaaaaatcatttagatcttttctaaatgatttaaatgattaggaggcggaaaaacaagaaagctccctttcaatttcttgaaagggagctgatagtccgtatcactcgaatctcttcgttttgaagagcccaaaatacatactacctagttcgcctgtgaaagtcaagatcgatttaaacatgaattccgttcagaaggcaattactcttcgtcttcctcttcatcaaaatcttcatcatcatccaggatctcgtcttcaagatcatccagctcatcatcgtcggcttcatcgatttcatcgaattcatcggcgtcaatgtccaaatcttcttcgacatcgtcaagaagaatatcatcctcgtcgatttcttcgaattcgtcaagatcaagatcttcttcaaccgcttttttcgcttttttctttttcgcttttacagtcggctgggtttcttcatcaagctgatcatacggataccagctgcgcaggccccacgtttggtctgacagcgccaaaaagcgtccgtcgatatttaaatctgtgtagaactgggcgatgcggtcttccagctcttctttccccattccaagcaaggaagccacttgatctgttagctcctggaatgtaatcggttttttgtgttccgagaaaatttcgtatgcgatttcaactaaagccatttcctttagctgctcctctgagtattgtttcaaactcatcgccagacactccctttctatcttcatgtatgtatctactatctctgtcatagaaaataagcatgtaatccctgtctttacgacaaaccatacctctcattataaacaaaagaaatcactttatgccacctttattcccgttaattcaataatttttgccggttgcattggaaatcggcggcaagcgggattgaaacatagaacagccgggagcgtccggccccttcaaaacaaaaaaactgcgccggcagcctgtccgccggcggcagatcaagccgggccagacggcgattttccacccttatttcatcagcattctcgaaatgacgagcttctgaatttcctgcgtaccttcatagatctgtgtgatttttgcatcgcgcataaagcgctcgaccggataatcctttgtgtagccgtacccgccgaatatttgcacggcctccgtcgtcactttcatggccgtatcccctgcgtaaagctttgacatggcagaagcctttccataaggcagtccttctgattccagccatgccgcctggtaggttaaaagccttgaagcttcaatctccgtcgccatatcagccagtttaaaagcgatgccctgctgctcggcgatcggcctgccgaattgcttccgctctttcgcatacgccttcgccgcctcaaatgcgccctgggcaatcccgacggcttgagcggcaattccgtttctgcctccatcgagcgtcttcatcgcgattttaaagccttcaccttccccgccaaggcggttttttaaaggcacgcggcagtcctgaaagatgatttcggttgtcggtgatgaacggatgcccagtttcctctctttttttccgacagaaaagccggggaagtccttttcaacgataaaggcggttgtgcctttgtgtttctgttccggggcaaggttggcaaacacgatgtagaagtccgcgattccgccgtttgtgataaagatcttcgtcccgttcaaaatatattcatcgccttttttttctgcggtcgttttcatgccgccggcatcggagcctgaaccgggctccgtcaatccgtaggctcctatcttttcgccgcgggccatcggctttaaatattcctgtttctgttcttctgttccaaatgcataaatcggccagcccgcaagcgatgtatgggcagacaaggtgacacccgttgaggcgcagactttcgaaagctcttcaaccgcgatgacgtaggcgagatagtcgctgccgattcccccgtattcctctggccacggtatacccgtgagccccaattccgccatttttgcaaacagttccatgtcaaaccgctcttcctcatcccgctctttcgcagtcggctccacctcgtgatgggcaaagtcgcgcaccatcttctgtatcatttggtgctcttcgctcagcttaaagatcatcctttttccccctttgacaccttataaatgtttaccgatgacgatccgctggatctcgctcgtgccctcataaatttcacacactttcgcatccctgaaatatcgttcagcgctgaaatcctttgtgtatccgaaatctccgagcagctgcacggcctctccggcgacatacatcgccgtttccgaagcgaacaatttggccattgaagcagctttccccgtctgcatgccttgctgtttcaacgaggcggcctggtagacgagaagcctggccgcctctgtcctcgccgccatgtcggccagcttaaaggcaagcgcttggccgttcttatacagctctccgtccggataccgtttttttagaaattgaacggcttcagaaagcgctccctcggcgatacccagagcctgcgccgcaattccgatccggccggtatccaggttggacagggccattttgaatcccattccttcctcccccagcagctgccgggcgggaatgacagcgttatcaaaatttaaagtgaccgttagcgaaccgtggagccccattttctcttcattttttccgatgaaaaagcccggcgtgcccttctccacgataaaagcggaaatgcctcccgttcccgcctccggatcggttgaagcgaaaacaagataaatgtccgcggctccgccgtttgtaataaaaactttcgttccgttcagcacataggtatcgccgcgcttttcggccctggtttttagactgcccgcatcggaaccggcactcggttcggttaaacaaaaagctcccaagtactgccctgctgccagctttttaacgtagtgctctttttgccgctcattaccgtttaaaagaatgggaatggtgacaattgacgtgtgtacagatagaaccgcaccaagaacggcgcttttctttgacagctcatgtatggtcatcatataggtgataaagtcatgaccggccccgttgtacttagccggtatcggaagccccatccagccgcgctccgccattttcttcaaaagagaggttggaaaacggcctttttccatttcaggtacaaaaggagcgacctcctgtttgacaaaatcccttacaaccttctgcatgcgggtctgctcttctgtaaactgaaaattcaagctcacccctccttatgtcggctgcttttcatacgtataaaaccctctgcccgttttctttccgagtcgtcctgcgctgacatattgtttaaggagcggacaaggcctgtacttatcgtcgccaaagccttcatgcagcgtctccataatatacagacacgtatccagaccgatcagatcggcgagagccaacgggcccatcggatggttcatgccaagcttcatgattccgtctatgctttctttctcggcgatgccttcataaagtgcaaaaaccgcctcattaatcatcggcattaagatgcggttggagataaatcccgggaaatcccgcacctctatcggaaccttgttcatccgctccgccgcagccacgacggtttcatatgtttcgccgctcgtctcaagccccctgatgacttcgacaagctgcatgacgggaaccgggttcataaaatgcatgccgatgacgttttgaggtttttttgtgacggcagcaagttccgtaatcgacagggacgatgtatttgatgccaatatcgctgagtcttcggtcacttcatcaagccgcgtgaaaatgtctttttttacgtccatttgttcaacagccgcttcaatgatgagaaaagcttcccgcgcttcgtcgagcgcagccgacggagaaaggcgctggtagatttgcttcacatcttcatgcggcagcttgcctttttccgcctgtctgaaaagctggccggaaatgcgcttcattcctttttcaatttgttcaggtgatacgtcatacatgtaaacattgtatccggcctgggcagagacctgagcgatcccggaccccatctggccggctccgatgaccatgatcgtgtcttttttcatctgaaatccccctttttatacctcgatcatcacggcgtctccctggccgccgccgctgcaaatggcagcaatccctataccgccgccgcgccgttttaattcgtacataagcgttaaaatgattcttgctccgctcgcgccgatcggatggccgatcgcaatggcgccgccgttgacattgaccttctccatgtcaagacccgcgatctttccgcttgccaaagcaaccgcagcgaaagcttcattgatttcaaacagtttgatatcagaaagctcagctcccgttttgttaagcagttctctgatgacaagcccgggggttttcggaaagtcttttgcttcgactgcaattgatgtgtgcgctttaatgacggccggcgccttcacattgagttcctttgccttgtcttcattcatcacgataagtgagcatgccccatcatttacccccggcgcgtttcccgccgtaattgtcccattatggtcaaaaaccggggcaagctttgacagcctttccattgacgtgtcgcgccgcggtgcttcatcttgatcgaccgttaattcgccgccccgcttctcttggatgctgaccgggacgatctcttctcctagcgcgcctgaatccgcagcgtgtacggctcgcatgtggctcctgagcgcccaccgatcctgctcttccctagcaatctccaactctttcgcagcggcatttccgtaggagcccatgtgaacgcccgtaaatgagcatgtcagcccgtctgcgatcatcaaatctttaaccgccccgtctcccatcctcagcccccacctcgctttttgaagcaaataaggggcgtttgacatcgattccatacctccggcggcaatgacctccgcatcaccggccctgatgatctgatccgccattgtgacgcttcttaaacctgaagcgcacactttattaatcgtttccgttttgacgtcccacgggagtcccgcaaaacgcgcggcctgcctcgacggcagctgcccctgtccgccttgaagtacggagcccatgatgacttcatcgacatcctcaggatttacaccggaacgttttaatgcctcttttacggcgattccgccgagctccgcagccgtctttgactgaagcgcgcccccgagttttccaaaaggcgtgcgtgcgccgcctgcaataactgatctcgccacctgacatcctctccccttatcatgatttgtacataccgaagataaaagaaggcggagatccggctcacaccttctttatttaaaacctgaaatccgtctatgaggcatgttctttttgctctgacccgaatacggcgcgttcaagcagctccgctacatcatacgtgccgacctgatcctccaattccttggcttttgttccgtcgccgagcatcgtcaaacagtaaggacagcccgagctgatgacagaaggtgatgtgctgagcgcctgctccgttctggcaacgttgatcctcgcgcccgcctcttcctccatccacatgaggccgccccccgctccgcagcacattccgttttcacggctgcgctccatttccgctaaacgcatgcccggaatggagcggagaatagcgcgcggcggatcgtaaacctcgttgtagcggcccaaatagcatgaatcatgaaaggtgacggtttcgtgaaccggaaactcaggtttcagctttccttcttcaatgagggcagcaagaatttctgtatgatgataaacttccgctttcagaccaaaatcaggatattcatttttgaaaatattgtatgcatgcgggtcgatagttacaattttttgaacatcatttttttcaaattcctcaatgttttttgcagctagctcctggaataaaaactcgttgccaagccgtctcggcgtatcgcctgaatttttttctttattgcctaatatcgcgaacgtgaccccggcttgattgaggaggcgagcgaaagccatggcgatcttctggcttctccggtcatacgatcccatcgacccgacccaaaacaggtattcaaaggactcgccttttttcttcatttcttttactgtcggcacctcaacatcgtctcttatatcacgccagttttcacgttcttttcggtttaatccccaagggttcccctgcctttcaatgctcgtcatggcgcgttgggcatctgcatccatttttccttctgtgagcacgagatagcggcggagatcgatgatcttatcgacgtgctcattcatgaccgggcactgatcttcacaattccggcatgttgtgcaggcccaaatttcttcttctgtgatgatgtcgccgattaagctcgggttgtaaagttctgaagcagccgcttcccttgacccttctccccctgccgccatggccagctggttgcctttcgtatgctgaaagagcggtgcgggtacccaaggcgttctcgatgtcactgctgctcccttttctgtcaaatggtctctgagccgcaaaatcagatccatcggcgaaagcatcttgcctgttcctgtagccgggcacatattggtacagcgcccgcattccacgcatgcgtaaaggtcgatcagctgggactgcctgaattcctcgatccgtccgacgccgaacgtttcttttgtttcatcttcaaaatcgattttttgaagctttcccgggtttgtcagccggctgaaaaatacgtttgccggtccggcaattaagtgggcgtgctttgactgcggtacatagactaaaaatgtcagcaggatgagaaggtgcgcccaccacgccgcgtagaacactgccgctgaagcggtttcccccataaagccgaaggcaaaagcgatgcctgatgccatcggttcgtgccatgataatgaatgttcatgccagatcatgttcataccgtttccgagtaaaacggtaaacatcaagccgccgatcagcatgagcacgatccccgacttaaaattgcgcttcagcctgacgagtttttctatataccgcctgtgaaaagcccagactaccgcaattaaaatcatcagtgtgacgatttcctgaaaaaacgtaaacgccgggtagacgccgccaagcggaaggccttgatcaggaacgagccctttcaaaataaaatcgatcgctccgaactgaacgagaataaagccgtaaaaaaacatgacatggatgatgccgctttttttatctttaagcagtttcttttggccgaacacgttctcccatatcttttgaaggcgctccttcgtccgcttatcaaaatcctctttttgtccgagcctgatgtaactgattctcgttctgatcaaatagacgaacagataaacggcgtaagcggttatacctaaaaacgcaatgaaattcaacgacagcaagacattcatcagctgctccccctttcatttccccaaccttaaatccccttgaactacctttatcttaaataatgaatgagtgttcagtcaatatattttcataaatgcaggaaaatagggggacactattctttacacgaaaaaagggagtgtcttcattggtgccgcttatgattatggtatgttttctcatcctgcttcttgcgctcgatttccattttggccgcaaagcctttgagaagaaagcctacgagcccgttttttcagagaagaaaagcgatattgaactgattcataatggagaagacttgtgtgagcggctgctggatgacatccgccaggccgaatcgtcggtgcatgtcatgttttatattgtgaagaacgatgacatcagccttgaatttttgaaggtgctgaaggataaagcgaaatccggcgtatgcgtacgattgctgatcgaccggatcggcgcgatgaaggtgaagaaaaaaacgctctccggcctgaaacaaagcggtgtgcacgtttttttcgccaacaagccgggcttcccctatttcttttaccggctgaatgcgaggaatcatcgaaaaatcgccgtcatagacggaaagatcggctatgtgggcggatttaacatcgcgaaagaataccttggtaaaaaagcggaattcggaccgtggaaggattaccatttgcgaatgacgggagaaggcgttgccgacttgcagcacatttttatatcggacttcaaaagagaagcgccgcaggcaaagccggccaacagcgtatttccgccgctgcagcaaggagctgtcacccatacaacccatgcgacaaagggattttctctagaggaaaaatacatttcatttatcgaacaggcaaaagaaagaatcatgatttgcacgccgtactatattccgagcccggctttgcagcaggctgttctctcagccagggaaaggggcgtgatcgtgtcggttctcgtgccgatgaaacccgatcatccgcttgtcaaagaggccgcctacacgcactttccagcccttttaaaagcgggctgctatatttaccggtactacagaggcttttatcatgcaaaagcattaatcgtcgatgaccggcatgtgatgatcggaacatcgaattttgacaacaggagcctgtttctcaatgatgaagtgaatgtcgtcatccatgataaagactggacaaagcaattcttcgacgtcgtcaaggaaagcattgaacacgccgagcttctgacaaaggagcggtatgcgaagcggccggtgatgcagcggcccgtcgaatggctggcgaaatcgatttcattctttttataaaacgtacgtttatcctgcatgacatgcgggtaacatttcaccaaagtgatgattacatacggaggggatgtacgatgaaccaagcagagtcgattaaactccgcgcccaatcgatgacgttaaaaaacttgattgagctgtacaagctttgccgctcagccagacatcagctatatatatgctcaagaaaaacgatgtgcaaaatcaaagatttaattgagctggaaatgttcagaatggccaatcgcgaaaatgagtgcctgattgtcatcgaagggaaaatggctcaggaattagtaaaaaaagcacaatcgattctttctgacgctcaagttcaataagggaaggcggaagttcttcctttgcgagacgcctcctcaccaaatcaagaaaaaaatcccccgttcaatggacgggggattcgtttacattttttcaggcgctgatacgccgatcagcttgagggcattatttaatgtgatttgcgttgctttcatcaatgataaacgggcccggcttttttcttcatctgccggatcgaggactttctcagcattgtaaaagctgtgaagcacagatgccaattcaaaaatatagtttgtaatgcggtgcggaatccgcttctctgcggcatcagcgacggcctcagggaacgagccgatcactttaagcagatcatactctttctcagaaccgatcttcgtaagatcaaggttcccttcaaaagaaatgcctttttcttcgccttggcgcagcatgctgcaaattctcgcatgggcgtactgcgcgtagtaaactggattctcattagatgttgagacggccagatcaaggtcaaagtccatatgggtatcggcgctgcgcatcgcaaagaagtaacgcacagcgtcaaggccgacctcatcaataagatcgcgcattgtgacggcttttccggttcttttgctcattttcattttttcgccgtttttgtaaaggtggacgagctgaatgatctcgacctcaagcgtttctttgtcataaccgagcgcttcaatagccgctttcatgcgcgggatatagccgtgatggtctgctccccatacattgatcagcttttggaagccgcggtcaagcttgtctttgtgataagcgatgtcaggcagaagatacgtgtaggatccgtcttttttgatcagcacgcggtctttgtcatcgccgaacgccgtcgagcggaaccatgtcgctccgtcttcttcatagatatgccctttttcgcgaagggcttcgagcgcctgatcgatctttccgttttggtaaagcgatgtctcagagtaccagacatcaaatgggacacggaaattctccaggtcttcacgaagtttgcccaattcgtactttaagccgtattcgcggaaaaacgcgaggcgttcgctctcttcttcatgaacaaaacgatcgccgaattcgtcggcgagcttttggccgatttccttaatatcttcgccgtgatacccgtcttcaggcatcggcttatcttttccaagcgcctgaaagtaacgggcttcgacggataacgcgaggttgttgatttgattgccggcatcgttgatataatattcgcggctcacttcataccccgctttttcaagtacattgcagagggaatctccgacagcggctccgcgggcatgtccaaggtgcaggttgcccgtcgggtttgctgagacgaattccacctggacgcgttccccgcccccgatatttgtttcaccgtaggcctctcctgcttcaagcacagccggaatcagcttcgttaaatattgattgttcatgtagaaattgataaagccaggtcctgcgatatcaagtttgtcgatcgacgcttttcctttgtcaaaggatgcgacgatttcttcggcaatattccgcggcgcttttttggcgattctcgccagctgcatagccatattagtggaatagtcgccatgcgacttgtctttcggaacttccagtacgacttctggaatctcgctttcttcggcgaggccggctttcatgacagcttccttaatttcctgcttcagcacatctttcatttgttcgactatgttcatgactcgtgtcctcctctatacgaaatcgacatcttatgtaaatgcttttgttcatcgcttacaatcatatcgtactcaatgctgatctttccgtccggcggctgatgtgtgactgatacagctttagtatccacgccgagctcgagtctgccgaatggcattttataatgagtgacggtgcggctgcccggcctgaagcgctgtttcatttcgatggcgccggaacgcatgaccagaacttcgttttcacttgccttgacgatcgtcttcacctttccagcatcatgctcttcatgataagaaagatatattttatcttttttcatataataaaatccagttgtccggaactcgatcgtctccgtgtccgatccttcccggataacagatttcacatagatatgaacgggtgtctcctgatccattccgacacttcctttttcgatccgatttgacttgattagtataatcattcgggaaaaaaagttcaaccgcagctcctttatatcatcttaacagaacggacgggaagataaaccattttctaagaaaaaagccgtcctgaaaaaaggacagcctgttttatttcacccagccgagcagcatttcgcgaatcagcttgcttgccgtatttgcggtttgttccgaatggtcatagacaggagcgacttcgacaaggtctcctccaacgacattgacgtctgagcgggcgatttcgtgaatcgaagcgagcagctctttggatgtgatgcctccggcgtcaaccgtaccggttcccggcgcatgcgcgggatctaagacatcgatgtcgatcgtcacataaaccggacgccccgcgagtttcggcaggacggctttaagcggctcaagcacttcaaatttagaaatgtgcatgccgttttcttttgcccattcaaattcttctttcatgccggagcggatgccgaatgaatagacattgccgggtccgatcagttccgcggctttacggatcggcgtcgaatgcgagagcggctctccttcatagtcgacgcggagatctgtgtgcgcatccatatggatgatggcaagatcgggatattttttgtacatcgctttaatgaccggccatgaaacgagatgctctccccccataccgagcgggaattttcctttatctaaaatgctgtcgacatattcttcaatcatgtcgaggctcttctgcgggttcccgaaaggcagcgggatgtcgccggcgtcaaagaaatgaacctcttccagctccctgtccaaataagggctgtattcttcaagtccgatggacacctcgcggattctcgccggaccgaagcgggagccgggacggtagctgaccgtccaatccatcggcatgccgtaaaggatggcgtccgcctcttcccaatcggggcggcttgcgataaacaccttgccggaatatgcttcatcaaatctcatcttcaaaaacctccctgaaaaaaagcgcagaatgccatcctgcgccaaactgttttatttgattaaatcgctgacgaatttcggaaggacgaatgccgctttatgaatttcttttgtgtagtatttcgtctcaatatcaaagaagcggctgtcctccacttcaagaggatcgtattttttcgaaccgatcgtaaacgtccacaatccgcttggatatgtcggaatgttggccaaatacagctttgtaatcgggaagatctcttttacatcgcgctgaacgtttgtgatcagttcaggtgtaaaccaagggttgtccgtctgagcaacgaaaatgccgtcttcctttagcgcttttgctatgccggcgtaaaagccttttgtaaacaagttgacagcaggccctactggctcggttgaatccaccatgatgacatcgtactcattttcagattgggcaatgtgcatgaagccgtcatcgacttttacttcgacgcgcggatcgtcaagtttgcctgcaatggaaggcaagaatttcttggaatattcgatcaccttgccgtcaatatcgacaagcgtcgcttttttcacgctcggatgcttcaaaatttcacggataacgccgccgtctccgccgccgaccacaagcacatgctcaggattcggatgcgtaaacaggggcacgtgcgccaccatttcgtggtagacaaattcatctttttcagatgtcatgaccatgccgtccaaaaacagcatgttgccgaattcttcagtctcggccatttcgagcttttgaaaatctgtctgctctgtatgtaaagtcctgttgattttcattgtaataccgaaatttttcgtttgcttctctgtataccaaagtccgctcaaagcgtcatcttcctttcgtgataagctgtatttcaatctatttttctcgcctgcggcggcgattattctgcactgaagcatcggcttttgcctaaggaaaaagtatagaggaattgcaggtgattgtaaagacggatcgattcattttcaggagtcattccaagtccattatattcccaatcgccgatttttcttttataatggctaagctaagcacagatgtgcatactgtgcgcttttggaggtgttctcatttgcagagcaaacaactgctcaaattgtatataaccagccgccggaaaaggtttttattgatattttttctgatcggagcggccgttttgtttttcagccccgtttatatccgggaggctgccgttccgtctttgccggattggcttctcgaagtcagcggatctgtttatttgatgcatatggtcgctgtcctgtccgcagcctgtttgttctacggcacagcgaatggatgcggcgttcagcaggtgcaattgcaacaaacagaacggtgttgccgttgattttgctcggctgcaccgtttctgcttttgtgatgatctgcctgctgttttggagtgcggccatcggctggtttacattcggcggctacggtgcggagaatgttcatcctttttttgagctgtcgggttctcccctctggtttgttgtctcacgcctgttcattgactggtggtcgctttgctttctgatttttctcggcttggcgggagtgctgatcgcaaagaaagagcagcttgctctatggctgccgcttgcgtggtcctcgggtttaatgctccttttcaaattcaatatatcctttaaagggctgctcccgggggaaggcatgctgttgtccatccatgcagcaggagcttccccgattctggccgcatcagtcaacgaaggtgcagttttcgtattatggctgatttcatatgtggcgaccgccaaaaaataggattcctcatattgctgtcttaatctccgcagagggtctgccgttttttccttcccgcttgtttaaatcctcctctttttcctcataatgataagaacattttatttatccgggaggagatttgaacatggacatgatgacggacaagcgggtccgtttaaccatcaagacgatacgcgcatttttgttcatgggagcattgatgctgatcttcctttcaatcgttgtcatgacggtggtcttggcggccaaatggcaaggcgctccttcgattcaggtgccgaggtctaccgtgctgtatgacggaagcggaaagcaaatgggggaaacgcattacgggcaaaagcggtactgggtttcgctgaagaacatcaatcccgcagtcatcgatgccacgcttgccgttgaagaccggaactttttccggcaccacggctttgactatatgaggatgggcggcgccctcattgccgatttaaaggcgatgtccaaagttcagggagccagcaccatcacccagcaatatgcgagaaacctctacctcggccacgataaaacatggaaaagaaagtggaatgaagctttttatacgataaggcttgaacaaaactacacaaagaaagatattttggaaggctatttaaatacgatttattacgggcatggagcatacggaatcgaagcggcttcccggctgtattttggcaagcgggccaaagatatcaatacggcggaggctgcaatgcttgccggcattccaaagggtccttcagtttattcgccctttgtcaatgaaaaaaaagcgaaagaacgccaggaaatgatcctgacaatgatggagaaacaaaacaagctgacggaaatgcaggcggcagcactgaaaaaaatgccgctccgctttgaaaaacaggataagcaaacaaccgaaaaaaccgctccgtacttttatgacgaagctgttaaagaaatttcgcgattgctgcgtttgacgccggagcaagcggaaacaggcggctacaacgtattcaccacgctcaacccgcgtctccaaaaaattgccgaggatacgatcgaacacacgatagattcgtcatccgacattcaggcgggatttgcagcgatcaacccgtccgacggcagcgttctcgcgcttgtcggaggacgcgactacgaaaaaagcccttttaaccgcgtaacgcaggctatgcggcagcccggctccaccatgaagcctttcctttattattcggcggttcaaaacggctttacaccggccacccgaatgaggagcgcggaaacgacatttgagctcgggcaaggcagcgcttattccccgagcaactatcacggctattatgcagacggtccgatcacgcttctgcaggcactggctttgtccgataacatttacgccgtgaaaacccaccttttcctcggcatggacaaactgattgatgccgcaaagcaattcggcatcaacagcccgctgcaaaaagtgccgtcgcttgcgctcggaacatcccctgtgaagccgattgaaatggtgaacggatacgccatgtttgccaacggcgggaaaaaaatcgaaccttcctttattacgaaaattaccgatccgaacgggaaggttctttatgaaaaaccgaagcggagcaaacaaatccttgacccaaaagcggcttttatcacggcgaacatgatgagcgggatgttcgacaaatcactcaacggctatacatctgttaccggccggacgatcgcagatcagctgacgcgccgatacgccggaaaatcgggaacgaccagcaccgacagctggatgatcggcttttatcccggtcttgcttcaggcgtgtggacgggatatgacaaagagcggacaatcgatgccgtcgcagagaaaaactatgccaaacaaatttgggctgagtttatggaaaaagcgcttgaagacgcgcccgccgcagctttaatgccgcctgaaggcgtgaaagggatgtacatcgacccggctacaggttatgcggcggcgcccagctgcccgtccaaatatttcgcttattttatcaaaggtactgaacccgagcaggtttgctatggaaaggaaatctataaggagcaaaacgccgggcacgaaaagcccgccgctcccccccataagcggcaaaagtggtgggaaaaatggtttaaaaaaggagaataaactttttagggggatagacgaaccccccggacttcatggcagtccggggggtttttcctattgctggagcagtccctttttcagctcgtctgatgaacggtcccaaagcccttgatcatggtttttcagaaaatcggcaagaacgcgcttagaaccttcatccatatgctcgacgataatcttccgcttcatcgacttatccattaaattgacgtgctccggaagcgatttgtagccgcggcggatgcttctgtcgaccgtcatttcgcatgccgtcacacccgcataataagggccttcttccctgcggtcgatcgtaacccacacaagccagtaaggttttccgttcggcacctcttctttgttcggcaaaaatttgattcctttttcaaccgtgctgcgggcgtgcatggcgccgatatccacaaacgcttctttctcttcaacatcgacaatgacaggcgagatgttgtcaaggcttaatgcgcctgctccaaatcccccgtgtccgtctgtcggatcgcttttaataatgttgaatccgattgtttttttcttttttccttgttccatcaaaaatacctcctacatcagcggccggaaaacgctgttaaatatcgatatgatcaattcccgcccgtcattcaaaaacggccagaatacatattggccaagcggtgtaatgacgataatcagaaagacgatcgagccgtacgcctcatatttcgacagcttcgcccgcacttcgggggcgaccacatcctgtataacccgaaaaccgtcaagaggcgggaacggcattaaattaaacagaaataaaagcaggttgagattcacccaaatcgtaaaaaattgaagcaaaccgctgtaaaaaccggcaggcagcgtcccggacagcttcacggacaaaagcagcaatataaaaccgatgaaagcaaggatcagattgctgatcggtccggcgattgacacgagaaatccggccagcctcgggtttttaaaataaaagcggttaacgggcaccggctttgcccagccgaatcccaatataaagatcaaaatcgttccaaacggatcaagatgcttaagcgggttgagcgtcagcctgccctgccgtttggccgtctcatcgccgaatttgtaagccacatacgcatgggcgacctcatgcacagtgaatgcggcagcaagtgtcaaaacaacatacggaatcatttccagcggataaataagaaaacggtctaaaatgtggctttccctctttctcatatacaaagatttactatctccagtatactataagagaacctgatgctaaagtgagcagccattttttaaaaggaggaggagaacatatgccatacgtaactgttcaaatgctggaaggccgcacagatgaacaaaaaagaaatctcgttaaaaaagtgaccgaagccgtctccgaaacaacaggcgcacctgcagaaaaaatcgcggtcatcattgaggaaatgaaaaaggaaaactacggtgtcgccggcaaacgaatgagcgatatgtaaaagaaaacggcgttcgccgcttacgcgcgggacgccgtttttattatttataccaagctttgtttttagtgatctggctattgtgagctgaatcccaaacatcgaccgtgtatgcgtagtcgtagttcataatgcagcggattccgcttccttgcacatcgtggttcaagccgaagttatgggaaaattcgtgggttgcagcttttgccgtgttggccgttccctggtcgaggtttacgctgaaggcgctgccgttcggcttgctgttgtatacgtatgcgatgccgccggcgtcaaaattactgttcgccgtaaatccgacgacgaatttatagctgcgcccgctgaaattgctctgaaggtttgatagaatttgagagctgttgctgcctgaagaggtccaaggcgccacagcttcgacgacaaaatcaacatcgtgatccctgttgaacatgacatccgcctgctcaataatttggacgattcttgtctgccaatcgctgtatttcgcccgatactgagcgtcagccacggcaaggacgctcactttctggcttcccgtgcctgcctgggttgaaaacgaccctttgcccgtattctttttaaacgttttcgttcccgtcacatttcctttctcatccagtattttcgtattgaccgttctttcaatttgaacttttcctttcaagtctttaaaatctttcgctttaggcaaagaatcaatataagttcctcttgcttcatgatcgtgctcgtgctcatgcccgcccgtcttggcggcaccggccgtcacaccgggaatgagactgacggaaagtaatagagataagaataaagaacgtttcttcactgcaaacccctccttattttttgaacgaatgaaaaattctgctagttatcaaaaaattccttcaattcatccaaaaagaggaaatattacatacgttcttttcactgcttctttcaatttccctacaaaaattccaaaacgcagacaaaaaaacaaaccaaaaaacctaccgtttttcggcaggcttatgaacaaagatttctgagcttttttatgtaagcgacggcttcatcgaattcttcgtccgtataccgctgtttgctttttacggtaaacactttttctctaatctcttcctgctccagcccctcaaaatacaaaatcgtcgacaccagttccaaaaaacgcgatgactggccgtttacgtcgtctaaataggctttaatatcccgcatatccagctcacactggctcaaaaactgctttcccgcttcagtgggtgaatagcggtattgataatagccgccctttttttctttgacttcatggagaaatccgagattgcaaagttcttcgacttgaagcgtcagctcctctgaataaggcccgtaaaaatgaaaatcatacttttcataaaaaggaagctccaatttctttgcgatataaatgattttctgcagctttttccgcccgacaatctcccccgaatccgagaagaccttcatcagctttgcatgttcttttaacaaatctccgccatctccttcatccttttctttctatttcagtccgagcaattctttcattcttttcgcatgacggccgtcaggcagcccttcgattaaatcgagcgggaaatacagcttatggtccgttctccgcttgcctgatatcgcatcgacaatatcggactgccgcgacagctccttaatctggccgttgtgcgtcagcaattgaatcgggaggcgttcctcttcttcccccggtctgtagaaatcataaggaagatctgaggacgaatccaccacaagataatattcgggatcaatccctgattctttaaacaagttggtcagttcaaagtaagtcgccatttcctcattcggattgaattccgcatactggaacagcctgcggttgataaaacggcggcataaatcagacaaaatttcgtcctcttctttttcccaggcctgaaaataataaagaatgattgattcatcaagacttaaataatcttccaatgtgacattgccttcaaaaatagaataaaaatgcactggcgcatgcgtgaaaacatagccttcctcatgaagctgctttgcacggtgaagaatcttcgtcaaaatcacttccgcacttcttgtcacaggatggaagtagacctgccagtacatctggtaccggctcataatatagtcctcaacagcatgcattccgctttgcttaatgacgatttggtcttcgcgcggccgcatgacgcggagaatccgctccatatcaaaatgaccgtagctgacgccggtgtaataggcgtccctctgaaggtagtccatgcggtcagcgtcaatctggcttgagatcaggctgacgacctgcttattttgataggttttcgcgatgacttcagcgacatcctttgcaaatgtcggacttaccttgtttaatactcggttaacttctgtatcgcctaaaatgatcgctctcgtaaagtcttcatgatcaagccggaagaccttttcaaacgaatgggaaaacgggccgtgccccaaatcgtgcagcaatgcggcgcaaaggcacagatcgcgctcgctgtcatcccattcctccccgcctttaaaaacgtcatcaaccattcttctgacaatttcatagacgccgagagaatggttgaaacggctgtgttcggctccgtgaaacgtcaaataggtcgtcccaagctgtttgattctgcgcagcctctgaaattcgcgggttccgatcaagtcccatatcagcttgtcccgtacgtggacatagcggtgaacaggatctttaaacactttttcttctgataattttccgtttggatacgccatttttgtccctctttttttcaaacgtgaggcaaactgatcgctgcccatccgtctctttttcttcggaaaactaaatgtatattgtaagtattgcccgatctgcttgttttctttaaggtctgcttctattatatcgagtctgtttttttgaaaacatccttgaatttacccggccatttgttccagcctgccaaaaagccgttaaacaagcaaaaacgcctgacccgttagggaggcggttattttttgagtttctttttcactttttcgatcagctcgtcttcatcaggagctgacagcggacgattattgacaaacgcaaacgatttttttcgtcccggcccgcagtaagactggcagccgatttccacttttgcatccggatcaatttctttcagacggggcaaaagcgtctttaaattggtggcctggcaatcgtcgcatactcgaaattcattagccatttcatacgcttcctttcgttttgttcatctgtctttatgaaaggcattcaactgtgccgaacttttataaaaaatgacaccatccttcattttacaaggattctttcattcctgcaaggatcgcgctaaaaaaatcagttcctattcttttagcaaacttgtataaatattttccaaaatggacaatctaataccaatactgacaatgggagttgagaagtgatgaaacaaagacaagacgcttggtctgaggaaaatgatttactgcttgctgaaacggtattgcggcatgtcagggaagggagcacacagctgaacgccttcgaggaagtcggagacagactgaacaggacatcagccgcctgcggttttagatggaacgcagttgtccgccaccaatacgaaaaagcattgcagctggctaaaaaacagaggaagcaaagaatgcgcgccctcggaaacggacagccggcgaaaaaacgcttattatacaagccgccggtcgaaacgaatgctgaacctcctgcagaaagcgttgttgagcagaagaaagcaaccgcagattcaagcgaacagcagccgatcgccagcgagcatctgccttatgttgatgagagctttaaagaagagttagctagtttatctcaccttctatcgccaaatcagccgcaggccggccatacagccgatacatcgaaagacatgacgatcgatgatgtgatccgcttcctgcaaaactatacaggaaacgaagaacaaactgccgctttaaaaatggaaaatgaacgtttaaaacaggaaaacgaagaactgacgaagaaagttgaaaagcttgaagcggaagtcaaaaagctggaaaaagaccagacaaccatccaggaagactacgaaacgctcgtaaaaattatgaaccgtgcaagaaaactagttttattcgaagaagacgaacacgctgcgcccgccttcaaaatggaccggaacggcaatttagaaaaaatggctgaatagcgctctcagaggatgcggcagagacgttcaggcagcaaggactgacaatgcatacaaacatttttcgatacgaggatacccctttctttaaaaaagggggtatttttacctttctgcggcttgcttttatatgacaaaaatttcataatagggatagcaattcataaggcggggtattcgatgaagtttgttttatatgcggttcagttcggcactgcggcccttttgtttttgttttctgcattggcaagctggtatcaaggcagcgagcttttaaaggtgccgtgggagtggaaatatacagccaagtttacaagttggctgtacggagaggactccattaaaaacgcacataatatttcacagcttgattttttcgtctatgcggccaagcatacgccggcaaccgttattttaatggccgtcagtttggcgtatatcatcgctttggcggcttatcttctcatcaaaacatatgtaaaacgaaaaagcgcttcgagcgcagcataaaaaaaccgctccggaagcggtgaggtgtggcaaaatcctaaaacgttcaaccgttttaggattttgccgtctttgaagcattttacagcccgctggtttttcaccgctttaagcatgcctgacaacgaatataaaggcggcggaggctcttcttctatccaaaaaccttttcattccgttcaatcatgcggacaaggtttttctcatacacttcctcttctgcgggcgtgagagggccttgataaatctccccgcccagctctttcagctgtgtcagaagcaagagcatcaagtcctgcaccgaaatgtcttcattgagaagctcagaaagcgaagccatcgtttccgggcgaatatcgggataaacggcttttgttttcccgcgcatgtctttcaaggcggtgtcgtaaaagcgtttgatcagctcagcgcgcccgcttccgctttgatcagcgcacaaataaatttgaacagccactccgcctctcaggcgcctctgggaaattcccgcaaatttccttcccccgatgctcaaatcaaagcttcctggacagtaggagcctttgatttcataggcttcgattgctgcgtcataggatgacagcattcgcttaacgagctcaaacatcgcttcatagcctctgtcgatatcaattccgtttttcttatcctgaaaaatcagggaaacgtttaaaaccccgctgtccaaaacgacggccagtccgccggaattgcggacgatggcttgatagcccgcttcttcaagcaatgaaatcccttcttgtaaataagggagccttgtatcctggattccgagcacaatcgtgtcatggtgcacccaggaacgcgcggtcgccggagataaacctttcccgacagaagcgcacagcgtatcatctatcgcaaatgattgttttgcatcaaaatatgggccgagactggattggtcaatgattctccatttcggctggatgagtagatcaatcggttgctttgccatatatagtgtaaaccctttcgttttgcatttcagccaacatccattataccatttacgaaaacatgtggtggaaattttcttatctccggcgcttccttcattcaagtgacgcttaaagacggttctccgaattcaagcggcagcccgacgtaattctcggcaagactttgagcggccgccgttgaagtcgtaacatggtcaagttcagccaattgaatctggtagtcaaaaggggtgtagccgtgatggcgatgcagcagggatgtcatataccaggaaaagcgttcagctttccagacgcggcggaggcaagactcagaatagccggccagccgttcgattcttccggtttcgtaatagtcttcgagcgcccatgcaagccgctggacatccgccatcgcaaggttcaggcctttcgcacctgtcgggggtacaatatgcgcggcatcccccgctaaatagagtctgccgtattgcattggatcgcatataaagcttctcatcgagacaatgtttttttgaatgatcgggccttcagtcagcttccatccgtcatcggccgacagccttaggtgaagcttctcccatatcctttcgtccggccagttcccgactgaatctgcaggactgacttgcaggtaaagccgctggatttccggtgtccttgtgctgacgagggcaaacccgtcttcatgatgggcatatacaagttcaggcgaggacggaggggcttcagccaatatgccgagccatccgtaagggtacaccttttcgtactctttgcggatctccttcggaatgctttgtctgctcggcccgtgaaagccgtcgcaccctgcgatgaaatcgcagttcagttcttctgtatcgccgttttcattctgataagtgatgacaggcgcttctgtatcaatatttgaaaggcggacgtcagacacattgaaaacgatgcgcccttccgattgcaggcgggcggcggttaaatctttgatcacttcatgctggggatagatggcaatgtatttcccccccgtcagcttgtgcatatcaattctgtgccgcttgccgccaaagcgaatctcaattccttgatgaaacatagctgttttcatcatccgttcaccggcacctgtttcattcagcaaatctaccgtcatctgttctagaacgcctgcacggacggtctcttcaatctcctttcgcgagcgggattcgatcacaaccgcttcgattcccctgcggtggagcaggttagcgagcataagcccggcaggtcccgctccgataattcccacttgtgtccgcaaaatggtttcctccctttatccatgttttgatgtggcttctaatgtatacccgcgctttccgacttagagacaaaatcaaatgaagcgtgtttctcttggacgagcatgatgccgagtgcagcaaaaacactcgggatcgcgaacaccatgaaagcctgcttcggctccatgccggaagcaaggatcaatgcaaacagcgaaggcgcaatgatcgctccgagtctgccgaccccgagcgcccagccgatgccggtcgctctgatttctttcggataatactcagaaatataaggattggcgatattttgcgctccgacggtgcatgccccgcctaaggcaatcagcaagtacagaagaacggggttcatcgtcattccaaatgctgcaaaacaaaaggctccgatgacatacatagccgcaagcacttttttatggccggctttatctgccaaatatccgccgaataccgctcctgcggcttgtccgcagcaaagcgccaagttgaatgacaagcttgacgacagcccgtagcctgacgcctgcatcattttcggaagccatgtatttaagccgtaaaccatgagaaggcagctgaaaacggaaagccagaatgcgaatgtgctggctgcacgtttttgtccaaacagtttttttaccggaaagcctttcttttctttcgcaatcaccgagatttgataattgtcgtcttccctgtagcgtcccgccggatgcacctgattgaaaatctcagccagcgctttcgtctttttcttcaaaacgtaaaatgacagagattcgggaaacctgctgaaaaagaacgggagcacgaagagcggcacggctccgatcagatagagcactctccagcttgtcacgggcacggcgaacatgccgacgagggaagccagcacaccgcctgcagaatagccgcaatacatagcggctacaatcaccgctctgtttttttcggcgaatactctgtcatcagctaatgctgcggtattcatccgcttcccccttttacagcttgatgcaaatattggttaattcgctgaagaattcgaggctgtgaatgcctccttctcgtccgagtccgctctgtttcatgccgccaaacggcgtccgaagatcgcggagaaaccagctgttgacccacaccatgcccgattcgatttgcccggctacgcggtgcgcccggcggaggtcgttcgtccataaggtcgcgcttaacccgtaatgtgtgtcgttagcctgtgcaatcacttcctcctcatcgtcgaacggaatcaccgttacgaccggaccgaagatttcttctttgatgagcctggaattgcgtgaaagtccggtgataatcgtcggttcaagaaagcagccggattcctgtccttcagggcgttttcctccggttaaaatattgccgccttcccgtttggccaattcgatgtagttcatcacacgctctgtgtgttcagaagaaatcaaggcgccgatattcgtgtccggatcaaaaggatcgccgactttgagctttttcgttttctcaacgaacttgttcagaaattcgtcatacgcttccctctcgacatagatgcgggagccgctcatacatacttccccctggttgacgaaactcgatttcaatgaggtgctgacggcttcatccatgtcggcatcggcaaaaataatgttcgggttcttccctcccaattcaaaggaaagtttctttaatgttttcgaagcagcttccataatgactttgccggttgtcgtttctccggtgaaagatatcgcatcgacatcgggatgctcagaaagcgcagcaccggcggaatctggtccaaatccgtggacgatattaacgactccgtcaggcatccctgcatcatggcagatttccccgagaagggtggctgtcatcggcgtcagttcagccggtttgataacggctgtatttcccgccgccaggcaaggcgccaatttccacgtcagcaaaagaagcggcaagttccacggattgatcagcccgacgacgccgaccggacggcgaatcgcataattgattgcaagatcgtcagtttgataagcttccgttccggctcctctcataaaatccgcaaagaaatgaaagttgaaagcggcacgtggaatatccaaagtgcttgagagcgaaagcggttttcccgtatccaatgtctcaagcctcgccagttcgtctttacgctcaagtatgatgtcgccgacctttctgatgatccgaatcctttcgtcagcggtcatgtttttccagcgtccgtttaatgcacgcctggctgccgcgactgcaagatcgacctcttttttgcctccttccgcaacgcttccgataatttcctgtgtagccggattgatgttgtcaaacgtgctgcctttctctgaaggaaagtacctgccgtttatgtagtgctgacagtcaaaaggttttacgagtttttccgatggagtttgaacattcatattctgcaaacatcctccttttcaaatcctttccattaaattaaaggattttaactgacaagaaaacagcaatgttcctctatgcggaacaaatcagacattttttccgaaaatttgatattttccgcttttttattttttatatcgtgttatattatggaataaaaggaaacaaaaacaagggagagagttgaggaacctatgactgttgagacgaaggaccaccagctgctcggttcagtaaaaaatgcgcttcggctgcttcaatcgtttaccttagacacaccggaaaagaaactaaccgaactcgcctcgtcgcttggcctcggaaaaagcacggtctcgcgccttttgtctacattggaaagcgaagggtttgtcatgaaggacccggaatccagaagatacaagctcggcttatcggtcctgcagttaaacaccattgtcaactccactcttgaaatcaaccgcgaatccctgccggtcctcaaacggctgaccgatgagaccggcgaaacgtcgcatatcgcgatgcgccgcggtctcagcgtcgtttatctcaatcggacggaatgcccccgcccggtcgaacttctctcatatatcgggcggcaaaacccgatgcactgcacaagctcaggtaaggtgcttctcgcctttgatgaagagggcatattggacgagtatgtgaaggaaggcttgaaaagctgtacgaaagaaaccattacagacggggacaaattgagggaggtgctgaaaaccgttaaagaaaacggatttgacgtcagttgcggggaattcatagatggtgtcacatcaatctcagctcccgtcagaaaccacgcaggtcgagtgttgtacgccgtcagtgtcgaaggtcctgcaaaacgcatcaaggcccggcaggcgaaaatcatttaccaagtgaaacaagcggcccgggatatttccgaaaggatcgggtactggaaacgaatataaaaattgggggaatcagctttgtatgatcttcacacgcactttataccgcgcgatgtgctgctttggctggaagacaatgaaaagagagtccacgctgtccgcgaaaaaaaggctggatgccaagcggattttttgacggtcaatcacaaatggggctttgaattaaaagagcttttctaccaggaggctttatatttggaagcccagcaggaggccggcgtcacacactcattggtatcgccggttccccagcttttcctttacgatctcgccgaagaaatcacggacgaattatcttttgtatacaacaaagcgcttgccgaatgggttaaaaaatacgacggccgcctctcgggactcggcacagtcccgctgaacagcccttcaaaggcgagcgagcgcctgaatgaagcgatgaacaacgggcttaaaggagcgattatcggacccggcgcttcgcaactacttctctcggacgaagcatttacaccgttttgggaaacggctgatagaagaaaagcgattatctttatacatccgctcctttctgaagatccgcggctccgccgcaggatgctgccaaacttgatcggcgttccgtgggaaacgacgatttgtgccgcagaccttttgttaagcgggtttacagaccggtttcgcaatgtgaaaattcttttggcccacggaggcggctttttgccttatcagatcggaagactgaacaaagggtatgacaaatgggccggcgtttcttcatcgctttcggctccgccgcgcgaatatttgcggaagttttggtttgatggtgtgctatgggagcaagaaagcgcggcatatttgaagaagcttgtcggagaagaccgccttgttccgggttccgattttcctttcgacctttgtcagtggccgcctctcgatcccggccggaaaggagcggagtctctgctgaatgtagcgattgaagcataaaaaaaggcgaacctcttcaggttcacctttttcaggaagcctattacagagcttgagccgccgtaatcagcgcaagattataaacgtcctcagcgttgcaccctctggacaggtcgtttacaggcatgttcagcccttgcagaatcggaccgaccgcttcaaagttgccgaggcgctgagcgattttatagccgatattccccgcttcaaggcttgggaaaacaaatacgtttgcatctcctttaatgacggagtccggcgcttttttctcagcgacagacggaacgaatgccgcgtcaaattggaattcgccgtcaagtgtaagctcaggcgctttttcttttgcgattgcaaccgcgttggctactttttcagtttcgtctgattttgccgaaccttttgttgaaaagctgagcatggcgacacgaggttcgatgtcgaacattttcgctgtgttcgcactttcgattgcgatttccgcaaggtcctggctgtcaggcgcaatgttgatcgcacagtctgcgaatacgtactgctcatcgccgcgcgccatgataaagacgcctgacgttttcttcacgccttcttttgttttaataatttgcagcgccgggcgaaccgtatccgctgttgaatgagccgcaccgctgacaaggccgtcggcaagccctttataaacaagcatcgttccaaagtagttttcgtctaaaaggatttggcgggcctgctcttccgtcgctttgcctttgcggcgttcaacgaaagcctgaacaaggtcttccatcccttcatatgtatgaggatcgtatatgtcaacgccatccagcgttaaattcaacccgtttgctttatctttgatttcctgctcgtttcctacaaggatcggctttaacacgttgtttccggccaatttgttgacagctgtaagaatacgctcgtccaaaccttccggaaatacgattttaactccttttcctgctacttttccctgcactgttgtaaatagatctgccactatataccctccttgaaagtgtcacaaatacttcatttctctattaagcatactcttttgtgatataaattcaatccttctgtattttattataacgtttacactttttaaacgctttttttaattaatttaatttcagaaaggctttaaacacttctattagtatataacagcctttcccagttatacgacagatggtcaccttttgttcaaaacttctaaacggataaaacgcggcaaactatgatatgatgaagacaagtacatacaaattgggagtgattgcaaaatgagcgaacagcaaaaaacgaatgaagccgcacaaacgcttgacggctggtatgcccttcacgatttccggacaatggactggtccgcatggaaaatgctttcaagcgatgagcgccagatcattatcagcgaatttaccggccttcttgaaaaatggggagctgcccaaaaagaaggaaacggaagccatacgctttacagcatcgtcggccagaaagcggacttcatgctgatgattttgcgccctacgatggaggaattaaatcaaatcgaactcgagttcaataaatccaaactcgctgaatacacgatacctgcttattcatacgtatccgttgtcgagctgagcaactatatgggaagcggagacggagacccttacgaaaatccgcaagtgcgggcgcgcctgtaccctgagctcccggatgccaaatatgtctgcttctatccgatggataaaagaagatcgggcgatgacaactggtacatgctgtctatggaagagagaagaaacttgatgcgcagccacggaatgatcggacgcggctatgcgggaaaagtaaaacagattattaccggctcaatcggatttgacgattatgagtggggtgtcacgctcttttcagatgatgtgcttcagttcaaaaagctcgtctatgaaatgcgctttgatgaagtaagcgcccgctacggtgaattcggttcgttctttgtcggcaaccgccttgcaaaagaacagctgcctgcatttttgcatgtgtaatgataaaaaagctccaaaggccgaggtctttggagcttttttgcctatttacttgcagttgcacggctgtgtaggcgggagtcgcccgtttttgcacttcgattgaagattcggcatagaaagtcgatccgagccccagtactctgttctccgcccggaatgtatactttcctgcggcaggcagcgttttgttggccagcaccatcttaaactccgcaatgcccagcagatcaattgtaagcggcagccttaccgtttttccgttgttcaaaatttgccctgttgtcagcgctcttccattcaccgtatctttcgttgtggcggaaaatcccgacggcaaagtaaattcaaccgttcccagcgccaagattgagttaggacgatatgttaactcaatatccgagaacgaccactcctgtttgctggcgcctgttatcaccgaatacaaggaagcgctcgcagccgggcggtagacagattcagtttttgttgtttgggcgctggcctggaacgaaggcaggaaaatcgaagccatcatcacgagactaaccgccaagattgacaatttagaacgatacattcttttcaacacagcaattcccccaagtcatcatttttttcatattcgtcatgacgaaagcgtgcaagaaagatgtaaaatcaagcaacgccttctttccaaagcgccggcactttggtgatttctattaaaaactaccattttttctgcttgtagtaaatgttttccatgtcatatttttaaaataaatgcaaaataatagaatttaaccaggcgttgttcctcttgattttctccgctgtgctttagtaaaggacaaaaggcctgcccgcttcccttctcttcattctcctgattttttgttgacaaacgatggatctggctgtacattattgacattattgaagcatcacgaaccgagtttatgattgacataaccttgctttttctccattcatgttttgaatggatgaagaaaggaacgaaaaatgcctaaattggtttcttcaaatcttgtaaaaggtaagatcatcaatattagtccgccgcagacgctggctcttagtttcttgattatcattgcgatcggggcttgtttattgaagctgcctggcgcctccactacttatatctcatgggtggatgctttatttacggccacctcggcaactacggtaactggccttgttgttgtagatacaggggcagattttacagttttcggacaaaccgttattatgtgcctgattcaaatcggcgggctcggcttaatgacgtttgccgtcctcgtcgtcatgatgatcggcaaaaaaatcggcttgcagcagcggattcttgttcaagaagcatttaaccagacttctttaggcgggcttgtccgcttggtcaagcacctgtttattttcacgattgtcatagaatttgtggcgtttctgatcctttcgatcagatgggttcctgaatatggtttgcaaaaaggcttgtttcatagtttgtttaacacgatttcagcctttaacaatgcgggattttccctgtggcctgacaacttgtctcaatatgtcggcgatccgattgtcaaccttgtcatcacaggccttttcattacagggggaatcggctttaccgttctgctggatttatggacaaagcgaaacttccggaaattatcgctgcattccaagctcatgatcgttggaacattgatcatcaatacgacagccgcgttgctgattttcattttagaatactcgaatccgggtacgctcggcggactgcctttggccgacaaaatgtggggcgcttacttccaaggcgtgacaccgagaactgccggattcaatacgcttgatatcgcccagatgacaacgccgtccctcctgttaatcatcgttttgatgtttatcggagccggaagtgcgtcaacgggaagcggaattaaactgacaacgtttatcgtgatgatcttggcgacgatcacctttttaagggggaaaagcgagacggttgtgttcaaaagggcgattaagatgaaaaccattttaagagctttagccatcattgtgatcagttttttattcgtgcttttcgcattatttatattgacgatcacagagaatgccccatttttgaaaatcgtctttgaagtattttccgctttcggaacagtcggcctgtcgatgggactgacacctgatttaacggccgcaggcaaagcggttatcatgatgatgatgtttatcggccgcgtcgggcctctgactatggcgtttacgctggccaagccgaagaaggcgccgatccgccatcctgaagatgaagtgattacaggctaatatgcagaaagaccgctctattcacgagcggtctttttgtttttctctttccaacatgatgtgtcgtcatattccctcccgcccgttcatactgtaaaagggatgggaaatattgatctatcatcttgagtcagcccacagcttttcagccggatcgtcttcatagcagcactttatcattcctcatgtatagatggtaggcatgactttgacacaatgaaatgaggaggaacgagatgaaatttaaaaaaaatcagtttcagccgcttcaggagcttgagatgccggatttccggcagcaaatgggccccaatccttatccgcagatggggcagatggggcaaatgtaccagcagcagggacagcagcctttcacccaaatgggagggcagcaatcgtatcagcagcccggtccccagctgacccagccgcagccggcaggcgtccaggtccctccaatgccttcaggacagcagccttcaccgagcatcccaggcatgctgccgcttgagcaatcctacattgaaaacattttgcggctcaatcgcggaaaagtggcaaccgtatatatgacattcgaaaacaatccggaatggaatgcgaaagtctttcggggagaaattgaagcagccggccgcgaccacatcattttaagcgacagaaaaacgggcacacgctatttgctgctcatggtgtatcttgactatattacgtttgatgagccgatcacttatgattatccgtattcaatggcctcatatacaccaagataaaggttcggtttaactaagccgaaccctttttttatagatgttaagcgaagtttctcacatcattattgcgtttgaatttgtaaatgacgatgaggaaaaagacagcagcgaaagcaaacagaatcatgatattcaaatacagaccttgaagctgctgtccctcctgcaattttgccagcgtatccaacacccaccgctgcggaagaaagtccgcgattcgctgtgcgaaagacggcatgatttcaaccggccaaaaacatcccgacagcatgatcgtcggcataaaaatcaaatttcgcaataccccggatgacctggagctgtttgcaaagacgactgtgatcaatgccaggccgaccgcgctcagcgcaaagatcagcagcaccgctgccatctcccaaaatgagatgccggtttccatccggaaaacatatttcaccataatcaatgttaaaaaggtttggcatgtgatgacagacatactgacggccacattggacatgacgtactgccttgccgttatcggtgtggtcaaaagcctgaaatacgttctgttctctttttcctttactaacagttcggtcaagcttcccgctgaaaaaagcatcgccatcagaagaaaaccgaccgtccgctccgtcatgtttctatttttcgccgtgtcttcaatcgtagatgttttgacactcgtttcagaattccggtaatttttatacatttcctcaaagcgcttttcattcccctgcgccgatttgccgattgcggcgatattatcaatataatgatagacatacgatttcacgaatccggtgatttcagcgcctttgacagatgcgattgcgatgtgagccggttcgccgctctgcacgctttgagaaaagccttgttcaaacgtaatgacgcaatcaatctcccctgccgcaacttgacttttcccttctgcttcactgaccgcactgatgttgacattctcgatccccttcaaaaaatccttagtatcttcggcgattcgtccgccgtcatgattgatgattccgacgcgcaaatccgtcttttccatgcttccctctgtcaaaagcgatacgaatatgcctagcaagggcagacatacaaacagaaagatattgatcttctttttaaaagtgacattcagtgtgtttttgacaagccatagcatttctttcatcctacagcccctcccttctctgcaatgagacaacggcaatcagcagaaataacagggataagccgatgttcagcaagatggcaggcagccctgccgctaaatcgtccgcaaatatgatgttcataatagcttcgttcgtccaggcgagcggagacaggtctgtgatcaaagctaaaacaccttccgcatcgtcgacaggaaaataagcgcccccgaaaaatgcaactagcggaatcaacacgttaatgatcgccactgccgcttcccccgttctcgtcaaataactgacgccgaggccgaggcatacggcaaacaatacgatgctgaacagcacggccgctacaagcccaagatgctctccccagtacgctttaaatacgtatttgctgactgcgacgacggcaaaaatacacaatccgtttgtcacaagattgccgatcagcttacccgcaaagatctcgcctttatgaaccggtgccgcgatcagccggtcggctgtttttctaagccgctccccccttattaaatagctggcgcttaatgcactgtaaagcgcgatcagagtggtcatggcaaccgcataataatccatggagctgggctttctgtctgagctgagcgacgtctccttgatataattgtcgcccggtgcgtccccgagcacggcgcccgcttgctcaggagcagctttgatgatctccgctgcggcattgtaccggtttgcaaacgcggtcagcattccttgaataatgctgtttttcatactgtttttatccatttggtaaagcttgatgccgctgttttcgatctcaagataagcatcgtagttcccctgtttgatttcttgtttttcatccatatcggacaacacttttttaaaatgaacgccggatgttttcgcttcctttacgaatgttttaaagccttgcgaaaacgctccgtcagaattgtctttatacaaaacacgaacctcgccgaccgctgcttgttgatcgaaagcattcgtcagcgcagtgcctaaaatcataatcagtacaatcggaaatgccagcataaaaaggaacgtccgtttgtcccgaaaagcagatacaatttcttttttcgcaatgatgagtgtattcaaaccttggacctcctttctaatcgcgcaactgtcttccggtcaaggtcaggaacacggtttccaaattaggcgctttttcttccaatgaacgaatctcggccccgtttttcatcagcttttcaataatctggtttaaattattgacgcctgcatccgagttgattttgatcgtattgtcttcaagaacggccgcttccacgccgctgatcgttttcagttcgccgatatcgatattttccgcagatttaagaacgacttgaatatcttttgtgttggtaatgatcgatttcagctgctccttcgttccctcggcgataatttttccgtgatcaacgatggcgatccgagtacagatctcttcaacttcctccatataatggctcgtgtaaataatcgtgcatcccatcgcatttaactttttgacggattccaaaatataatttctcgaatgcggatcaattccaaccgtcggttcgtccatgatgatcagctttggcctgtgggcgatcgcgcaggcgatattgagccttcttttcatcccgcctgaaaaatttttcgggaagcttttatgcttatcacttaaaccgacgaactgcaatgcttcttcaacccgattgtgtaaatgggccccgcgcagaccataaagcccggcaaaaaatttcacatttgcatatgccgttaaatcttcgtaaatggccagatcctgcgggacaatgccgatgttcatcttggcgaacttgcggtgtttcgcaatgttttttccgagaatcgtgatctcgccttcattgcttctcaacaaactcgaaatcatgtgaatggtcgtactctttcccgccccgtttgcgccgagcaatccaaatatttcgccctcttcgatcgagagtgatatattgtcgacggcaacgaagtcgccgaattttttcgtcagatgattgatttccaatacattcatgttctcacctcattttgatttcattataaaaaaaagatgaatggtgcggcagtgcagcatttcatctttttcacatgagaaaattcatattcaattcatgaaatcattcatgcttgggcagcagggtggtgacagagaagccgtttgaaccgtcaacgatcacctttccgttaacagaagcggcccgttcctccatcccgatgatccccatccctttcttgattttctgccgcccttttccgttgtctttcacttcggctttaatgagcgtattcagcacatgaatacagatggatacatgtgtcgcttcagcatatttcaccgagtttgtcagcgcttcggtgatgttttcaaaaataatcttccattgaatctgagaaataacatccaaatcgcctttatgcaaaaatgaaatattcatatggtactgcgccgaacattcatcgataaacagcctcaatctgtggatgcccatctgttctgagggcggcttgacgctttttaacgtcaatctaatattttcgatcccgtccttggagatgttaatcgcattttgcaggagctctgaagctttttccttgtctatgtcaaggacgcgcttcgccgcttcgagctgaatcagcgctcctgtcatggaatgaccgattttatcgtgtatttcctgggaaagccggttgcgctcctcaagcttataagtatattcggattgtctgataaactctttgttttcacgcagcatgtttgtcagcttctgcaggtctcttctcgtttgatcaatatgatgttcaagcttttcaatccgcgctgcatcatggcttgccgcccagtacagtaaaaattgaaaagcggccgtcaacgcgtagaccgctgagatgctttcattgataaacaagaccggaacgattgaagcggcaagtaccgcccacttcggcagcccaaaatcggctgctccttcacacagggtaaaaggaaggaataaaataaatagggggtgcacttctgcataagaaacgattgaaatgatgacagaaatgataataaaaagcttttttgtttttcctttaggtaaaatcgcaatcccgaggttgatacagacgtaaacaagaaggctgaacacaagccacggcagattgtcactttccgaaaaaacgcattgatagatgataaatcccaacaaaatcagtttgccggtcataatccgcaattccatggtgatcccccaggttaaaagttaactttaccggttaaataataaatcgcaatttgcgtccgatgttcaagccctgttttccccaaaatcgaggaaatataattggcaatcgtaccttcagagataaacagctccttcgaaatttctttattggacagccctctggcgatcagcgccataatcccgagctcgcgttcggtaaacaggctttcgtctatcttaggttccgcttctttatgctccgccaaattggacttaatcttgtcgaggatgatatcctgcatcacaatatggccgttgaacacacttttaatcgcgtctctgattcgctcgggttcggcatttttcagcaaatagccttttgcgccgttccgtatcgcagcgacgatgtattcgtcgtcatcaaacgttgttaagataaaaggcttggcgcccgtttctgaaatgagccgcgcagcttccactccatccatgttgggcatgcggacatcaaggagtgcaatatccacagcttgggcgcggcaaaattcgaccgcctgcaagccatcctccaccgtcgccagcacttcaaattcatcataagtgctcaatatgattttcatgccctctcttatgaatgaattgtcatccgcaatgatcactttaattttcatcgtttgaacggagaccggtcctccgccgtgcacatcccttctgtcaaaatgcaaaagccgggtctttcgccctgttcataacattaaattaccatgaatcagcccctgttaaaataaaaaaagccaatccttttcagagattggcttttttagtaaaactacaaatatttgaccactgagacaacgaccatgatccatgcggcaataaacgttacgccgcccagcggagtaatcgcaccgaggacgctgatttgcgtaaggctgaggacatataaacttccagaaaataaaacgattccggcaaacatcagccaccctgccgcagaaacgcttaccgcacctgccagttttgacgcgatgagcgcgacggtaattaaaccgagcgcatgatacatatgatactggacgccggtctgccagatttgcaaatatttctcgggaattttcccttcaagaccatgggctccgaacgctcctaaagcaaccgcaagcatagcattgacagcacctaaaatcaaaaataatttcacgatcaaatcgcccgcctttcctttatcatcatagcgtacatgtcatgaatttcaacttatgcaaatctcatgacacgatattgtcatatttctttttcctaagctgtatttgttccgcagcaatcgctacgattgttccaaggacaagcccattgcttaaaatggaaacaaaaacaggatgcatcccttccaaagcactctcaggtacaaacataacccccacaccggcaaggagcgcaatcccggtaacaaagcggatgttgccggcctcgtccttttcataagaatcgaattcggcaaatgccaggccgaccatcgttgaaaacacgacgaagttcaccgcaaaaccgaccggagacggcaggctggcaaaagtattcatgaccagcgggaagaagctgatgacgattacgatcagactcccgagcaaaaacggttttttggaagacatcctcgtcgtttgaataaaccctgcagctccggatatcggcacggtccctacagctccgagcagtccgctcagcaaatggctgacagaggcgataaacccggccggacgggcccgcttcctctcttccagcttctcaaactgtttgactgctccttcaaccacccgtatgcttgcgagcatattgacgattaacaaaactgtaatgaacaacgaagtaacaaccagcccgctgtcaaacatcggcatgccgaaaggaaaaatatccggaaggtggaacagctggttcgcacgctcgggcgccttcgccacgccgaatacggcaaataagatccagccgccgaaaagcgcaattaaaattgaatattgcttgagaatcggaacgtttgaccggctcatcagaaacgtagccagcataatcacaaccgccagaaaaaacacgggtatatcgacctcgtttttccggtagccgatccccatgacacctttaacgatcggatcgctaagctggatgaccagcagcagtaaataaatgcctgtcacaacaggagtaaacatcacagccagcttatcaatgactttaaataaactaaaaataaagaagaaaaccgcgcttagcagcatcgctccctgcagcccctggagcgtttcgatgtgagtcgcgaatacggtccctgtaagaccggcataaatcgtgtagacgccccaccagaggccagccggactctcattaatcggcaggcggtgtcccaataaacattggataaaagccgttgtgccgagcacgaaaaaagtgctttgaaccacccccgcggtctctccctggttcagcccgaatgactgcccgattgcaatgggcaccacgattgcggacgcaataataaatgccgtccattgtaaagccccaaaaagcagtttcaagttgatcaacctctcttttttaaaacagacggacggcgcctagaaatcaaaaatagaatctccgttgccgtcatcttcatgcttttgtttctcttgttttttgtattgttcagcaccggcgctccccatcattttttcgagcatcagctgatcgctcgatggtttattggccgtttgaacataaggcgaagactggacggacggcccctgctgcggttccacaatgacgtcgcaaagggagcggatcaccgcgatgtgcattttcaattcgttttcctggtggcattcctttgcttttttcaattcgtcctccatcttttgcagcaaacttgatatatgtatgttcatcaaatcgatcctccaaaccgttttcagtttccatttcattttaccaaattaacttctctcatgccgaatgcacttttcaaatattccttgcgaaaaattgcctctgctgctatgaagcattgtcttttacatttcaaaaaagaatattccccggcaaaacgcgggtgaaaaaagccaattttcttccggacagaagttgacagctgaaaaggctgtcacccataatgaaaaaaacttcactcgaatttctaaaagcgaaaggaaacagggaatggcagaacgaacaacctccatcgaaacgaccgttaccgagcaaaagcaatattttttaagcggggcaacactagctgttgaaaatcgtctggaacagctcaacattctaaaagatgctgtaaaaaagaatgaacggaacatacttgaggcccttcagaaagatcttaataaatcagagcacgaagcctatatgacggaaataggcattgtactggaagaaatccgcttcatcagcagacgattaaaaaaatgggccaaaccgaaaaaggcgaaaacggccgtttcgcacatcggttcaaaaagcatcgtcattcctgagccttacggcacggttctgatcatcgcgccatggaactatccgtttcagcttgccgtctcgcccctgatcggcgcacttgctgcggggaataccgccgtcatcaaaccgtctgagcttgctcccgccgtatcaaccgttatatccgagatgatcaaagatatctttccgcccgaatatgtgtccgttattgaagggggagtgaagacaaaccaagagctcttgcggcaaaaatttgactatatcttttttacgggcagtgttcccgtaggcaaagttgtcatggaagccgcggcaaaacagcttattccagtcaccctcgagcttggcggaaaaagcccctgcatcgtgcacaaggatgctgatctcaagcttgcggctcaaaggattgttttcggaaagctgacaaacgcaggacagacttgcattgcgcctgactatctgctcgtacacaaagatgtaaaaaatgagctgatgcgcgctctgaaacaatcgatccaaacattttacggagaaaagccggaaagccatccggcttacggaaaaatcataagtaaacgtcatttcgaacggttaatccgctttttacaaaacgagaatatcgtcacaggcggaacatatcaaaaagacgcactcaaaattgctccgtccattatcgatgaacctgactgggaatcgccggtcatgcaggaagagattttcggaccgatccttcccgtcatcggctatgaaacgatcgaagacgttatccaaatggttcaaagccgccctaaaccgctcgcgctctatttgtttacgaatgaaaaaacggtacagaggcacatcctcagccggatttcatttggcggaggatgtatcaatgacacgctgatgcacacagccacaccttacctccccttcggcggcgtaggcgaaagcggaatcggaagttaccatgggtatcacagctttaagacgttttcccatgaaaaaagcgttttaaaacagacaaacctgtttgacatttcattccgttatccttcatcgaaaaacgggctgcggatcatcaaaaaacttctcaggtagacaggagccagacaaacgaagaaccgcttttttagcggttctagcgattaaagattcggaagggaccagtcaatcggctcatccccgatttgttccaaatactgattggctcttgaaaacggtctgctcccgaaaaacccgtttctagccgagaacgggctcggatgcggcgattggataataaaatgcttggatgtatcgattcgttcttttttcatttgggcatgccggccccagagaataaaaacgaccggtttgtctcttttgtttaaaacatctattatactatctgtgagctgttcccagcctttccctttatgcgaatttgcctggccccgtctcacggtcaaaacggtgttcagcagcagaacgccttgcttagcccagctgacgagagaaccgtgattcgggatgtcggcgccgatgtcattctgcaattctataaaaatatttttcaaagaaggcggtggattgacgccgggttgtacggaaaaacttaagccatgggcctgacccggaccgtgatacgggtcttggccgagaattacgactttcacattttcataggaagtataatgcaaagcattgtatatatcgttcggttcaggatatacggtgtgttcagcatactcccttttcagcatttccctcagttcttgataataaggcttatcaaactcgtccttcagctgttgccaccagctgtcattcaaaatctgtttcaatgttcaggcctccttagttcaattgtcttgcagcggtgagcctggatgcaaccggttttccatcccagacgatttcgctttccgcttccctttttttcatggcaggttcttcgagtagcacgaaaaagttctttgtcggcagcttgccaagctgatgcttttcactcaagacatccaagtaatactgcctcattccgccaagatctccggactggttgtcaccctggtctgaaaacgcatagattacgcttgcgaaaggaactcttttcacgcgaaaccgctcagccgctctcaggaaaaagtcccaatcccaataattgtggacggcaggatcgaagtagccgatttcgtcatgaagagatcgtttgtacatacttcctgaaggaacatatgtagaaaacttcctcatttcatccaagttaaaggaatacgcaaaaaggtaacggcttgtcggaattctcatatcctctttttcttcaaaagacacaatctcagcatccgaataaacaaaatcggcggtctccagcgcattcaacattctctccatatggcacggcgtgaaaaaatcatcatcatcacacagcataataacatctccggaagcttctttcacccctatatttctcgcttttacatgcttcacgttttctttcagatgtataactctgatcggaagctctgaataaaggcgctcaacaaagtcgacgctctccccggcatcattaacaataataacttcaaacggttcaacagactgttttgcaatagattcaagcaattcgcacaaagcggtgacccgattatgcgtgacaactacgatagatatgttcatgtttgtgatatacgctccttcttatttcattctaaacatattaaagcataatgcgaataatttcacatggatcaaaagatggtctggttttttatgccaatccattcacgaaattttgcagaggaccgctgcactataaagcggcagccatttcattgtgatcttgcgaaaagctgtctataataagtaataaaccaactttggatggaatctcttatcgtggaggattgactgaacatgacaatgcacaaagcactgacaatcgccggctctgactcaagcggaggcgccggcattcaggcggacttaaaaacgttccaggaaaagaacgtctatggaatgacggcccttacggttgttgtcgccatggaccctgagaacaattggaatcatcaggtgttcccagttgatacggaagtcatccgcgctcagctgtcgacgattgtggacggcatcggtgtagatgcgatgaaaacgggcatgcttccgacagttgacataattgaattggcggcagacacaattaagaagcacagcatgaaaaatgtcgtcattgatccggttatggtatgcaaaggggcaaatgaagtgctgtatcccgagcacgcaaaggctttaagagagcttttggctccgcttgccacggtcattacgccaaatctttttgaagccggccagctcagcggccttggagaaattaaaacggttgagcaaatgaaggaagcggcaaaggccatccacggcctcggcgcccaacacgtcctcattacagggggaggcaaactaaatcacgaaaaagcggtagatgtattatttgacggccgggatgcagaggtgatcgaaggagaaagaatcgacaccccatacacgcacggggcgggctgcacctactccgcggcaattacggctgagcttgccaaaggttcaaatgtaaaagaagccatttattctgcaaaagcgtttattacggaagcgattcgcgaatcgttccgtttgaatcaatacgtcgggccgacaaagcactccgctttacgactcagcggcaaataaaaaaagccccttttatgtaaaaggggctttcatttagctttcccgtttgatcgttcttgcagatgatcttaagaaagattcgatcgattccacaaaaagagcatattctttcatttgttcataagtgtcctgaagtttcttttgtacttcctcatcatttggaattgttttatcttcaataccgccgatcagcttcttcatctggaggagcaaaccattgtattcctctctcgtatcctcaatatggtccgctatttttttcaaacgcatagcggtcaatttctgctggttttgatccacaaaaacaacccctttatactgcactctctctaaaaaaagcatatcataaagggattgtacagaaaatagcaaacagcagccgctccctttatgccattgtccaggatgtcacattcattatgatttcttttctggcactgatccaaacatcattatttcccgggtaaggaaaatatcttgccgtaaagacttcctctccctcattgacgaagatttcaatagaagaggcgtctaaaaagatgtttaaattgcgaagctcctgcaaacggcactgtctggcttccgttttttcatcaacataactgtttctctccaaggttatgatgccttctgctttattgtatatgagtcgggctgcacccctgaaggaaatctcaaaaccctcttcaataactttcggactgatgaaaagctcagctttgtccggttgaacaatgtccaatttttcggtgccttgattaagcgatattgccgcgtttttttcgttttggcggagcgttctaagctcctcgaccggtttttgaacgattttatcgttttgtaaatgcaattccctcggcaatgtcatacagtgcacccattgatgcggaatcgtcggctggctctgttcatcttggtctggaacacccatccaggcaaccaatatcctccggcctgattcgtcttttgtcgtctgcggcgcataaaagtcaaagccgcggtcaagctcttcgaaatctccgtgtgtaaaccagggtttcagctcgttcaattcaccgacaaaatagcctgactgatagacgttttggtagagcatctcttctgcttcaaggccttgcggacagacaattaagacgtctttgccgtccagttcgaacatgtcagggcattcccacatatagccgaattccccgagctgatctgtatttgaacctgtgatatcgccgaggaactgccagtccttcagattatccgattgaaacagcaccgcccttccctcaagattttcagtctgggcgccgagcaccatgtaccagctgccgttatttttccatactttcgggtcgcggaaatgagccgtataccctttcggaagccttgcaacaaccccctgcttttcaaacgagatgccgtcttttgagacggcgagacattgataggtctccctatttccctcgccgtctctgacattccccgtgtaaaacagatgcagcacatcattttcagcgatcgcgcttcctgaataacaaccgtttttatcaaaccagtcgctcggcgtgagggcgatctcttcatgccgccagttaaccagatctgctgaggagtagtgtccccataactttgcaccgtgccccgttttaaaaggcatccactgataaaaaagatggtacacccctttccactgaatgaacccgttcggatcattcagcagtccgacaggaggcatgatatgataatgcagccgatagggatcaaggtttacaatatcccggtattcttcaacccggttcattgccttttgacgaagctcctgatcttgattcatcgttttccctccctccgtcactttttctcgtcttcattaatgcctaagataaaggctgtgataaatgcgacagtcacagaaatcgccattccgattaaatagtggatcaggttgcccattccaagcggggcgacaatcgcaatcatcggaattcccgtcaaaccgtatgcgtttgctgcaacattcataaagacaacgtatgcagctcccagcgctcccccggccattgccgcgataaacggccggcggtaacggaggttgacaccgaaaataacaggttcggtaatgccgagaaaagaagagaaagcggcaggtaaagcaatttcttttgtttttgcacgctttgccaaaaagaatacggcaagtccggccccgccttgggcgacattggacatagaccagatcgggagcaggtagttcctgccgatatcagcgataaggccggcctcaatcgcatggaaactgtggtggacaccagttagaacgatcagcgagtatgttcccccgaaaatcagtccggcaacaggcccggcaacgtcatacacatatgttaaaatgttcgtgatccctgtaccaagcattcttcctaaaggaccgatcgcgataaaagcaatgaatcccgttgaaataatcgtgacaaacggtgttactaatagatcgatcgcatttggaacgattcttcttacgcctttttcgattttactcatcacatatacggcaagcaaaattggaacaacggttccttgatagccaagcatctcgattttgagtccgtaaaagtccatcacatccggtgatgcagttgcaagtccccaaggattgaacaagctcgggtgaattaaaattcctccaagtacagcccccaggtaaggattgctgccaaactctttcgcagcactgacaccgatcaagatcggaaggataataaatgccgcgctcgagaacatatcaagcattttatacagcgccgcatcaggatcgacccactgaaatgccttcatcattcccaacagccccattaataaaccgcttgcaacaatggccgggatgattggcacgaaaatatttgacagcgttttcgcaaatcgcgctaaaggattcatttttccctttgcggcatcgctgtgctgaaccgtttccttttggtcaagattcagctctttggcaaactgttcatacactttattaacaagccctgttccgaaaataatctggtattgaccagagcttgaaaaggctccttttacaccttccagctcttcgaccttttcctggtcgatttttgcttcgtccttaatcaccaaacgaagccttgtcgcacaatgagctgcactgatgacattatcttctccgccaagaagctgtataagacgtacagcgatttctttatgaatcatgatgactccttacctttttttttaaaaaaaagacagaaaagacctaaaattcaccaacgaatggaggatagattttccccattcatctagcaaattttaggtcttgcctgctttaccagtcacaatccccggtatttattttttaatacgctttcattttattatgtgataacgctttcgtcaactacttttttattctctgtgaaaatcgacctaaaaaaagcctgatcgcgcgatatcaggcggtattacctataggaatcatttaaacgctggacatgcagcgtaatatatccgacttctgattccggaagatgaagatcatattcagtttttacgtaatccgccagccctgccgcacatcggtagctttcaggatacttttgccggatgaaataaagcatgtcatcgtccatgacatgaaacgcttcatttgattccagccggttgatggcatacctgagatgcgtgacaagacgctgatatgagatgctgttttcgtcaatcttctgattgaaacagcattcgattttttctatcaattctttgatgatgttcgtgtattttagagtcttctgcatgttttccgcatccatttttgcggtatgaatatgcagcgcaatataacccgcttcatcatcaggcaattcgactttcagtttttctttgaccaaatcgattgcccagagtccgatctcatattcttttttataaagcgctttgatttcatttaacaatttattttgaatgacgaatcctttgcggactcgctcgatcgcaaatgacaaatgatccacaagggcgatgtggatatgatcgctcaacggtgcggacagctgcccttccgcatagctgatgatctcttcggcagcttcaatatgttcttccggaagtgtttcgaggatttgtttaaacttttcattttcttcatgaatggtaaaaattttttctaccttgtttcttggaatggtatcgtttttgcctttttgaaaagcgataccaggtcccatgacaattttttcttgaccatcctcctttatgattgctgcattgttgttcaatactttatagattttcaaagctgtcacccacttcccattatgagtgggattttaccttgtttaagttcccgtgtaaagagttggtccggctcttacccttttcaccgcttttttgcaaacagcccggctgggttctgtcgtataactgccgggcttcattctcttacagcccgacatccgctctgtcttctcttctcttttttccgaaaagccgcctgcctgataagcatcggcagcctgatatgtaccgccggcgaacgccgtcaccttcatctgattttctctgacaggcatcaccgcattcagcagcacggctgtccataattttaaaaatgatatcaaacctttcataccgatccctccagtttcgttttgataaaactagcaactctattaaactttcttgctctatcttatcccagcaaaatgaaaatgtttgtcacaatgtgtgtgcaaaatgattctagtttttagaagttttgttgaaaactgaaggaatcgcatgattcagcggatacaaaccatgaatgtaacttactcacagcttatcctaaggataaacacatattacccacaggatatatccacatatccacatacttattcaatatttagtataagaacgtatattccctacaatatctatacacaagtttattcacttatacacagtaaattgtgcataaatctagagaaattcactccaacacattgaatctttgaaaattatttctatatatagaaggatttttttgaaactgagagaatattttaaaagttcgaaactctaataattacaaagaaacatttatccagaagggggaaaacagattgagaaaaagtatcgtgcgctattttgttatggcttttattctattatttgcgttatccacattcctcaccggagtgcaggcaacttccgttcccgataaaaagtcgcctgagcttgagaaagctgaaatctacggtgatattgatgtgacgtctgataaacagacgacggttatcgtggaactgaaagaaaagtcgcttgccgaagcaaaagcggacggagaaaaacaaacgaaggcttctctaaaaacagctcgaagcaaagcgaaaagcaaagcgctgaaaacacttaaaaaagcgaaagtaaaccgcgaatacgaccgtgtattttcgggcttttctatgaaactgccggccagtgaaattccaaagctgctcgccgtcaaggaagttaaagcggtttatccaaacgcaacttacaaacctgacagcgtaaaaggaaaagacgtgacacttgcagcagacgccatttatccacagatggataaaagtgccccgttcatcggagcggatcaggcatggaaatcgggctataccggtaaaggcattaaggtagccgttattgatacgggcgtggattacacccatcccgacttaaagaataatttcggcccatataagggctatgactttgtggataatgattatgatccacaggaaacaccgacaggcgacccgcgcggcggagcgactgatcacggcactcatgttgcaggaacaatcgtcgcgaacggacagattaaaggcgtggcgcctgaagcaacgcttcttgcttaccgcgtgctcggccccggcggatcaggcacaaccgagaatgtgattgcgggcattgaaaaagccgttgcagacggagcaaaagtgatgaacctctcattgggaaattcgctgaacagccctgattatgcaacaagcatcgcactggactgggcgatggctgaaggggttgtcgccgttacgtcaaacggtaacagcggaccggaaaactggacggtcggctcgccgggaacatcaagggatgcgatttccgtcggcgcatcacagcttccgtataatgagtattcggtgacgcttccttcgtattcatcagcaaaggtgatgggataccaagaggaaaaggatcttgaagcattgaacggtcaagaggtggaactcgttgaagccggcctcggacaagctgacgatttctcaggcaaagatgtgaaaggaaaagttgcggttatccagagaggcgtcataccatttgttgataaggctgaaaatgccaaaaacgccggcgctatcggagccgtgatttacaataatgcaacaggggaaatcgaggccaacgtcatggggatggccgtaccgaccgtcaaattgtcaaaagaagagggcgaaaagcttgttcaacagatcaaagaagggaaacactccgttgtcttttctttcaaattggacaaaaagctgggggaaacaattgcctcattctcgtcccgcgggcctgtcatggatacatggatgattaaacctgacgtttcagcgccaggcgtcaacatcgtcagcaccattccgacccacgatccgaaaaacccgtacggttacggttcaaaacagggaacaagcatggcttccccgcatgtcgcgggaacggcagccatattaaagcaggccaaaccggattggacgcctgagcaaatcaaaggcgtactgatgaatacggcggaaaaactgacggatgaaaatggaaagcctctccctcacaatacgcaaggagcgggcagcatccgcatcatggaggcccttaaagcttcatccattgtaacgccgggcagccattcatacggaacattcctgaaagacaaagggaaacagacgaaaaaacaagcgttcacgattgaaaacctttcttcacacagaaaagcctatcagctcgaatactcctttaaaggaacgggcatcacggtatcaggaacggaacgagtcgtggtaccggccaatcaaacaggtaaagcagcggcaaaagtaaccgtcaattccgcgaaaacgaaagcaggcacatatgaaggcacggtttacatccgtgaagacggaagaaaagtcgccgaaatcccgctcctattgatcatcaaagagccagactacccgcgcgtcacatccgtaacagttgaaccgggagcaaagcagggcgcttacacgatcgaagcctacctgccgggcggggctgaagagctcgcatttctcgtctatgatgaaaacctgaaccttctcggccaggccggcgtttacaaaaaccagggcaaaggctatcaatcttatcaatggaacggcaaaatcaatgacgccgcatcccttaagtccggaaaatactatatgcttgcctatgcatccgccaaagggaaatcaagctacgtattgacggaagacccttttatcgtcgaataatgacaagccttgttgagaaccactcaacaaggcttttttatgttaaaatacggataatgcgttcaggagaagctccccttctcttcaaaacgtgaaaaaagcaatcggaggacatcgtgtatatgctttcttttatcgtattattcggcttatccttcattattgtctgctttatatttttcacgactttgtacttcgccgtcaacctgcagaagcgcgagcccaagccttttcaaaaagctgcggagcaaaccgtcgataccatcatcctcattccgctcagctggctgtttaccgctttatacatatgcattctgtttattcttttcccaatccgccattttctcgatttttttcagcaaaaacgctaaattgactgatgaaacgcttcggccagcagccggtatgaatccaatctgtcttgaaaatcgtgggtgatcgtcaccgccatgatttcgtccgttccgtaagcgccggccagttcaagcagctgttcctttacctgctgcggcgttccgatgaccatccgttttcgattgtcttccactctctttctttcataaggagaatattgataggacagggccgtttccaatgatggaaagccttcggtcaccatcccctgttcattggccaataaagaaaaatccaagcttttggcaaggttctccgctttctcttctgtctcagcgcaaatcacaaatacggcaacgatcacatttggctgttcccccaatacagaaggttcgaacctctctttgtacagtctggccgcctcttctccgccttcaccgttaataaattgagcaaatgtatatgatgcccctgtttgggcggcaagccttgcgctttcccctgaggagccgagcagccaaacagcgggcgctgtggcgatgttcggcgttgcggtcaagttgggaaagcggtgatgttcatcggcttgatcgtataaatatgtgacgaggtcctgaatttgttctggatattggtcagccatccgtcttcctccattttgaagggccattgaagcgatcggcatccctcccggagcacgtccgacacctagatcaatcctgccgggcgcaagtccttccaagacgcggaagttttccgccaccttgtaggcgctgtaatgcggaagcatgacgccgccggatcctatacggatcttctctgttttagccgcaagataaccgatcagaacctccggacttgaccctgccaagttcctggaaaaatggtgctcagaaacccaaaacctcttgtatccgagccgctccgccgcttgcgcaagctccaccgtatgctgcaaagccagttcaggtttgcttccttcagaaacaggagtctgatccagtatgcttaatgacaacatctttttcaccccaaatcttcgtttactttttctgcgcaaaaagaaataatagtatcatggataaactaaaggagctcccagtactgatgaatgagacgaagcaaaaaacgcacccgccagccgtagaagaacgctttgcaaaaggctgtttattcggaatccttttcagtctgcccttttggctgatgttttatcttttccttcaatacatgctgataagataagtcccctccgagtcggaggggaggttccttaccttttgttcaaaccttttcctttaacgaattcattcatatacgcacgcggcggctttttgaggctgccggtgatctggtctgtccatttgtcagaccgtttgccgtccgtccgcttttgataatagtttgaaatcgtttcgtcatatgcggacaaatgcttttcaaactcggcatcatccgcttgatagacattttcatgataaatgtgatcaagcggcagacgcggttttttggccgaagggttggccggctggccgacgacaagcccgaacagcggaagaacgtattcaggtgtttcaagaagctcggagacttcgttcaaattgttgcgaatcccaccgatatagcagatgccgaggcccattgattcggccgctattgacatattttgagcggcaagcgctgcatcgatgacgctgaccataaaggtttccgtcccttcaagagaagctgtaatatctacaccctttttccgagcgattttgtcatgcctgtaaagatctgcgcaaaatacaaacagatggccgtttttttcaacatatggctggttcccggccaattccgcaagcttgcgcttcttgtccggatgggtgacaccgatgattgaatatgcttgaatatagcttgacgtcgatgcgctttgagcgctctccacaagcaggcgaacctcttcttcggtcaggagccgatctgtaaaagacctgatcgaacggtgatttaaaatagtttcaatcgttttattcatcctcttacctcctcaactttatcatatccaatatctgcttttctctaaagcaaaacggtttggcggactgcagatggattcaatttcatatggtaaaatgatagaattgtcttactattttcgaatcggaaagggagatgacggtgaaatccgtaattgaagaattagatgcattatttccggaaatgatcgaactaaggagacattttcaccaatatccggagctttcccatcgcgaggtcaatacaccgcgcaccattgcaaattacttggaaagcctcgggattggcgtgagaacgaatgtcggcggccaaggggtcgtcggtcacattaaaggcggccgccccggcaagacggtcgccttgagagccgatttcgacgctctgcctttacaggatcaaaaaaatgttccgtaccggtcgactgtccccggcgtcatgcatgcctgcgggcacgatgcccacacgtctgctctcctcacagccgcaaaagccctggcaaagcatcgaaaagacttgaagggaaatgtcgtgctgatccatcaattcggtgaagaggttacaccaggcggcgccaagccgatgattgaagccggctgtctcgaaggcgtggatgccattttcggcacccacatctgggctccgatgcccgtcggtcaagtcggtgtcaaatcaggcccgatgatggcagccgctgataaatttaaagtcacgatatccgggcggggcggacacggaggcgcgcctcacctaacgacagacgctttaatcacgggagcctcggtcgtcaaccatctccagcaaatcgtcagccgcagaatcgatccgacagaagcagccgtcttgtcgatcggaacatttcattcaggccaggcatttaacgtcattgccgaagaagcggtcattgaaggaacggtccgcaccttttcaaagcatgtccaggaaacgatcatcgccgagatcgaacgcgtaattaaaggcgtctgcgacagcaacggggcctcgttttcactcgattatgaaaaaggctacccgcctgtcgtcaaccatgaaaatgaaacggacatcgtccgtcaatgcgccaaacatgtcgtgggccctgaagccgtcatcgaactcgaaccgaatatgatcggcgaagatttctcttattatcttgaacatgtccctggatcattcttttttaccggcgcgggcaatccgcagactggagccgtttacccgcaccatcacccgatgtttgacatcgatgaaaaaggcatgctgaacgcggcgaaaattcttgtgtcggcggctctagcatttttaaaccaagactaaaaagacagcctgattcggctgtcttttttatttaaacatatagcctttatatttcgtcagctggcagctggcgttataaacgatcgcatagccgatcagcgcggacaatacagagctccctccgtagctgatgaacagaaggggaacgcccgtaaccggcatcagcccgacgttcattccgatattttggaatgtgtggatgacaatcagcgccgtatacccaacacagaaaaacgatgcaaacttgttgtacgggtgtatcttatcaatcagcacgacaagccggtaaatgagaaggaaaaacatgatgacgacaaatgtacagccgataaagccgaaactttcgccgatgacggcatagatgaaatcggtttggccttcaggaacgtatactttcaaattgttaatgcccgttccgaagatttctcctgagccgatcgccgtaacggctttttcggtctgatacgtatcattcgcgtcctgctggctcgaatcgacccatgtcatcacccggttgatctgatattgctggatatgcaatgtatcctttgaaaactccggaaaattgatcaccaaaaacagaacgagcagtacgagcgtgatgcccgatcccgcgactatgaaaatcagcttccagttcacgcctgataaaaacaccataacggcgacaaagaacatgcagataccggccgtaccggcgtcctgcattaaaatcaatccgaccggaaccgccgacactcccgcgattttcagcaacaggcgaacatcctcctgcatcgagcgcgagcctttcggacttgctttggaaatcaccgaagccagcatcataatcaggccgattttcataaattccgacggctgcagcgtgatcgtaccaaattgaaaccagctttttgcgccgtttttaatcggagcgatcgactccggactaacttttaacacgagcaacgacaagatgccgaataaatatatgtaaatgcttaacttttcaagctgctccagatcaaaatagagaaagccgacgatcaccgaaataccgagcagataaaagaacaattgctttgccggataacccttcggtgaaaaagacggctccgcagcgtaaacagcgatcacactgattaaaaagaacatggctaatataaaaatcaaatcgccctgataatagggacttgtcgtatttttcttctggcccattataccccgccttatttcttcatcaaaagcactaactttcattatagcatgaacaaccgttcacattgcgaaaaagggtgaataaaataacagcccgcatacatcaggctgttatttgaacatatagctttgatactttgttaactggcagcttgaattgtagacaaccgcgaagccgagcaaggttgctacgactgagctgcctccatagctgaccaaaagcagcgggacgccggtcacgggcataatgccgatattcattccgatattttgaaaggtatgaatgacaattaaagcggtaaagcccgcacagaaaaatgaggcaaacctgctgaacggatgtattcggtcgatgagcacgacaagccggtaaattaagaagaaaaacatgatgacaacaaaagtgcacccgacaaacccgaagctctcgccgatgacggcaaaaataaagtctgtttgcgcctcaggtacatagacttgaagatcgcttacaccatttccgaatacttttcctgaaccgatcgccatttgcgccctttcgacctgcattttatcgtcggcattctgttcgctcggattgacccaggtcataacgcggttgatttggtattgttcaaccccgagcgctcccgcaacatcgggaaatttgatgatgacatataaaatcaaagcaacggctgcaagacccgttccgaagataagagagatcaatttccagttcacgcccgacagaaataccatcacaaggatcacaaacgcgacgatccctgctgtacccgtatcctgctctaaaatcaagccgaacggaacaatgatgataccggcgattttcagcagaaaaatccagtcttcttttaacgtacgcttgccgacagggccgtttttagacatgaaggaagccaagtacatgatcagcccgattttcataaattccgacggctgcagcgtaaacccgggaagcataaaccagcttttggcaccgttgatgaccggcgcaaacctgtatgatccgatatatgccggactgaactttaacacgatcagcatcaaaatgccgagcagatagaaataaaagctgagcttttcaagctgctccaaatcaaaataaagaaacacgatgatgatgaaggcccccagtaaatagtaaagggactgtttcatcgcaaagggttcattatattgattaaactgctgagcagcgtacacagccacaacgcttatgataaaaaagacaatatagacaaaaatcaaatccccctggtaaaagggatttgtaatattctttttctgactcattcgaaatcccgcccttataatatgacacaatgaattaatgcaggaagacggcatccgcttcctcacaaatgatatgacgtacaaaagaacaaaatgtttcgattttattgcgaacaaattcctattctattttaaaggatttttccaactattgtcgaatgtgataaattcattgatttttgcttgaaatgtattaaaatgagtaatgttgcataaaattaaacttttgcctccggcagaagtggtacagaatcaccaattcataaggagtttttcatttggataaagcacttcaaaagcgtaaacggcttgatatcataaaatttttggtcccttcgcttatcggaattattctgtttatgattcccgttaaaattgaaggaaatttaacgattccaattgctgttttttcaaatgcattgcaggagctgcttcagcagcaattgccgctgatcatgacggtcatcgtaaccgcaacatttatcttaacctttatcaccaaaacctttcatccggctttcatcaaaaaaagcgagtttttctataacctgctgaatgtatctttattttggtatatcgtccgcctagtcggcatgattttcgccgtgatggcgtactttaagatcggacctgaagcggtgtatgccaagagtaccggcggaacattattattcagcctgcttcccgttctcttctccgtctttctatttgcaggcctttttctgccgtttctgttgaatttcggcttgctcgaactgtgcggcgctttgatgaaaaacctgatgaggcctgtctttaagctgccggggcggtcatcgatcgattgtatggcttcatggctcggcgacggcacgatcggcgtgctcctgacgagcaaacagtatgaagaaggattctacacgaagcgtgaggccgccgtcatcggcacgactttctcagtcgtctccatcacgttttgcctcgtgattatttcacaggttggccttcctcatatgttcgttccgttttatttgacgatattgctggcgggtgccgcagctgcggtgatcagcccgcggattccgcctttatcaagaaaggctgatacttatattacagatcaagcggatcaggatcaagagaagattcccgaaggatacactccgttccaatgggggctcagccaggctgtcgcaaaagcaaaacaaaatacaagcgtcaaagatttcttgcaggacggggctaaaaacgtactcgatatgtggatgggcgtcgctcccgtcgtcatggcgctcggcacagccgcgctgattgtcgctgaatatacgccggttttcaaatggcttggactgccgttcattcctcttctcgagctgctgcaggttcctgaagccgctgaggcctcacaaacgcttgtcgtcgggtttgccgacatgttcctgccgtccgtgctcggaagcggcattgaaagtgaaatgaccaggttcatcatcgcctgtgtatcggttacacaattaatctacatgtccgaagtcggcggccttttgctaggttccaaaatcccggtgacgttccttgacctcgtcttgatttttctcgttcggacgcttattacgctgcctgtcattgtactgtgtgcccactttattttttagacaaataaaaggctcccggcgccaaatgccgagggccttttttgtttagaaaaaaatcgttgatccaaggggtctgcggccttatcgtgcgatccgcctgtccgcttcttcgcttcccgtaagccctgccggcctcgtataggaaacgcgcggttcttggctaactttcgcatgatcaatctcctccacgcattttcgctattcacttcttctccccttcaccctttatgtcctaactgaatcaccgtgaaaattgagccgatagttggagcggaaaatgctttccagtatgtatcatttttcgaagaacgtggtataataaatgtaacagaatgttcacaaaatattctccaattagacacaattgatgtttcattccgctttttttgacagcgctatcattatcgaaaggggctgaaaacgcatggatatgtttttcgcttacttgctgattgcaagcgccactcctttatttttatggctggacaacaaaaaggtcgcaatttcttctattccgcccatcattttaatgtgggtattcttctttttctatatgaccagcagcctttctcctacaggacactctctcatgatcgcactctttattctcaacgttgtcatcgcccatgtcgccgctttcatcatctacggacttccattgatccggaagcacatgagccgataaaaaaagtgccggtttttccgccggcgcttttttgctgttaaacgcaactatagatcaaagttaaatgttgaatgcgagtaatctttgatgaatgtttgataccggctgctgaagtcaagcaggcggtatattttcgatttttccgcaaaccgcttatggttgtctctggccggataataaacggacatgccgcttcctcttgggtgctccggagatttgatgttcatgatgacagccttcttgacggattttacgacctcttttgcttctttctcggctccgatctgctgaccgatcaagcttgacaaatccgccaaatcaaccatatccgattcatctgcataatcttcagcagcgagacgcgcgtagtggagcaggcgctttccgtcaggctctttcaatgccaggttcatgtttacgctcaatctgtcgagggcatcgacagcgtctttgacacggttcaattgaattaaagactgctgcaggtcttctgtttcaccgttttcttttgactgctgtacgtagcctgcagcgatttccctgccaagctctttcggatcgattgaagggtcgtcttgtacagactgcagcgcccttttataatcccagccgttttgattcgtatagtcgactgaagccagcatgtacttaccataatccctcaaggcatatgccgtttcaatcccggccattttgcagttgtcaaaaccgattaaatcaaacttttgcttcgtatgttcataggccgttttgattcccgactgcagctcgcttattttcattttcttattgccgaagttttcgtctcccccgtagccgtcaactgagccaagcccatgcccccaaaagatcaatacatattttttagccggatatgttttgactccccatgtgataaaatctgtgacggagccgggactgtccatatttttcttcccgacattttcgaggggcaccagcttctgatgttcaactttccacctctgattcaccttgtgactgatcgacgggttcgcccatttttttgctcctcctgtctgaagaacgacattgacgtttgaagatgaacccgcatccatcatttcctgaatgtcatcgcttgccatatgaaaatcgctttccatgtcagaaccaatcatataaacaagaatagtatagtcgtccttttcttttaatagagcggctggtgccggctgaaaaaaggcgaatgaaataacggaaaacaaaatccatttgatcaagttcatcttcttatgctccttatttaagattccgggaaataaataagagagtagtagcagtcttcgtccggctgttcgtgttccaatgaatacccgacggatcggaagcacgctaagcacctcttgttatcctcttcaattccggcgaaccatttgttgatccggctcatttccggcaatgccatcgtccttttgatgagcgcttttccatatccccctccgcgcaaaaacggatcgactaaaagggcaatgttcccggtcaagtcctcctcaacttcaaccatgacaacgccgacaggcttgccgtcctctaaagccgcccatacccggtagttttcattaccgcctgcaaaattgaaccattcgtcaagagggagcatcccttccagccgccttttcacctctgcatcctcaaaccaggtctgcagccattcaatatcttcttttcgaaaaagacgaagttcttctatattgctcattgctttctcctttattgcgcgtatttttcagcttgcaggcgataaagctctgcgtactgtgcctgatttttcatcaattcttgatgggttccggcctccgccacccttcctttttctaaaaagatgatgtggtcggcaaaacgggccgtgcttaaccggtgcgagacaataatgactgttttgccctgcgtcagcttttgcagcttatcaaatatctcttcctcaataaatacatccagcgcagaagagggttcatcaaatattaaaatgtcggcagactcatcacgcataaatgcgcgggatatggcgatccgctgccattctccccccgacaaattcctgccgccgaacaatctgccaagctctgtttcatagccgtcttcaagcttatgcaaaaactgatccactccgccgaaagccgaagcactttttattttggccaagtcggtgcatgaagaaatgtcgcccagaccgatattgtatttcaatgtcatttcgtaccgcaaaaaatcctgaaacacggccgcggcatttgaccggtaatgctctatatcatacttataaagcggtaaaccattatacgagatcgtgccttgattgggatcaaaataacgcagaagcaatttaacgagtgtgcttttgcctgatccgttttctcccacgagaacggtcgtcttattcaatggaatatcaagctgttgaatatcaagtaccgttttggttccatcataagaaaattccacttgatcacatgtaaatcctttttgcttttgaacagctggagcggtttccccattttccatggaatttttgctgtttaaaaaagaatgcacatttccgaggtgcctcgtttctcttgctccgatcgcaaaagcagcgaacatttcattgattccttcattgaactgaaccgcggctccgataaacagcatcacatccccgatggataatcccccatgaaaagcctggtgaacgatgtaaatcaggacggcacctgcggccaaagattgtaataccgaccagaacagctgatacagcgccagttttttttgatcgttggacagcgtatggaggagctccatcgaggtgtttttataaaaggatttaaaaaaaggaacaagattgtatatcttgacctctccggctgtttcagacataagagggacacctgcataatattccgcgcgccgcctcagttcctgaacctctttccgtccttcaaaggtcgcgttgtttaacttcgcctcccagtacagtttgggaacggccaatatgagaaacagcagcggcacccacggtgcagccatgccaatcaataaactgctggctgcaatcatcaccattccgccgaaggtttgagacacgatggaaacccacatcgtgacaaaatattcattatagcggatgatttgtgtattggtatgaaaagatgcgtcttcaaaagccgcgatatcaggaatggaaattgcctttttcatgagcatttcatcaagataagcttcgagcttggcggtaaggagccttttctgcatttcagctacaggctgaagggcatctacgatcagcgtaaaagcaatgtatgcaaaggccgcccaaaccagtgcattccaagaagacagctcaaacggcgcccgtgcaatctcatcgatcacctctgcactcagccagactaggagaggtccgagcattgcattcagcagtgtaattaaaaacagaaccgccgacttaaaaggatcgcagcgccaaaacaacgttaaaccgtaaaatatgatggaagcggtttgaggcagctttttggaaaacgaataaaatttcagcaatatacctcatccttcccctgaaacgatttggcctgcatgcggaacattctgctgtattccccgttcttgtccataagttcctgatggcttccctcttctgcgattcttccgtttttcaaaaccagtatgcggtcagccatctttaccgtactgaaccgatgggaaatcatgatcaccgtttttccctctgtgaagctttgaaactgccggaaaatatcatattcagcccgaatatccaaagatgcggccggctcgtccaatatgacaagtccggcatctttcataaacgatctggctaaagcgatccgctgccattggcctccagaaaaatcggtgccgccccattcagggccgatcattgtttccagcccttcaggcaactcttcgacaatcggttccagcttggcggcccgagcggcggcgcgaagtttttcttcatcgcctaaagcttccgttcggcctatcgcgatattgtgccggagtgacaattcgtatctgccaaactcctgaaacacgaccgccattttgtttctcagctgttgaagatcgaccttgcggatgtctttgccgttcactttaatctcaccctcatcatactcataaaaacggcagagcagtttgatgagcgttgttttcccagatccattcgcccctacaatggcaattctttctcccggtgatactgaaaagctaattcgattcagaacatcgcctgtgtgcatgtcatacgattcaggctgttcgtcttgtccccgcatctcttcatcttcaagctcatcgagcatatccaagtcttcctcatccacatcagcttcatttacccgggagccggcagccgcttctctgaaaggatagcggaaggtgacatttttgaattcgactgccagcggtccttcgccctcgagagattcgccattggaaggaagcctgatatccttttcggcgttcataaaaagaaaaaagtctcttcccattctccatatatccaacgtatctgcaccttctttggcgatatcccggagtgccgttgataattggaacacggcccccaagtacagcgatatatcccccacagaaaaactgcttgaatgggattgggacagaatccaaaagtaccccaaacccgttcccgcccccgataagaaacccgttaaaaccgaccagcgcgcgcttctgacctgaatattccgcagcacagaatataggcctttaaaagcagattgatataaatcaagaaagaaagaccccaggccaaaaaggcgtacttctttggccgatcgtctcccgagcagaatgtggcgcgcatatgcggccctccttcttacaggggcataatccttgtgatattcccactccatttcattgtaatgattatggacaaaagcaaatggagcggtcgacaaaataaggatgaaagcaaggacgggcgacagataggcgatgatcaaaacgacgcccgccaaagacataacggcggtcaccaagttcgaactgatattaatgaattgggaaggaagccatgtcgaacgatcccgcagtgtttccagccggtccctgtactttggatcctcaaaaaaacgcatccccggaatgcggtcaaaagcgtcgatcaacaaactgttgactgtgatcatcgacctctcagaaagcattgccttcacccatttttccaatgatttaacgacactgaccatgaccaggcttcccgcataaatgacagcccatatttctggatagatgacggcttcctgatcgacaatgccgtcgatcatttgctttgaaacgtacaattggattaaaggtgctccggcttcgatcagcatgaagataaccatgcaaatcatcagccgcggaccggatttccagaccattttcccaagcaggcccgccgtttgcagcggctcttgaatatgcttcatcttccacacatgcttcaccttcattttctatacctattgtggtcattgatacgagtatattttggctttctccggcgtattgacggtttcgatatcagccatgacccttggctttaccggacggctccggtcgagaaggtgctccttccccttggatgcttctcttagccatatttccaagtcaataacagatctcatgtactgatagcccatgcccagatcattatttggatcttcagagcggatagccatagccagcaagtgtttccaccatatatcgcgcttaatgatgccgagttcttcaacgaagacgcgctctcccggctcaaataactgaagaacgtgtctgcggtcattcataaagcttttcctggccatatgggcatatgttgttttcgttgatctgttataaacataggcaggcaggatatcggtgaaagatttgcgaagaagcattttagagcctgcataatgttcatcaagcccttttaaaacatcaaaatgctgttcaggcggtacagaaaatgagaactcgatcagccgccggtccaaaaatggatggtacgtatgcaatgtcacaccaacagcatccatgtacctcgctctcggccacaaaaagtcatagtgaaacctcttgccccacactgagagctcccggctttttcgatagcgtagatgatcctctttattgatctcccattctctctttcggtgttcttcagtgaaatattcaggcagctcatattccgtatctgaccacagcaggtcgtaatagagcttttctccaatataaggcatgaaaggggcgattccgtattgaaatccgagcttcagcatctctttcatgctgccgcctgaccattcgcgaagcaatttgtagatttcagaaaaccgtctctgccgaagcaaggaatcgatcactgacacttctccgctaaaaatgaaatccccgccctcacctgtaaggacagacgaggcaccatactcctcagcgatcactgtaaaagtctcattaaccagtgaattggctctcggatcaggaccgtctacaaaccaaagcggatcacgcccaatttccgcgtttggaattttggctgtagcgtctccaagaatgatcaggccggggatatccatatctcgcatcatattctttacaaggtccctgtcgtggcttaatatcatgtcgggttcggcaaatgatatattgacggccagcagctgttccttgcgtccgcctgcaactgcggcggcggttacggcagctgaatccagtccgccgcttaattcgacaatatgcctttcatcctttaaacgatctgctgtcacttcctgaaaaagctcccggaacctcggaacagcgtctccagcaagatctttctcgtttaatagctgcggaagcccccaatagctgtgcacgtgaaccgcttgatcccggccgagaaaagcgtaggacgccgcaggcactttgcgtattcctttaaaaaatgtccgatcttcaaagccgttttctcctacagcaaagcccgaagtaggaaacattctgcacacatcttgatcgatcgcaaaaggaatgtcatgaacaagcaaaaggatgcgcatgtcattcgctgcataccattctcctttcggactgacccagtagtaaaccggacgggttgcgtatgtatcagtcgccaaaacaaggctatgcagactgtcatcccaccagaccatcgtatattcgccatgcgagtgagacagcatggcagctttgtcctgcttcaatgatgcgtacagcttgtcatattgctcgatctttcgggtgccatccgattttgcgttaagaccgccgctgatccaaccgtctaagatgacggggtgcaaaagatttatttgagttgaaggtctaaaagcttcatcgtatcggatatgcgcttcagccatgtttgcgatcccgcagctgtagctgtgaatccgttccgcccgtccccatttcttgacggcggaaacccactcttgccataaagcggtgttgtttccctgcattccaaaccatattttcatactagagataacacccacctttcagcgtaagcgctcatcttatatgtctgtaaaacttttaaattcttatttttatgattcggatcgatcgatttgccgttttccatttgaacccacgcgtgagaaaacagcttgtcatcaattttcttgaccccgatcatgagatcagcatcagacccattgctgaataatatagattgaatcgttaatgcaatagaaacgcatgaagtgaccaaatggtcgtcttcatcaagggaatacaaatattcgccgttccggtgcagttcgtctatatcaagaagccctgcacctctttgctttgcgctcgcatacagcggaaacaggtggatcgcaattttttcataagcttcttcaaagtcataatttaacagcatcatacgtacaaaagcatgaacggttgtaaaatattcgtggtttttgacaagcgctctttttttcatcagcttttatcctctattttaatgagcttatgatgtgtcagttcctgtatcgcctcatttaatatcgctgatagttcttcttccgtctgatcgaacgccgattgccacttgatcagaatatcttttttatcctttcgctcattttcaatttcgatccacagctcttttaaagccccttccaatccgaaatactgcccattgtccaggtttaggacgatgcattcattttccaacacggttgtcgctgtctcttgatttcgaataattttcaaagattagacctccccggtatgcatgatttcagaaaaataaaggagaagagagccggcaagctctctttcagcactttatgcatgatgttctttccacgccctcgttatcatttcagcgctggagcgttttaaaaagagcctgcaatgcgacgatgcccctgaatttaccaactgatcacatgaatcagattatcacaggacaatattaaaaaaaccgcaaaaaactaccgaaaaccgacatgattagccaatggcatcaatgggccattattacgggatttattcggaggaaaaagaaaaagagagcctatcgactctcttttgcagggaaaaacgaatatatactttgtctatactttctgcttgatcaaattaagcatcgtccctttttttactgcgcagtaccgcgacgttactttgagctttttatagattttgctcaagtgatactctacgttccgcgtcgacatttgcaggtctgctgcgatctctttatttgttttaccgctggccaccttctgcaaaatatccagttctgtgtctgttaaatgctcgtccaccgagagatcggagtcgagcctcagtttttgcagcaagccgtcgggaaataacacagccccttttaaacacaataaaatactcgaagctatcatgctgtctgtatacgatttatctataaaccctttaactccggcctcgatcaacttattaaaatatgagtgaatttcatctcccgaaaacataatgataattttggattgaggttcgatttccagcgttttaagagacagttccaacccgttcatccccggcatttttaaatcataaagaaaaacgtctatatgtacctcttggttttttaagaggtcgagagcttcatttccttcgtggcaaacgatgacatccatattatatttttttaatatttccttcattccggatgtcagaaccctgtagtcgtctactaacaacacgcgtatcatcagtaacactctccttaaatcagtttcctccgaacaaataccgcaataaaaaccccatgaatagaattgaaggatgatgtcgggttttagtgcctttttgtggtttttaccactatattctatgatagcatgattatgtaatcaactggaagtaataaggaggtgacacagatgcgcaaattggaaagtgctcaagttaaaagctatggttcattcctgactgttactctttctaaaaagagcaagccgggcgacggcaaattcggccgcggcgtaaaacgcggttaagagtgtatgagaaagagagagcctcgggctctctctttttccgttcagcaatcaaaaaagagtgcggatagttgaaatccgcactcttttgccaatcaattaatgtccgctgtgctcagaatgttttgcacctggagaaccgccctcagggttgtctccgtgatagttgtgagcagcgaagatccagacggaaccggcaataatcgcaaccgcaataaacgcggcaaacagcgtattcccgacttggattttgccgctgtcactctcagtcatatgcataaacattaagagctgaagtccagcttgaatgatcgcaaaaccgaaaataatccacagctttgcagccatgcttaaatccgtatagatcacccacaaggccaataaggtcagcacaatggacaacacgaacccgacaatatgcttccaaggaaagtggctgtgttcagccgattgttttgctgccattatacattcaccaaccctatcaaatagacaccggtaaagatgaagatccataccacgtctaagaagtgccaatacaaacttgagataaacagcttagcagacgtttgcggggtgaggccgcgctttttcgtctgaagcaatatgccgataatccagaagataccgatcgatacgtgcagtccgtgggttcccaatagaacaaagaatgctgaccagtaagcacttgtcgataaagtggcaccttcgtgtacataatgattgaactcataaagctcatagctgacaaagccagcaccgagcaacagggtaatgatcatccagatcatcacgcctttcaaactgccgcggcgcatttcatgcactgcaatgccgcatgtgaaactgctcgttaacagcaggaacgtcatgattaaaacgagcttcgcgtcgaacagttctgccggcagtacgcctcccgctgttctgttatgaagaacagcataggtcgcaaataacgtagagaataaagcaatctccgctccaagaaaaatccaaaagccaaggatattcaaccttccgatttcagaacggtattccataggagcgttagaattgctgtgttctgcatgttccatcaatcccgcctcctttacttggcattctttcgttcagtctcttttatttcctcaacacttacatagtagccgtcgtcatattcaaatgaacgaagaatcatacagaggaatacaccgatcagaccgacgattcccatccagaaccattcaaagacaagcccgaatccagcaaatccgaagcataatgacatgataaacggacggcctgaattgctcggcatatgaatctttttaaacttgctttcaggatgaatctcgacattgtcttccttcatttgcgcaaatgcgtcaggtgaagtgacctcaggcagaaccgcaaagttatagtgcggcgggatcgcagaagatgtagcccattcaagcgtgcgacccattccccaagcatctcctgattcctcgcgttttgaatgacggaagctgtagaaaatgttatagcagagaacgatgaatcctgcggccatcagcaatgcgccgaatgtcgcaatcatgttcaatgcagtccagccgtcttctgctccgtatgtgtaaatacggcgaggcattccctgcaatccaaggaaatacatcgggaagaaacagatgttaaagcccgtcatgaacagccagaagaaccattttccgatgcgttcgttcagtttgtgaccgaacattttcggataccagaagatcaatccggcgaaacatgcaaacacagtacccgcgatcagcacgtagtggaagtgcgatacgaggaagtatgtgttgtgatattgataatccgcagctgccatcgcaagcataacgcccgtaacaccgccgatgacgaagttcggaataaatgcaagcgaccacagcatcggcgttgtgattttaattctgcctcgatgcagcgtcaacagccagttaaagattttaaccccggtcggcaccgatatcgccattgtcgtaatcgagaagaacgagttgaccgccgcgctgttgcccattgtgaaaaagtggtgcagccaaacgataaagctgagaaccgaaatcgccacaatggaataaaccatcgctttatagccgaacagctgctttctcgcaaatgttgcaatgatttctgaaaaaataccgaaagcaggcaaaataacgatgtaaacctcaggatgtccccaaatccagaacaggttcgcccatagcatcggcataccgccgtttgccaaagtgaaaaaggctgttccgaacaagcggtcaaatgtcatcagcgccaaagccactgtcaagacagggaaggcgaaaatgataatcacacaagtgatcagcgttgtccaagtgaacatcggcatccgccatagagtcatgccttttgtacgcattttcaggatggtaaccataaagttgatcccggtgagaagcgtaccgatacccgcgatctgaagtccgagcaagtaatagttctgtccaggtccaggactcagctcattgcctgcaagcggcatgtaagccgtccatcctgcattcggcgatccgccgatgacgaatgaaatgttaaacagcatcgctccgaccatgaaggtccagaagctcaagttgttcaagtaaggataagcaacgtcccgcgcaccgatttgaagcggtacgaccacgttcattaacccaataagaaacggcatcgccatgaagatgatcatgatcgtaccgtgagtcgtaaatacttcattatagtggttggaatctaaaaagccgttattaggaagcgtgagctgggcacgcatcattaacccgtcgacaccgccgcggaagaacataatgactgcggcaatgatgtacatgattcctaaacgtttatgatcgacggtggtaatccactctctccaaagccatttccattttttgaagtatgtcagcacaaatacgattgcaattgaagtaagcaaaatggaaatctgtgctccaagaattaatgggtcacctgtaattatgaattcgtcccatttcaaattcatgcaagcttcctcctttcctagtgagaatcttggtcttcagattgtttttgatctttgtttgtctttacgttttcaaacggatctgatttagagtgcggagacaacggtttatagcccagtctttcgcgcgctttaatggcgtattccgcatcatttccgtgattaacgtacttcaggtgtgtagatgagaacgtcatttcgtccgcatgctgaggaagcatcagttcatcgtactgggttttcgtcagcttgggagcttctttctgcgttttcttcacccagtcattaaacttgctttcagataccgcattgacattaaacttttgttctgcaaaaccttcgcctgtgaagtttgcatttcggcctttataagtaccctcatggtctgcctgtaaatattgctccatttccattccggacatggcgtatttttgcccgccaagctgcggaatccacagagatgccatagagtcggcagatgagattttaaacaagatcggtctgtctgtcgggatattcaaatagttgaccgtttcgatatcctgttccggatagctgaatacccatttccaatcgacagatgtagcatatacgaccaaaggttccttgtcctttgatgcttttggagcctcttctagagaataaattgtttgaactgtcggcactgacagcgcaataacaattaaaatcggaaccactgtccagacgatttctaaaaatgtattgccttctacttccgggctgtaaggagactttctgtctttacgctcacggtatttcacaatcatcacagtaaaaaggacaaatacgaccgctacgataaacagcataaatccaatcgataatagaataagatctctttgctgcgaagcaaccggtcctttaggatccaataccgcgatttgactgcagccgcccaataaaaaaacggaggaaagcagagtcagcataatcagtggtttaaatgctctgaacaagaggatcaccatccttccttaatgatgtctaaaatttggtcagaatatctaagataaaaggattctgaaaaacttttttcttctaccttgctatgctatcaaaatcttcaccaattagccttatttttttcgattgttcacctttttttcacccaaatgtcacaaaatcgtcaaaatttgttcatgatattatgaataacaaaggaaaaagactggtaattttttagttctttttacacacatagcaagcgctgacaaatccctccggaacaaaaaatctgtcaaatttaggtttaccacaataaaaaactttggtcaatcattaatttcacattgttaaattttttcatggtgaatcattatccttctcccttccttttccctgctgacaaccggttttaaactaaagaacatcaaaaaagagctttcttctgtgactgaaagctcttttttatcctatataataggcgttatcgcattctagctttgatagccgttcggatgtgctttaaaccacttccacgcgctgtcaatgatcgtttccagttcggcgtacttcggctgccatccaagctctttcaccgctttttccgaagaggcgatcagctgtgccgggtctcctgcgcggcgctctgcaacctccgccggtatcggacagcctgtcactttccgggcagtttcaacgacttctttgactgagaagcccgttccgtttccgagattgtatacggcgctttctccgccgtttcgaagcctctcgacagcgagaatatgcgcgtcgaccagatccatcacatggatgtagtctctgatgcacgtgccatccggagtcggatagtcgtcgccgaaaatcataatcttgtcccgtttgcctagcgcgacttgaagaatgatcggaatcaggtgcgtttcaggctggtggtcctcgccgatcaagccgtctacatgcgccccggcaacattaaagtagcgaaggacgacatgacggattccgtatgccttttcagaccacttcagcattttttcaatggcaagcttcgtttccccgtacgggtttgtcggatccgtcggatctgtttccataatcggcacccgatccggttctccgtatgttgcagcggttgatgagaaaacaatttgcttcacatcgaactctttcatgacctttaacaggcaaacagctccgtaaacgttgttgtcataatatttgagaggatctgttacgctttctccaaccaatgaatcggccgcgaaatgcatgacagcctcaatgtcgttttcctgaaacacctttcttagaaatgcttcatcgcgcagatctccattatagaaagaagctccctttaaagccgcctcttcatgtccagtttgcaggttatcaataattacgacatcttcattgcggcttaacagttccgctacagcatggcttccaatatagcccgcccctccgcatactaatattgccaattcatttctctcctttcagcggcgttatccttctattttaaaatctataaaacgcctgtgaatctctttttcaaacaaagatgatatatttgcttttttcattttaccaccttcagcattttccggcttgtattttcatcatttcttcaaataaaaagttgggggaaaaacgaattgagagaccttcattccattaaataccttacaaggaatagttcgggtttttatccatatcaatggttttctattggtgaatcaacgcgattttgaggcaaaagctatacttttttcactgcatttgaaaccaatgttctttttttccacttaatgctgatcggtaatagtattttcgtattacccttctttaacccatacagcaactaagcccaaagaaccctctccacccattagatctttaatctaaataaccccttcaaaccatcgattttccaatatttccacacaatgacctctcaaaaatcccttccttgtttttagaatattcaaaggatattcggctgcaattgagaaattcttaatagggaaaaatgatcatttttatttgaatactatccagtcagtaattgattgtttattattataagtaagaatctaagattttttggtttttttagtcagttatttagggaataggtaggtttatcaatgatgactttgtgaattttttatgaaatttgtcattgttttcacatggctgttgttttataacttttattgcatctcaaggaagaaccgttttttctttgaggtgaacaacgtcttatcatattggaggaagctatgaatactcaaacgaaacacaagttggacaaagattgggtgattttgatgaaggaggcgaaaaaacttgggctgcaaattgaagatgtgaaagaatttcttcgcagtcagcccatccaaagcgatgctgaaaaacagataaagcaataagcgtttaaaagcatcagttatccaaaaaaacaggcggttctgttgaatcttggtctatcaagatgatccaaccggctgttttaacgagtgttttaattgataatgacgtatttgagcagcaggcttgctgcctgtgtatagattctgtctgctccatagaaacgagcattttaaggagcagccttaccttttgccctgtacataggttgtttcactttttccagcttcactctcttaaggggtaccagaccggattgattaaggcgttttagaggcattgctgaccaacgctgatgccagcagccccatacactttcttctgtatcggtttcgattgcctttctcctgaaagggggcggagcttttggccttaatccttttgataccatcctcgggcttcctttccatactcccttttctgttaaccatccgcctatataatcggttttttcgatgttaaatatctaaaatatcaattttactgatggttgttgttatcttaaactgaattcatgacccattccagaggaggatgatgaatatggggatagcagcaatctgcggaagctcccgcgaaaacggaaatacggaagagttggtgaatcgattaggtagacggacttgatgccgataagatctacctgcgaaactatcacattgagcccgtatcggactacaggcacggcaatacagcccctttgtatcctgatgatgactacagagacctgatcagccgggtgctggagaaggatatcctgatttttgccactccgatctattagtacggaatgtcgggtttgatgaaaaactttattgaccgctggtcacagacattgattgagcacgggagatctgcatttaaacagcaaatggcgaaaaaaacgtctacgtcgcggctgtcggagacgatgatccccgcttgaaagggctgccgcttattcaacagtttcaatatatctttgattttatgaacatgacattcgacggctatttgctcggcaaagggaacaagcccggcggcgtggtgacagaccggacagcgattgtgtctgcaaatgaactgagaaggaagctggcagaggcggaaacggggcaaaagcatggcaaataaaaaggcgaacaaacggttttatttatggaaaaagcatttattcgagatgatcaggtctttcatcttatataaataaaaggctttgtgaaaattgaagaataaatccggagcttgttacatacctttgttgtatcttttcagacaaacacaaggagggtcaaagaacaaatgggagaaggcaaaatagattacagcaaagctgcggcatctccggagttccagcggttgttaaagcggaaacgggcttttattgtaccgatgacgattttctttttgctcttttatttcctgctgccggttatgacatcatacttcacatttttgaatcagccggcagtcggggccatcacgtgggcatgggttttcgcgattgctcagtttgttatgacgtggacgctgtgcattgtgtatacgaaaaaagccggtcaattcgatcaaattgcaagcgatttcaaaaagaagattggaggcgttgattcatgagtgccacagcctttattttgtttcttgccattgtcgccctcacgcttgtcattacgtatttcgccgctaaacagacaaaaacggccaatgagttttacacggcgggagggggacttaccggcattcaaaacggactggctattgcgggagattacatgtcagcggcttctttcctcggaattgccgggatgatcgctttgaacgggtttgacggtttcttctacagcatcggcttcctcgtcgcttatttagttgtcctttatattgtggcagaaccgctccgaaacctcggtaaatttacaatggcggacatgattgcctctcgttttaaacaaaagaaaattcgcggtgtcgccgcattaaacacaatcacgatctccaccttttatatgattgcacagttagtcggcgccggcgcgctgatcaagcttctgctcggcatcgattatacgctggcagtgtgcattgtcggggttttgatgaccatctacgtcgtattcggaggaatgattgcaaccagctgggtccagatcatcaaggccgttcttttgatggcggggacgctcatcatttcggtcatcgttttttcaaaattcggcttcagcctgacgaacatgttcgaacaaatgaaaacagctactccgctcggggcggattttctaaaccccggcaataagtataaagttcctcttgaaacactttcactcaatttggcgctcgtccttggaacagccggcctgccccacattctcatccgcttttatacagtaaaagatgccaaaacggcaaggaaatcggttgtctcggcaacatggattatcggtatattttatattatgacggtctttctcggttttggtgctgccgcttttgtcggttttgaaaacattttagctgccgataaagcggggaatatggccgcaccgctgcttgctcaggcgctcggcggagattttctgttcgccttcgtctcagccatcgctttcgccacgattttggcggtagttacaggacttgtcctgtcggcggcttctgcttttgcgcatgatatatacagccagattatcagaaaaggcgcggctacggaaaaagagcaaatgattgctgcaaggtgggcttccatcggcgtatccgtcctttcaattctgcttgctgtctttgcccaatcgctgaatgtcgcgtttcttgtctcgcttgcatttgccgtggcggcaagcgccaatttgccgctcattatcttcaccgtcttctggaaaagattcaatgccgccggcgctttggccggcagcctgaccggccttttaagcgctctgatccttgtctccatcagcccgagcgtatgggacccggccggaaacgccatctttgttggagacccgctcatcccgctttccaacccgggaatcatctctattccgctcggctttttaggcgcttatcttggaacgattctatcttcaaaaacccctggtcaagacgcgtttgcagaaattcaggtcaaagcgcatacaggcatccacatggatcaatcttaaaccgtgtgcagccgaaaaaaacttatgagccggccggcccataagtttttatttattcccgaaagcttgccagccgctcgttcagcgttttcgtgtgccggtagacatctctgtaaatttgaaagagagcttcgtattgtctgctgtattcacggcggggcgaaaaggtttctttgatgagaacgaatcggtctgcacaagcctcaagcgacggaaaccagccgcacccgacggccgcgatcatggctgcaccgtatgccggcccctgttcgcttgtcagtctgatgatgtcggcgttgaagatatccgcctggatttgcagccattgattgcttttggcgcctcctccgattgaaatcacacggctgatgtcttttcccccggcacggaattgttcaatgctttcatgaagggagaatgtaatgccttcaataacggctctgacaaagtccgcccgtgtatgtgcgctgtccatcccgatgaagctggcgcgaatatctgcgtcggcatgaggagttctctcccctgacaagtaaggggtaaacagcagtcccccggccccgggacgggaatggccaatatcgctgattaattcgtcaaatgacgcctgcccggcaaatacatctttaaaccagctgaagctgcgtcctgcagaaagcgtcactcccatcgaataaaacgcatcgggggctgcatggttcagaaaatgaatattgccattaaactcttgatcacggtttgattcatatgtgagaacaacccccgaggtgcctatgctgcaaagggcggttccttcttttaaaataccggcgccgacagcgccgcatgcattatcagcgccgccggcaaacaccttgacttcaggagacagcccggtttcggccgcgaattccggtctgaggccgccgacacaagcgcccggttcaatcaaatccggacataaggactccgggatgccgagctttctgcagatttccccgctccatgtttgatgtctcacatctagcaggagcgttccggccgcatctgaatattcgctgtgaagacgccccgtcatggtgtacctgacatagtctttcggcagcaaaaaaacggccgccttttcaaacagctctttttcatattctttcacccataaaagcttcggaagggtaaagccttcgagcgccgggtttttcgcgatctcgagcaggcgctcctttccgactttctcgttaatcagccggcattgttcggttgtccgtgtatcgttccacaggatcgcgtttcgcaaaacctctcctttgccgtttaaaagtaccaatccatgcatctgtccggaaaagctgatccctttaatctgagatgcttttcccgggaaatgcataactaattccttaatggcttccttcgtttttaccgcccattctgcgggatcctgttcagaataaccggaatggggctgaatgatggaaaatggtttggagacctcgccgcacagctctccccgctgattgacaaggatgattttaaccgcgctggtgccgaggtcgaccccgatcacgtattccactagcgtgtctccttttctgccggcgcttcgcgcaaagcgttcaataagtaacggttaacggtcgctttcagtcgttcctggcggcctgactgattttcaatttggtcgtgttcaagagcgtatgcggcaagcttattcagatcggtgcggccttctttgatctcaagcccgatccctttcgtatagctttcataacgctcttcaatgatctggtcgagggctttgtcttcaagcagacgggaggcgactttcaagccgactgcatacgtatccattcctgcgatatgagcgtgaaacaagtcctcatcggcaaatgacgggcgccttactttagcatcgaagttgatgccgccggttttaaacccgcctgctttcaaaatttcatacatcgccagaaccgcagaatacagatcggtcggaaactcatcggtatcccagcccaagagcaaatcgccctggttggcatcaatggaacccagcatatcgtgcaaggcagccacccttagttcatgctcaaatgtatgcccggccaatgtcgcatgattcgcctcaagattaagtttaaaatggtcttttaaaccgtaagtttctaaaaaagcgatcgttgtggctgcatcaaaatcgtattggtgcttcgtcggctccttcggcttcggctcgattaaaaattggccgtcaaaaccgatttcacgcgcatactcaactgccattctataaaatgaagccaagttttcgagctcaagcttcatatctgtattcagcaatgtttcataaccttctcttccgccccagaacacatagttttccgctccaagctctttggcgatgtccaggccttttttcacttttgcagctgcataggcatagacgtctgcattgcaagaagttgcggccccgtggacatatctcggatgcgtaaacatattggctgtattccaaagcagctgaacatggcttgtctccatcatttctttgagaaaagacgacatttgatccaaatacgtgaaagtttcacgcaatgttgctccttcatcgacaatatcaacatcatgaaaacagaaatagggcacgccgagcttttcaaaaaattcaaaagccgcttccgccctggctttcgctttatccaaaggatgtgtcagccggttccacgcccggaacatcgtcccgtcgccgaaagggtctttcccgtccgcatcaaaggtatgccaatacgcaacagcgaagcgaaggtgttccttcatcgttttgccgccgacaaattcatcagggttgtaatatttaaatgcgtaaggattttccgaatcggccccttcatactcaatcattccgatatttctaaaaaacattccgatctcccccttcacttttccttgcaaacgttaaaaaacaatgtttgtttaaccattaaactaacttccttgtatgtattttacaggatcaattaatcgctttcaatggaaatagaggaaaaaataagttttcaaaatttgttatactataataaattcacagcttcaaagcaatggagtgattgacattgaatacagcggatcaagcccttgtaaaaaaaatgaacaaagccctgatttttgagcagattattgaaaacggacccgtctcaagggccaaactttcggaaataacaggattaaataaagcgaccgtttcctcccaagtgtcttccctgcttcaaaaggacatcatttatgaaaccggccccggcgagtcaagcggcggcagaaggcccgttatgctgaaattcaatcgaaaagccggctatgcggtcggtgtagatgtcggaaccaattatataattgttgcgttaaccgaccttgaagggcatttgattgaacaattcgaacgaacgcttgatgaagaagacattcaggcgacagaagaggcattaatcgaattgacggggcttgccgttgacaaaataccgccttccccattcggattgaccggaatcggcgtgtgcgtgcccggcttggtggacaacgaacggcatgtagtctttacgccaaataagccgatccatttgattccgataaaagaaaaactggaagaaaggttcggcgttcccattttaattgaaaacgaagccaacgccggcgccgttggcgagaaggaatacggggaaggcggccagcttgagcatgccgtgtttgtcagcattaataccgggatcggtttagggattttaatgaatggaaaattgtttagaggtgtgcaaggtttttccggagaagccgggcacatgtccattcactttgacggtccgttatgccggtgcggaaatagaggctgctgggagctttacgcttcagaaaaagccgtcttctctcactatgcagcgaattccggggcccagctttacgaaaccgttaaagaacttgcagaccgcggtgatccgggcatgatggagacgtttgaacgctttggctttcatatcggcatcgggcttctcaacatcttgaaaacgttgaatcccgacaccattatcttgcggaataccatagtggaatcctatccgagcatcgtcgatgcgatcaaaaaaacgattgcctcaagaagcgcagcagaagccttgtctaattatcatttaaaaatctccacgctcggccgcaccgcctcagcgcttgggatgtcctcccttgtaaccgaacgttttctggaacggtttatgaacgagagattttaatcttcatataaaaaagcgcatattccatttaggaatgtgcgttttgcagattgttgataaaatcccaaaacggctttttgttttgggattttatcatcctttcagcgtgattgaaaacccttgcagtctaggaaggtcgagcatcggagcggagcgaatgttggaattcgtgagcaccgacgcgcaggcctgacaacgaatgcgagggtttctcgacacgctgaaaagcgcatattccatttaggaatgtgcgctttgtttggcagcttggactttctcgctaaacgcctcgacggcctgctttggatcggcggctttgctgatggcgctgatgacactgatgccgtctgccccggcctcgatgacggggacgcagttttcgaccgtgatcccgccgattccgaccacaggaatgccaattccctgcctgcggatctcttgaatgagcgagacgccctgcacagcttttgtatcccgctttgtttcagtagggtaaacaggccccgcaccgatgtaatccgctccatccttttccgcctttaagacttcttcaagtgtatgcgcggaaacgccgaggattttgtccccgattctcgctctgacgtctgcggccttatcatcatcctggccgatatgcacgccatctgcgtcaagttcaagcgcgagttctacatcatcgttgataataaacggtacattgaactgtttgcacagcgcctgcacctgtcgggcaaacgccgtttgatctccggctttcaacgcaccctcgcctttttcgcggaattgaaaaagggtcgcaccgccttttaaagctttttcaataacggttaaaggatcccctgcggtattgtttgaccccataataaaatagaccgacaacagatctttcattgcttcttctgagactcgcgtcatcttattccacctctctgatcctgccgcgttcttttatatccatagcttcaacggcagcaagctgattcaaaaactcgatttggaaacttccgggcccccggctttccgttttcgccgcggccaactcggccgctgttccataaaaagcggctgcagatacagcggcacggcaaacgtctttttcaacggcgcaaaacgcaccgatgacagaggtaaacaagcagcctgtccccgtcactttcgtaagcagctgatgtccgttgcccacggtatacgtttttgtaccatccgttatcacgtcttcagcaccggttatgatgactgctgtatcccataatttcgcggctttttttgcgagctccgttctgtcgccgctctcttcacccgcgtccacgcctttgatcagccagtcttccccaagcgtgttggcaatttccgcagcattgcctctgacggcagaaaccttcactttgcgcatgatcgcttgagccgattccgttcgaaacggcgtcgcccccgcaccgaccggatcaaaaataaccggcaccccatgttcattagctgactttcctgcaataatcatcgcttcaacagattcacggctgagcgtgccgatgttcagcacaagggctccggcgatctttgccatgtcggcggcctcttccctcgcatacgccatcaccggcgatgcgccgagagccagcaaaccgtttgccgtaaagttggtgacgacattgtttgtcatattgtgtacgagcggtttttgctttctgactaactcaattccccttgcggcatcttccatattcattcgcctgcattcctttctgtttttgaattctcgctccatatatacgattttgtatgatcaatccacgccctcgccgcgaacgacagatagcggtcttttctccaaatgacggcgacatgccaaggaatggccggcctcaccagcggaatgatcctcaccctttcagggtcaagatcccggcagatcctttcgggcaaaagacctatcccaaggttcgcggaaaccatttcgctgatgaaatcccattgtgaggtttcataaatgacattcggctgaaatcccgccttcaagcaggccgtaatgatccgttcgtgaagaacaaagtcttcccggaagaaaataaacggttcttcgcttaactgccgaagctcgatctcttcctcatcggcaaaacgatgggacgggtggacgattagcattaagtcttctttaacaattgtaaaggagtgaaaaatctcctcttttgcaggcaggacgacaacgccgatatcaagcgatccgtcctctactccctcctgcactttcacagacccgtgttcaacaagctgaaaggtgacgttcggatacttatctctgaaatcccctatcactttcggaaaaaaaccggagccgatcatcggcggcagaccgatcctcacatgcccttttttgacgtccatcaagtcgttcagctcagaagttaaattttgaaatgacttggtgatttcctgggcctgcacatacatgctttgccccgcatcagtcagctcgatctgccggccgcgccggtaaaacagctcgatgcccagctcttcttcaaggtttttaatcattttggaaatcgtcggctgagatatgtataatgactgagcggcttttgtgaagcttttcagacgggctacctccaagaaataggttaagtggcgtatgtccatttgtttgacaccctttcagagttcctgcgtgtattcatattctaaaccaaattcattgttttctgcacccccgcgagagccacaataaaaaaaacgccgccggcatacagccggcagcgcctatcttcgggcaatcgcctcatcctgttccttcagcgtgtccacatttgagcgggtgtcctcaatgtttttacgaacagcctctttatactgtttgaccatattgcaaatttcggcttctcgttcaagccactttttcgtaaaatcaaggttgttccgcccgagcgctccggctggcgggctttttaaagatacggcttgaagcgtgctgcttacttgttccagcttcttcataaccgctgcatggttaagtttaatcgttttgctcatttcaaccatccttttaaaccgttgattgtgctgtgcagagcgtcgacggcttcctctcctttttccatcagaaagtccgcccggtcggctgaccagcttgcagcctgaacagctcctttttcagcatctaaagcaaatatctttaaatcgattttatgaatataccgatcatactcatcggtgaaaattctgtacattgccgtgtgcgcttcatcacgtgcttcgttaaaatcggctgccctgcttccggtccacgactcattaagattcggccgcaaaatctgcctgatttcttcgattccgaggttttgttcccgctctacatcgcgctttgcccgctccagccttgcaatttgttcttccagctctgccgccttatgggagaggacaccgtgtattttttgcagcgtgtctgagtagtccattattgtcacctctgaaattgcagtatgattcgcattgattatttccttgtcaaatcatgatccggtttgtttttcatagattcacatctttgactagacttgctctcatttccaatatttatagtttaagtcgaaaatcacggatgttgaataggctttaaagactgtttttagggatatatacacagttcgccatcatcctcacaccgcatttcaaggacatataacccgtctttttgaatcatctgtacaccgctttcattgcggacaagtctaaaggcacgggaacacggcggtttaatggtcacaaaaaatcgccaaatgattccgtatgacgttttccaattttagttattaaactgttgcttttgacctgatttgcgcttttaactatagacaaaatgaataatatatattctgtatatgtattttacctatacttgaaactcatgtacactcttgtttagaaagggggataatgacatgaaaacattcattaaaggattaggtcaggtcgctcttttgtttttattcgcccgtttcatgaatctgattgtcgaggttcttcatataaacattcccggcagcattctcgggattatcgtcatttttgcgcttctccatttcaaaatcattaagctggaatggattgaaatcggcgcgctgtggcttctcgcggagctgcttttgttcttcgtcccttcagccgtcgggattatgaactacggagatattctggctgaattcggcacaagcattatactcgttgtcctcatcagtacattcgtcgtcatggtgtcgaccggaatgctgactcaattgattgccaaaagaaaggaaagaaaaaaaacatgctcatcggatgcttaagcctgatcgcaacagttttaatctatttgggcgcaaaagcggtgtattcacgccatccaaaggtgtatgcgtcacctttattggtcacgccggtgatactggtcggcctgctgcttttcatcaacgtcccttttgaagcgtacaatgcgggcggacgcttgttgacggacatgctccagccggcaaccgtggcttttgcgattccgctgtacaaatactttccagtcttaaaaaaatacgcggttgagatcattatcaacgtggctgtaggctgctgtatcgcgatcctgtcaacagcgtttatcgcaaaactcttcaagctgaatgaagacctgatcgagagcctcgttcccagatctgtcacaacgccaattgcaatgaacgtttctgaaatgatcggcggaatgccggcggtgaccgctgtttttgtcatattgaccgccttgttcggatcagtgatcggaccgatggtcattcgctacttccggattgataatgaaatcgcgaggggcgtactgcttggcacaagcgcccacggcgcaggtacgtcaaaagcatttgagctgagctccgtgtccggaacgatctcaagcgtgtcgatgatcctggccgcgatcatcacgctttgcgcagcgccgtttctgatttcccttattgcagtgtaatagccgaaaaaaaaaccaaattggtgaaggtttttccgccaatttggttttttcatttagaaatcgatcagccatatgaatatagacatcatcaattaatacaacggccagaataaaagaaatacacctaaaagacctgtcatgcagcagttttggggaaattgcttttaacagtttgacgttcagtaaaccgatcaaaccgaaaagtgtgaagactcccgatccatccgccgccatttccgagaaaaatccatcgcctttttctttggaaaatgcccacaggaatcctgcgaaagcccctgtgagaaaagcggtcgtcaacaatactttgacaaaggccatcactagattctcaacctttcagctgttcaaccgcagtctcaaattccttttcaatctctgcccgcggcttctttgtcatcaggctgacggcgatgatcacgactgtacaaacaataaatccgggaatgatttcataaaccgggtcaaacgctttcacttgctcccacacaataacggtcagcgctccggacagcatccctgcaagcgcgccccacttcgtcattcgtttccaatacaggctcagcaaaacgacagggccaaatgccgccccgaagcctgcccatgcatagccgacaagattcagaatcgtttcattcggatgaagcgccatcaagagtgcgatcagtgaaatggcgaggacagacagccttccgacaagtacaagttctttatcagaagcccctttccggataaacgctttataaaaatcctctgtcagcgcgcttgaggttacaagaagctgtgaagaaattgtgctcatcaccgctgctaatatggcggccagcaagaaccccgtaatcattgaagggaacaaaaggtcggcaagcttaatgaatatcgtctcggcattctttaacgtaagatgattcgcactgaaataggcaatgccgacgagtcctgtcagcatcgctccgcaaatcgaaaagatcatccagcccatgccgattcttctggcactcttcaattctttcacgcttgaaatcgccataaacctgacaataatatgaggctgtccaaagtagccgagaccccatgccagtaaagatatgataccgattacggttgttccttgaaacggacggaggagatccgggttaaccgcgttcacttccgaaaacgccggcgcaattccccccagttgaacaaacacgactaccggcattaagatgagcgcgataaacatgatcgtcccttgaacaaaatcggtccagctgacagccaaaaagcctccgaagagcgtataaagaatgacaaccccggccgtcagccagatgccgatccgataatccaggtggaatgcggttctgaacagctctccgcccgccaccattccggatgatgtataaaaagtgaaaaatactaaaataacaaaagccgacgtcatccgtaacagtcttgaaccgtctttaaaacggttttcgaaataatcgggtatagtaatgctgttgccggccgtttccgtatacgtccttagcctcggcgcgacatacacccagttcaaataagcgccgattgtcagaccgacaacgatccagccgctgctcaatccgttcaggaacatcgcaccgggcagccccattaatagccagccgctcatatcggaagctcctgcgcttaacgcggtaacggcgggacccagatttcttccgccaagcatgtaatcggtcaaatttgatgtcctgcgatatgcaaaatatccgatgaaaagcattcccgccatataaatacctatcgatattaaaattccgtaattcatagcttccccctgcctgtgtgatttgcgtaatatcaatatacatgaataattgaccgacaggtattgtttttatcgcaaattttttctccagccttacattaacgatggcgaacctgtaaaaagacaacttttaaataatcgccctcaggatagcttttcaccgttttaaaatcttcgggaagcgaatgctcctcaagcactgtaaagcgcgtccccgtttctttgcatgcctcttcgataaagcctttgaattttttcattccaaatgcgctgctgttcgtcgaagcgacgatcacaccttgatctttagtgattcgaatcgcgtcttttaaaagatttttgtaatcctttgccgcgctgaatgtatgctttttcgttctcgcaaatgaagggggatcaaggatgacaaggtcaaaggcgagttcttttttggccgcgtattgaaaatatttaaaaacgtccatgactttaatctcatgagcttcatagtccagcccgttcacactgaattgttcgatcgtcctgcttaagctgcggtttgcaacatcaacgctcgtcgttttttcagcgcctccgagcgccgccgccacagaaaatgcgccggtatatgagaatgtgttgagcgcggttttcccttccgcataccggtccctaaccgccttgcggacatggcgctgatcgagaaaaacgccggtcatcgctccgtcattgaggtaaacggcaaaatgaatgccgttctctttcacaatgatcggaaagtctcctctttcgcctttgacaaagtcgtcatcttccacatactgcccggccgtattaaaccgttttttctcataaacagctttataatccgtcaattcatcaagggcttccataatcgtttctttaagcgtataaatccctttgctgtaccattggaacaaatagtagccgtcataatagtcaatcgtaaagccgccgattccgtcgccttccccgttaaacaaacgaaaagcggtcgtatccgggtcttgaaaaagcgattttctggcttgaaatgctttcgccagcctgcttaaaaagaatgactggtcaatcgattccccctcgtttcgagtcagaatccagccgatccctttgttttgctcgccataatagccctttcctaaaaacctgccgttttcatcggttatcctgatcagcgatccttcttttatgccgttttcttgcgaagaaacggcctctttttcgattaggggatagccctttttcatttttgcagcgaatggatgttttatttttaatgtatgcattttaattcagtccttatcttaaagtcttctctatcctaccataacgcctgatagatgttcttattcatcatgtaatcgatataattgacagatgattccgaattttctaagatgatggagaaactaaaggaggaatggcgaaatggcgcgaatcgaccacgtaggactgatggtgaaagacattgatgcttcgatcgcattctaccagaatgtgatcggaatgacgctgaaaggcagaatgacccatacaaacggcgtcatgaaactcgcttttttaggctttgagaacagagacgagacagagctcgaactgatcgagggatataacgacaaccttcctcaggaaggaaaagttcatcattttgccgtctcgaccgatgatatcgaggctgaatttgatcgcgtaaaaggcgccggcatcaagctgatggaagatgagattaccgtattgccgaacggcttccgctatttttttctttttgggcccgaaggagaaatggtcgagttttttcaaagaacataaccggacgcggcttatcgccgtttccggtttttattgaacgcggaaagccggctgctgtttttcgataaaccttttgatgttttgatatgtcatctcttcgatgcgcctgatgctctcatacgtagcgccgccgatatgcgccgtgcaaatgacattgctgagaccggcgatccgggcagccggcggttcggtttcaaagacgtccaatgctgcgcctctgatctgtttttgctcaagcgcttgaataagcgcgctttcgtccaccacttctccgcgggcaatgttgatcaggtacgcggttttcttcatttttgccagtttttcttgattgattaaatgataggtggcaggtctcaatgatgtgctgatacatacaaagtccgatttttccaggagatcgtcaagctcggcgaaccgcacattcagccgtttggctgcattgtagtctttgtatgtgccgtacgccaaaacgttcatattaaacccggcagcccgccttgcaacctttttgccgatttccccaaaaccgataagccccagcgtttttccatcgagctcatagcccatcgccgcttgccataagcccgctttgactgccgcgtttgactgcgggatcgaacgggcgccagacagcagaagaccgaatgccaaatcggcgaccgccgaggcattttggccgggtgcattcgtgacgagaatccctttttcgtttgcatattccacatcaatattgttgattcccgcgccgaatttcatgatataccggagtcccggagcggcgtcgatcagctcccggtccgctttttcaacgccggcgatataaatatggacatccttgatatgagtcagtaaatcctgtctcgtcaaccgatttgaatccaaaaacgcaaattcggcgccgagccgttcgaccctttctctcaagcgcggcgcagcgcggtaaaacagtccgttgagcgtcaacagtactttaaccaaaagctctcctccattcagcaggaattttcccgaccagaaaaatgcttgtttccgaaggaaacaagcgaatatggggatacgtcagggtttgttgtcattatatcgattcatcctgcgatttaaaatgagattggcatgttagctgacatggtttttagacaatttggccggctggttaaaggctgtggactgcaaatacttaaaatattgacgggcgtacgggtgtgaggtgtttgaattccaaggcttgtttccgccgcagaaatgaacgattgccgggtttgcccttgtttccatatagcgcttttgatcgatgagggaagccggtgttttttcttttaaaataatgtgtgtttgggcgttccacctcggatgaagttcgagccactgatcataaagaatcgcgttcaatgcgtcttggtcatgaaacacaaacatgtcttcatcgttgttattgataaagtcgatgacttttttcgaaatgtcgttttttctccaagcttccatatcgatgatcattaagcccgagttaaaatattttgcttcatcgctgatgttcatctttttcagccgttcatgctggcctgcatcttcaaccgccgccgcgaaataaggtgaaatgtccatgtcccacagcttcgatatatcctctaaaactaaggcgtcgcagtcgacatagatcattcgtttaacggattcgtcatcaatcagatcgggaatggaaattcgatagtaagccgcttttgtaatatggctgctttcgaccgctttgtcatactggcttttttccacattaagaaatgtaataggagctccgaattggagggtcgtctcttccagacgctttttattctccggttcaatccctccgtcgatgacatacagtttcacctcgcgcgtctgatccatattcgtcagcaatgatgagaacatcacgcttaaatgctgtgcgtagttattgtctgtacaagaaataatatgcatggttcggtcgcttttcatatgtcgtccatctccttttctttttttgttctattcccttttttcgaaaaataaacaccgttgataggccgaaaaaaaaaaggatcatgcaagatcctcagattgtatagcgtctattttgctatcttttagcaagatgctgctttaaataaaagtaaggatagccaacaatgataagcggagctgctaatgcaaggagtatccatgagcctgagtgactgcctctaatgactccaatgaaaatacaagtaccgacgagaaaatataataaagcacctaagaaccaatacatcttcattcctctttttctttacgcttgttcttggattgacgatttttgtatctatgcttgtctgttttttcgttcgcattgcttaatcgatcagggcactgattttttgacactttctcagttcggattccttttctttttaatgataaaattgtgagatcaatcgatttcaatgttgatcattcctttaatcaatagtgagttcctcattatttcaaatgtaaatttggaaagataaaacgtacataaaggcagaatgcatatgtacgtttgggcaatgttcatatgttgggaagatctaatggttcactgcacattggtattgttgtgttccttctcttcctataaaatgattggataaatatatgttgcacgttcaatgaaatgggatcgattttcataagtctctttttggttaaactgttaaaggaagtggatgaggtttgctgataaggaatcctttcaaagaaaaatactactcacatgataggcgggcattaaatatgcttgcactcagagtgccgggcctggcttttattctcatgatctatgtcgcctctatcgtgctgcaatttcttaatgggagctggtccattttattgcttaatgtgtttacggtattgaccgccatctttgctttgttgcattggcactcatatcgctgggttaagaaaagggtgattctgtacttcgtattacaaggtttgatcacttttacacttgctaatgtcatgtcaggctttttagtgctgatcatcattggcctttatgcatttttgatcggacagattataggaatggcagacagaagaaagacgttcctcatcctttatttattgcttctgctgtcaatcactgtactatatcatattcacaaaggtgaatatttgcattttcttgtcatagcagtacctattatgatcgtgattatcacatatgccgctacattttttgcccaagtcgatgaaaagacaaaagcgcagctgactcttgaaaggctggagctggctcatcagcaggtagaacagctgacgctgcaaaacgagagacagcgtatggcccgggacttgcacgatacgcttgctcaggggctggtcagtttaaatatgcagctggacgctattcatgttcatctcgccaaagacaacacagagagagcaaaagaaatcgttcaacaatctatgaatagagtgaaaagcacactagctgatgcacgttcagcgattgacgatctgcgcagcaaatcagaagaaatcggttttttaaaagaaagaattacctcattaatggatcattttcaagagtcgacaggcatggcttgctttttagactacagattagaccaagtgccggacgttcgaacagctgaaaactgttattacatcattggagaatgcatagcgaatgccgtaaagcatgctgaagcagaaacgatctcagtgtccatttgggatgatgataagaggaagtttaaccgtcaaggataacggcaaaggatttgatgttgaaaaaggcaagaaaaagagaggacattatgggcttctcggcatagaagaacgcgtcagagcaatgaaaggccaattcaatataaagagtacaacatctaaaggaacacaaattgatatcactgtaccaattcagggagagatgccagatgaataaggttttaatcgttgatgaccatcttgtcgtgagggaaggtctgaagcttttaattgaaacgaatgatcactacatcatcataggagaggcggaaaatggcaaagcagcagttcgccttgcagatgaattaaaaccggatattattctcatggatttgtatatgccggagatgagcgggttagaagccattaaactaataaaagaaaaacacgacatccccatcattattttgactacgtataatgaagatcacttaatgatcgaaggaattgaattaggggcgaaaggatatctattgaaggatacaagttcagaaaccctttttcatacgatggacgcagcaataagaggaaacgtgctattgcagcctgatatcttaaaacgtctgcaagaaatccaattggagcggatgaagaagcagagcagtgatacgcagctgacagaaaaggaagtcatagttctaaaagcaattgctaaaggtcttaaaagcaaagcgattgcctttgatttgggcgtctctgagagaacagtaaagtctagactaacgtccatttacaataaattaggcgcgaattcaagaactgaagcagtgacgattgccatgcaaagaggcgttctgacattagactaataatatcaaattaaaatttgcccaaacgtacatgcccgaatgtacgttttttttatttcattgtccactacaatgagaaagaatgtgatcaagcaatgtgttgaaaggagattatcatgtcaaaaatgttatataaattaggaggatgggttgctcgcaatcgcataaaagtaatatgcgcatggatcgttgtgctagttgcttcgataggccttgcaatcacgttaaaaccaagtttttctgaggatatgtccatacctgacacaccttcggaaaaagcgatggatgtcattcaaaaagaatttccccacggtcctgataaagggagcatacgggttattttcggtgctgaagatggggagaaactgacttcgaagtcagcggaaaaagcaatagaaaatacgttaaaggaaatcgataaagatggttccgttgactcgattgcaagtccttttgtgacaggaacaatcgcgaaagatggcacagttgcctatgctgatatcaagtataaatcatcagcagatgatattaaagattactctatcaaacacttaaaagacagtttgaaaatggctgattatgaaggattgcaaactgaactaagcggagatgtaccaggagctgagatggagataggcggtatctctgaaattgtcggcattattttggcctttatcgttttggccattacgtttggctctttattaatagcaggtttgccgattttaacagcactgattggattaggtgtaagtattgggcttgttttgattgggacacaagtattcgatatcgtttccgtcagtctatcattagccggaatgattggccttgcagttggaattgattatgctttatttatttttacgaagcaccgccagtttttaggcgaaggtatacaaaaaaatgaatcaattgcgagagctacaggaacagccgggagtgcagtcgtttttgccggacttactgttatcgtagcactttgcggattgactgtcgttaacattccttttatgtctgcaatggggctgacagcaggacttagtgtactgatggctgttctcgcttcaatcacgcttgtgcctgccgtcttgtcgatagcggggaaacggatggttccgaaagcaaacaagaaaaaagaaaaacaaagcgcggaaacaaatgtctggggacgctttgtcacaaagaatcctatcatgctatttctgccaccctttctctacggtttttttatcggctgacatcttcttcatcagattgttccataaacgcaaacagtgattcgcggtcaggcagcccttcaatatcaccgtttaccgccgctaccatggcaccgacggcacagccccgtttgacagcttctgaaagcggaatttgatcaatcaaacccgataatacgccggccgcaaagccgtctccggcacccacgggatccgctgctgcctgaatctgatagccttccgcatagccgctttcgttcccgccggcataataggcgccttttgaaccaagcttgatgatcgcagtttcagcccccagcccgcggatggcttccgcaatttttttctcatcagcggtgccgaacaaaaaacgcccttcgctcaaccccggaagcacgatatcagaccgtttgataagttcaaacatggtctgccgcgcccgctctccgtcccagagcttttttcgaaagttcggatcaaatacaacgcatttattgtgctttttggcgagctccactgcataaaacaccgcatctgaagcgctttcacttaaagccggggtaattcccgtaatgtataaaagccccgctttctcaatgtattgctcatcaatatcgcatttctttaaaaaactcgccgctgaaagcgtcctgtaatagaagacattgactttggccgcgcttttcctttctttaaaaaacaaaccggtcggcgccgcgtcatcgagcttcacctggctcacatcgactccttctcctctgacagaagaaagaatcatcgccccgaactcgtcttttccaagccgtgtaatccagccggcttttttcccgagcttcgaaagcccgatcagcgtgttggtttctgcgcccgctattctcacctgatagtttcttgcgtatctgagagggccgtcttcattcggagtgaacagcgccattgtctctcctatgctaataacatccatcagaactctctcctttgctaaagcggctttctatatccgccaatgctttctgtaatttttccggctgtgtgaagcagctgctcaacgataacggcctttcttgcgagcatgcgctcctttggcccggcggtgctgatcgccgccttcatcacgccatccggaccatagacaggcgccgccagacaaaacaaaccttcttcattttcttcattgtcaacggcatatccctgttccaaaaatgtctgcagctgcttttccagctcttctctggcagtgatggtatgcccggtaaaccggataaactccatgcggtcgagcagcccttccgttttgtcctccggcatgaatgccaaaaatgccttgccaagcccggtgcaataaagcggtttgcgcgagccgggctgtgcggttgttctgattgacctgttgttatcgatttttgcgatgtagacgagctgatcatcggatagaacggccataaacaccgtttcctgaacgccgtccatcagctgttttaaaaaaggaacgccctgcgatgaaatgtctatcgactccatggcagcggttccaacttgaatcagttttgcccccagcctgtaacgcttgacagcatcctgctgaaggtaaccttcatccaaaagtgtagcggccaaattgaatgtactgctctgaggcagcgaaagttctttgctgatttcctttacggttaatccatccggatgatttgacagcaattcaaatatacgtacaacacgtaccgcggattttactgacatgacaccctccaaaattcacatatgtgattcaaaatcaggatcctgataattcggacgtattctaaacagaaagaaggctcacgtcaaccatcctatcaaacaaaaaaatttttttattaaacttcaaattaccagtctatcgaatcatttatctgaagcatgcaggattcacccgttctgctgcgaatatctcttctcaggaaaacaagaccatcaagggggtttatgtatgaagagaaaaatgatgatgttcggattggcgctatcgatcattgcaggcggcgtggtcgccgatggaacggggaatgcagctcaagcggcctctcaggaaacagccatcgcaaaagatatcgaaaaattcagcaaaaaattcaacgagaaccgcgcctatcaaacgatttaccatttaagcgaaacgatcgggccgcgtgtgacaggcacggcagaagaaaaaaagagcgccgcttttatcgcctcacagatgaaaaagtcaaatctgaaagtaagcacacaaaagttcagcatacctgaccggctggaaggaacgcttaccgttcagggaaataacgtgcctgcgcggcctgccgccggttccgccccgactgcagcagaaggcttggccgctcctctctatgatgccggcctcggcttgcccggcgacttcacagaagaagcgaaaggaaaaatcgccgtcattttgagaggagagctgacattctatgaaaaggccaaaaacgctgctgacgcaggcgcaagcggagttatcatttataataacgtcgacagcctcgtccctctgactccgaatctaagcggtaataaagtcgatattccagttgtcggcgtcaaaaaggaagacggggaaaagctgctttctgaacaagaagcgatcctgaagctgaaagctcataaaaatcaaacctcgcaaaacgtaatcggcgtccgcaaagcaaaaggtgtcaaaaatcctgacatcgtttatgtgacttcgcattatgacagcgttccatatgcaccgggagccaatgacaatgcctccggcacttcagtcgtccttgaactggcccgaattttgaagacagtgccagccgacaaagaaattcgctttattacattcggagccgaagaaatcggactcctcggttcgcgccattatgtcagcacattgtcaaatcaggaagtcaaacggagcgttgccaactttaacttagatatggtggcgacaagctgggagaatgcttcacagctgtacatcaatacgcccgacggttcggcaaacctcgtctggcagctaagtaaagccgcttctttaagccttggaaaagacgtattatttttacatcaaggcggatcatccgaccatgtcccattccatgaagccggcatcgactcggccaactttatttggagagagccgggaacaggcgctttggagccttggtaccacaccccttacgacacgattgaacatatcagcaaagacaggctgaaaacagccggtcaaatcgcgggaacagctgtgtataacttcaccaagaaggaaaacagaaaaccgtcttacagctcagttgcccagtaattttaaaaaggagcagattgaaaatctgctcctccttcttttcatagacccaaagcgcctatcctccccaccgcttccgtatcatcaccttttcagctattcgttatctttattatcaaacaatcaataagcaaccaatatcaatttgttaatttttgtctctttgcttttccaatctccaaaagaaagcaaaaaaatggagccgcatctcgcgctccatttttcaatccttcatcagcttgataaatctgaagctcatcaaaatgctgccgatggcaaccgcaatcatgaccatccccagatcctgaaaatgccccgcggttatttcttctccaaacaacagacccagaatgacggacgaaaagatcgagccaagatagcggcatgtttgaaaaagccccgaagtcgtcccgacgatgtccggcggacttgccgtaaacatggcagcctgcagggcgacattgccgaggccgtagctgaccccgagcaaagagaggatgatgcctttccacaacatcggtgcatcgacaaaaaacaatgtgagcaggatagcgcccgctgccattaagcaagaaccaattaacacgggctgcgtttctcctgaacggtcaatccatttcccgacgaaaggcgagatcaatacgctcgtcccggacatgaacagcatcaaaagaccgctcgtttgaacggaaaggtgcatttcatcctgaaaataactcggaagtccaaaaaacaaacagtagttaaagatgttcagcataataaattgagcatagaccgaagttaacgtcctgcgtgcgatcaacagcctgatatcaataaacggactgttcactctcagctcccaccaaacaaacatcaaaagcaagacgagtccgaacatcccctcggcaaaacggggctcgcccgtgctcaatgagagcagaaatgccagcaggagaacgattccgcccgcaaacagaagaattccggtgagatcaagccgcttgatcacggcgcggacatttaagccggcttttttctcatctttcgggaacatgtacatccccagcaaaaagctgaacaaaataaatggaaagttcacgaggaagatggcgggccatcccccgagtacgattaaaaatccccccacggtcggtccaaaggcggtcattgccgaagaaaaaatggacagcacactgagtgcagacgcctgcttctcatgaatgtggcttctgatcaggcccactcccgaagggtaaatggcgccgctcccaatcgattgaaacaaacgcatgatcaacaagacggaaaaagccggtgcgagaggagcgccgattgccgatacggcaacgagaacaagccctgacaaaaacatctttttccggccgattaaatcgccaatttttcctgtgacaggctgtgcgaccgcactggctagataaaaagatgaaatcagccacgatacggttgcaaatgaaaggtgaaactcatgctggatgctgtgcagcgccaaagaaatcattgaagagttgagcggattcagcatcgtccctgatgcaacggctgttaaaaacagggcccggttctttttcaatccggccatttacttagggtacagcagcctttcgccagctccgcccgctttaccgcccgcccccgcttccccgctcatcagacggctcctatcatcacagccgaaagcattgaggacggccccgtataaagcagcatcaagccgttgcgactcccggttcatcattgcttccgttccgttttgcaaaccgcattccgcacgtttttcaatatccgatttcatatttagacctcctcgtgctcttatcattttcttgttttcctttttcgattcatgacagtcataacctttgatacagaggagcgttcttcctcttttctgttagttgaaaaacgcatttgacggagctggcatagtgaaaagttcaaaaaaacttatcagtacgctgacaaaagaagaacgccatcgccgggccatgatttccaaaacaaaaagcggaaagaagtcgagcgtcttgccggagatcaagtgaaagtgtggattaagagcgcgctcggcaaactgcagggcaaataccgggcggacgtcttgaaattcgggtatcgaaaaagcggaagggaaatgggatgagattttcaccgaagccgatattacatatcatgttgatatcaacattgacaacttcgggtcaagcggcagaaaaaaatagcagccgggcatttctttagcccggcttccttttattgatccgcttttgttcgaatatgaagcatcttttcatccaagtagttcgcgatgtcagccgcttctttcagctcatcagtgagctggttcggcacttcattgttcaatttgtagtagattttatgctcgaggctcgcccagaaatccatcgcgatcgtcctgatttgaatctccaccttggcgtgctcgacgcggttggtcaagtaaacgggcacttctacaattaagtgaagactcctgtatccgttcggcttcggatttttaatgtagtccttcatttttaaaattttgatgtcttcatgttccttcagcacttcaaccatattgtaaatgtcggataaaaacgagcagacgattctgagaccggcgatatctttgatgtgctccttagcggcctttgtcgtaatatcgcagcccttccgcacaagcttgttaatcaggctttcaaagcttttcacccttgatttcgtatgttcaatcgggttgtggccgtgaattaaattatattcctggctgataatcgaaaacttcgtatccatttgatccaaggcaaatttatagacgaggagttcgttcttccagtcctccatcaggtttctcaaatcttctatctgggcttcaggcagtcctatcatcttatctatcgccatatccattgtatttttctccttataacatcatttcgtttcgttttttcagttaatagacgggtacctccatggtaaagtttcgacttaaagcggagatcaaaaaatagcctggtttaccattttccacatttttaaatttatacccctttcaaaagtcataaaactatcatattctgtaataccacttttcggaggtgagaatatgtcatactctaatagcttcgctttgattgttgtattatttattttgctgatcattgtgggctccgcttttgtaaagtattaattcattcgcgcacgaagccttcttccgaaaaactgcaggttcatatcgaaaggcgctccgcttttcatatgagcctgtttttttgtaatttaaaaagaatttatttccacaataacaaaaaatgtttataataggataggctctgagctgacggctgacggcgctcggaaataaaaactctcccacaaatgaaacttttatacaacattttcgtcttatactgttgttaaggcaattcaataacggaaaggaaaagatcaatgttaaataagctaagaatgttgtatgaaaaaacaacaatgaagtggctgctcaacacttcctattactttctcattctggtgctgctgtttttaatttacggattccatacagcaaatacaggttcatatatttataatgacttttaatggagaagaaaacaatgaaactgattgaaacaattaaaaaatacgcgcaaacacaacccgatacccttgcttttgtgaatgaagaagaaaagctgacatacggagagctttggtcacaatctgagcgccttgccgcaaggattcaaagcgaagctttaacagatgcttctccgatcattgtctacggacatatgaaaccggttatggcggtttccttcctggcttgtgtaaaagccgggcatccgtacattccagttgacgtatcgattccggcagaccggattctgaaaatcatcaacagttcaaaagccgagcttctgctcaataattcaggcacttcggttgacacgggagatgccctcatttccgtagtggaaccgggcgttcttgaaggagacggggtgccggagacagatcccggacgctgggtacatggggaagatactttttacattatctacacatccggaagcacgggaaatccaaaaggcgtgcaaatctcagccgataaccttcagagcttcacagattggatcacgaatgactttccggtggaaagcggccaagtgttcttaaatcaagccccgttttcctttgatttatcggtaatggacctttatccgtgcctgcagtccggaggcaccttatggacggttacgaaagacatgattaatcggccgaaactattgtttgaagcactgaaacagtccaacgtcaacgtctggacatcgacgccttcattcgcacaaatgtgcttgatggatccgtcttattcggaagagctgcttccggagctgagcttgtttatgttctgcggagaaacgcttcctgcgtcagtcgccagacagcttaaagaaagatttccaaaggctcgtgtttttaacacatacggcccgaccgaagcgaccgttgccgtcacttccatcgaagtaacagacgacgtattaaacaagtattcttctcttcccgtcggttctgaaaagcccgaaaccgaaatcgtaatcatcaatgaagacggaaaagccgtccaagacggggaaaaaggcgagatcataattaccggagcaagcgtcagcaaaggctatttaggcgaaaaagcgctgacggaaaaagcgtttttctcttacaacggctcccctgcttaccgcaccggtgacgcaggttacaaagaaaacggccagctcttcttcctcggaagactcgatttccaaatcaaactgcacggctaccggattgagcttgaagaaatcgaatatcaaatcaatcagtcccgatatgtgcagtcggcagtcgttattccattctaccgcgaggagaaaatcgagtatctgatcgccatgattgtgcctgccgaacacgatttcgaaaaggaataccagttaaccagcgcgattaagaaagatttgggcagcaagctgccggcctatatgattccgagaaaattcatgtatcaaaaagagattccgatgacagcaaacggtaaaatcgaccgcaagagattaaaagaagaggtaaccgtatgacgccttatggttcatttcttttcttcattatattaggaattttactggcgccgaccatcattctcggactgaacggaaaaagcttccgcttatataatatggcggtttccgttctggttctggcgcttattttttcgaacagcctgcacgggctgatcatgctgtgcctgtttacgctttggcagacggttctgatcaaaggctatatcgcttaccgtctaaaagcgaacagcggcatcgtattttgtctggctgcagcagcttctatcctgcctctggcactgtcaaagctgctgccgtttttcgccgttgacaactgggcaacatttctcggaatctcgtatttaacttttaaaggggttcagctcatcattgaaacccgcgacggtctcattaaaaagcagctcccaatcagcagactgctttactttattctcttttttccaaccatctcgtcaggtccgatcgacaggtaccgccgttttgaaaaagacgatcagacggtttggacaaaggagcaatacgaagaactgctttacaaaggaatcaataaaatttttctcggctttttgtacaaattcattatcggctactgcattaatacgtatgtcataatgaaactgccgtttttgacttccggcagcttctcgcatggattggcatacatgtatgcgtacagcctttatctgttttttgatttcgccggatacacggcttttgcggtcggcgtcagctatatcatgggaatcaaatcccctgaaaactttaataagccgttcatcagccgcaatattaaagatttctggaaccgctggcatatgtcgctttccttctggttcagagactacgtcttcatgcgctttgtcctttggatgacgaagaaaaaatggatcacaaaccggatggctgtttccaatatcggatatgtactgctgttccttctgatgggcgtctggcacggccttgcccctcagtacatcgtctacgggctgtatcacgcgctgctcatggtcggctttaacttctttgaaaaatggaataagaagcacaagtggtggccgaacaacaagtggacgacagccgtctcaattgtggtgaccttccactttgtatgttttggatttttaattttctcagggaaactaatacactaaaaggagattttcataatggattttaatcaagaagtactttcagttttagcagaggtatgtcaggacgatatcgtaaaggaaaatccggatattgatatattcgaagagggaatcctcgattccttcggcacggtggaattgctgctcgcattcgaaagccattttaacatcacagtgccgattacagagtttgaccgggatgcatggaacacgccaaatcaaatcataaagcagctgaatgagttgagataatgaaaaagcgttttttattcgggccaatcatcttggcatttttactttttttcaccgcgatcttgatcccaaatgcatggctgacaaagctggttcctaaagatcgcgtcgaaacttcagctacagaattaaacccgatgatgttccaggggatgtatcttcaaggcaaagcgcttgaagacccgaaatatctgccgattttcggatcatcggaattgtcccggttagatgcattccatccgtctaactattttaaagtaaacaatcaagggttcacgccttacctggtcggaaaaggcggctcacagtccttgattcacgcgatcaactttgcggcgcagtctgatcaattaaagggcaagaaaatcgttttcattatctctccgcagtggtttcaaaaacacggctcggacgaagcccactttgcgccgaacttctcggctttgcaggcatacgatcttgtgttcaatcaaaatgtcgattccgggctgaagaaaaaaatcatcaaacgcatgcttaaatttcatgcagtgaaaaatgacgctctgctttcagccctttttaaagccgagctcgaccaggacaaggtggcactgtctcttctgacgccgccggcaaaagcttaccaaagcattctggagaaaaaggacatctattattccatggttgaaggagacggaccgaagcggaccatttcccaagatgtaaaaaacaaatcgtgggatgaattaaaacagatggccgaaaaggtcggcgccaaagaatcccggaacaatgagtttaaaatctcaaacggcgtttataagaaattgaagccgaagctgaaaaagcttaaaggccataataaaaagatgaactatgccgagtccgtcgagttccacgatttccatctcatgatggatgttttgaaagaatccggcgcagaaccgctgttcatctcggttccggtccacggcaaattttacgactataccggcttccctaaaaaaggccggacggatttctataaaaagatcaaaaaagaaatcgaacaagagggctttcaagttgctgatttaacgaatcatgaatatgatccgtacttcttgaaagatacgctccaccttggctggaaaggctgggtttacgtcgatcaggagatcgaagctttttataaaaagtcatcataaaaaaggattccccgctggggagtccctttttttcctgttttaaatttttaatgtttccaaaaattctattttacaaatttctctgaaatctattgcgattatcaagagaaggtttaaaatagaagataaatattttttggaaaaagactagaaacggcagggagaatgaatatgacaaaacaaacgatcagcgtacagctcagtacagcaaaaaagcaaaagccagaggctgacaagctcgaattcggccggacctttaccgaccacatgtttatcatggactatacggctgaaaacggctggcacgatccgagaatcgttccttaccagccgattgaaatggacccggctgcaatggtttaccactacggacaatccgtttttgaaggattaaaagcttatttatcaagcgaaggcagagttcttctgttcagacctgaaaaaaacttcgagagactcaataaatccaacgaccgcctctgcattccccgggttgatcctgaaatcgttctggaagggctgaagcagctggttcagatcgacaaggaatggattcctcaagctgaggggacatccctttatatccgtccgttcattatttcaacagaaccgtaccttggcgtcgccccatccaatatgtataaaatgctgatcattttatcgccggtcggatcttattacaaagaaggcatccgccctgtgaaaattgctgttgaaagcgaatttgtccgtgctgtggcaggcggtacaggcaatgcaaaaacggccggaaactacgctgcgagcctgaaggctcaggaagttgcggaaagcaaaggcttctcacaagtgctgtggcttgacggagttgaaaagaaatacattgaagaagtaggcagcatgaacatcttcttcaaaatcagcggtgaaattgtcactccggctctaaacggaagcattttggaaggcattacgagaaactccgtcatccatctcttaaaacaatggggactctccgtaaccgaaagaaaaatttcagttgatgaactggttcaggctcacaaagacggcctgcttgaggaagcattcggcaccggaaccgccgctgtcatttcccccgtcggcgagctgatctggaaagacgaaagccttgtgatcaacaacggtcaaactggagaaatcgccaaaaggctctaccaaacgatcaccggtattcaaaaaggcgctttgcctgacacattcggctggacagttgaagttgataaagtaagccagtcctgctaagcggtttaagctctcttttgcaaaaaagagggcttgcacccttatcgtaaaattcgccggcggcaggctctgtttccaccctacttgcctctttttcaatccgacttgcaatccctcccgcataaaacgattccattttatatactttatgttaaaattatcaataaccatgccggaaaggagagattatccgttctgatgtaacacgcaaatcaagaaaggacgctgaacgatggatcaaacaaaattgagcgtctgggaaaagaattacacgttccttttcatctccaggctaatcaaaatctctgctgactgttttgccttcaattctattttatggtttttaatctttgacggaaaaggtgcaatcggcacttccctgcttcttgccgtcacttttctccccgaagcctttttggcgccgattacagggcctttagtcaaaagaagcgccctgaaattctggatgtacttttcggatttaacaagggcagccgtcgtcattactataccgatttgctatttaaacggcttttcaccgatgtggtttgttttaggcctcatgatcatccattcggcaacaggcgcgacatataacccggcgtcaattacgctgattccgcagatcgtgaacgaaaatctcatccaaaaagccaacgcgattctccagtcttcttcagaaatcatcaggctgggagccgttacattgtgcggagtgctgctgacttttatcggtcctgcaacgactttggtcttttcatttatcttttatatcatatcgggcctattcatgctttgcatcaaatacagcatcacccggactcattcacagtctaagtctcttgctcaaagaggtacatattttgcgagattaaaaagaggatttacattggtgaaaaaccacaaaatattatatccgctcgcgatttattgcatcttcatgaacctggcggcttcaccctgggaagccctttccgcggtatatgttgctgaggatttaaacggaacgccgttcatccactcgctgctgaaggcgacgacggcaggaggagcatttttactgggatttatccttgcaaaagtaaaaatcaacaggtacggactcctttttattacggcaggcattctcgaaggtgcagcttattttatcgcaggactgaatactttcctgccgctcgtatttctcgccgcctttgcattcggggcagccatcagctcgattaatgtccccgaattcacgattatccagacatctgtcgaaggggatgaccagcctcaagtgtttgcagtcatccatatgatcacaaatctatcgcttcctttaggggcaattgcctgcggatatgccgcaaaaatgcttggcgcgggaaacgtgattgcaatcggcggcttcatcgaaatcattgcgggcatcggcatcctcatatttactcagcttgccagggcccggcggtcagatctgataaaagaaaaagaagctagcgcaaatatgtagtacgaatgtgacggccgcagtttcaccgggtcaggcgggcgcagcggcgcctccaacaatgaaaaggttccggcaaacacaccggaacctcaaatctattcctatgcttctacagatctaaaaaactgcggaagatgctctttatgcgcttcaagcatttcgtccagtatttgtttcgcaattttgtcggacggaacgagcgggttgatcgtcatggccacaagtgcagtgttgtaatcgcctgtaacagccgcttcagccgcaacgcgttcgaacgatttaatttgctggacaagacctctcacggtgacaggcaaatctccgaccgcgatcggtttcggcccgtttttcgtcatgacacagttgacttccactgcggagtcatcaggaatgcttgcgatcgctccgttattcatcgtgttaacaggttgaatatcgtgcttgtcattgtaaatcgagctgatcaagttgcaggcggcatcactgtaatatgcgccgccgcgcttttcaagctggggcggtttgatcgccagctccggatctttatacagctcaaacaattccttttcaacttgctgaacaacctctgcacgcgttccttccgtttttgaagcctccagttcgtgttcaagcatttcctgtgttttatagtagtagcggtggtagccgcacggaatcaggccaaggccgcggataaagtcgggttcccacgattctccggagatatttttcatcgtcatcgcattttctggatctgccatcgcttcgatcactttgtctttgacgctgacgccgtcaaggaaaacgtcgagtccgaacaccatatgatttaatcctgcaaattgaatgtctatgcggctttcatcaacatcgagcgcctttgcaacccccatcttcatgccgatcggcacattgcagagcccgacgacttttttcaaattagaatagcggagcagcgcttcagtcaccatgcctgccgggttggtaaaattgacaagccacgcgtcggggcacagttcttcgatgtcttttgcaatctcaaggatgaccggaatggtgcgaagccccttgaaaaggccgcccggtccatttgtttcctgaccgatcaccccgtattttaaaggaattcgttcatcttttgctctcgcttcgagcaagccgacgcggaattgcgtcgtgacaaaatcagcgtcttttaaagcctccctgcggtctagcgtcagatggactttgatcgggacgcctgctttttcgaccattcgcttcgccagcgtgccgacgatattaagtttttcttccccttccggtatatcgacgagccagagctcgctgaccggaagctcgtcatgccgtttgattaatccctcgacaagctcgggcgtataacttgaacctccgccaattgttacgattttcaatccttttttcatcaattgacacctccgtggatattcattttttcatagagctcgacaatctccgcggccaaatctttcatggtcatcgcattcattaaatgatcctgggcatgaatcatgagcagtgaaggttcggttttcgcacccttcgcttcattttgaatcaaagctgtctgaaagtgatgcgccctgatcagttcttcgtcagccgcccggatcttttcttttgcagctgcgaaatctccctttttggcttcggctatcgcttccatgcaaaagctcctgccgtttcctccgtgaaggataatttgaaatatcgttcgttccaattcctcggacattttggcaccccttttctatacactgacctgttgaccgtcgcttgcagccgttccggtctccagttcgctctcttctttcagcttttgtttatcccacattctaaagaacggatagtatacgacaaacgagatcaacagattgatcagctgcatgaccgctccggaaattttccctcctgttgccaaatatccggaaaagccgggcggcatcgtccacggcacggcaatcccagccggctttgcaacaagacctgtgctcattccaatataggttgccgttatcatcagcagcggcgacacgatgaacgggatcagcagcatcgggttcatgacgatcggcatgccgaagataatcggttcgttgatgttaaaaacagcggggccgatggcgagtctgccgagctgtttcatttgcttgcttcgcgccctaagaaacatcgtaatgaccaaagccaaagtagcgccgctgccgccgatgttgatccaaatctcaaaaaactgcgtcgtaaatatgttcgggagcgcttctccggcttggaaagcgagacggttttcgtccatcgctccgtaccagatcggcgacatcactccgccgacaatgtttgctccatgaaggccgcaggaccacagcagcattttcacagtttcggcaataaggcttccgccgagactgccgccaaggacggaaagaggcgttcccaaaaggacgttgacgacattatggaggctttcaaacggcgtcatttcaattaaaaggcgggccgcccagatcgagccgataacggcgaatcccggaatcagagcgataaatgatttgctgacagccggcggtacgccgtccggcattttgacgacaatatccttttgaacgacccagcggtaaacctcagtggagaacatcgcgatcagcatgccgacaaacagacctttgcttcccattaatgaaatcgggatgccgcctgacactaaaatttcctctgttgcgccttcgggtgtgaacggaatctggtagggggtcgcaagcagaaaagctgctacggcaatggcgcccgatgacagggcatcgatatcatatttctccgccagacggtaggcgatgccaaacgtggcgatcagcgccataatgtcaaagctgacattaaccggatagcttaatttctcagcccattgatcgccgaaaatccccgccatgaattccggatatcccggaatcggcaaattggctaaaatgagaaacagcgatccgataatgattaatggcatggtcagaataatgccgtctctgagagcctgcaaatggcgctgggcggcaattctgccggcaaccggcatgatcttctcctctaaaaatgcattaaacttgttcacttgtgccgcctcctttaagagccggcaagctgttcggcggattttaacacttcagctccattacaagttccgtaatggaccgtattgatgacatcgacgggtacacctttcgattctcctaatttttttaattgcgggagcatgtaacggacttgcgggccaagaagcaatacgtcggctttatcgatatgattctgaacctctcctccggaaacggcccagattttatagtcttttccttgttcctctgcacttttttccattttcgtcacaagcagactcgttgacattcctgcggcgcaagctaataagatattcatgttaaatagtcccccttttacgtatcgtgtctgatctctcttacagtttcatcatataatgaaatcgttttcatatacacttaatgattttcctcagcgaagaggaaaaaagacaaggggacatcttcatttggcatatcgatgagccggcccgctttttttaaagacggacataaactccccgtacgttttgcatttcaggagttcccggacaatcgccctgtcatctaaaacacggcccaaaaatttgtacatctcctgcaaatttgctgtattgtccttttctacacaaagaaggcagacgaattgaaccctcttattctcccagactatcggtttttgcagcgtgcaaaccgcccaaaaagttgaagcggtttttggtgtcatcggatgcggaatcgcaaccagattgccgaagcaagtgggcgcaacggcctcccgttcaaagaccgaggcttcaagccccgcgtctgcaagccctgattgcgtcacttttccgcacagaaagcgaaggacatcctctcttgaagacagactttcccgcaaaaagacaagctcttttctcgtataagtcgaagcgattccgtcatcttcggcaagcacttgttctattttcgttaaatctccccctcccagtattgtgtttacttgaatcaccggaatgggaagatcatcggacagcggtattgtgctgataacaaagtcgagtgcatggagcgacatttgattcagcttgtagtaatcaaccgttccaaggatctcaagctttgaaccgaatgttgcccgcagtctgtcctgaagcagcatggcgcttccggcccctgaagcacagacaatcatacagcgttttgagggcctgttcatgtttcttctttccatggctgcgcctatatgcaacgcgaggtagccgacctcgctttcctgaatgtcaaatcccgtctctcttttgatgacttcaccggcttgaatacccgcttcaaatgcgagcggataattggccttaattgcatccagcattggatttctgatattcatgccgtatctgcagcgattcaaagccggttttaggtgaaggccgagaccgatttttaattctttgtcatccccaatgccgagggtgaatttttgatcgatggttttcatgatcaattgcgtcagccggtctgtctcttcttcatccatcatgctttcgattgcaccgctgcgaatggcggccataaccgtccttttcgcgccaagcaaatggatggcgatgtaggccgtttctttttctggaaacgccacgtgcagcttttgttcaagagtgcggacaatcgccctcgccacttcatattctttatgattcataatctcctttacatctttggaataaagagaaacatgtttgccgcttcggatgcgtttgcatgcaatggcgacgtggatgagaagattgtttagtccgatatctgaaagagaaatttgatcttcgcttattttttctaaaatcgtttgacggatcatagcaagctcttcttttgggagaatggatatccgggtgttcataatatcaatatccgtttcccgctttggaaaaaggtgctctgcgatgcacgatcgcagcttcatctcatctcccttcagcttaaagccgtaattcggcttgatcttcagctcaatgtcgtaaggtttaagccttttcttcacatctctcatatcgttttggaccgtcgatttgctgatatacatctcagcggctaaatcttcaagtttgacatactcctcagttaagagaagcctttttaataaatagagaatacgctcatttggaaaaacgggagtagaaagctcttgatgaaatgtgtgctgcagaagctggcgaaagaggcggtcattcttgatggagagccgatagcctgcacccctgatcgattggacggcagcgccgtttttggagagaagccggtctaattctttcacatctgatctgatcgtccgagaggtcacatttagctcattggccaaatatgcgctggttaatggtgattctgcccctatcaattcgccaaggataagcttaagccgagcattgagcatagaaaaagaccctcccactaagatacttgaaccgagaacaaacctatacactcaggtatattcatttttttgtgaaatttgtctcatagttaagtaaattctattatgactgcgctttcaagtcaatttggcctttctccaagaaaaaagccggtttaaccggctttcagattctttttctcccttcggtttttaatgattttccatgcgatcggatagatgacaggcgcccatttgacggcgcttttaatcatttttttcatggcttgactccctcctgttttttttactgttttccctgatgaacgggagccaaaccttttaactatcttgagacatagcggttcccttttatccagaatcgccaagggtattccctcgcttcacctgagttgtcaatgccaattcgcggaccgctcaaaatatcttggggttcatacccttttgcgatataaagcggcggccccgtcagcggtctgccgtaatcgttcatcgtgatggaaagcgcctttgtcagctttcccggaccgtttgtccaatcgcgcggtttctttccgctccttcgcttctccatcagcgcgaggccttcatgaggttcaagcgctctgatcagcacggcctcaggttcatcggctcctccgcttacaacattgatgagtgtgtgggtatgcatggtgtacgtatacaccacgccggcttcacgatacatgatttcggtgcgctttgtccggcggttgccatagctgtgagctgctctgtcccctggccctttataagcctctgtctccacaatatatcctgaagcaggcccttcttccgtttctttaacgagaagacagcccaacagggacctggcaagttcaattgttggcttgttgtaaaattcgagcgggagaggttcgtgagctggattcatttttgttggcctcctttttgctaaaaagcaaatcgcctctttgtcgattgtgatatattttaccattttcgacagacgagatgccagaaatgaaggcaatgatgaatgagatgatttattggtcttcagtggatgacattgacatatctgtattattgtatacaataataattatattctgaaaaaaggaggcgaaagcttttttcatgcactcttcaaatccagtcaaaagacagtctgcaagtgattacgcttataacgaattaagaacgaaaatcatcgaacttgaatatcctccctctgaacagcttgctgaagacagtcttgcaaagggtttaaacatcagcagaactcctcttcgccaggctctttaccggctggagcttgaaggattggtcagtaaacagccgaacggccggcttcgcgtatgcccgatttcgctcgctgaagcgaaagaggtttttaaagtgcgtgaagcgcttgaaggactactcactgccgaagccgcacagctggtgacgccggagagccttcatcagcttgaagaccgcatcgaactgatgaagctggctgccgtaaagggccgcaaaacagatacggtcaaatacggatcagaatttcattctatcttgcacgccatcagcacaaatgcaaccgcaaaacgttttctggatcagcttgaaagcaggattgaacggtatcgcagaatcagcggatacaaaaatcctgactacaaaccgtctgtatctttcaatgaacacttggatatttttaatgccgtcaaagaaaaaaacagcgttttggcagaagccgccatgcgttcccacattaaacgaagcttacgttcaattgaagaaacgctcgaacgttcatactaatccgccgaacagccaatgccattctcacagcacgtttttgacacaaatgttaaaaaacgaataagaggtggaaaaatgggcaaacaaggtgtatttaaaccgggattagaaggcgttattgctggagaaacgaacatttctttcttagatacggaagcggaacaaatcgtcattaaaggctatgatttaatcgaacttgcagaacaaaaaacatatcttgacctcgtctatcttctccttcaagataagctgccagatccaatggaattgaaaggaattgaaagcgctttaaaaagtgcgtatgaactgcccggcggaatctatactattctgaagtcgcttccgaataatacccatccgatggatgcgctccgaaccgggatttccgctttagcaggatatgatcccgaattgaatgacagatctcaagcagcaaacagaagcaaagcgctgcgcttgatcgcacaggttccgaatattaccgccaacagctaccgcatccttcaccagaaaaacgtcatcacgcctgacaaacagctttcattcagtcagaactttttatatatgctgacggaaaaagaaccgactccccaagaaacagccgtctttgatcagacattaatgctttacagcgagcacgaaatgccgaactccacatttgccgcaagagtcatcgcatcgacaaacacagatatatacggtgctttcacaggcgctgcagcatcgctaaaaggacatttgcacggcggtgcgaatgaagcggtcatgtacatgctgctcgaaggagaaacaaaatcgggcttctgcaagctgattgaacataagttaagcagaaaagaaaaaatcatgggctttgggcaccgcgtctatatgagaaaaatggacccgcgcgcagccttgctgaaaaaggcgctctattcgctttctcataaaaccggcagacaggatttatatgagatgtgcgatgccggcgaaaagctgatgcgcgaagaaaaaggcctgtatccgaacctcgactactatgcggctccagtctattacctgctcggcataccgatcgatctctatactccgatatttttcgcggcacggtcggtcggtcttagcgcgcatgtcattgaacagcatgaagacaacaggctgttccgcccgagagttcactatacgggaccgcgtcatcttcatccataattcgctttgattcagaaagaagggagatagatgttatgaaaactgaaagtcaaacgctccaaaactgtgatcaattgctggaagagatcgccgactatacggtaaatgccaagatttcaagcgaagaagcgattgaaaccgcccgttacgtcttaatggatacactgggctgcggaatattggcgctcaaatatccggaatgcgccaagcatctcggcccgattgccccgggtaccgtcgtcccgaacggcacccgcgtcccgggaacgcaatttgagcttgatcctgttcacggcgcctttaatatcggctgcatgatccgctggctcgattataacgacacatggcttgcggccgaatggggccatccgtcagataacctcggagcgattttagcctgcgccgactatgtcagcaggcagctgctcgcggcgggcaaggaaccgctcacgattaacgatgtcctgacggcaattgttaaggctcatgaaatccaaggcgtccttgctctcgacaacagcttaaacagaaacgggcttgaccatgtgctattcgtaaaagtcgcctccactgctgtggcatgctcactattggggggcacaaaacaggatgttatcaatgccgtctcccaggcctgggtcgataattcaagcctgcggacgtaccgccatgctccgaataccggctcgcgtaagtcctgggcagccggtgatgcgactagccgcggcgtgaggctcgcgatgatgaccttgaaaggcgaaatgggatataaaaccgctttgtctgctccaatgtggggttttcaggatgtcttattcggaggaaaagaattgacgctcgccagaccgctcgactcttatgtcatcgaaaatgtcctttttaaaatttcgtatccggctgaattccacgctcaaacggctgctgaagccgcgatcaggcttcaccctgaagtgaaggacagacttgatgacatcggccaaatcgtgatcacgacgcacgaatcggccatccggattatcgacaaaacgggagaattacacaatccggctgaccgtgatcactgccttcagtatataacagcgatcggactgatctacggcgatattaccgctgaccattatgaagacgaaaccgcgcaaaatccggagatcgacaggctgcgcgaaaaaatgacgacagtcgaaaacaaacagtattccgtcgattatctcgacccggaaaaacgctcgatcgccaacgctgttcaagtgttttataaagacggcacacactcggaaaaaatcgcggtcgaatacccgattggtcatcggcgccgccgcaacgagggcatcccgctcttaaaagacaaatttatcaataatttaaaaacgcgctttccggcggggcaagcggaacgaatcaacgccctgctgaatgatcctcacagattaagcggtgcacctgtaccggatttcatggaattgtttgtcatttaggaggttttgaatatgtggattgtctcgaaacaatcaactcaggaagagctggccaatgcattcagaaaactgatgaaagcacctgatattttgaaaatacccggtgttcatgacggaatggctgccattaccgcaaaaaacatcggcttcaaagcgctctatctctccggggccgcctacacggcaagccgcgggctccctgacctcggaatgatacactcccaggaaatcgctgaaaaagcaagcgaacttgtgagagccgcaaatcttccgcttttggtcgatatcgacaccggctacggcggtgtcctaaatgcggcacgcacggccgccgaaatggccgagagcagagtcgcagccgtccaaatcgaagatcagcaactgcctaaaaaatgcggacatttaaatggaaaaacgctcgtacccgcagaggacatgatcgcaaaaattagagcgataaaagaaaccgccccttcgctcgttgtcgtggctcggacggatgcaaaagcagcagaagggatggaagccgccgtcaggcgcgccaatttatatgccgacgcgggagccgatgccatctttcctgaagcattaacgagcgcagccgaattccgggaaatggcttcttccattaaagcgccgctcctggccaatatgaccgaattcggaaaaacgccttattatacggctgacgaattccaaatgctcggctgcagcatgattatttaccctgtgacttccctgcgcgccgccgcgaaagcttatgagcgggtcttcgcggagattttcgaaaaaggcacgcaaaagggtgtgctcgatgacatgcagacacgcgaagaattatatgatgcgattcattactacgactatgaaaaactggacgaaaatattgccaaaacggtgcttcccgaaatcggaaaagaacaccgttgatacgcgaaacaaggctgccgaatgatcggcagccttctccacttacaacagctgcaacatcgcaccgccgacagcaccggctgcaacgatgatccacggcgagagcttccagtagacaagcaggctgaacaaaaccgcagcgaatgcaaaatcgatcggcgccaatacggagctggtccagatcgggtgataaaacgcggaaatcaatatccccacaacagctgcattcactcccattaaagcgccttttactttaggattgcggcgcagcgtatcccagaagggcagcgtccccagaatcagcaggaacgccggcagaaaaatcgccgctgtggcgagcaatccgccttgccagccgctgatcaccgcaccaagatatgcagcgaatgtaaacaaaggccccggaacagcttgtgcggctccatatccggccaaaaatgcctcttcacttaaccatcccgccggtacaaattcccgttctaataatggcaggacaacatgccctcctccgaagaccaaagaacccgacctgtaaaagctgtcaaacatggcaatccagccggaagatgtcatttccctgagcaccggcagcaaaatgagaagcccgaaaaacaagctgagacagaccgctgcaaaccggcgcgacacaggaaactgcatgacggaatcatccgtttcaacttgctctttatagataagatatccggcgaaagcggcgagcaggatgactccgacctgtgtaaaagccgtctgccagagaagagtggcgaccagagcaaacagcgcaatcgctttgcgccttttatcaggtgtcagcttttgcgccatccccataacggcatgggcgactacggcgacggcgacgattttcagtccatgaatccagccggctgttccaatatcgaagccttgcagaaccatggcaaataatacaagcgctatgacagatggaagagtaaacccgatgaacgctgagattccgccgaggacgccggctctcatcacgccgattccgatccccacctggctgctggcaggaccgggcagaaactggcataaagcgaccagatcggcatagtttttttcgtccatccattttcttttacggacatattcggcatgaaaatatcctaaatgtgcgatcggacctccgaatgatgtcaatccaagcctggttgaaacgaatagaatttcaagcagcgacttcaagcttctgtccgctttatgctttgtcatcattccactcctctattctttaatttctttaaacagttcatatgctttcaatctggcttccttcagtacgcttgctcctttttccgtggttgaatagtattttctgatctttccgtccacattctgttcttcttttcgaagaagtccgtcagcttccatagaatgaaggatcggatacagcgttcccgcactgatgttatatccgtgctctttcaattcctcaagcatccacaatccgaaaatcgggtgttcgctggcgtggtgcagaatatgaatttgaataaatcctagaaatagctttcgcaataccttatcttccaataccgcaccccctttaacgaaattcaatatcgaaatccgatatcgataatatataacgaaagtgtagcatccgttccctttcttttcaaggtcttttgtccttaaaaaaacaagcccaaacatgggcttgcctgtttccaatcatttacgactgatactgtacacgatgaagatttgcgaaaataccgccgcgctcaaccagttcatcatgtgtcccttcttctgcgattccattctctgtcacgaccacgatccggtcggcattgcggatcgtagcaagtctgtgggcaatgacaagcgtcgtcctgtcttttgcgagctccgtcaaagcgttttgaatcacctgctccgtctctgtgtcaagtgctgatgtggcttcgtccaatatgagaatcggcgggttttttagaaacatcctggcgatggcaatcctctgcttttggccccctgacagcttcagccccctttcgccgacctgggtttcataaccgtcggggagcgactcgatcagctgttccaaatgcgccattttggcggcccgctgaatttcttcatctgtggcatccagttttccgtaggcaatgttttcgcggagcgttcccgtaaaaagaaacacatcctgctggacgatgccgatttgcgaacggagagagcgttttgtcatatcgcgaatatcgatgccgtcaattgtgatggccccgccgtctatatcgtaaaagcgcggaatcagcgagctgatcgtcgttttgcccgctcccgacggcccgacaaaggcgacggtttctccggctttaattgacagatcgatgcctcgcaggacgggtttatgtttttcatagccgaacgtcacattcttgaagacgatgtttccttccagcgccggaacatcaatcgcatctttgcggtcgacaatctgcggctttgtatcgatcaactccgtaaaccgcttaaatcctgccattcctttaggataaagctccaaaatggcgctgattttatcaatcggcttaaacagcacgttgacataaagaacaaacccgacgaattccccgtaggacatattcccggaaaaactgagccaagctccgaacacgagcactgccagaatcatcaggcgcgtcatcaaaaaggttccggcagtcgtgagagccatcgttttgtagcccttcagcttcgccttgcggaacttttgattgttttttaaaaaccgggatatctcaaagcgctcattcgtaaaagattgaacgacgcgaacgcctgaaacgctgtcctcaaccctggcattaacatcggcgatttcgctgtacatctggcgccaagcccggttcatcctgatattggaatagatgatcaagataatcaataacggcacaaacagaactgcaaccaatgcaagcttcacattaatcgtcagcataatccaaaatgcacctaaaaaggtcatcacggcgatgaacaaatcttccggtccgtgatgggccagctctccgatatcaaacagatcatttgtgatgcggctgatgatatgtcctgtttttgtattgtcaaagtagcggaaagattggcgctgtacatgttggaaaagctcctggcgcatatctgtttcaatgttgatgcccagcttatgcccgagataattgacaatgtactgcagacctgtgctgagcaggtagatcagtaagaggccgatgcttacccagacgatttcaagccagtctcccccgggaatcagcgtatcaatgaaccactgaacaactagaggaaaagccagctccagcactgcaacgacgatcgcgctgctgaaatcgatgaagaacaaacgtttatgaggtttatagtatgaaaaaaagcggcgtatcataggatgatgtgcactccttttgaaaatctttacgagattgatcgtatcacagtttggcatcggaagtgcaaaaatttcgaaaaataattgaaaattattctcaagtaggctgttttataaaggaattcccgcttcttttgcttcctgtgcaacaagcttagcgatttcttttgccccgaagtcgcaaaagtgggtgtcatccctggctccgtccggatagttggggtgttcccccggttcaagccataaatacagctttttggaagcttccggtcctagcgattcaagcaattgacggcttttgaaggcgagatcgataagcggcacccgaagctcttccgcaagctgtatcatcgcatcaggatagtcgccatgggtatttttaaagcggccatcgcttgcaaatgatcttctctggaccggtgtaatcagaacaggattggctttctttaaccgtgcctcatctatataccgggtcaaatgctgcttgtaagttgtgtatggctctgtatagcgatcatccggtttttggtcgttatgaccgaactggacaaacaaataatcgccgcttttgatctgtgttatgattcgcttcagcctgccttcttcaataaagctttttgagcttcttcctgatgccgcttcattgcggatcaaaacacctgcgcttaaaaactcgccgattttctgcccccagcctgcacgcggcgccctattctcatcataatcgcaaaccgttgagtccccggccaaaaacaactgaatgtctcgcatcatccatccccctgatccctttttatttatattaaaacgcccctcaaggaactgcaacaaatatacataattaaccattttgttctttatacgactcctttttataaaaaaaaggcgtcaattgacagaaaactatcaatttatactaatttttttagaaatttatctaaaaatatttacttggatggtaaatggtgatagattaagtaaacaagaaaaggaatatagttgatcgcgatctcatttctgccttttcttgaaaataataggacgtcctctactttaacttaaacattgcaattaggaggaacttatcgatgctaaacgaaaattcattcgtaaaatcagtgttggtctattagcttctgcagcattgttttcatttatcattcctacccaaggagcaaatgctcaagaggtgaaaacaaatcattttagaggaccgatcttttgtccgccgccattcaagccggcacctaaaccacagccgcctcaaaaaccgcagccggacaatccgcaaccggataacccgactcagaagcctgtgcttgaggcaaaaactattaacagcaataaagagtggtcaacttcagacatcgaaattacttatagaccaaacgcatttgtcggttcaagctatgttgaatttcattttccgtaccgctttcatgcaagcacaagagatacactaaatggaaaaacgcttgactatacacaaattttaaatgatggacaaacggtcagagttcctgtctatgctttaagttcctctgagttcaaactggtcatggttcggaaaacgcttccaaatgccggcactcacagaattactgctgaactgcagcaaaatggaaaaaacatcaaccatgctgaaacaactttggagattgtccctcgttaaatcaatgttcggcccgccggcatgaatgtgccggcagccgttctattgtatttttctttacatatcatgcattttttaaatgtttttagaattttcctttaaaaatatttacttgattggtaaatgatgatagattgatggagcgggaaaaggaatatagtagattccgaacttattttttcctttttcatcattttttaaaaacatttattaggaggggtaagtacatgttgaaacgtaaatttatcggtaaaattggagtcggcctattaacttcagccgcattgttttctttcattcttccgacggaagaggcgagcgccactttttacagaaacgctccgacgctgcatgtcgagacggttgacagcaataaagaatggacaacttcagacattgaagtcacttacaaaccgaacttttttgtcggttcaagctatgttgaatttaacttcccataccgcttccatgcgaatacgagagattcgctgaacggcagaacactgaactatacacagattttaaatgacgggcaaacggtcagagtgccggtttacgctttcagctcttctgagttcaaactggtcatggttaggaaaacgcttccaaacgccggcactcacagaatcaccgcggagctgcaaaagttcgggcgaaactacaaccacgcagaagctacagttgatatcctgccacggtaaaattttaagcctgccggcataagagccgccaggctttttttcatttaagcgctgcccgccgaaccagtatgttaaaacaagcgagcgcgctgatattgcaaaacagaatgacgactgccatcggcaaagctgtatggcttccggcaataccgacgagcggcgccgcggcagctcctaaaataaacggaagcagtcctagaagcgcagatgcgctcccggctgatttcccctggctctgcatggccaaggatccgctggtcgtcgtcacgattccgatgcaggaaaccacgacaaacagcgggattaaaataagaatcagcggagctttaaaaaagacagaaacaaataaaacaacgcttgcggtaaaagacagcagcaaaccgctccgcaaaagggacgcttcaccgaaccggccggcaagcctgcccgtaatctgagctgcgataataatgcccaggccgtttaatgcgaaacaaaaactaaaggcttgagccgacaatttgtaaatgtcctgcaaaacaaacggagaggccgatatatagccgaacatccccgctacgatcagcccttgcgccaaggcgtatcccataaatgtacgctggccgaagagccttccaaatgatacaaacgtctctttgaatccgcctgccgtacggttttccggagacagcgactctttaaccccgaatataacggacaaaatcatcagcaggccaaaaaggccgatgatgaaaaatacgccgttccacgtcgtccatttcatcagctgtccgcccgctaccggagatatgataggcgctatcccgttaacaagcatcaagagcgaaaagaactttgtcaattctgttccagaatatagatcacgggcaatcgcgcgtgatatgacgatgccgcctgcccccgccgcgccttgaataaagcgcatcgcgatcaaaacccatacagaagatgtcatagcacataaaaaagaggccgcggcaaaaacggacagcgacacgatcagcggaagccttcttccaaggacatcgctgaaagggccgatgacaatttggccgattgccagccccagtaaacacgatgttaaactgagctgaacgacggaagcattcgtatgtaaatcagttgccatctgtggaaggccgggcaaatataaatcgatcacaaccggaccgattcccgataaaatacccaatatgacagcgatccataccctgttcggctttgctttcgaatgagccgcaagatctgcctggctgttaagcgtacccattggatcactcctttattatatttttaaatacgccctcgaaaccttccagtgtattgtataccttaagttatgaagatgacaattagaaaaaccgggcgagcccggctgattagtaagattcatatcttttaaaaacaaaaacggtgcacatgaacaaaagaattacaattcccaaagacgaaaacaccatccagccgaaagcatggtcccatgaaccgtgcatgataaaataatcagcctggcttttcgccttatcaggcatccattcggtaaagcggggaaataaggatcccgccaatgaaacgaaggcgatgaaacagatgctcatgccggcaatccccccgatatggcgaaacagagcactgaaaaacatcgtgaccgacatgacaaatataatccatatactgtacacggataaactaactaaaaaccggtcaaattcaaccttgccgaatagcagatttgtatagtagaaagccaaaccgtagcttgcagcaaacgaaaccaatacgagcagcacctgctgaagccacttgctgccgatatactgaagcgggctgacaggtctcgccatcaccaatgaaagggatccttggtttcgttcgtgaacaatgctgcccatcacactgaaaacgaaaattgccgtaccaaccgtgccgaactgggacaaggtgctcgccattacctcttcacctctcggccttggtatgtcgatcacggatccctcaggcaaattcccggccatatcgataatttgaggcatataatacaggctgagcggctgaatcaagcccagaaggatcaaaatgacaggcagccaaagcagctttccgtctctccagctttccgtccattctttttgaaataacataaaaaatgaattcatagccccatcaccttcagatacatatcttccaaggacatcgttttttgttcaaaacgaacaatcgatacttgtctgttcaagcattcagccaacagtcggcggttgtcagaccgatctgttaaataaaattcagcttgtgaaggcttatgatacacgactttgctgacataaggcaggtgttccagccatccttcaagactttcttcagctgtcagcatatatgatggctttaaatgacggttcttcaatctgtgaagcggaccagaccatttgacagccccttctttcagcatgatcacttgatcgcacacctcttcggcatcatgcagcacatgagtcgaaaataggattgtcatcttcttttttaaatccttcatcatatcaagcacttcgcgccgccccgccggatccagcgcggaaacaggttcatccaaaatcaacagcctcggctcatgaaccaaagcctgcgccagcccgagcctttgcttcattcctcctgaaaaaccgccgattttccggtcttcttccttttccagaccgacatagcgcaaagcggttcgactcttttccagggcttcacgacgtttcattttggaaagccttgcagcgaataccgtatattctaaagctgtcatccatgaaaaaaacgcaggatgctgaggcaaatatccgatttccagcctgtttatcgattctctccccaaaaagcggatgcgtcctgatgtaggggccaataaaccggaaagcatttgcaatgtggtcgtttttcccgctccgttcggcccgagaagggcaacgcattgctgatattcaaggtcaaagctgacattttggacagcttggtgctgctgatacatttttgttaagccattgacggacagcatcacacccgcctcctctcatatgtttttttaccgatgataaagtaagagacgggaccgacaaaactgatcccgaaaatgatcaaaatccacatccactttgggccattcgttttctcctgttttatgcaactgaccaatgcggacactgctaaaatgaaatacagcacaatgaaagggggcgagcagcgcccaaggtatatctgctccagtcatgataacggcctcctttttttatgaaacggccttacaacaaataaataatagaataataaaggcatcggtgtttggatcaagccccatattccccagaaccacgcattggctccctttttcttcgcattaagaaatagaaagatactctgcgcaaataaaagcggtgaaatgcaaagcagcagcagcagtttttcctgagtcatgtcaagattcatttaatcagcctcctcatcagccgtatgccgccttttttctatcagggcaagcgctggcagcaagataagcgccgctccctgcaccatgataaaaacagccggtacttgaacggaaatcgtcaagtaggccgataaaatcaccagcgccatgacgataaaacaaagcaattcctttttaagcgcccgcttgcgctcttgcttaaaccgcgctaaacgctgattcagttcaaatgcttgaggaaccggcggcacaaaattatcatcaattctttcgagttcgcgtttcaaatgtgtaaccgtttctttttcatctcgttcattcactgtccccactcctttcgaattttctttaatccatgatgcacgcgcgatttgacggtaccttcttttattttcagcatgtttgccacttcagggtaagtaaacccgtaatagtgtcttaacaagattggcattctgaactcaggctcaagcgcagcaaacagctccaagtattcgctccattcgtggccgtgaagggcaggattccatttcatttttcgcaaggcttcctctcctgctgcttgcgttttgcggttttcgcgttttttccggcgctgatggtcgataaacagccgggaagcaattgagatcagccatgttgaaaattttgcattgccctgaaactgatgaaggctgacatacgctttcagcatcgtttcctggaccaagtcctctgtgagatctgggttcagcgttaatttcagaacatattgatatacaaaggggtaatgaagctgaaacagtttcgtaaaagccgcatcttcaccgtcttttgcccgtatgatcagttctttttcatctgcttgatccactaaaacgcaaaccccctttctttttgtctctgtatctaggacgacgcctgcaagcaaaccgttcaattctatttcaataagataaaaaatcatcttgtttttcggccgggatttatgatgtacttgaatttaaaggggtgtgagtaaaaagggatggagcggcaaaaacaaatcgtctatgaagaaaaacaaattttaaggaaagatcatatgatcttttggggtgccgtcttttgtttctggtttgctacatacatctatgtccctgttttcggattatatttagacaacatcggattttcatattcagcgataggaatcgtacttggaagctacggcgtcactcagatattactgcgttttccgttcggcatcctgtctgatgttctttcgccgcttagaaaacagctgttgatcagcggctttgcaatgtctctgttgagctgctgcatatttctgttgtccgattcgttcatcatggtgatcacagccaggctgctcgccggtatgaccgcggcgatgtgggtgatggcaaccgttttatactcgcagtattttacaaaagatcaatcatcaaaagcgatgggcatcctgcagtttttaacggtccttccccaattcatcagcatggcagtcagcggctacctcgtccatttgttcggctggatgtttccgttttggatcggtgttgccgtatcatgcatcggactgattctgtcattttacattaaagataacgggccccgccatacggccaaggggatggctttgtcagactatgttaaacagacgttgcgtcttcctgatttaaaagcgattacaacattatcgtttttagcccacgctgtactatttatgaccgtgttcggatttacgccgatttacgcggaatcggtcggaatcgatgagaaacagctgatttgggttatgttcgccttttttgttccgcaaacgctggcttccgtgtggtgtatcttttacaaagtaaaggccgccgatgcactgatatggatatcttatgtgataacggctgttttcttttgcttgctgccgtttgccgaaacccttttcgcggtatgtatcgtccacgccgtgacaggactgacattgggatttatttttccgcttttggtcagcaaagtcgttcagcttggtacgcctcagctcaaaatgtctgtgatgggtttctatcaatctttttatgcgctcggtttttttctcggaccggttgtggcgggaaaagtggctgaactgttcgggctgccggaggtgttttggtttgccggcgcattgtcactggccgctgcatgtatcatgcttttttccaaacagtttcgtatatttacagcaggaagacgggataaatcctcaaatatcgttcagccgacgaaggtcttccgtaagtgaaacagcgatgaatcccacaagaggttcatcgctgttttcttctttaatacgggtcttgagagtgccctttttcttccgcctgtctcggggcatcttcggcgccttctgctccgatcggctctcggctggatgtattttggctggaggcgttttttaatccttcctcgactctgcttccatattccttgtcgcattgcttcagcatatcgatcatcttcgtttgaattctttggtcgcacggggcaagtgtattgaccagattcgtaatcagctcgtccttttcccagtcttcgaaatgcctgtaagtgtccccggcctgctggaaattattctgcctgtcgatactttcgcgcacaaggtttccttccacatgcggggtgtattctttgccatcctgctttgcttctttcagcccgttgatggttgaaggttcatagttgatgtgcgggctttgatttttgcctaaatcgaccttgtactgcatctggccgccccgctgattagttgccaccctttttttcggcgcattgatcggcagctgcagatagttggctcccactctgtagcgctgtgtatccgagtaggaaaaagtacgtccctgaagcattttgtcatcggaaaagtcaagtccgtcgacaagaacccctgttccaaatgccgcttgttcgacttctgtaaagtagtcttccggatttttgtttaaaaccattttgccgacaggcagccaaggaaattgatcttcaggccacagcttcgtgtcgtcaagcgggtcaaaatcgagctcaggatgctcatcatcgctcatgatttgaacgaacagctcccactcgggataatctccgcgctcaatcgcttcatataaatcctgtgtggcgtgattgaaattcttcgcctgaatttcttccgcctctttttgcgtcaagttttttatgccctgcttcggttcccagtgatatttcacaagcacggcttccccttcttgattcacccatttgtacgtgttcaccccggacccctgcatctgccggtagttcgccggaataccccaaggcgaaaacaaaaatgtgatcatatgcatcgcttcaggcgtgttggaaatgaagtcaaagattctttcgccatcctgcaaattcgtaaccgggtccggcttaaatgcatggattaaatccggaaactttaccgcatcgcggataaagaagatcttcaagttgtttccgaccagatcccagttaccgtcttcagtgtagaacttgaccgcaaatccgcggggatcccgcagcgtttccggtgaggatatcccgtgagtcaccgtcgaaaaacggacaaacaccggggttctcttgcctttttcctgaaaaagctttgctctcgtatactttgagaccggctcatcgcctgctgtcccataagcttcaaaatagccgtgcgctccggctcctctggcatggacgacccgctctggaaccctctccctgtcaaagtggctgatcttctccaggaaatcatagttctccaatgttgatggcccccggttgcccacggttctgatattctgattgtttgtgatcgggtggccctgccggtttgttaacgtatcatcagtctccatgtcagatttctgctcgtttgaatgctgatccattcttcttcctcctttatttgtaattaacaataatttatcccaatccagaaaagttattcagcatttatcatgatcaaatcaacgataataaatttttctttataataattataaataaatattgtttttttcttgagaaatgttatcattgttttgtaattaaaatttacgcgaggtgatcctttgatgacgacaaataaaaacaacctaacaaccagctggggcgctccagttggagacaaccaaaactcaatgacagctggttcacgcggaccgacgctgattcaggacgtccacttgctcgaaaagctcgcccacttcaatagagagcgtgtgcctgaacgggttgtgcatgcaaaaggcgccggtgcgcacggttattttgaagtcacaaatgacgtttccaaatatacaaaagccaaatttttatcagaagtcggaaaacgcacgccgttatttgtccgtttttcaactgttgccggcgaaaacggttcagccgattccgtccgcgacccgcgcggtttcgctgttaaattttatacagaggaagggaactatgatctcgttggaaacaatacacctgttttctttatccgcgatgcgattaaattccctgacttcattcatacacaaaagcgccatccggtcacacatttgaaaaacccggatgccgtatgggatttttggtcattgtctcctgaatccctgcaccaggtaaccatcctgatgtctgacaggggcatccctgcgacttaccggcacatgcacggcttcggctcccacacattcaaatgggtgaatgccgaaggagaaggcgtctggatcaaataccacttcaaaacagaacaaggcattaaaaacctgaccgaagaagtggggacaaagattgcaggtgaaaaccccgattatcacacacaggacttgtatgaggcgattgaaaaaggcgacttcccggcatggaagctgtacgttcaaataatgccgctggaggatgcggatacgtaccgttttgatccgttcgatgtgacaaaagtatggtcgcaaaaagattatccgctgattgaagtcggccgcatggttctaaaccggaatccggaaaactatttcgcagaggttgaacaagctacattctcccctggaacattggtgcccggcattgaaccgtctcccgacaaaatgcttcagggacgcctgttcgcatatgcggatgcacaccgctaccgcgtcggcgcaaaccataacagcctgccgatcaaccgtccgaaagcggaagttcataattatcaaagagacggacaaatgcgctttgattcaaacggcggcggctctgtctactatgagccgaacagcttcggaggccctcaggaatctccggaaaataaaacaacggcttatccggtgtcaggttcggcggacagcacggcctacgaccataacgaccactatacacaggccggcgatctttaccgcctcttgagcgaagaagagcggacccgccttgtcagcaatatcgtaggttcgatgaagcaggtgacaaaagacgaaattaagcttcgtcaaattcagcatttctataaagcagatccggagtacggcacacgagttgccgaaggattgggcttgtctgttccgcaggaagtttaaggctaaaatcatttcaatcattctcaatgaaattctcattttctcaggtacaggcacccgtcctcttaagcatgcgggtgcctgcccttaatcaaagaacgacaggggatgttacgtgtggaagacgagcagctcgtccctttattaaaaaagcggggtttacgaattacagctcagcgcgtcctgattttaaaaacgattgcttctttgggcggccatccatcggcggaagacattcaccgggaattgccgtacatgagtctcccgacaatctacagcaacttgaaactatttgtgaagctcggcattttaaaagagctgtctcacggagacgcaaaaagcaaatatgaactgtttacatcacagcattatcatgtcatttgtaaatcatgcgggaagatcgctgatctggactatcctcacctcaaagaggtagagcatgcggcagcacaattgacgaactttaaagtgaactcgcattttctaggaatctatggaatctgtacaacatgccaagaacagcagcagaggtgaagacatatggaacgaaaaaaagtcggcctgttagtcatggcatacggaaccccttatcaggaagaagatatcattccgtattacacgcatatccgtcatggaaaacgaccgtccgatgatatgattgaagacttgaaaaaacgctacaagcatatcggcggaatctctccgctcgcgaaaattacgctcgctcaggcaaaagagctggaaaaaacgttgaacgagcgccaagataaagtcgaatacgtgatgtatctcggcttaaaacacatctctccgtttatcgaggatgcggttgaacaaatgaaaaaagaccaaattgaagaggccgtttccgtcgtcttagctccccactattccaccttcagcaccgaagtatacaatcggcgcgccaaacaggccgcagcagcaatcggcggaccacggatcgcatcgattgacgagtggtatcaggaagaaggctttattcgctattggtctgaagaaatcggcagcattttaaacgacatgtctgaaaaagagcgggaaaaagcggccgtcatattctcagcacacagcctgccggaaaaaatcagggagcatgacgatccttacccggatcagctcgagaaaacagcacaactaatcggagaacggctgtcatttgaccagatcgccgtaggctggcaaagcgagggcaacacgcccgatccttggctcggcccggacgtccaagacttaacaaaggaactgtatgaagaaggcttccggtcattcatttacgcaccagtcggttttgtatctgaccacctggaagttctgtatgacaacgactatgagtgcaaagtggttacggacgagcttggcgcaagctatcaccgtccgcctatgccgaacactgatccgcggttcatcgatacgcttgcttcagtcgtggagcgaacatacaacagcacagaacaggagaaagcggagctgtaaatcgagctccgctttttgctgcaatgttatgacgtgacaatatcccgcttttgaaaaacccaaaaggagacagccagaaaaagaataaaataaacagcaatcacagccgctgaaaatgaaagagtcatatcttgaataaacggctccccatcaatgtattgactgagatctgaatttgcaaagatcgtatacttggtccaatcaaattttgccgctaaaaattgagtaatcgcagaccctgtaaaaaagacgaacagcgaaagaccgacagagacgaccgcgcttcttaggatgaccgaaatcataaaggccagcgtggccagcacaataatattcaataaagcggctccatagtctaaggctaaaaacttcagcattgacatctttatcacttcgccgcttcgataggacaaatagtattggcttccctccaaacctagcagggcataccctaaaacaaacgcaaataaaagtgtcgcagcaaacataaatacagtgttgagcaagatcgacaagtatttccccaatagataatgccaacgcttgaccggtgttgcaatcgcaaatttaatagttcctttgctgtgctcaagcgcgatggagttcgctgccagcacgattgcaatcaacgcgattaatgttgtgatcggttttaactccttcagcatcgtccaaacattgtatttcgcagaaggcggcaaattatgctcaagccggtattgattgaccgcgatctcttcttttaaaaattggtatttgggaaccgctgggctcagctctctcatttctctttcatactgagcgttttgaacggttaattgctctttccagttacctgtctccttctccttttcgccattgctgaccatccatgcaacagcgattgtcatgacaagcagcaagcttaacacaatccaggtacttttcgtcaccatcagcctgtaaagttcatttttcaagaccctcatgccggtcaccccttattgatcaattccagaaagctttgttctatcgactgtttttcctgcttcatatgcagaactcttattttgttctccattaacagattaacgactttcataatgtcttcttccatgcaaaggacataaatctcatttttatcttccgtgagaccgcctgcatactggtactcattcaacaggtcagccgcttcatcggcgtggccgtttaatgtaagccgataacgaaccgtatcggtatcgcggtgattgctcttaatttgcaggagttctccgtttttcatgacgccgtattcatcacaaatcatctcaacctcagacagaagatgactcgaaatcaaaatcgttttgttgaaggttttcgccaagtactgaaggtgttcgcgcaaatcaatgattccctgaggatcaaggccgtttgtcggttcatcgagaatgagaaattccggatcatgcaagagcgcgacggcaaggcccaaacgctgtttcatgcctaatgaatacgttttaactggtttatgaatacttcctgtcaaatcaacaagctgaacgatctcttctatgcgctcctttgacacgtggctgtggaatccgccgagatatttaaggttttggtatcctgttaagtgctcataaaaggatgggttttcaacaacagaaccgactcgggctgccgcttcctcgtaattgcttttaactgaatagccgtcgatgcggatatctcctgatgtcggctttgccatcccgacaatcattttgataagtgttgtcttgccagcgccgtttggcccgagcagcccaaaaattgtacctggggcaatttgaaatgtgatattttggacaattggtctgccttttattcgtttacttacaccttcaaattcgacttgactcattttgtattcctcctttttggtatggcctgatctgtttcaatagaagagaaaaaaagagcagcgaaaccgccgtgaaccaaacaatcgaaccgataagaacggcaactgacttctccattgcaatgagggccgtcacaggaaaagaccatggaaagagaagccctaaaggggattgcgaaacgccgaaactcagcagtgaacaaatgaatacgataatgtttaatgaggtcttttccttactggtgaatttaagccataggaccgtacagatcagcggaaaggttgacaagagattgagaatgaagcccagcatccaagaaaaccaaggggcaggcccggggaaccccgatattaaaccgaaggcaagcgattcgatcacacagacggcatataatgcggctgcgaacagtccaataaacaaaaccttagcaaaaagcatggctgcgaaaggctgcggcgataagattcgattcagccacactcggtttttcagttcatccttatgcaaaaatactgtgaccgaagagacaagccagggataaatcgtgctgaataccaacagcaatgtaagatgccttaacgatgtccattcattccctcccgcaaacggggtgattcgttttgccataaaccctgtaaacactaaagatgcggtaagaatgaatatgctcgtcattgtaaaatcagagttcctgagtttgatccattccgctttgagcaaatttttcacggatcttttcctccccgctccttaagatccaacacatacagaccgctatataacccgccgaaataagataaactgccaggcctatatcgttcactgaatattcagtcaacaaaagccaagaaactccccacggcaaataaagtgttccactttgcataaaaaacggcgtcagcgtcatcaacagcacaaatagatattctgcctttaacgtcttcagaaaaaactggacggaagacatgatcaccgccagtatcgcaacagcggctaaacgctctggcgaaaacaaaacatccttttgaaacagcagactgactgccaaacagccgtaaagcaagaccagcgctgagacgatagttatcacggcgattccagtcagcacccaagtgaacaggcgaacgggataccgcaagataaaagcttgatgcatcatgcgtccaaataatcttctgcctgtaatataagtcagccaaaccgagacgacataaacagtcattccctccatgctacggatttctttatttgccccgtttttataaaagagaagataattaagcaaaacggcgagcactgtgatgatcataaccgtacatgcaaacgtctgaaatttcattctctttttcaccgcttcgggacagcttaaccaaaaataaactttaaacaatttcatttaaacgcccgctttctatggctagaaaacgatcaaacaattcgataaaagtttcgttccaatggcttgatgccatgatggtcccgtcataccgccttatgatgtctacaacgctttcctgcgcttttcggtcgagcccatttaaaggctcatccaatattaagatggaaggctgatgaaataaggccattgcgatcttcagcttttgcctcatgcctgttgaatagtactgtactttcgtgtcatcagccggattgataccgaaccgctctagttcagaatagatccggtcatcgtcatctattccgtgaagcaaggcatggactctcagattgtccgttccagtaagatgctcatgaagcggcacttcgtcactgacatagccgatatgcccgacagcagcttccctgttttggataatcgattgaccgtaaatcaaaatttcgcccgcaaataaagacaagccggtaattgctttaagaaacgtcgattttcccgatccgttttctcctttgagcaaaacccggctccctttgtccacagcaaggctgacgttttcaagaagtttcctgtctcccgcccgcacctcaacatgtttcatgacaattggaagctcaaccatggctacacccttgaacgaattcccaacaaaatgaagaatccaatgaaatacggcagcgaaaaagccagtgtgaccatgtttttataattggcgaacgacaaatcgacccatgaacttgtaaaaataacggcggatattccaagtgtaagcaaaaagaacatcacccgaaagaatttgttttgaatatatgccccgcgttcatcctttccgtcaaggctgattaaaataatgattccgataaaccccgcaaatcctgcgacagcaccaattgaattgatcatttctagcatcagcgatcatcctcctctagttggtattgaaatacctcgttgatgtccttctcaaataacgcggcaatgcgaaaccccattaacagggatggtttgtatttattcttttcaatggaaatcacagtttgtcttgttacacccaatagatcggcaagctgcttttgcgtccaccctttctctgctcgcagcacaggaatccggttggttaacaccccgctttgcttttcaatctcaatcaccctctttatttgcaaatcatttacatatatagagtacaatgttttttacacattgtaaagagtttataacaaaaagtaaaaagttttttaccaaaacagactaaaaaaagatcttcacgtgatgattgtgtgaagatcttttcgacaatcaagatttaggtttttcaaaaatcagttcgatagaagaaacctggcctccggcccttgatggaacagaaaagacgctgtgaagcttccagcctttttcagcatattcatgaatcacatcagaataatttttctcaagttttccgttgaatgctcctacagcgattgaaactgtttgatattcatacatacccttcactccttgttcatcattttcagcgcttgataagcgcgtacttccccgtagccgtatataacatctttccccggtttgcccaggtctaatgccgatttcctcaggatgtgatgcacttgtttagccgatggcttcctgtgatggcgctcccggtattcagatataaccagtgcagctgttccagctacctgcggggcggccaagcttgttccgtatgagagggaatatccctttgggatgtttagcatctggtctaatgcggtgttgtccttccctttcggatacgttgtcagtacgaggtctgtcacacgaaccatcccatcctgatcatacgtttctcccaaatatcctcccggggctgtgaattcaatttcccgcccttgattggagtatggggaaatattgttgcttttcatattgctgctgactgatacgacgtgcttcaaagcgctcggcaaatgcaccttgttttccgttttcctcatctcatcaaggttgactcctttattgccggcggaagagaagaccagcacctgatgctttgcagcgtagtttgcagccctttgataagctttcatcagcacttttccttccctgtcaagagaagtatagcttcccgtactgatgttgatgacttcatgcccgtcattgactgcatcaaccatcgccttcatgatgttgtagctgtctccgcctttttcgtccagcacttgataaggcgttatcgtcacatctggcgcaatgatattgatcatcccggctgtttgtgttccgtgtcctgtcggatctccggatacaggcttgccgtcaatgtaattccagccgccatttgtattgacggacgcttttaagtccggatggtcaagatccagtccgctgtcaatcaaggcaactttgacgtccggatgccctctttcgatttgatacgtgcgataggaatccgtctgctttgcagcgaaccatagatattcttttagttccaaaataccgtcaagcccccatgcaggcgaaccgctgatgactgattccgtttcgtttactgctgtatttgcaatcggcttttcaatgacgtcagccccgactttttcagcaagcttctttgtaaaaggagcaagcttttgtttttcaccggtcacttttgcaagtccgatttcttcaatgacatcggcatggatgtgaaattgttccgccgtgtccagcagtttcgatttatcttttacatgttcaagcaaaagatactgttctcctgcttgttcttttgcttgagccgtctttccgccgaccggcagcaggactgcaaaacataagagaaaaatatatattcttttcacatcatcacctctgcagattgctctttttcaaggaactttcgataaaaatctccgtaaaacttgctctcattcagcaatgtttcatgcgtacccacatttaaaaccatgccgtcttccaaaacgatgattttatcggcatccatgattgaagtcagtttatgcgcgatgacaattcttgtacatttcagctcccttaaaaaggcgtcgatttttttttcattttgatgatccagcgaactcgtcgcttcatccaacagcatcacagcggggcggtttagcagtgcacgggccaaggcaatccgctggcgctgccctcccgaaatattcatccccatttcagaaatcatcgtattaaagcccatcggcatattttgaatgtcatcgtatatttgcgccatttttgcgacttcatgtatccgctcaatgtcaacatcttcactgtataaagaaatgttgtctttaatgctgcggttgaacagcgttacatcttggggaacaacaccaatttgtttgcgaagagcgcttaaatccttgtttttaatattcacgccatcatagaacacactgccttttgtaggcatatagaggccaagaataagttttgccagcgtgctttttccggacccggattgtccgacgatagcgattttttcgccaggcttgatatgcaggcttacgtctttaataacttcttcgctgtgcgggctgtaacggaacgaaacccgttcaagccggatctcccccttaatcggggagttgtctttatttccaggtgtctcttcaatcgggctttgaaggatatcctgtatccgatgaagataagacgtcgtcaagattaccgagttgacggtttggacgatcgagctgcttgtattaaagaattgtgtggataaagcatgaaatgccaccagctccccaaccgataaattcccttcgaacacgagcattgcaccaatccataaaatcagcattggtgatatgatctgcatcgtgcctgtcagagagttcacgatgttaagaaacccttccttgcgtcggtatgccccgatcagttcccccagatagtgatcccatttttgatacgtttctttttcgattcccacagtcttaataccaaaaatcccatataaaaactcagtctgatagctttgaatctgcgaagtctttgcgatttcgtcctggtttttttctctcagcttcccgcggctgagcgccgtgatcccgacattcagaagagccagcagaataaccagccctgctaaaggcggcgatttataaaacatataaaacgagataaataaaagtgcgccaaaatcgagtacgccgaggaccaattgggaagacatcatatccctgacaatccggaggcttgtcgcgcggaaaaggagatccccgaacgacctcaattgaaagaattgatagggaagcttcagaatatgcgagaaaaatgttctcatcattcgtttgtcaaggaagttatttaatttaatgataaattgacccctgatcaattgaaccgtgccttgaacgagcattaaaacaagaacgcccgtcataaatgtttgcagcagagcctgctgattttgagcaaggatgtcatcgatcaggtattgcacgagcatcggtatgcctaatgaaacgagctgaaagatcatcgcaaacaacagcacggtcgcaagcagagaaggggattcttttaaatgaaaaagaaaatgcctccagacgggcggttttttcttcggcctgatccgctcggtagggatcatctccagcacgatcccgctgtaattttcgagaaaagcttcgatactgagtttttttcgtccaatcgcaggatcgatgatgttgacatgccggtcttttatttgatcaataaccacataatgattatcggaccaaaaagcgattgccggcagacgcacatgtggaagttctgccgcgcctgccctgtacacctttgcgtcaaatcccagattttcgctgagctgacgcatatgaaaaagggtcataccgtccctgccgcatcccgataaatccctcagctcatgcagagtatgatgcgaaccataccgtccggctaccatcgccatacagcacagtccgcattccgtctgctgcatctgttctataaacggtgtcttatgaaaaaacaagccttatctcacctgcccgtcggaatatcgagagttaatacggatggaacagattcatcgaggagccgcaaaagcccgtaggctattcctgccgtcccgacaaacatgccaagcgattccacatcggaatgcaaacccgttttccatccccggtttttcgttttataaatgtaaaatatatcatcagggacatgaagttcccggttcagccttttgatatccagcagaatgttcaaattcccaattaaaccgtggcacagcgaatgattttgacagtctgctagatttaaagaactttgaagcgcttcttgaagctttaaagtccgggtagtcaattcaggaataaaagcctgaatgtgcgctctccccagcaaaatcccgggagctccatgacaccagtagcttggggacagcgtatgcgaatcatttcgtaaatctagccagtttagatgatccttttgaaaatagcggtcctcttcttcgacaagctttaggacaagctctttgcagctgtcatcgtgtatcaccttcgccgcctttgcgatagaaaatgcgatccccgtcaagccgtgtgaaaatcccgtcaacgaaacggcatcctgctcgattgaatcaagtaagcggccaattcgatcattcaatctgctcagtacctgtcttatagagtccaatactgctgggtgctgcttgatttcgtacagattaacaagcactgtcagcaatcctgaatcccctgcgataaaatccgggttttgtgtttgattcggctgttccaaaactcggggaatgaggttcaacgccctttccaataaggaatcgtcttcccatagactgccaagataggaatacaggtaaatgaatgagcctgtgccgaaaaaagcagaatgggaattcccattttgaacccaataactttcttccttttgaatttcttctatcattgatcttgccgtatccgtatatacctgctcgttcagaaccttgcctgcttgtgcaaaaaatattgccagccctgccattccgtcgtaaagccccataggaagcggcgacaaaaacaccattttttcgtctccggcattattgctgatccagaaaggaccttcaccgcgctctgaatagatcgccttctgcagcaaatcatcagctatatgcttgacctcttttccgagatcagcgaccgtttccttctgtccaagcccgctttctgcatggtcccagacattttcaatcaacgtcgccattgataaagaaatatagcggagctgatgattcaaatccttttccgagaaagattgaatttttttctttgccaaatcaatacttgatgtttcataaaaaccttccgattcttcccctcttgaattgagcagggaagtgcccccagcataaaaagtaaagtagggaatatcatggagcagcagatcgacaatttcgtccggaataaacacgtttgccttttccgactgtttggcgagcatccacatataatcaaataattgctctcgtttatctccggcggtcaagtagtcagggtgggtgctcgcttcgagaaacttgccgtacacatgtgtcggccggaagacgtggcggacttcgtcgtgcttaaacagattcaaaaaccccgatggtcctgccagttcttctttatgtttcatcataatggcataagcatttttaaatccttccacgataaagtccgtataggaaacggcggacaccggacgtccatttagtttgggcgcattcaatttttcctcggtggtcagcgatgtttcttttaaagacatcctgtcctcaccgtaattcaggacggcgtagcccttcgctttctttgactgctggccgcctttgccgccgatcccgcttaaatcaaaatcgagcacttcatcatgtttgaatttgaccggaagcatcatcgaagacagcacggaatgcttcagctccaatgcggtgacatggaggttttgattttgagcgaaaatgctgacatggttgtcaaaaagagtctccagatcaatcaggatggggtgttcgcctgaggcgatgatattttcattatgaaaatcgacggagcgcaatccgtacaatatcgccaaatgtccgccctgccggaaataaaatctttccagttcttcttctgaagaacagccttcatgctttacaaattcctgccagccgtaatttcccctgtcaagcacttccgcagcacggaggctgtacttcattccccgtccgttcagccagttcagcagctccctgtaatgttcgtcaattgacaaggaccgcggtttatacacgagctttccgttgtttaacaccagcactttgacactctgcccgtttttgtgggaatctcccaaatccccttcaaatccaatcaattcgggggaagcgatattaaattttttcgcaatcaggctgcggtcgcttaaaaatctcccaataatttcttcatgaatctcgagcaccctgagaaccttctcagccatcagcctgccaagcacagggtaaagctcgaaaaattcccggtaaatttcaggatcggaaatgtattgttcaacaaagtaaacatatcgctcttccggtgacgccccctttagccggccgtcttcccgggctacattcagctctgtgataagggttctcgtcgccagcttatcaaggcattggtgaagttcagacatgatgccgtcttgatagccggcagcgtcgattatgcccgatagaccgccttcctgcttctcaaattcagaaaaagctttcgacatccgttcttgtgcaaataaaagaaaaggaacaaagaaggtgacaaatgacatgtggggaagcgggtgttttaattcggaaaccgctttagggttgtatttcataatttcagacaaacaggcagcccattccggcattttgccttgcagctgcacaggctcattgggtgaatgttggacagaagaaaggtgaaaatccgtaggacgagacggagtttttccgttttccggaaaaaagccggacggatgttcttgaccttgaccgcctcgttcattgctgtaaagagctttatacagataaatttcgaattctttcatgctcattctcgtcatccctttggcgaagaaaaccatccctgcaactccgttgcaaggatggattcttttgaattttttatgattccctagcatcggcttgtacacttagttgttgggcataatgaagcagaaaccgttacaccggctgtgatgcaagtccaagaagaggttgtagcaggagttgtttcaggattgacgtcatttcctcctaccaaagctttcaattcctcttcggaaaccatccctgccggatgattggctcctttgaaggcttcacgggcagctgaatttttcattgttttcatgattctcacctcctagaacgggcaaactatcgaaattttcctataatttagaattgactcgccgttccagtcaaattatactataagtacatcaagaaatcgacaaaaaattataaattttctaggaggtggaatatatgtcaaaaaaggaaatgattctttcatggaaaaatcctatgtatcgcactgaatcttcttatcatccagcagggaacatccttaaagaactccaggaagaggaacagcacagcatcgccggaggcacaatcacgctcagcacttgtgccatcttgagcaagccgttaggaaataacggatacctgtgtacagtgacaaaagaatgcatgccaagctgtaactaagttcccaacgcgggggccctgctcccgcgttggcatattgatagaaaaagaggtcgatagaatgaatgaaaaatccgccggatatcacgaacggcttcccgtcgcccaaactcaatccccgctcgtaaacgataagataaagtattggcgttcccttttcggcgatgatgataaatggctcaataaagcagtttcattattaagccatgaccctttgtcctccatcgcacaatcctcggtatcccagtcagtcgggctgaaagacagccgtcgcggcccatggcagaagatgcaaaagcggatctttgaaacgcccttttcctacaaggattctgctctgcaagattcagaattgctgttcgactccctgctgacccgttttgcgtctgcagcacaagatgctttggaggaacaaaatatcatactttctcctcctctttgccggcaggtgctgacacatttaaaacagacgcttcttcaaattgcccttcaaacattaatactggaactaaacattttaaggcttgaagatcaattgaagggcgacacccccgaaatgcgctatcttgatttcaatgataactttttagtcaatccaggatacctgcggaccctgttcaacgagtatcccgtattgctgcgccttctgtgcacaaaaaccgattactgggttcaaaacttttctgaactgtggaagaggctgaggcaggaccgcgaacagctgcaggctgcatttcatattgccggcgatcctgtccatattgagcttggggtgggagactcgcacaataaaggaaagatggcagccatccttacatattccgatggaaaaaagattgtctataaaccgagaagccatgatgttgacgacgcatttcaacttcttctatcatggatcaatgaccgaaattcaggcagccctttaaaaactttgagattaatcaataaaaaacggtacggatggtccgagtttattcctcacgaaacgtgccatacgaaaaaagaactggaaggctactatacacgcctcggcaaacttttggccgttttatacagcatcgatgccgttgactttcaccacgaaaacattatcgcctccggcgagcatcctgttttaatcgatcttgaatcaatttttcatcaatataaaaaacgagacgaacccggctcgaccgccgttgacaaagcaaactacattctttccagatccgtacggtctactggaatcctgccgttcaacctttacttcggaaggaaaaaccgggataaagttgtggacatcagcggaatgggggggcaggaagctcaggaatcaccgtttcaggcgcttcaaatcaaaggatttttccgcgatgacattcgcctggagcatgaccgctttgaaatcggcgaggcgaaaaatctgccgactttagatcaccagcatgtccctgtcgcagattatcttcattgtatcatcgaaggattttcagcagtataccgtctgatttctgatcatggcgaaagctacctggctacgattgaacattttaaaaactgcaccgttcgaaatattttgaagccgacagcgcactacgcctctcttttgaataaaagctaccaccctgattttctcagggatgcggtagaccgtgaagtgtttttatgccgggtggaaaagtttgaagatgcagacacagatattgcagcggcaaaaacagagctgaaagagctcattcggggagacatcccctattttctgtcgaagccttcagatacctatttgctcaatggcgaagaagaaccgattgccgcttattttgaaacgccgtccttcacaagagtaattaagaagatctcatcattttcagaccaggacttaaaggaacaagcgaatgtcatacgcatgtcgattctggctgcatataacgcgagacatgaaaaagacgcaattgatatagaccaaaatcacccgagtcctagatcaggcgccttgcagccgctcgccatcgctgagaaagcggctgacgatttggctgaaaagcgaattgaaggcaatgatggaaaggacgtcacttggatcagtacagttattgaaggcgtcgaagaaatctcttggacgatctcccctgtcagtcttgatttatataatggcaatgcaggcatcggattttttatgagctatctgagccgcttcgcaaaacggccggagacttactcgcatataaccgagcagtgtgtatttgcgattcagcgagcgttgaatgaactgaaggaaaaagaagaattcctgaagtacgccgactctggggcattcacgggggtttccggctatctgtattttctgcagcatgcgggaacggttcagaaaaaaaacgaatggatcgaactcatacatgaagctctgccagtccttgaagctgtcatcgaacaagacgaaaactgcgatatcatcagcggttctgccggtgctctaatggttctgatgtcattgtatgaacaactggatgacccggtttttctaaagctcgccgaaaagtgcgccggccatttgcttcagcataaaacaaatattgaaaacggagcggcctggaaagatcctcatacacaaaactattacacaggatttgcccacggcacttccggcatcgccgcagctttatcccgattcaataaagtgtttgattcgcaatcactgaaaaaaatcatttcgcaatgcctggcatttgaaaagcagctgtacatcgcttccgaaaaaaattggggatcaaaaggaagagaacaactgtcagttgcatggtgccatggcgctgccggcatattgttgtcgagaagcatcctccgagaaaacggagtcaatgatcccggactgcataccgacatcttgaacgctcttgaaacaactgttaagcatgggctcggcaataaccgctcattctgtcacggcgatttcggccaactcgaaatcctaagagggttcagggaagaattcagcgaactgaacaccattatacagaatacggaagatcggctgttgacatattttcaagaaaatccattcagtaaaggggtatcacgaggtgtggattcagccgggctcatgcttggtttaagcggagtcggctacggcatgctgcaatgccaatatggagaagaactgccggaactgcttcagctcagtccgcctcaagcgcttatcaaaaagaacagcaaagcttttaaaagagaaaacgtgttttaaaatcaaaatctatggattttcatccatagattttttttgtcaacattacgatgaaagaccttcatccaaatgcgcttattctcagattcgtgtcatttggcataatcaccagcttatgagcaaatccaactcacaacatgattattcagacaattcagaaatatatgctatgctctctctgattccaataaaagggagggatgatcggtgcccaccattcagtatccgccgtaattgtaagcgcttcccattcagcgttggcatcaaaaaagaaacaataggaggaatataatgaagaaattaatcagcatcatctttatctttgtattaggggttgtcgggtcattgacagcggcggtttcggcagaagcagcttctgccttaaactcgggcaaagtaaatccgcttgccgacttcagcttaaaaggctttgccgcactaaacggcggaacaacgggcggagaaggcggtcagacggtaaccgtaacaacgggagatcagctgattgcggcattaaaaaataagaatgcaaatacgcctttaaaaatttatgtcaacggcaccattacaacatcaaatacatccgcatcaaagattgacgtcaaagacgtgtcaaacgtatcgattgtcggatcagggaccaaaggggaactcaaagggatcggcatcaaaatatggcgggccaacaacatcatcatccgcaacttgaaaattcacgaggtcgcctcaggcgataaagacgcgatcggcattgaaggcccttctaaaaacatttgggttgatcataatgagctttaccacagcctgaacgttgacaaagattactatgacggattatttgacgtcaaaagagatgcggaatatattacattctcttggaactatgtgcacgatggatggaaatcaatgctgatgggttcatcggacagcgataattacaacaggacgattacattccatcataactggtttgagaatctgaattcgcgtgtgccgtcattccgtttcggagaaggccatatttacaacaactatttcaataaaatcatcgacagcggaattaattcgaggatgggcgcgcgcatcagaattgagaacaacctctttgaaaacgccaaagatccgattgtctcttggtacagcagttcaccgggctattggcatgtatccaacaacaaatttgtaaactctaggggcagtatgccgactacctctactacaacctataatccgccatacagctactcactcgacaatgtcgacaatgtaaaatcaatcgtcaagcaaaatgccggagtcggcaaaatcaatccataagctttgaggtgaaacgtccggggcattccgggcgtttcacttatttccatcctcatacgctttccataccgttggcagcagatcggaaagttcatgcgcaagaagcgcatgagccgatctggtctttgtccatgcgtccgcacatgcgccgtgcaagtggacagcattcagcaccgcttctctcgaattctcatgacagcacagcatcccgagaagcatacctgttaacgtatcccccgttcctccctttgccagcgccccatttcccgttacattcctccagcactcgccgtcggggaaagcaacgatcgtttcattgcctttcaagacaagggtaataccttgttcctccgcataatctcgagcataaccggcccggtttgcttcaatttctcgaatggacaagcctgtcattttcgaaaattcgcccggatgcggcgttaataccaccggcgctttcctttcttggtacgatcgttttgaaagagcacccgcatcaagcacaaccgggcagtctttcgctaatacgctttgaaccgcttgctcagtcatttgcgaaggcggcagcccaggcccgatcgcaatcgcccggtaaggttcggcaatctcgcctgacgccgccttttcggcgccgtcccgccaatacgtcgcctcaggaagaacggggaggatcagcggaatcgcactcccgcacgttccgatgacaagctttcctagaccgctccgcatcgccccgattcctgcaaggagagccgctcccggcatatcatcgcttcccgcgagcaaaaggccggttccataagttcctttatgactatcatttccccttttcggcaatgagcccttcacgcagtctttcgtccatatcggcaattgttctgcagacatcccggatcacacctttcaatatagtttaaacaaacgtttaattaaattgtaactgaatcatacccttcactgctctttaacatgcaaaatagcactgatgaacggatcagtttacgttcatataaaaaagacagcttcacaacttgaagctgtccttggcgttttcgactaaaaaagccggctgacaggcgcatccagacgataaagtcttgaatagcgcggattgttttccaaaagctgctgatggctccctgccattgcaagcttccctttgtctaaaaacagaatccggtcggccgcttcggctcctgccaaatggtgtgtaatccatagaacggtctttccatcaagtacttgaaacatcgttgaaagaagctccttctctgttttaggatcaaggcctacggtcggttcgtccaacacgacggtgggtgcgtcctgcagcagaatccgcgccaaagcaatccgctggcgttctccacctgaaaaacggatgcccgtttcctgtacagatgtatgatatccatcgggaagagactgaatataatcgtgaagcttcacctggcgcgccgcccaatacacgtcctcatcgctcgcgtcagggttcccgagccggatattattcaaaaccgtcgtatcaaacaggtgcggctgctgattgaaaacggagactacgcgtgaaatttctccctgaagagactgcacagaaatatcgttcaatgtaatgtttcctttagaaggagcaagcgccccttgtatcaacgacaagatggtcgatttacccgcaccgctcgggcctagcaaagcggtcttttcaccctgctttaatataaatgaaacaccgtccaacaccggctggccttgctcataagaaaaagaaacgtcttcaaagcgaagcgtgacatcgtccaaacctacagcctccgcccgttcctgctgaacatcggccccgttcccccttttcggcggctgcagaccgtccattctttctaaagaatcctgatactcagggattgaagtcgctgcgtccgaaagcggaaagaaagcttccgtcaaaggaaacacaacaaggacaaacgccgcaataaacacaggagccagagccccttccgcgctttggccgcccgcccatattagcatcagaagaacaagtcctgccgccaggcattgcatggcaaagtccctccaacgactgaagcgcacctgtttcttttcgatcgccagccattcatgttctgccgcttcatacgaatggacaaagtcgttttgccggccgctgaaaacccaatcgctcacccccatgaccgcgtctgtcagctgacggtacaagtggctccgtcctcttttcagcgcaacattttttgcccttgtcacaagcagggaaacaagcggaacaagaaatacgaaaaccgcggcatagaccgccattagtccagcaaaaggccatgaaaaaaagccgatagctgcgatgaatacgccatataaaagaagagccgacagcccgggaaataccgttctcaaatacatgtcctgcaaatgttcaacatcgtcggccaaaatgccgagcatatcccccgttcggaaacgttcacgccattttaaagcttgaggttcgagcatcctgtaaagcctgacgcgcatatcggataaaattttcaaaatgatatggtgccctgtcaaccgctcaacatagcgcgacaccgagcgcagaatcccgaaggtgcgaaccgctacgatcggaacatagatcatcaaaacattttccggacgcgtagccgctttggatattaaataaccggaggtaaacatgagagcagccgccgagcatgccgtcaacccgccaagcagcacgacaatgatcaaaagccttgtatttttcttgatgtagggcagaatccacccgtcttcattgttcatgatgcacctccaaacgactgcgccttcacgagctcgtaataaacgccccgcttttcaatcagttcttgatgtgtaccggtttcagccacctgcccatctttcagcacgataatttcatccatatcaagcatccagtgaaggcgatgggttgccaaaaaaaccagcttgtcttcaaacagttttaacatcgtttttttcaactcgtattctgtttcgatatccaaatgagcagtgggctcatctaaaagaataatcggacggttgccaaggaaagcccgggcaacggctgtacgctgcgcctgtccaccgcttaatgccctcccgccttcaccgatccgctctttcaagccgtttggaagctgatcaatcagctccgagagcccggcagctcttgctgcctgttcaacgtcttcgtcagaagcggcgggatgataaaaacggatattggctgcgagcgtatccggaaagatatagggatgctgcggaatatacaagagctgattttgccagctgtccgtctgcaaatgcgttctcttttttcccccgactttgataacgccgcttttcgtttccaggaagccgccgagcacatcgataagcgtagattttccggcaccgctttccccgatgattccgatttttctctttcccttaaatgaaagagaaatcccggataaagagcagttttcctcatcttcatgccgcacatctacatgcttgaactcgatttgatcgtcgtcagaccatcgctcaagacttaaaggcgcctcatccttgaaacccggcgaatccaatatcgccttgatcgctttaccggcttcgcgtccgttcaatgtagcatgatagtcattgccgacttcccggacagggagaaaaaactcaggggcaagaatcagaatggcaagagccggctccagcgagatgctgccgtcaacaagaccgagaccgagaaaaacagcaacggtcgctacggacagcatggtgaaaaaatcaagtgcaaacgatgacagaaaggcgatcttaagcgtactcatcgtcgccttcctgtaccgttcgctcacatgaaatatattcttagtatgtgaacggctgatgcccagcactttcaatgtttccaggccgcgcaaggaatctgtaaaatggtttgaaagcatctcatacgttttccattggctgtccgcttttcttttagccgcatacccaagaaggatcataaaagtgattaaaatcggcatcgtaatcattaagactgcagcggaagatgtgtctttaaaaaagacataacagacaaccgccggcggtataacggccatgctgaccattttcggcaaaaacagctccaaatagcggcggaactgtgcaattccttccatcgcgagcgtgacgacatgaccggttccttctttcctcgccagcctggggccggattggaaaagcttctccaaaaactttttccgcatgccggcccccgtctcggcggcatagtcaaatatcagcttttgcctgacaagggtaacagcatgtcgaaataaaaaagcggcggtaaataagatgagcagcggaaagagcgaaccgacgcgttctccgttaaaaaggcgggtaaccgcttcagcaagccattcggcctgcatgataatggcggcgccctgcatgcatgtcaggacagtgagtactgcaagtattcgtttcatccctttatattgcaaaagatcttttcccattaataaatcattggctccttgctgctgacccgttttctaaaaacatagtagctccagatctgatagcccagcacgaacggaagcagtgccagcgcgacgatcgtcataacctttaaagaatagtcgcctgatgaagcattataaacggttaagtcatatgcgcttttcaccgagctgatcatgacgcgcgggaacagcgcagtgaaaatcgtcgccactgtaagagcgatccctgcgcccgtcatggcaaatgtccagccgtcgcgtttttgtttcataaacacgatcgacagcacatagcaaacgacaatcagagccgcaagcggtatcgtcacatgccccctgcccgtgaacaagtccgtttcaaaaatggataatgcaacaaaggcaacaagcgccgccaaaacggcgaatacgacttttttggccagctgtcttgcccggtcgcgcaaatcggcttccgttctcaatgtaataaagatcaggccgtgcagcaggcagagaagcgtaacggcgactccccctgtcacggaatagacgttcacataatcggtaaaaccggcgtgcagattcatatcggcatcaatcggcatgccgcgcaggatgctcgcaaacaatacaccgaacaaaaacggcggcagaatgctaccgaaaaatacgacccaatcccatgtattcttccattttgcggtttcgacttttcctctaaattcaaacgcgaccccgcggccgatcaatgcaagaagaacaaagacaaacggaatgtaatatccgctgaacatcgtggcataccagttcggaaaagcggcgaaaatcgcgcctcccccggtcagcagccagacttcatttgcatcccagaaaggaccgatcgtattgatcatcaccctccgttcaagatcgttgcgcccgagaaaccgcatcgccattccgacgccgaaatcaaagccctcaagaaagaaaaaaccgatgaacagcacagcgactaatataaaccaaaattcattaagagataccatggtaaacctcctgatcaaacgggtctgtcgatacggaatcatcatgatggtggtcatggtgtgcagccccttttttaatctcccgcacaaacaaatagacaagaacgagcgccagcacaagataaatcgctgtaaacgcgatgacagagaacagcagcattcccgctgatacgttcggcgacacggactgcgccgttgtcaaaataccgaacaccgtccacggctggcgtccgatttcagtcatgatccaccccgccgtatttgcaatgaatggaaaggcgatcaaagccaccattgtccgcaagaaccatttgcttgtttcgagtcttttgcggaagctgagataaagaccggtcaaagcggcaacgatcattaaaagtcctgatccggccatgattctgaaactccagaatgtcgttttcaccggcggaatataatttccttctccgtatttttcttcatattgcttttgcagtgtcttcattccgggcacatcgccgctgaattgtttataagccaaatagctgagcgcatacgggatgctgagctcggatttgttttcctgcttgtccgtgtcaatgttcgcaagcaccgtccatgcagccggatcgccgctgtcatcccaaagcgcttcgctggcagccattttcatcggctggctcttcatcagatgctgtgcctgctcatgtccgctgaacgcaacgccgcccccggaaacaagcgccacaatcatcgcgatttgaaaggattttttaaaaaagagcaattcctgttttttcagcattttatacgcgctgacaccggcaatgaaaaacgccccagtggcaagcgcaccgaaaatgacgtgcggaaattcaacccatagctgcgggtttttaataatcgcaaaaaaatcggtcatttccgcgcgtccgtttttgatcgcaaatccgacaggctcctgcataaacgagttggccgctagaatccaaaacgccgacatgatcgtgccaagcgaaacaagccaaatggacagcaaatgaatcttcttcggaaggcggtcccagccgaagatccacaaaccgataaacgtcgattccataaagaaagcgagcagcgcttccaccgcgagcggagcgccgaatacatcaccgacaaagcgggagtactccgaccagttcattccgaactgaaattcttgtaaaatcccggtgacaacaccgactgcaaaattaattaaaaataagtgcccccaaaatttagccatcgttctgtaaatgtcttttttctttgcgacataaagggtttccattaaagcaaccataaagacaagcccgattgacatcggtacaaaaataaagtgaaagatcgttgttgaagcaaattgaaatcttgccaaaatgagttcgtccactgttcctgtctcctcctctttgttctagccgggcccgtttgccaaatgggcatcacacttgctcagactttcacatgcatcttattaatgtgattatgattacagacaaaagggtgacctcggcccgcattgatgttccgttattatcaggatggttatttatacctgtactttaccgcgaattccttcttaaataaagtacattttccctaatttatggatgtcattgtgacaattatacgaaggaattatagatattttgtgacacgctggttaacaagcactaaaacaacatgagaaaaatgccccgaaattcacgtggaacatttcgtcattcaacatctgtgattcttcgcgaaagcctgtcgcatcaaaagaaaaccgttatatgcagtgaaacaaattcggggttttccttcagtgtgagcgcgccttacggaaagttctgctgttttgtccaatctgtgaaatcttccttccgccttctgcgcattcccttcatccatttgctgatttatctccactgaagccttcacgcagcacgagctgactgcaccgcacgtttttccccctgcacagccatccagctcccgctgactattaacggaggaagggaaggaatatttattgctttgaaataaacaataacgataccccgtttattctatgaaaatcgaaccatacatttgttcaaacaaaatacacaaaatttgtgaaatgtttcacaatatcctgctatacttaggttgtatttatgatagatacttcttaagtaaacacttgatggtggtggaaaacatggaatctaaatcacttgttctagtcgaagagcttgctttaaaaaagcaaagcatctttgtgcaaagcccgcttcgctatcttttacgggctatgctggccagtatgtttatcgggttcggagtcattgtagcgtttaaaacggggaatctcttttatgttgaacattctccgttcacatatccaattgcagcaatcacctttgggggcgccattattctgatcgtctatggcggaggagatttatttacgggaaatacattttattatacattggctgcgcttcgtaaaaaaatgcgctggcccactgtgatcaagctgtggatgttcagctatgcaggaaatttaatgggcgccgtttttttcgcaggcctcatctttgcgaccggcttatttaaagatccttcttccaccggctttattctcagcgtggcggagcataaaatgaatacgccggtgaccgaattgttctttaaagcgattctgtgtaactggcttgtctgccttgcgtttttcgttccgatggcgcaaaaaggggacggagcgaaaatgttctctatgatgctgtttgtctttactttctttatttccggttatgaacacagcatcgcgaacatggccacttttgccgtctctctggtcaccgagcatccggagaccatttcgattgcaggcgcaatccataacctaattccggtaacactcgggaacctggtcggaggcgcgtttatgatgggcttcatgtaccactatgccaacaagccgggcggtgaagaaatcatcaaataaaaagatcgtccatttttaatggattctaaatatgcgggctcccttcataaaatcgtggtaactttaaaaatggaggttcagcgatgcaaagttttcattcgctttgccggcaatttggacatattttaaatggggagccgcacattgaaccacggtgtctgttctgtcagcatcaaacggaatttgcgtgtcgcgattcaaggaagaccgagccggggagtcggcatggaagaaatcatgttcgaatcgctcgatcaaaacggaatcgccttgaatatggccgaagtcgcaattttgcctgaagaagttccgctgtttacaaaaaagcttgtcgatcagggcatcattatcagtgctctccacaatcattggatttttacagaaccgaatattttatatattcattttcaatctgtagaaccgccgttaacattcgcgaaaaaaacagctgccgctttatccgtattgcgatgaagcagcagctgttttctttatccgttgatttttcccatttctgaaagtgcgaccctttcgactgctttggccacaatctcgtgaacttcagggttcagcggatgaggcacaagatcgccttgtcttgtgcaggatgcgatcgcttcagcggccgcaaccagcatcgggtggctgatcgaatcggctccggcatttaacacgcccctgaaaatacctgggaaccccagcacattgttgacagaccgtccgtctgcagcgtaggctgccccggcctcgagcgcatcctcaggctcaatctccggcttcggattggacagagccaaaatcacctggccttcccgaacccatttcttattgatcaatcccggaacaccggttgtcgcaacgacgatatcgcagctttccatcaattcttcgatgctttcagccgcatggccgccatagttctctaaacgcgccatcgcctcaagcgatttatccgttccgacaacacgttttactccatatgccataaacatcctgcagatcgcgacacccgccgcgcccaggccgatttggccgacatgggcctgcttcagatccacccctgcactcttggctgctgaaatggcggccgccagcgtcacaaccgccgtaccgtgctggtcgtcatgcatgaccggaatattcaggtcgtttttcaggcgctcttcaatttcaaaacaatgcggtgaaccgatgtcttcaaacaaaatgccgctaaagccgggcgcgatgtttttaaccgtccttacgatttcatcaggatcattcgtgtcgagcagaatcggaaccccgctgatatccgcaagctggtcgaaaagagcggctttcccttccataacaggcattccagcaactggccctatgtctcccaagccaaggatggccgtgccgtccgttacaattgcaaccgaattgccgattccggtataaatattcgctttttgcggctcttctttaatgagctcgcacacgttcgcgacacccggcgtatacacccgacgcagatcagcaagcgagcgaatcggcatcttgcttttcatgcggattttgccgccttcatgtgcagccagcacgtcatctgaaacggtatgaagatggatgccttcttttaagttgcggatcacttcaagaatctcggtgagctgttcttcatgctcaacttgaaccgtaatgttccgcatcgtataattcggccctaccttgatcgtttcaatctctccgatatcaccgccggcaaggccgatcgccgttgtcacctttccaaggtttccgggtgctgaagggatttccagcatcaaattccgaataatattgttgccattcataacagaatacctccatcaattgttttaaaatcggctactgaaccggcgagtcttttttatcggtgtaccaaataaatttacctgtgtatccgtacaaaatcgcaaggccgattgaaacaaagctcagccacatgaacggcacataagagaaggtcgagacgccgagaatccccgccatatatatgccgttgtccgaccacggcaccatgcccgacgtcatcgtaccgccgacttccgcgtttctggacagcaccctccggtcaattccgagcttgtcatagcttttttccataattttcggtgttaaaatgagcgagacatacatcgcgcagccgaacacatttgccaagaaggcgacgataatcgtcgagaatgtgacgttgccggcagaagtcagcttttgctggaacttggagacgatcacttttagaacgcctaagtgctccaagaggccgccaaagcccagaccgagaatgatgacgacgaccgaaccgagcatgccctctattcctccgcgatttaagagctcgtccataaatttgatcccggtgtcaatggaaaagccgttgtatgctgtgccgatcgcatccgcaaagtccatgccttggaagaccgcagcccagatcgcgcccaaaagtgcgccgatcgcgatcgtcggcacagatggctttctcatcgccaatagaacgatgacgacaacagccggaacaagcatccaaatgtgaatatcaaacgtgttctgcaaagaagctttcaaaaattcaactttttccaaatcaacatttcggcttccatacataaagccggtgatggtgaacaggaccgccgtgattaaataggcgggaatcgacaagtacagcatcgctctgacatgggtaatcacttcgacctttgaaagggatgacgcaagcaccgtactatcggaaagcggcgataatttatctccaaagtaggctccggacagcacggctccggctacaagcggaagcggaagccccagcccttccccgattgccatcatggcgatcccggccgttcctacagtcccccaagacgtacctgtggcaacagatgtgatcgaacaaataatgagcgtggcaagcaggaatatgctcgggtggataaactcaagcccgtaataaatcaaagtcggcacaacaccgccggctatccatgtgccgataagagcgccgacggcaatcaggatcaatatcgcttcaagtccatttgaaattccgtttgtaatcgatttttgcaaatcttcataccggtgccccaggcgcagtccgagcaaaatcaccaagaaccatgaaataaacaatgccagctgaatcggcagctcgaatttgactgtaaatgaacaaactatcgctaaaaatgcacctaatacacaaatgatttccaacattgatggcaaccgtgctgttttcaacctaaatcccccttaattattgaaacgctttcaaaataaactacataaaaatagcaatctgcttcaactttttcttaaaaatttaactaacaacgaacagtataccatgaaaaaggctgatgcggtaccacttcaccgctgttgtcctttctcttcataaagttattgaaggaaagcgaaaacactctgtgtttctatcccggtaaaatgtcagagtgttttcgcatactgttttttccagatcaatcccgatttaaaagttcagccccggcaatccccggttttgtcatttcataaggattcaaaatcagatcaagctcttcttctgtcaacacatcgttttgaagacagagatcgcggacggattggcctgttaaaatggcttctctcgcaatccttgcagctgcttcgtagccaagatgcggattgaccgcagtgatgacgccggcgctcttttcgacatatgcttttaagcgtttttcattcgcttcaatacctgctacacagtgatcagtgaacgaacggaatccgttgttcatgatgctgatggattgcaggagattaaagacgagcactggctccatcacattcagttcgagctgtccggcttcagaagcaaggcagatcgtatgatcgtttccgatgacctggaaggcgatttggttgatcagctcggccataaccggattgactttccccggcataatggatgaacccggctgtcttgccggaagggaaatctccgcaagtcctgcgcgcggacctgatgccatcaaccgaaggtcgttggcgattttcgacatgttcatcatgcatacttttaatgcagctgaaacttctgtgtaagcgtccgtattttgcgtcgcatctaccagatggtcagcgccgacaagcggaagaccgctgatctcagccaagtgcttgacgacattttcgatatagcgcggatccgcgtttaatcccgttccaaccgcggtagcgcccatattgacttcatacaaatgctggcgcgattgtttaatccgtttgatgtcgcgttcgatcacgcggctgtaggcttcaaactcctgtccaaggcggatcggcacggcgtcttgaagatgggtgcgccccattttaatgacgtggtcaaagtcgcgtgcttttttcttaaaggcatcaagcatgtattccattgtgtccagcagcttttccagcagcttaagcgttgaaatatgaatcgccgtcgggaatacgtcgtttgtcgattgagacatgttgacgtgcgtattcggactcaggtgaatatattcgcctttgttgtggccgagcagttcaagtgcgcggtttccgatgacttcgttcgcgttcatattcattgaagtgcctgcgccgccttggatcggatcaacgatgaactgatcgtgcagctttccttcaaggatctcatcagcggcttggacgatggcatctccaaggcctttataaagacgttttgtctccatgttggcaagcgccgccgcttttttcaccactgccagcgccttgatcatttcttcgtggattttatatcctgtaatcgggaagttctccgctgcccgcaatgtctgaatcccgtagtagacatcggccggaatcttcttctctccgagaaaatccttttccgtccggtatgtcatttcagctttcattttttaaccctgctttctttttatatgatgatatcgtcgtcaatcggcgtttccatgatctttttgacttcagcttgttgtccgtttttccctaaagcccacatcagcttcggaacgatcgcttcagtgttcatatttctcgagcggataatggcatcctggtttaccttgcggccgacctcgtaaatgctcatatcctctccttcttcaaggcattgcgtcgtgatcgctacgaccataccggaatcgatcagctcgttcactttttctaaaatgtttcttttctcaaaaggaatgccgccgcttccgtagctctcaatcacaatgcctttatatgaacctttcagacaatcgaaaaactctggttttaaacccggatgaagcttcaccagacaaacgtcggtatttaaagaggtatcgagtttcaaagcgcctggctttacttcgggaacccgtttgttgtactcgatttccttatcgtgaatgaaagcgatgtaaggataattgatgctttcaaatgcatcgtagctttttgttcttaatttgatcgctctcgtgcctaaaatgacgcggccgtcaaagacgacatatactccgccgatgccgtcgcacgcaaagcggaccgcatcttttatattttttttcgcatccgttttcttaaacgtaatcggaacttgggaacccgtaatcgcgacgggcttatcaatattctgcagcatgtatgaaagcgccgctgaggtgtaggccatcgtatcggttccgtgcgtgatcacaaagccgtcgtagcggctgtaattttcatatacagcctcagccatcatcacccagtgttcaggctgcatgttggtgctgtctatatccattaaagattggcaatctatcgtataatttgaatgatcatcagataaatagctgagaagctcttccgctttaacccccggagccagtccgttttcgccttctactgaagcgatggtcccgccggtggtcaacagcagtaactttttcatgtgctacacctctttaagaagtagttttatacagtataaatcatgatttattttagcaaagaaggcttgatacatcaggaatgtatacgctttatgcgtaccttcaatgcaattatagtcctcaaatgtgaaataatcaagaaactttattcatttcgcgtacacttttactgataatgtgctataatcactgtgtatcaaaaggagcgtaagatatgaatttagatcgattaacaacactgagaaaaaacaaaaaatggtcattgcaatatactgccgaccgcctcggtattgcgaaaagcacttacgcgggctatgaatcgggataccgccgcccttctttagaggcgcttatcgaaatcgctgatttattcaatacctccaccgattttttgctcggaagagttgacgatccccgggatgaaaaggctaaaaacgaagccattgaactgacggattgggctaagctcaagctggcagtcgacggaacgcttctttccgaagaagaaatcaagcagatggttgcgtttatcaaggtcaaaaaagggctggatgcggagtaaaatgacagcggttaaccgccgcatgctataaaaagaaaaaacttgactggctaaaaaggccaatcaagttttttttgcttttattgatgtaaaaatttcacacaaaccgcttcaggagcaggaactccagactctaaaagcgtcagccggcccgttgtccggtctctttcaaacaatgtcaaagtccctgtttcctggttggaagcaactaagaattgctctgaaggatcaatctcaaagtcgcgcggccattccccttcagttgatacgtgttcaaccagggaaagttcgcccgaatactcgttgacgctgaagacggcgatgctgtcgtggccgcggtttgaagcgtatacaaatttgccgtctttcgtgatgtggatggcgccgccttggctatggccgtcaaagccttccggcaatgccgaaatcacttgaatctctctgaattcacccaaatcggggttgtattccagcacgatgacttcattactcagctctgttaatacatacgcatacttttcctgtggatggaactcgatatgtctcggccctgagcccggtgcagcagcgtgttttttcacttcttcaagccggccctctttcaattgatacgtgatgatatgatccgttccgagatcgacggccactgcatatttctcatcaggtgagaatcctgaataatgagtatgcgctttttcctgcctctcatgcggtcctgatccctcatgctgtacttttgatgaaggctcaagcaggccgcggctttcatttaaaggatatgccaagatcgtcccgttgtggtaattggcggacagaacataacggttatcttgatccacactgacgtggcaaggcgacggtccttccccggtctgctggttgacgatagtcagctctcctgtggaaccgtcaatacgatatgcggcaaccccgcccttatcgccgtctttgaccactgcataaagcatgtcattgtctttggcgatattcaaatatgtcggactgcccagctttgctgccggcttcggcgtgcttaacgcctttttttccgtatcaagctcaaatgtataaatccctacgctgtctgcttttgtatatgttccgatataacctctgtatttcgccatttgatcctctccttttttgacagtcgtccattcctattttaactcagagaaactgaattatcatgatctggtatgcaaaaaccttaagcgctcacatgaaaaaaaactttttatgatattcttaacattagaggcccttcactgccgcttttataaagaaatcggcagcggagacttgttcataggagtgttcaaaatgacgaaaatcatgattgtcgaggacagcgaagacattcggaagcttttacgcgatcatttagaaaaatacggatacgaaactgttgcagcgactgatttcacctctatccttgaaatatttctccaagagaagcccgacctggcattgcttgacatcaatctgccggcatacgacggttactactggtgcaggcaaatccgccagcattcgacttgtccgatcattttcatttcggcgagaagcggagaaatggatcaggtcatggcgatcgaaaacggcggcgatgattatatagagaagcctttttcctatgaggtggtgctcgctaaaattaaaggccaaattcgcagggcatttggagaatacgcagtaaaacaaggtgaaaaagtgattgaatttgaaggcgtccagctgtttgtcgaacgttttgagctgcactgccgaaatgagaagctcgagctttcaaaaaaggaaagcaagctcttggaagtgctgcttgaaagaggagaaaaggtgacaagcagagaccggttaatggagaagacatgggaaaccgatacatttgtagatgaaaacacgctaaatgtctatattacaaggattcgcaaaaaactgcgaagcatggacgtgcccttctcaattgaatctgtgcggggcgaagggtatcagctgaggacgaaatcatgaagctgttcctaaaaaaccatgccgttctcatttttctgtttctctttcagggcggattcgtgtttttttactattggtttgccggcatgcagactttcactcaccttttttacattctcggcgttcagcttctggcgctggcgctttatctttcgtacaaatggtatgaagaacacagagtctaccagtggctcagctcagaacaaaaagatacagaaattccttttttggggacgtctgaattttgctcagagctctatgaaaaacatatggagctgagccggctccaccaccgcaaaatacatgagatggagtccaagctggaagacagggtaacctacatgaatcaatgggtgcatcaggtgaaaacaccgctttccgtcatcaatctgatcatccaggaagaggacgaacccgtttttaaacaaatcaaaaaagaagtccagcagattgaatacggactggaaacgctcctctattcatcaagacttgacctgtttgaaaaggattttaaaattgaagccgtatcacttggcgagctgcttaattcgcagattcagcgctataaacgctattttatacagcaccgggtctatccaaataaacaggttcccgctgaagacgccgttatttactccgatcgaaaatggctcaaatttgccgttggccaggtcatcaccaacgctgtgaagtattcgtcaggaagaagcgaacgcatcgatatgacgatattccgtaaaggcgaacgcatcatcctggaaatcaaagattatggagtcggaattccttcacaagatttgaaaagggtatttgagccttattacaccggggaaaacggacggcgctttcaggaatcaacaggcatcggcctctaccttgtaaaagagattgaggaaaagctcaattatgatgtgagcatcgcttcagaagttggaaaagggacggctgttcaattttcgttccttacaaaaatgtaagtcttctttaataaaaccgcatagctcatccccatcctccttgatatgatttgtttacaaaacaaacgtggcaaggaggattttttataagcaatccgagtctatgaaaagagtcggcacattctgttatataaacgaggccgccgttcttagtttctggacaatggccattcaagcctttcataaacgcattttggctgaaagcattccggaggagcccgctggaatggataacataccggaaacggtcatccttaaaaagcgcagcaaaaggaggatatcatgacaacaaatatgctggtcgttaaaaacatcaataaaacatataaaggacaagtctcccatcaggctttaaaagatatttcattcaatgtcgaggaaagtgagttcacggcgatcatggggccgtccggttctggaaaaacgacgcttctcaatatcatttcgacgattgaccgcccggattccggcgacattttaattcgcggagaagacccgcatcatttaaaaagggcgaagcttgcccactttcgccgcaggcagctcgggttcgtattccaggattttaatttgctggatacactgacgatcggcgaaaacatcatgctgccgttaacgcttgaaaatcaaccgctttccgtcatggaagataaacttcaggcgattgctgaaaaactcggcattgaacaacttttgaacaaacggacgtttgaagtatccggcggacaaaagcagcgggcggccatcgcaagagccgtcattcatcagcccgccctcatcctcgccgacgaaccgacaggaaacctcgattcgcaggcatcaaaagacgtgatggagacgatgcagcatcttaatgaaaacgacaatgccacgatattaatggtcacgcacgacccatttgccgcaagctattgccgtcgcgtcatttttattaaagacggaacattattcaatgaaatttaccgcggcgccaaccgccaagtattttatgaagagattctgaatgtgctgtctatgctgggaggaaataccaatgacctttcttcagttcgcttataaaaacgtcgtccggaataaaagagcctatctcgccttctttttaagcagctcattttcagtgatgatttttttcacatttgcgatgtttttgttccaccccgctttagaggaaggctacttaaacaccattgcaaaacgggggttgtcggtggctgaatggatgattttcgccttttccattctgtttgtgctttattccgtcaacgcctttctcaagtcgagaagcaaggaattcgggatcctcaccatccagggaatcgctccgggtcaattgaggaagctgattaccgcagaaaacatcatcatcggcgtgctttcgaccgttacaggcatcatcggcggtcttgtttttgcaaaaacattctttacgatcggcgcttatattctggaaatggacgctttgccattgtatctgccttggaaagcgatggcccttacatccgcctgctttcttgcgctgtttattctgctgtcgcaatttacggtgttatttattaaatcaaaaaccgttgtcaagctgatcaaaggcaccgggaaaattaaaccggagccaaaaccgtccattattttttcggtcgtcggcatcggctgcctcggctccggctactggcttgtattgttcgccgacatccattttccacaaaccgtcacgatcttaattttgacgatcatcgggacttatttcttcttcagccaaagcagcatttggctgctgcggctgttaaaaaagcggaggtcattttatttacgaggaaaaaacgtgctttggatatccgatcttgtctatcggctgaaggataatgcccgcctgttctttctcgtttgcatcatttccgcggtcgcctttaccgccatgggtgcattggtaatttccaagacttctatcggaaaattggattcccgatatgagatagagtacttattatacagcgggagccaaaaggaacaaacacacgttaaggtgatcgaacaaaaattgaaggacggacatttttcgtatgcaaaggaagtgacaaaaggaatttatatgagctatagccagggagatctccttcctccggtgctcctggtctctgaaggcgaattccaaaagcacttcaagttaaattccggtgaactgaaagacggtgaggcgctgtattatccaaacgcctttgaggcaaaagaaaagcgggaaattcctgagaccttggacatgttgaacaaagatttgaagccggcaaatgaacggctaaaggtaaaaggtattaaaaaaccgctcatttcgttagaaagcatcgttgtcgtaaacggcaaaaccttcgaaaagctgaaaaaacaaggcgaatccctcacattgtacggctatcagtacaaccgctggaaagagagcctcgacatgagccaatcattggaaaaagatctcagagaaaaatctcacaatatccaatttcattttaagcaaaggccatcaattattttgaaactgttcagcttccaagcctgagtctgtttatcggattctttattgcggttctcttttttacggcatccgggagctttctgtacttccgcctgtttaccgatcttgaagaagatcaagagcgctaccggtcactctcaaaaatcggcctgagcgaaaaggaaatgtcgcagagcgtaacgattcaattggccatcctgttcttctttccgttcgtactcgcctcaattcatacgtattttgcgatgaagacgctcgaggcacagagccttggtcatttcgcatctccggtgatcatgacaataggcggatttctgatcttccaactattattctttatgatgattcgaaaaagctatctgaaaaaattaaaaggatttttaaggtgataaaatatgaaaaaaacaatttctctcattacagccgctttagctgtatgtatcggcgcatttctgttgattcataatgaagtgacagacaggttcaatccacttgtgaagaaagaaagcgtatatgtccagatcaacaaagacgataagcacctgagcccgggccgctatgagtacacgctggaaggatataatgacaccggtaaggaaaaagaaattacattctccgccagcgtttcccttcgaagaaacgcctatctaaaggtacacgcgaagggaaaatatgttgagacatgggaagaagtacagcccggcggcatgccgagtgccgttcagaaaaaattgatcaagcaataaaaaacggcgtctaagccgttttttctatgaatcactatattttaacaaaattccgaaactttttggcccgttgctcgtataaaaacagaagtcatattgtttaggaggttttcatatgattgttggaataattggttttatactggtggttttccttctctacgcctccatgttgccgtccggggaaaaaaacagcggcagcagctcttcgactttttttattggaggtcctgactcatccggagacagcgggggtgattgcggcggcggcggcgatggcggctgttaagacctgcggctgcgttaacctaacttctgctcctgctcggatccctaggctgtatgcagttcttgctgcagtgagccgggtatattccagctatctcccttcatcattcattcaacatcaactccaaatacgtcattattcattcagttgtttaacctgacttccgattgggaatgatgtaaagacagcagattcccgctcttcaaacgatttaaaagtcacaataaagcgattctgatacaaaacatataaaactttgcacctacttgttcgatattaaaagaagacattcatgataaggagggttttttccagatgatttttttactggttttattggctctgtttattttgtattcattcttttttgacaagaacaacaaaagttcttataaaaaagcggcaccgaaaagcagaatattgatccgccaggcagctgcgccgaccggagttttgagggtaatcgaaaccgctcccggacagacggcaaaccgccgaacctccgaaggtatgcgcccgaatctgcggcttgtcatgagcccgacgcaccaaaacgaaaaaaaataaggaaagcggcatcatgataaatgccgtctttcctattgtctgctgtgttccaccattttcccaaaggcgtccggcgacatccccggcgagattcggacgcggtggagcgcatacatcccctgatccctagatgccgctcccggttctgttgtgacggccatttgatagcctgcctgctttgcgaagtttcagcgtatcttcgttgtagcgcccgaccggatagctcagcatcaccgtattttggctgaacatgcgatcaaacagcgctttggaacgcgtcatttcatcgagctgctgtcccggtgccagtccgttcaattcaacgtgatgaatggtatggctttgaatcgaaatgccgtttcgcctcatttcattcatttgtttctccgtcaaatggttcttcccgccaaccgatttgccgatcataaaaattgtcgccttcatcccatagcctttcaaaatcgggtacgctttttcaaagttatctgtataaccgtcatcaaacgtaatcagcacgcatttatcactcggcattttatcttgcgttaagacaatataggcttcctcaggtgtcaacgtgtaatagccgttatccttcagccatttcatatgcccgcggaattccccttccggtacgcgcaggctgtttcctgaggaaatgctgtgatacatgagaatcggaatgcgggccgggcttttcactttgacccacttggatgatggatcatgttccgcctgctgttttgattgttttgccgctttttgagccgtatttggttctgttttttcctctccttttgtttcatggccggaacacccgtacagcacccccatcaacatagacagcacaagtaacattttcgtttttttcacaattattcccgctttctatctactgaatcctttttaatatcggtgcggaacgggcatttttcactgttcctgctttgaggaggagagccaagctttacgcagtctgctgatcccttcttcaatttccgctgcagtaagacccccaaatcccgccatgacgattgaagagctgctttcatgaggcttaatccagaaatcggataccggataaactttcacaccgagtttttccgctttatgtatgaggtcttgtgcatgtcggtctgtcttcatcaaaatatggagccccgctttttcgccgatgattccacgtcatttccgaaatacgttttaatggccgatattaatgttttgtgcttttcttgatatacttttttcattttacggatgtgcctttcgaaaaacccttctttcctaaataaaaacatcgctttttgaatgatgggtgaagcagactggctgtagcggccaagcttctcttgaaattcatccgccagttttgaaggcagaacgatataactcaatctcgctcccggaagaaatgactttgaaaaagtccctaaataaatgacattttcttttttatcaagcgcttttaatgatggaataggcctgccctgatagcggaattcgctgtcatagtcgtcttcgataatataggccttctcacggcttgcccattcaagcaatttcagcctcttctgtatcggcagaaccattccatacggaaactgatgcgatggcgtaatataaacgagtttcgcccgtgtggcagcaagctgtgtcaaattgatcccatccgtctccagaccaattggctgaatatcacatccatggttaaggaaaacagaacgcacaccatcatatcccggattttccaacgcaaccaatcggccgttcattgagagcagctggcaaagaagtccgactgcatactgcgtaccggaacagatcacaatttgctcaggtgcacagcggacacctctttgttcagccccgagagatcacagctaaagaaaacatgctgaaccaaagcatgaaattcgaatacgggcggaccgtacaggaagaccattgacaaaaaaagacccgcagcttatgctaccgggtctcccattgattttgatgcatgttcatctaaaaatttcaatcccgctgtgtatcgctttctccgcttctttatccagcagacgagcgccagccgctgatccgggtccttctcattgatagaaaccagcacatgttcattgatttcaagcgggaagccggattcaactgacagcctgacaagctgatatccttaatcataacctcgtgagcccctttctctgaatcacggggaaacagcagtgttcccagaccttgaaaggcctcgcgcacgtattttctcttgaatgcatcagggcttttttcagttttcgttaaaaagcgtatcactgttgacaacgtatcagcccgcttttcccggtcggccttttttgcattttcttcattaaacataaaaccgatcagtttcacatacagttccttgtccatctctttgaagtgcagcccgatttcaatgtcggcctcgtccttcgtcgtccacatcacccgggccgggacttttccgaccgcatctatgatcagaccgtctacatgatagtacatatccgaatcagccgtataaggcagtctgatacgcgcgcccgtgtcgctcacatcgatcagttcacatttgtgctcatctactgaaacggtggaaaaagccgccggcttgttgactgtgaaacgctcagagcttcggaacctcggcctgtcaaaggcaacgagcagcgcaagtatgagccctgtcatgttatagagaacccaaaataaattatacgaagtgacgtttataccaaacgtatgaagaaacaacaattcataaagggtttttccgagtgcaagcagcgtcattgcgagcaaaatcgcacacggcagcgccgttgtatatttgaattttcgccgatctgtgttgacgcctttcggtgtgactttaaaatcaaaccgctttttgaaaatgaattccgacaaggccgatatcgccatgtgcggcgccatcgatgtatcgtaaatatggctccagttcatactgcgctgccggtccgaaacggctttaaatgaaaggtaagaacctaaaaacgcaggcagccaaaacgaagtgatcgaccacagatcagtctttaagctatgtatgccaaacagcaaaaacatgagcggcgcgaggatgtataccatcttaaaaacgccgaaaaaccaaaagagaatgccgtcaaaataaaggattcgctgcatgggcgtcaagccttttaagaaaagcggattccacttctttccgcactgaatgtcagcggtcgcgctgtttcaaaagatccgtccacgtttccggcgagagaccgaccgcaagcacttctttgacgaaaacagatttaaattttgtttgcaaaagcatccctgttgccatatcctccgtaatcacacctgtcgcaaaaccgccgatttcctccaaagccgttcttctgaaaaccgtattgctgccgacgtacatgacagcattaaaacggtctttcccagcctggagcctgcgcatgaaaaagtcctgctcattcggaatgttcgctccggaaaataagttgtactgataaggatcttcattatagaaagcctgcggcgtttgaacaaaagccactttttccttcttaaaatagccgacggttttctgcaaaaatgaagggagcggaaccatatcggcatccatcgtcacaatcagttccccgttcgagcagctcatcgcatggtttaaattccccgcttttgcatgctcattgttttgccttgtaacgtaatgaacgccaagttcctcagccagcttttgaatagccgtccgccttccgtcatcacacaaataaatgttgacaagctcttttggatagtcgaggttcagacagcctgccaccgactttttcagcacatggcgctcctcgttataagttgcaatgagaatatcaacgctcggccgatggtcttgatcgcccagcttttccggctcccgcttcttttccttccatactagcgtataaaagaccaagagctgtaaaaagccgatacattcagttgcaatcaggatgacgcccatcacgatatcggcggggcgagagacgggcagcgtaaagccgaaccgccatacaatatacacaccgttcgtcataagacacagtatgattaaaaacttcttaaaacgcgaattcacccgcgatccccaaaaaccgatgagaatcagagcaatcattgccgcgggatagtagtgtaaaataaattccattttcttctccttatgtgatacataaaaaaacctttttacagggtttctctaaaatattcctttatttctttcttttgcactcaaatatattaccactatttgtcctaattttctttaaaaaattataaaaattatatctttttatctatgaaaaactgaaattatacgactatagtctcttgttcaaaaaaatcataaggctcacattgataacccttcacatgtaccccgtatcaagattgaatcttttgtctcagacgtcctgtgtcttttcagagaaaggagctgaatgtatcaacgctttacaaaagaaaaaaggtctctgctcctaaatgtttgatttatttttgacggattaacagctattttgtgtcgatttttattccacaaaaagggaatccaggaataattgcatcaaaaacggcctgcacaagggccattacctatatccagacacgtctttagccaaatggagctgttcttgatcattatgggaaaacagttaggtcttcctgcacggttgtctgaattttgatttttttagtatacttaatttagttaaataactcagcaaggggatcacataaaggatgggggaaagaatatggaagcaaaaacaaaggtacaacatataccgattcaaacaacaaaagaacaggatgaaaatttttttgcaagagcaatgaatgttaaaatcggcatcattccgctgcccgtatatttgctgctcttcgctttgattgtgacgtttgtctatatgcacgatctgaaaagcgacattttaacagccattgcggttacgggctttttcggattcaccctcgcccaaatcggaaagtcgctgccgcttcttcgttctgtcggcggtgccgctatacttgcgacgtttattccttcagctatcgtctattaccatctcattcccgatgacattatcaaatcaacaactgaatttacagaaaactcaaactttctttatttgttcatctctgccattgtagtcggaagcattttaggaatgaaaagagaaacgctggtcagggcgttcattaaaatttttattcctctgattgcagggaccattgctgcagcggcagtcggtctggcggtcggtacaatgctcggcctcggatttcagcatacgctgctgtacattgtaattccgatcatggccggaggggttggcgagggagctattccgctgtccatcggctattcggaaatcatgcacatgccacaagggaaagcttttgcacttgtcattccttccataatgttcggaagcttaagcgccgtcattttgtccggaattttaaatgtaattgggaagaaaaagcctgaattgacaggcaacggaaaagttgaccgttttgatagcggggacgcacagccgctcgaaagccgcgacaaagacaaagaaagcgtttttaatctttcctactttgcgtcaggaggcattctcgccgtctcattatatttggtcggtatgctttcacatgacttgttcggatttccagcacccgtcatgatgcttctgctggctgttgccgtgaaactgtttcgtctggctccggcgaatttggaaaacggcgcctacggcgtgtcgcgcttcttttcaactgctgtgacatatccgctgctttttgccattggcgtctccatgacaccgtgggacaagctgatcgcagcttttaatatcgccaatattattacgatcgtatccgtcgtggtcacgatgatagccgtcggcttttttgcagggaagtggctgaatatgtacccgatcgaaaccgcgatcatcaatgcttgccattccggccagggaggcaccggcgacatcgcaattctcagcgccgcagagcgcctcgagcttatgccgtttgcccaggtgtccacaagaatcggcggagcgataaccgttacgctgacgctgctgctgctagcccagttttattgatgaatgaaaaagcctgcagagcgagctgcaggctttcttattgtggctaccgtacttttttcggaacatagtcgggaaagtctgtcacaatcccgtccacgccggcctttaatagcggaggcacttcatcgcgggagcggacggtccaaggcgtaatcttcatgccgagcgcatgaattctcggcacaagcgtaggatcagcggccacatttttcaagttggcgttcacgtatttggcatagccggaaaattccttaagctttgcatctgttaagtccgccgcttttgacgtcaagacacctgtcggcatcgatggaagcagctgatgaattttatagacagagttaaaatcaaacgattgtacaatgatttttccgtttttaggcttatccattctccgctctttcaatgctgctgacacttttccttcgattcccggatagcgtgcaggctctttcaattcgatcagcattccgatcttccctttataccggtcaagcacttcttcaaatgtcggaatgcgctctcctgcgaactgcggaccgaagaagctgccggcatcaagcttgcgcagctcggcaagcgtcaaatcctttacggcaaccggcagcactgagtcaatatctgtcgtacggtttacggtcgtatcgtgaatgatgacaagctccccgtctttggacatttgaacatccagctcgatataatctgctttcatctgaagcgctttatcaaaagcagccatcgtgttttccggcgcatatcccgaagcgcctctgtgtgcaatgacatccacttttttaggcttcaccgccggctcttgtgcacccgcattcggtgcaaacagcgctgacccgatggaaaccccgatcaatgaagataacatcaattttttgaataaagctgacacatcatccactccccttttgctcttctcttgccaaagtataggttcgcactgttaagattatgtttcagcagtctttaattttcataaatttcctgataaacaaaaaaagatcccttggcagagatctttttttggatatatcagcgctcacaggcaattttgtctttatcgcggtccagcttcttattggcatcataaagcgcttttgaaacatacggcttgtacttcgtttttccgcctttgtttttcaccgatttcgtacgggcgacgccgcctttatagtctttgtttaaagctttgcagtttttgtacgtctttaccttcgtttttgcttctgccacatcgccggcgccccaggaaaaaccgatgatcagaccggcagacaaaagacccgctgctatttttttcatcccatttgacccgtttcgtctatttgttatgtatcttttaccatgataaaatatttttcttattcgatcaagaaaaaaatatggcattttattgaataaaaagtatgaatcgaaaaagcgtctcttcgcacaaaaaccggccgttatgcgccggtttcatccacatattgatgttcgcaagtctttttcaaaacagcgttaatctcatacgctaattccttcggatggatgcacagcatgtcttccaaagggctgtcccagttcccgttctttatcaatttcagcgcataatggcctgccggactgcactcgggataccactctacatcgagcagaaggcgttcttcatcatgccgcagcttcaaaaggtcccgtttgaagtcagacagccaagccttgctgtcaggcgctagttcatcggggtttgtatcagttaaagagtgatgcgcaactgtccagccggccgggattctaagccttagcaaattgcgggcgccatcagaggcacgcatcaagtcttccaaccgttcgatcagctgttcatacggcgcgtcagaatcttcgctgaccttcgattgatcagcattttgcatcctgatgacgtacttcagttctccagcatattcaacttgtaccattttaccgcagctttcattctccaagatcaatagcgtatggcgggggtcgcgaatcggcttttgatacaaatgattttccttcaccttccagccggccggcaccatcaaaggatgcaatttaaagaaatactgagatttggtcaacgctctcacatcctctttcattgttctgtcttctttcctatcaatctatgtgccggacaggcttcttagaacaacggcggagcggccccacaaaaaaccgcctgacgcttgttaaagcagtcaggcggttttttgtcttttattctccggttttttcttttccgtaatgatattttgatggatcaacaggcttgaagtctgaaatctcgtggaatctcaacagatctttatagagtacttggtcggacagatccagctgttcggacacctgcgatttcaggttttccgtctcttggttgcccttgatctcttttcctgtctttgtatcatatacggtcgtatcaatcatcgtgtacttcggcgttacatagtttccatttctgaaagccacggtttggtcgtggtctttagaaaagaggtctgtaccaaagttgatgtattttttgctgtcaataccttgcaggtgaagaagtgtcggcatgacatccatttcaccgccatacgtatggttgactccgccttttttgcccggaatgcggatcataagcggtacgcgctgattcatcgcgttttgatacggtgtaatctctttacctaatacttctttcatcgcacggttgtgattctctgagattccgttgtggtcaccatagatcactataacagaatcatcaaataatcccgcttttttcagctctttaaagaaatcttcaagcgcttcgtcaagatagcgcgccgtctggaagtaaccgtctaccgttttgtctcccgttgttcccttttcaagggtggcatcctcttcatccaaaatgaacggatagtggtttgtcaacgagattaaatgcgcatagaacggctgcttgagcgatttcagcttcggaattgattcttcaaagaacggcttgtctttcaagccaaggttgacgagattatcctctgacatatcatatgtgctggcgtcaaagaatttgtcatagccaatttgtttatacacctggtcgcggttccagaatgacttgtagtccccgtgcagcacggcgcttgtgtagccttctttttggttcagaatcgccggcagggactggtacgtattttgcccttttgttacaaacgcactgccttcaggaagtccgtaaaggctgttgtccatcatcaattcggcatccgctgttttaccttggccggtctgatggaaaaagttatcgaaatacatcatgtcatcctggccgtgcgccagcttgttcaagaacggcgtgacttcttttccgttcagcttataatcgatcaaaaacgtctggaagctttccaaatgaatcttgatgatgttcttaccttttgctgcgccgaaatactcgtcattcggtttcgcataatgcgaatttgtatagttgatgacgctcgtcaggtcgtcgctgctcgcgtatgccttttggctcgcgttttgggcagcctgaacaccatcatagatcatgtaattgtaaggccccaaatacttgacgatgtaatttcggtcaaatgttcttgtcaaaagctccggacggtctgtctcggcaactgcaaggttgatgaaaaacagagccactccgctgagaacaacggctgcagcccatctttttttcagttgtgacgccttcagttcaggcagcttcacacatagagcaatcaaaatgatcaaatctgcgaaatagacgatgtcatgaaatgccatgatgtcaaaaacgccgtcagacatattgccgaggtttccggcttgttttaagtttgcaaacgtcaaaaagtcatcaaagaaacggtaaaacaggacatttgcatataaagcaaacgtcatcacagcatcaatgatgatgatccatatcgccgaccggcggccttttgcaaacaaagccaaaccgagtgcagcaatcgtgaagctcaatgggttgatgaacagcagcatgtgctgcgtagaccctttcacacctaaattaaactctaaaaaataggaagcataggttttagcccatacaaaaacaacagctaatacaaaaaagcttagcttatgagagaatatttttttcatgataacctctacctttttaaacttttttcagaccgctttctgtttcagtcaatgaagcgtgaggaaacgataatatatcattctactaaaagtctcggcggttttacaagcacgtcctggtgaaatcccccggcttccctcactcaaacagtctacgcctgcgaaaaaaattttccgcatgtaagacaacggcctttaattaagacgaatgaatttccccaaaggtttcagttattttctttcatctagaaaattgcagtttcccggacgattaaatatctttatgaaattcatttaaataagcctttctttgcgcttctgtaaactgaccgatccattccgcacgcgcttcctccgtcatatacggcaggatgtacagctcgaccgctttataaaattccggctcaggcagaatgttgtacgtcggaatccgcaccctgccgttcccccgtgtctctatcagtatatccatcaagaaaatgcctttcgggctgtagcggtgctccgccattttaaggcttttgatgtccttgaacaacacagatttcttccctgagaatatccgcccgtcttctccctcgataatggtgaagatgatgtttccttttttcgtgaaggccggaaaaaccattagaaaggtcatcaaaccgtagatgaccccgaaagttccaacgcccacgtacagcaaggaatattttgattcgagttttattgcttcataaaagagccatgctccaatcaatccgaaacctgcagtccctgcaaaaacccatactctaaaggacattctgcttttcacatcaaatgtctgctttttttcctgttccaaaaataattaggccctcctctacttcagcaagcggattccgctacaaataatattcatgccaagacctaccttaccacagaaaccagttcctgcataaaacttcatgtatttgtctgtccctaatcagaatgaatacagaaaaggctcccggccatctgccggcagccttcccctattttgaaatatcaacaaatccctcgccgaatacatccctgacatcgtggatgatgacaaatgcttttttatctgtgcttctaataattttcttcagcatggacagctcttgtttattaatgacaatgtataaaatttctttggagtcgcccgtatagtgcccgcgtcccgataatatcgtgacgccgcggtccatcagggtattgacctgcgccgcaatctcgtttttatgctcggaaataatcgtgatcgcctttttcgtgttgagcccttcgataatgaagtccatgaccttcgtggcgatgtacagcatgacaatcgtaaacatcagcttttcagctccaatgataaagtaggaactgaagacgacaactaaatcgatcatcagcaaggcatagctgatgttccagtcaaaatatttattggcgattctcgcgagaatcgcagacccggcggtggttccgccgacacggatgatcatgccgattccgacgccggcaaataccccggcaaagatggtgctgatgatcacttcatcggccggcaccgtccaatcttcggtgacgtgcagaaagaacgaattggccgccaccgcaataatagtgtaaatcgtcgtctttttatccaaaaagcgatagccgataatcagaagaatgccgttcagtacaaagtttgtgatgcccggagaccattcaaaaacgtagtataaaatcagcgtgatccccgtgacgccgccttctcccaagtcattcgggatggcgaacagattcacggctaacgcaaagaaaaatgcgcctataatgatcaatattatgtccattgctttctttttcataaatacatccccttcctttgtccctaatcgatttcctgtaaaaagtaaaaaagcccaggagagaagctctttgattaagagcaaaaactcctgggcttttatcccaccgtgtcataacgatacttcgctatgtgttttctctcggaccagaccagcgcgggagggcactgcggaaccctagaaaaccaccttttctctgctatcaatttgtcatcttcaagcattataagtgaaattctggggtctatcaacccctatatcagcctgaaagatttgtttttttgtaaaatagcttccatctgtcagcgataaaaccattctataataatagatatacgtgttttgcctgggaggcgctcttatgaacaaacaaaaacggcaatggctcatcaagcagaccattctcgaacatccggtagaaaatcaggaacagctggcatccctgctggaaaaacgcggcatcaccgtttcgcagtctaccatttcccgcgatattaaagaaatgtatcttgtgaaacagcccggtgaaaacggaaaacttgtctacacgacaaatgcttctttatccatcaatccttccaaaatattaaaagataaaatctctgacgttgtcctgcatgtgcatcgaagggacaacttgatcattattaaaacaatgcccggcaacgcccatgccatcggcgttcttcttgataagctcggaagcccggaaatgctgggctgtatatgcgggaacgatacatgccttgtgatttcccagtcacctgaggcagcccaatcattttatgaccatttatgctgatccggccgtccggatcagctttttttgcccttcaaaaaaatttttttcgagaaatccccgttaaaaatatacacgttttatacgttctattctccgctccgacaggaacttattttccatttatcataattattcatttttgtttttgcttcatcaaaaaacatgtgaaatatatcacgtttttgttgttatcgctttcacatcgcgcttttccttcctgttttaagctgtacatgtaacaaaaagagcttaggaggcgggatgatcatgacaacaccgatacacgtttactcagaaatcggccctttaaaaaccgttatgctgaagcggcccggtcgggaactggaaaacctcacacccgaatatctggaaaggcttctctttgacgatattccctttttgccagcggtgcaaaaagagcatgaccaatttgcagaaacattaaagcaacagggggctgaagttctttatttagaaaagctgacggccgaagctttggatgacgcattagtccgcgagcagtttatcgatgagcttttaacggaaagcaaagcggatatcaacggcgcatacgacaggctgaaagagtttttgcttacctttgacgccgattcaatggttgaacaggtgatgagcggcattcgaaaaaatgagcttgaacgcgaaaaaaaatcgcatcttcatgagctgatggaagaccattatccattttatctcgatccgatgccgaacctttatttcacaagagatccggcggccgccatcggcagcggactgaccatcaacaaaatgaaggagcctgcccgccgaagggaatcgctgtttatgcgctacattatcaatcaccacccgcgttttaaaggacacgagattccggtttggctcgaccgtgatttcaaattcaatatcgaaggcggagatgagcttgtcttaaatgaagaaaccgttgcgatcggggtatcggaacggacaacggctcaggcgatcgagcgtcttgtccggaacttgtttcagcggcagagccggattcgccgtgtactggccgtcgaaataccaaagagcagagcctttatgcatttagataccgtcttcacgatggttgaccgagatcaattcacgatccatcccgccatccaggggcctgaaggagacatgcggatcttcgttcttgaaagaggaaaaacggcagacgagattcatacaactgaagaacacaatttgccggaagtgctgaagagaacgctcggcctttcagatgtcaacttgatcttctgcggcggcggagacgaaattgcttcagccagggagcaatggaatgacggctccaatacactcgcgatcgctccgggggttgtcgtcacctatgaccggaattacatttctaacgaatgtttgagagaacagggcattaaggtaatcgaaatcccgagcggggagctttcaagaggacgcggcggcccgcgctgcatgagcatgccgctctaccgagaagatgtgaaataaccaacctaaagaaaaaggagagagatccatgaaccaaacgattaatttaaaaggcagaagctacttagctgaaaaagatttttcagaagaagaaatcctctatttgctcgatctggcccagaaactaaaagaaaaaaaagcacaaggcatcaggcatcgctatttggaaggcaaaaacatcgctttgctgtttgaaaagccttctacaagaacgcgctgcgcttttacgacagcctgtatcgacctcggtgcgcatcccgaatatttgggcaaagacgacattcagctcggcaaaaaagagtcgatcgaagacacggccaaagttctcggccgcatgttcgacggaattgaattccgcggatttgaacacgaaaaagtgatctcactggcagagcattccggtgtgccggtatggaacgggctgaccgatttatggcatccgacgcagatgcttgcggactttatgactgtgaaagaacatacgggacgcgtaaaaggcgtcaagctcacccatatcggcgacggccggaacaatgtcgccaacagcctgctcatcggcggcgcaaaagtcggcatggacgtaagaatctgttcgcctcaagagcttttccctgatcaggacatcgttaaaatggcggaagcgttcgctgaagaatccggcggaaaaatcaccgttacaagcaatacagataaagccgtgtccggagccgacgttctgtatacggacgtctgggtatccatgggggaagaagacaagtttgcagaaagaatcaaactgctcaagccttatcaagtgaatatggatctcgtcaagaaaacaggcaacgacaacgtcatcttcctgcactgtctgcctgccttccacgaccttcatacaacctacggacaaaatgtttacgaacagcacggccttaaagaaatggaagtgacggacgaagtgttccgcagcaaacactctaaagtgttcgatgaagctgaaaaccgcatgcacacgattaaagctgtcatggcagcgacgctcggcgatcttgactgacaggaaaagggactcattcccttttccattctaaaccgaatgaggtgacaaaaatggcggaagaaaaaaaacttgggctgtttgcgctcatcgcgcttgtcatcggatcgatgatcggcgggggcgccttcaaccttgcaagcgacatggcttcaggggcgggggcgggagccattttaatcggctggatcatcaccggagtcggcatgattgccctggcattctctttccaaaacttgacgacgaaaaggcctgatttagacggcggtattttcacttatgcccgggaaggattcggccatttcatgggctttaacagcggctgggggtactggttcgcagcccttctcggcaatgtcgcatatggaacgctgctgttcagcgcaatcggatatttcatccctgcgtttggagacggacaaaacatcgcatcaattatcggtgcaagcgtgatcctctggtgcgtgcactttttgatcctccgcggtgttcagtccgctgccatgatcaacttaattacgaccatttcaaaacttgtaccgattttcgctttcattatcgccattatctttgtgtttcatcttgatttatttacgaacgatttctggggaaaagggctgtcgctcggttccatcggaacacaggtcaagagcacgatgctggtgaccgtctgggtgtttaccggaattgaaggggccgtcttattttcaagccgggccaagaaatcaagcgatgttggcaaagcgactgtcatcggcttgatcagcgtactcgtgatttacgtcatgattacgatgctgtcgctcggcgtcatgaatcagcaaaacttggccgagcttccgaatccttcaatggccgcgatcatggagcatatcgtcggcaaatggggaaccgtgctcatcaacctgggattgatcatttccgtattgggcgcctggctggcctggacattattcgcgggcgaactcccgctgatcgcggcacgcgaaggggtcttcccgaaatggttcggcaaagaaaataaaaacggtgcgccgacaaatgcgctgactttgacaaacgccattatccagctgtttttgctgacgtttctcatttcagatgcggcctaccagtttgcattttccttggcttcctcggccatcttgatcccgtatctgttttccgggctttatcagcttaaatacagctggctgcacaaagagcctaaccggggcaaaaatctcatcatcggcaccatcgcaagcatatacggcgtctggctcgtatatgccgcgggacttgattacctgcttttgaccatgattttatacgctcccggcattctcgtattccgggctgtccgcaaaggaaaagaaggccccgtcttcaataaagccgagcttttgattgccgccctgattcttgtattggccgtgatcgccgtgatcagactggcttcgggaagcatttcaatttaacaaaacagaggtgattattaaatgaaaaaaagaaaaattgtcgtcgcacttggcggtaatgccattcaaaccggagatgccagcgcagaagcgcaaaagcgcgcgcttgaagaaacggccatgtatttggcggatatgatcgacagcggcgctgaattaatcatcacgcacggaaacggcccgcaggtcggaaacctgatgatccagcaaaaggaggcggattctccgaaaacgccggccatgccgcttgaaacctgtgtttcgatgacccagggaatgatcggctattggctgcaaaatgcccttgaccgggcgcttcacgcaaaagggaaaggcggacatgcggcaaccgtcatcacccgcgtcgccgttcgaagcgatgatgaagcgttccgcaacccgacaaagccgatcggtccattttacagcgaagaagaagcgaaagaactgatgaacagccgaaacggcggcctcgtttttaaagaagatgccggaagaggctggcgccgcgtcgtaccgtctccggccccggtatcgattcttgaacacgatgttatcaatgatcttgtcgaacacggacatatcgtcattgcagccggcggcggaggcgttcccgtcatcgaaaacggcgatgccgtctccggtattgacgccgtcatcgacaaagactttgcagcctgcaaactggcggagcttgtgcaggctgacgaactggtcattctaacaggtgtcgactatgttgccgtcgattatttaaagccgacagaacgtgcgctgaaacgcgtcaccaccgaagaactgaaaggttatataaaagaaaagcaatttgcagaaggaagcatgctgccaaaagtcaaagcagccattcagtttgctgaagctaaaaaaggcaacaaaacggtcatcacatccctgaaattagccaaagacgctctccaaggaaatgccggcacgattgtcgtccaagcctaaatgcaaaaggaagggctcagggagggttcttccttttgccaatcgtcaaaaacaagtaaaatttaaactatatagccgcaacataagaaaatcgataagggtggtccatatgaagaacaaagacatcgtacatcagctgaaaaagtttcctcttctcgcttccctgaataaaagagatctggaagatatgaaacagtttatctattggcgctcttaccataaaggccagatattatttatggaagacgacccccgggaacgaatgtaccttcttctcgacggctttatcaaactcgaaaaatcaaacgaagccggatccatgttttataccgactatgtacgtcctcataccctctttccatttggaggcttgtttcgggatgagcattatcactatgccgccgaagccttaacagatattgaactctactatatacccatgaacatcttcgaagatctcgtccgggacaacaaaaacctgctttacgatattctcaatcatttatcagacatccttgcccttcacgaggaaaggctgaagcgcatcacactctcccatgcccacgacagggttacacaagccatttattatttaaccgaaagcctcggtcaaaaagaaagcaactcaaccgtcatcaactgtccgatcaccgctgccgaaatcgccaaaatctcggggacatcccgcgaaaccgtcagcgccgtcctgaaaaagctccgctgcgaaggcgttatcagtcaaatgaacaagcagatcatgatcaatcggccggaatattttatgtaggcatatatgagaaatcatcccggcgacaagcgggatgattccccgccgtttttatttataccggaattcctctgtttcaaaccgtctgtttttgatgatatcccgataaaagcaagccgattttttcagcgccctgctgcggttgttctccaatcgaatctcgacaaggccgtagcggtttttaaaggcgttcatcggagagacgttgtccgtgaatgcccaaagcatatatcctttgcagtttgcgccgtcggcgatccctttcatcgcctctcgcaaatgggctgaaataaaatcgattctgtagtcgtcctgaatgaccccctcttcatttttaaaacgctcttcatgttcgacgcccatgccgttttcagcaatcagccattcgatatttccatactcatatttaagtctcatagccatatcgtacacaatgcgcgggcagatctcccagcctctgaacggattcatctttctgcctggcagctcaaagggctcatagtaataagcaggatgaaaaggcgtcgattcattccattgccttgaaggcgcttgaactctcttcggataatacaggttcacaccgacaaaatcgaccgtattccgcttgatgacggaaagctcttcttcatcatggtcaaaaaggatgtcgtgtttggccatgagctccatcaattcatcgggatagacgccttttatgctcggatctaaaaaaaccctgttaaaaaacaaatcataaacttgggccgctttctgatcatggggcgcgcttgacctcgcatacgcgacctcaggatttaagatgacgccgatttttgcgccttctctaaaactgggcttccttttccggaaaattgccacggcctttgctgtcgccagtgctttatggtagttccactgcatccattttttcgtgttctgctcgtacggatagcgaagtgcgtcaaggtagatccgtgtttgcggcacgatcggttcattaaaggtaaaccagtatttcaccctgtccccataccgttcaaacgctttttctgcataagccgcaaataagccaatcacgtgttttgatccccatccgccatactgttccagcaggacagccgggatttcgtagtgctcaagacaaagcatcggttctactccgcatctcttcagctcatcgatgacgtcatcaatgtagcctgcatacacctcgtcaacttcggcggtttcataatccaaaagaaaccgcgaccagttaatggatgtccggtagtgggttagcccgatgtctttcatatattgaatatcttctttgtagcggttataaaaatcggttgccacagccggtccgtatccgtcatgccatacatcaggatcatttttgtaccacatatccaaataggaatcctgtgtcggccgcttcccgtcccacccctctgtctgccacgccgacgctgctgcgccgagaataaaatcgtcgggaatcttccacgtttgtctggccatctcattcacacctttctttgctttacatagacacatttttttcagaactaatcgtaaaggtctgattcaataaaataacaaacggaagataaataaggacggagacgatgatgcatacgatttgtgtgacgacggcaccgaggcttcctcctgttgacagccaggcattgataatcggcggtgtcgtccacggcaccatgacaacggcttttccggcaaagcccgccgctgtcgcgatgtaaccgatcgcacccgtcacaagcggcgtcacaataaatggaatcgccattaacggattcagcatgacgggaaccccaaagatgaccggttcattgatattgaagatgccgggaccaaacgaaatctttgtaatgctgcgcaaatcctcccgtttccccgcgataaacatcgcgatcaacagaccgattgtgacgccggatccgccgatgctcatgtacacatcccaaaacggcatcgtaatgatattcggaatcgattcgccggctgcgtatgcattcatattgacggtaatcgaagcgagcagcaaaggctccctgatcggcttcaccatctggtttccatgtatgccgatcacccagaaaaactgtgcgacaaacaccagcaagagaatgccgggaagaccttgaatcgcgccctcaagcggcttttgcacgacattgtacacggcttcatgaagatatacccccgtcagccgatgaaacgcaaatccgaagctggcgatgatcgtgacggtaataatcgaaggaaataaagtgccgaatgatacagagacatttgccggcacgctgtccggcattttaatcttgagccggtccatgcttgacagcttgctgaagatttcaacagacacaatcgaaataaacatccccaaaaacagcgacttcggatccgtaaattccttggccagcacgttaaccacttcctgcatcgaaccgttcacttccaacagcaccgccgatggaatgacagagatataggacatgagcgccatcaagccgggaaaaaacgattcatgcccattcagcttcccgagctcaatcccgatcaaaaacaccgcgccgatcgtaataaagttcagcgtcgcataattgattgacgccataatcggctcaagcgcagacaagaaccgaaaaggcctgaaaaccgcaagtcccgtctcggggctcatcaccatattctgcatcaaaaccgcaaacgccccggcaatgatgaccggcatcagtgtgacaaacgccgacttaatgaccatgatatatttgaaacttgtaattttaaaagcgacccgctcaaacatctcagtcaccttcgccatcctgctcatttactctccccctttttttggtggtttgcttttactttacaatgaaaacgctttcttttcggtgcatattttttcctttgggagaggaaatttttcaggttggacggccagcaaagcagacaacccgccgtttcactgaaacagcgggtcatatattttactgtggcaactgcactttgatcggcttaaacggtgtagaataaaatgcgcttaaataaccaaattcgacatcaagcgaatatcggtcaaggctgaagtttttcgctccaaattcaccatctaacgtaaagtctgatcggaatcggagctttttaggatcaagcacttttgtaaaattaccttttacgctgtgtcccatcggcgcttcgtcaatgcttttataagcagaatcaaccagtgacatcgtttctaaaaagttttgcatgctgtcaatatcaatcttagattgatcgacatgtttcagatgatagtcgacagacaatttacttccgttttgtttcacctgatcaacggcaatctggaagtcatgacggtcagcgctcagcgcggcgggcgtttttgtgagaggcagcgtcttttcggaatcgcccatactgctgctcgcctcaatcttaaggtgttttgttcctttattcacttttccaaggatcagcctttcttcgtgacgaaccttgtttccgttctttgtactgtccgtcgtccactgcccgccactcaaataaggaatttcatttcctttatcatcggtcacttttataaccgatgtacgatcgttcggatgttcctctgaattggatacttcatagtcgatgacagtcgattcttttccgagaattaccgtttttacggcgagcttatggccatcagccgattgtgtattgtttttggttatgtggagcgttttatacggcagtttatcaaccggaatgtcgaacttccatttccctctgattccgttaatatttgtgatcgtaaccgggagtgtcagtttatcgggaatatgtttgtctggatagcctacttgaatgtagccggtatagccgtcctctgttttcttcaagtctccttgagaagcgatagcccatttgcgctcgccattaaataatgtgaaatgaatcattctcgctccatcatctaaatcttttcttgtatcgcttttcaccttaaacgtcataccgatgattccgccgtcaaaataaacgcttgtagctgtcacgtctatgttgttgctggacgctttctcgttcagttcagtgacaagctggcccgccaccaagttttggccgacatagtcatggaattgttgatacgcttttccaatcagcgggacgtcagccaacacgctttgcatcgctggggaaacgaagccgctaccgagaaggagcacggcggccgcgctcgaaacaaaaacagtccttttcacggcgcgcttcggccgaaacgttttttcccgcttggcccgcttgatgcctttatcaatcgattcgcggatttcttttgtagggacatcgatcttgtttacttcgtttttgaaccgttgtttgtccatgcgtcttctcccccagtcagtagttgttttaattcaagcttcgctcttttcagataggtcttaacggttccttcaggagcattcatcacctcggcgatatcatgaatcggcaggtcgtgataataaaataaaatgatggcggtttgatattcttttcgcaactgctgaacagcttcaagcatccctattctgtcgtccgcatgcatctcctgctcccggccttcgtccagcagcggcctgtccattaaaaccactttctttttcttgtccaatatggcatatgcatgatgaatgaggattttcgtcagccatgtcaaaaagtattcgggattcctcaactgggcaatcgataaaaatgccttgtacgccgtttcctgtacgatatctaacgcgtcctccttatttcgcacatatatgtaagctgttctgtaaagctgttcgctgtgcttttgaaacagcatttcaaaagctttggcgttgcctgcgacagctttcttaactaatctgatttgcttcactgctgcgcctccttcaaacattagagaggagaaatgaagagaaaagtttcaaaaggatggaattttttctctgcattaaaaaatccgctatttcactgaaaatagcggattctatttatttttttgtcagcgtcactttagaagttccggtttggccgtgcggggcctgttcatgtataagctcttccctcaggtcattcatacttgatcgtttgatccgatatacggcctcaagccgcaccaaatattcggctcttgttttgaaagcatgaatgattgagatgatccaaacaatgagtaatgctttcattgccaaatcgaagaggaacgttctggctgtaaaggcagccaataaaaccgccgctgcgtatccgattccggcaaataaccattttccttgtttagttcgcgctgcgatataaataaatgcaaaccagcttaaaaatccaaaaggaacccatgtgaacacaagccagaaggaatgtgcaaactcccatttcgttccttcatttgtataacctttagccattttgatactcccttacaattgtgatgatcctttagaactatattatactaaattttcctacacaggaataaaagttttcgattcgcccgccatgaatgataagataaacataaaaccaacaattggagatgaaggaaacatgaagaacaaattgattgaacgcctcatttcttatgcgaaagtggatacgcagtcaaatgaaaacagtcagacgacgccttccactcccgggcagctggcgcttgccaatatgcttgtcgaagagctgaaagagatcggcatgaaggacgtcacaatcgatgaaaacggctatgtgatggcgacgcttccttcgaatacagaaaaagaggtgccgacgatcggtttcttggctcatgtggatacagcaacagattttaccggaaagaacgtcaatccgcaggttatcgaacaatacgacggaaaggatattgtgctgaatgaatccctcaatgtcgtcttatcgcccaaggaattccccgagctagcagattatgcgggacatacgttgattacaaccgacggaacgactttgctcggcgccgacaataaagctgggatctctgaaatcatgacggcaatggaatatttaattgcgcaccccgaaatcaaacacgggaagatcagagtcgcttttacacctgatgaagagatcggcagagggccgcacaagtttgacgtcgaggcgttcaatgccaaattcgcgtatacggttgacggcggaccgcttggcgaactgcagtacgaaagcttcaatgccgcagccgcgaaaatcacttgtaaaggaacgaacgtccaccccggcacagcaaaaggaaaaatggtcaatgccgccaaaatcgcgatgcagttccacgccgcattgccggaaaacgaagctcctgaatttacagaaggttatgaaggcttttatcatctgctttcaatcaagggcgatgtttctgaaacgagcctctcttatatcattagagattttgacagagaccgatttaacgagagaaaagacaccgtccaaaaaatcgcaaacaaccttaaagcgaaatacggcgaaaacagcgtcacagtggacatgaatgatcaatattacaacatgagggaaaagatcgaaccggtcaaagagattgtctacattgcctataaagcgatgaaaaaccttgatattgaaccggtcgttaaaccgatccgcggcggtacagacggctctcagctctcatatatggggcttccttgtccgaacattttcacaggcggggaaaactttcacggaaaatacgagtatatttccgccgacaatatggtaaaagccgcgaatgtcatcgtggaaattgtgaagctgtttgaagaaagagcttaaacgaaaaaagcggaaagcggctgcaagacaaagcagccgcttttttttccagatcaatctttatctgcgctttgctgaaattagaacatgttgcaaggcggtttctttttggagcgggataaagccaattaacatctcaccgatgcaaaaaattctgttcatttggcttcatcacctttccaaatatctttcaacgtccagtaagtgaattcttcaacccgtacgttgcctttctcagaaaacagctcaatccccgctcttccttccttcggatatatgcggcttgtcattgtcgcttcaccatgatttgcaaatacttcaatagacgatctgtcgagaaacagatgcaaagtgagcttctcatccgcttcaagccgtacgtttctcacaccgtcccgcgctttgccggactttgaacagtcgagcgtcagcttgtgatcaaccaagctgtactggatgattgtctcttcctgttcaattccccggatctttaagccaaccgtttcggcactgcaaattgtcaaatcaaaaacggccaccacttcaagaagcttttcggctgtctttataaaatagctgccggaaatcgattgattgtcacactcatgatgttccgatccacgaagtaatttagtctcctcgacgggattcattaaaattttgtgaccatccttcaacgtcaattcacgcggcaaagttaatgccccgcaccatccgtctgctttcgtcggcatctctgactcccacatatccatccagccaatcgcaattctgcggcctttgtcatccaataaagtttgcacggcataaaagtcgtggccgtgatccaactctttaaaggagccatgtacaaactcattcgtttcttcatcatagtctccaatcaaatagcctgtttgatacagattttgatatgattcaccatcagcctctataccctgaggggaaatcagcaaaatgtgtttgccgtctagttcaaagaaatccggacattcccacataaagccgagatttccgtcgctttgggcgagaacgcctacgtactcccaatctacaaagttaggcgagcggtataagatgacccgcccgacgttctcttttgaggagtttccgaccaccatataccagttctcacgatgcttccatacttttggatcgcgaaaatgacgtgcgctgtcttccggcggctctgcaataacagggttttctttcagtttttcaaagacgataccgtctttgctgactgctatattctgagtttggtagaaatcgtctttctcttcatctatcatattatgcccagtatagattaaagcgaggtcgccgttatattcgactgcgcttcctgagaaacagccgctctcatcaaattcgtctcccggcgctaaagcaaccggcaagtgctcccagtgaataagatccttgctcttcaaatggccccaatgcatcggcccccaattctcatcatacggatgatgttgataaaagacatgatactcccctttatattgaataagtccgtttggatcatttatccagtttgcccggggcatcatgtgatagcccattcggtaacggcgattcacttttttcccggctttctttaatgcttcttctgcctgctgaattctgttcatctgtgacatcctctctatatatgattgctttgtagattttgagcaaattcaacatctttctttgagtctagcaaggtaaaaatcgaaataagggtgaaacaaaggaccattgctcccatgatgagataagtgtggcgaaatccgatgctgtcgtataaacctcccgcaagcggcgaaaaaatcgacgtgcctacctgggatgcgaattgaaagccgacaagataaagtacggatgaaagacgattatcaaaattagtcgccaaatatttaaacatcgcaatcagcataatcggcaattctaaagcatgaatgagtttcatcgatgaaattccgaccggtccgctgacaagtccggaaccgataatccggaaagccattaacagccccgctaaaatcaaactttttttaggaccgagcttattgacgatgaaaggcgcaagaaacatcatgcccgcttcaataaatacttggaatgaattaaggtatccaaatatttggttccccaaggccgcagtcggaaataaggaagcgtagtaaagcgggaactgctggtcatagacgccgtacacgcatgttacgccgatcacgtacagcatcaaaaaccagaaatcttttaagagaaaaagccctcctacgtcttttaatccgaccgagtctgctctttccttttcatcatctgtcatctcaatttttacggaaacaataatggccaccaatatgattgctgaggcggacgcaacccagaagttgatattcggatcgatattgaacagctgacctgcaaaaaatgtcgccgcagcccagccgagggacccccacatccttgttcttccatattcaaattgatatttgcggctgaccttttcaataaaggtttcaatcgcaccgattccggcgagaaaagcagttcccaaataaattcccccgacgatagccccaagaaagacgttgtattgcaaaagcggtccgtagacgaaaatataaaagggacccgtaaatacgagcagcaaactgatcataaataatatgtttttcttcagcccgagcttatcggagataaaaccgtacaaaggctgcatgcacaaagtaaagatagcgtttacagaaaagataatgcccgtcgcggacccgttcaaattgatttcttgccctaaccaaatcgcaaataaagaatagctggaagaccaagtaaaaaagaaaaagaaaaaataggcgcttagtttccaatacagactgtttgagcttttcattttcatttgctcctttaacccgatttggatgtatctatttgatgcctgtccctgaaccgcccaggccatctaaaatgtagcgttgggctacaatgtagatcagaatcagcggaatcgtggaaatcgtcaagacagccatcacctggttcgtataaaccggctcggtgctgttgatggctgtaatcgccacctggatcggaaatttcgacttatccgtcaaaaccatcagcggccaaatatagtcattccagctgccgataaaagccaatgtccccaccgtagcgacagccggtttggacatcggcagcatcacccgccagaaaatctgccatgtatttgctccgtccagcttggccgactcaatcatctcccccgggatcgccatgaaaaagtttcggaacaaataaatattgaaagcccccgcaagcgccggcaaaatcacggcaaggcgcgtatcaacaagtccgagcttatgaacaattgtaaactgcgagattaaaatcgtttccatcggcacgattaaaagcgccagcaatatggtaaacagcacttttttacctgtgaattgcagcttggcgaatgcaaagcccgccattccgttgataatgaccgctcccgctgccacacacaaaccgtaaaacagactgttaccaatatacattagtaaatcaaaccgtgacagcacttccctgtaggattgaaaccattccgacggatgaaaagacggaagaaacgctttaatgctgctgatattgttgtaaatatcggcttccggtttcatcgatgaagcgaccatccaaatcagcggaaatataaacagagccgccagcaaaacaaggcatatatattccagtatcgttaaaggtccgaatttccttctcatccgccttcatcctccttcaccaacttgcgctgcgcaagcgtcaccaatccaattatcgtgccaaacaagagcgcaattgaacttgcatagccgaccatccgatcggtaaatcccgtttgataaatataatagacaactgtcatcgttgaattgaccggtcccccctgggtcatgaccattggctgcacgaggagcttaaacgcactgatcagcgtcgtaataaagataaaaaccgacgtcggtttcaacaaaggcaatgtaatataaataaaccgctgccatttattcataccatccaattgcgccgcctcgtagacatctccgggaatgttttgcaggcccgctaaaaaaatcagcatctgaaatccggctccctgccagactgaaacgaaaacaattgtaaagatcgcctgattaggacttgtcaaaaacggctgtggcggcaaaccgacatgcgtcagtacgttatttatcattccttcattcggattcagcaagtacagccacaaaacggagatgacaacaagcgacatgacgacggggctaaagtatgcgactttgaaaaacgtattggccttgcgctttttattcaacagaagggccagcccgagagcggccccgatctgtaatggaatcacaaggacaacaaatttcaatgtgttgctcaaacttttcaagaaaatagggtctttgaacaatttgataaagttgtcaaaaccgacaaacttgcgcaggtcaggtgttaacaaataataatctgtaaatgcgtagtaaaccgccataatcgaaggaatcacgagaaacactgacaaaatcagcaaggccggacctaaaaatgtataggccagcacattgtcccgccaccctattttactggcagggatttttttcagcggaaaggccgtccttgcttctttcaacggaattttattcatggctccaccttctagtttgccttatcgatggctgattgcatttcttttgcacgcgtatccagaaccgattgaatatcctgatgctgatcaaagaagctgatgtcatcgatcgcttgctgaaatgcgcgcgtcacctgtggatatgccggtgtcaccggtcgtgcatgccccgtttctttcagctgctgcaagaagacattcatttcatctgagaattcttttgccagcactttctctgatgaatagcgcacaggcagcgcggcgatcgaacggctcaattccaagttggattccttgtttgtcatccaatcgaccaattttgccgcccattccttgttttcagacgtctgtgtcatggcaaactgccagcttcctgaaggggacacaagcttttttgtttttggcgacacaggatacggcatcacaccataatcgacattaggaaaatttgtttccatgtcggttaccgtccagacaccgctcattttcatcggatatttttccgtttcaaacgcctgcttaaccggagtccgggtcgtgtaaccctctttcagcattgtttgaataaatgtcatcgcttcaacggtcagtttgtcgttaaaaacaccctccgctttcttgccatcttttgaaagaacatcgccgccagccgaccaaacaaatggcaaaagcgcataggtcagcatttcgtcttttgactgcaactgcatatcgatggccggtttgtcatatttatttttcagctttttgcaaagctcaaggaattcgtcccacgtccatggattctcaaccgttggcagcgttttcaagtcaacgccggcgtccttcagcatttttttgttatagtaaataccgaccgatgattcgctgacaccgatcgcatacagtttcccctggtaggttccctgttgcttaatgctcggcaataaatcatcctggtctttgatatactcatccaatggcgcaataacgccggatttcgcataagccgccgtgttcggtccgtccaaagtgatcacatccggcagggtattcgttgtcagcgccgcgttcactttgtcttcatatccgccgccgtttccgcttctggggatgaaatcaattttggcctcgatgttttcagaggcatactttttattaaaagcgtccacccgcttttgatagacctttccttcttcactgtcatcagatacgtgcacccacatcgtaagcgttttcccatcttggctatttgcacttttgctattgctgcagccccacatcgcaaacatcagcaacaacgaaaaaattccgaagagccaccttttcatctttgtcacttccccccattttttatcaattaacaaatgaaagcactttcaagtgaattgtatgtcaaccggtttcatatgtcaaccggttgacatattttttccccaattattcatcccggtacatttctcagaatcatggcattttcttgcacatatcggcccgattctctaaaataagtgcgtgacgagaattgtaagccatttcagtaaaatagcagggggaaaagggaatgaagcctagcattcacgacgttgcaaaaaaagcgggagtttcaccaacaaccgtatcgcgggtattaaataaccgcggctatattagtgaaaaaacaaaagaaaaagtctataaagcgatggaagaaatcaattactttccaaacgatttggcccgctctttatttcgtaaacgaactcatttaatagggctcatcatccctaactccagcaacccgtttttcggcgaactggcctttcatattgagagcatctgcgctgccatgggctacaaactgctgctttgcaacagcttaaaccgcaaagacaaagaagaaaaatacttggaaatgctgatgcgaaatcaagtggacggcgtcatcgccgtgacttacaacaggggaattttaaattatcatcggcaaaacctgccgattgtcgccatcgaccattacttgtcggaaacgattcccgtcatcggctctgataactatgacggaggaagaaaagcgacagaactgttaattgcaaaaggctgccggcacatcatccatatcaacggaccaattgagctgaaaacaccggcaaatcttagaagaaaagcatatgaagatgtgatgcgacaacacgggagacagccgattacatatgaagttccctttcatcaaaattaccgggaaatcatttcaaaactgtttgatgaacagcctgcagctgacggcatttttgccagtgatgacctcatggccgctacagtcatcaccgaagcaaaaaaacgcagaaaagacattcccgggcaattaaaggtgatcggctacgacggaacggaagcggttcagtccattctcccggaattgacaaccatccagcagccgatcgaactcatttccaagacggccattgagattttgtccaaagccattgaaggcgaattcgatgatttgccgctggaaacctatttgcccgtacagcttttagaaggagagacgacttaaaataacgggacaaaaaaaggagacattgacgtctcctttctccatacatatcctgatctatccaattataaaaaagataaaatttacattgctcacctaaaatttaacttatatttctagaaaaactcacctccccatgataaatttaaagacaagttttcgaaaaattctaattttggcgtggaggtgcctttaattgaacgtaagccacttttttcctgaaacccttgtttctcttgtaaaagacatgttaaccaaaaccgatggttcaacaaccaaagcgattgaaacgctgatcggcggcaaagccgaaatcgaagtttttcagcaaaataatattgattatgacaagctttcacctgaggaagcaaggctgtttcaacgcgatgatgacatcttgtttagaacctcgtctttgaaaacaggcgatgattatttatcttataattatgtctatgtcaaaacaaacttactgccgcccgccatcaaacaagatttgcaggaagaaaggcttcccatcgggaaaatcattgcagaactggagtcaaggcgtgaaattttcagcacgggcgactgcctgggaaaacatttcacacaacttgtacctgtttcagcagaccggacatatgcttttaaaaaataccagatcatcagcggccgacagtgcatgttctatgtctgcgaactgtttgatttagaaaaaatctgcaaactgactgcgggctgaatcatgcccgtcagctgccgctttatgaaagagcttccaaaacctcctccttccttcttccctcataataaaaacccctgagaaacaggggctgttatttattgatacaccgttttcggaactgcaacgaccggatttccggcggcataaggggcgacatcgtattgttggaagacgatcgcaatgccgtcgttagtgtaatagaaggccgtgtttttaccgaggacgatgtctttcttcttcacatccggaaagaaaatgtcgctgtgtttttgaatatagttgtaaatgtatgtttttgtcttatccattttcgattttgtatttaggatgtcggataaatacacccgttttttagagacaaggtcatagttgaaagagcggactgccgtatttccgtgcgctccgccggaatagacgtaattgcttgtcaggatgctcagcttttggccggtccggtatttcacttcaaaggacgtttgataatccgtttggtatccgtgctgttggccgtctttcttgttttttacataatctttgtaggactgctcaatataatgtttaaaatctttgttgatcttgttttggagagatttggggcttacatttgaaacttgcgggtatttcaaagccttaatgtttttgtacgtatggctcgtgaccgtcggttttttttcgtttgccgcgtgtgcagaaggaagtgcggccgcactgtacagcgcaaaaaacaatacccctgtcatcaacattccgaacgctttaaacactgtttttttgttcataaaaaccctccttaatctgtcattttttataatacccattttgaaatcaggtacacattatagaccggtgaactcaataaaaagtttctgtttttggaaataaaaattgaaaaaaattctaatttattctgtttgttcagcatcttgttgactgtttgaacggctgtcctgacgaaaaattcacacattgattcgaaacgccctccggtttaaccgcagaagaagaaaatgaaaaaaacgaagagttttttttaaacccattgacatttttataaaaagtattaatattaaaactattaaaaaatcgcataaaaaggttttccttatcaagagtggtggagggactggccctgtgaaacccggcaaccgctgtctatgacagaatggtgctaaatccttaagagcatgttcgtgctcttgaagataaggaggagattgaatatatcaagctcttccttatcgggaagagcttttttatgtctataaagaaagagggatgaagcatgacacaatcaaccgatgtactgaagcaaacgcctggaagaaaaatcggaccgtacagagctgatcaggtgggcagtcttttaaggtctgagcccgtaaaaaaagcgcgcctccaaaaagcgaacggcgaaattagcgctgaacaattgcgcgaagtcgaaaacgaagagatcaagcgcattgtcgaaaagcaaaaagaaatcggtcttaaagccgtgacagacggggaattccgcaggtcatggtggcatttcgattttcttgaaggacttgacggcgtagaaggatatacagcggacaagggcattcaatttcataatgttgaaacgaagccgcgcggcatcaaagtaacaagcaaagtcgactttacaaaccatccgatgctggaagattataaatttcttcatgatattgcgggcacacatacgccgaaaatgacgattccgagcccgaatatgctgtttttcagaggaaagcttggagaaagcccgtatgaggatcttgatgaatttcatcacgatgtagctcaggcttacaaaaaagcgatccgcgcattttacgatgccggctgccgctatttgcagctggatgacacggcctggtccgtatttttctcagacaaaggacatgagcagatcaaagctttcggccgccagcctgatgaactgcgccagtctttcgccaacacgattaatgaagcagttgaagggcgcccggacgatttgacggtcaccatgcacatctgccgcggcaacttccagtcgacatgggtggcggaaggcggctacgatgcggctgctgaaacgattttcgacggactcaatttagacggacttttccttgaatttgatgacgagcgctccggcggcttcgaaccgcttcgctacgtccaacggaaagacttgcaaatcgtcctcggtttaattacatctaaattcggcgagcttgaaaacccggatgatattaagcggcgcattgaagaggcgtcccgatatgccgatctgaaccagctgtgcttgagcccgcagtgcggctttgcttcaacggaagagggcaacctgcttaccgaagaacagcagtgggaaaaactgcgccatgtcgtcgagatcgctgaagacgtatggaaataacacctcatatttgagacatgcctcctgacggcatgtctctttttttgcccctctatacaatttaaaattccttcttgatttgttcatagtttgatcatatttggcttctataatgctctttagtgaggtgatcgaacaatgattaagaaaaggaaaatcgatatattcctggtcttcattcttgtattatctgcagcattaaacttgtacggcatctggaatagtgacacagacaacgcctactatacggcggccgttgaaagtatgacccaaagctttcataacttcttttacgcatcatttgatccggcaggctttgtaacagttgataaaccgcctgtcgcactctggattcagacactttttgcacttgtattcggcgtgcacggctggagcgtcgttctccctgaagccattgcggaagtgatttccgtagcactcttgtactttattgtaaaacctacttttggcaaaacggcggccagaatttcagctcttattatggcgtgtacgccgattgccgttgcggtcagccatacaaacaacgtcgacagcattctcgtcctttgcttgatgattgcaacgtggctgttgtttaaagcagtccggaaaggaaaaatcggctggctgctcggcgcattctgtatgatcggtgtcggttttaacgtcaaaatgctgcaagcttacatggtattaccggcattcctgctgttttacatgattggagccaaaacgacgattcgcaaaaaagttgtgtctcttatcacagccgtgatcgttctggcaggtgtttccgtttcctgggcggttgtcgtcgacagccagcccgagagttcgcgcccttatatcggaagcagccagaccaactctgtccttgagctggcgtttggctataacggcatccagcgtctcacaggtcaaaacggtgcaggcgggggcggaacctcctcatctgatcatgatcaaaagaatcagcagcaaagcggcgatattgaaaacaactcagactcggcaaatggacaaatggctccgccgagcggaggcgaaatgccttcgggcggaccggatggccggcagggtgatgtccaaagcggcggcggaggtcccggtggcggcacaggcggcatgtttggcactggaaccccgggtcctctcagactattccaatctgagctttcaggacaggctagctggctgatcccgtttgtcctcttcggcatcatcggtttgctgatcgcgggtcttcgcagacaaagaaaattcaatgaaacaacgactgaaacaattttctggatgatgtggcttctgccggtcgctgcattcttcagcatcgcaggattcttccatcattactatctgattatgctggcagctccaatcgccgctttgtcaggtgcaggctggacggcgctcgttcgcctctatcaggaagaaagcggctggaaaaaacggctgctgccaatcggcattttgctgacaaccgcatttgaattgtatattttgagtccttatctcagcgaaatcggcttcatctggagcatattgatcggcgctttcggcattgtcacaagctgtcttctcatctttctcaagaaaggaaagtcattcagctactatgtatcacttgcagcgctgcttggcatgctgatcgggcctttctattggacaacggcgacgcttgctgacggtgtaaacggcatgattccacaggccggacctaaatccgcacaatcatttgccggcggtggcggaggaggtaagatgcagaataacgacggcagcggacctcccggatttggcagccaagacggccaaacatacagtaatcaaaacaacaataatggccctggcttcggtccaggttcaaacagccaaaacagcaacgattcttcagctgataccggttccggccaaaacagccaaaatcagaatgacgaaggcgcaagcggccgtcaacaaggcagaccaagcggcggcggcagccctggaagcgtcgagtcggtcgatgaagaactgttgagctaccttgaaaagaacaacaccggtgaaaaatatttatttgcagtctcaagtgcaacttctgctcaatcttacatcatcaaaacgggcaaagctgtgatggcgatgggcggattctcaggaagcgacccgattttgacggttgaaaaacttgagaagctcgtcaaaaacggcgaagtcaagtacttcatgatcggcgacggccgaggccgggacaattcagaaatcaccaactggattaaagaaaacggcacagaaatttcaaaaagcgaatacagcagctcttcttctgatgattcacagtcaggcggacctggcggaaatcaaacgctttataaagtggagctggattgatgaaaggaaaggtgatgaatatgcagaaacaagtcacattttcaatcgtagtccctgtctacaacgaagcggaagtgcttcaaagcacctatgaccgattaaaaaccgtcatggactcgacaggcgatccctatgaactgatttttgtaaacgatggttcaagcgatgacagcattcacacgctgaagtcgcttgctcagtcagaccaggcagtaaaatgcatcaatttctcaagaaacttcggtcatcagatcgcgattacggccggcacagactatgctgccggcgaggcgatcgttgtgatcgacgccgatttgcaggatcctcctgaattgattttggaaatggcggaaaaatggcgccaaggctttgacgttgtatacgccgtccgcacaaagcgagaaggagaaacatttttcaaaaagcaaacggccgccatgttctaccggattttaagaaaactcacagacgttgatatcccggtggatacaggagacttccggctcatggaccggaaggtggtcaatgaaatgaacaagctgaaagaaaaaaacccgttcgtccgcggtcttgtcagctggctcgggttcaagcagacagccgtctattacgagcgccacgaacggcttgcaggggaaacgaagtacccgctgaaaaaaatgctgaagctctcgctcgacggcatcacttcattttcctttcagccgctgaaactggcaagctactcaggaatcgtgctgtcagcgatcggctttatatacgccttcatcgtcgtctgcatgaagctgtttacgacaagcaccattacaggatggtcgtcgatgatcattctgcaatgcttgttcagcggatttatcctgatcatcctcggggcaatcggcgaatacatcggccgcatttatgacgaagtgaaagacaggccgctttatatcattgacggaaaatacgggtttgaagaacagcggcgggcgcgagctccccagcgccatattatgtagaaagatccaaaaggagggattccgatgagcgtactagttgtcgggggagccggttatatcggttcccacgccgtttacacgttaattgagaaaaaagaaagagtcgttgttgtggattccctggcaacaggacacgcagaagccgttcactccgaagctgcgttttataaaggggacattcgcgaccggcattttctcaagcaagtatttgaaaacgaggacattgaagccgtcatgcatttcgcagcatctccgatttcctcgaaatccaaaaacgtgtttacttcctttaacgaaaacatcacaggaatggaaacactgcttgacgtgatgaaagaatacgatgtcggccggatcgttttcgcgtcaagcgcggccgtctacggcagtccagaagacctccctgtcacggaagaaaccgaacctgagcccgttcacgcgcacggcaaagtcaaatggatgatggagaaaatgctgatggaagcggaaaaagcgtacgggctgaaatatgtgatcctccgctccttcaatgcgtgcggcgctcacccatccgccatcatcggcgaagaccgggggagcgaaacacatctcatttcaaatgttctgcgaaccgctctcggacaccttccttttgttcacatagatcaatctgaagacggaactggcgtccgcgattatgttcacgttcaagatttggcagaagcacacgtgctcgccatcagtcacttgcggaaaggcaaggatagccgaatctacaatctcagctatggcgaaagctactccgctgaacaaatcatccttgccgcccaatatgtcacaggcattcccctcatcgccgcaaagctgacagaaacggacatcgattcacaagcaacatttgccgcttcttcctccagagccagaaaagaattaggctggaccccacagcacaacagcctgatcgcgatcatccgcgacgcctggaactggcactctgcgaatccgaatggatatgcgtcggagaaggtgaagcaagggtgaaaatgaactgcacccctatagttggatagtgtctaactatgggggtgcggttttttcttatgatatatggatactgtaagtctaatcgatcaagtaagcagtcgggtgttttttgtcctgcaaatcaatcagcatatcaatatatcccgagccataccagatgaaatcatataaaaattggatagccacataatttttattaaaatatttaatttcagctgaattcactttcaaacctgctccgtcaaaagccttttcaaaatccaaattaaattgcacttcatccttatgatttctttttagataattttccactgtttgaacgcgaataacgaagcccgcccttaccaccgcgcataatcgtatacttatgattttcatgccttaacgtcgcatcgccccgctaatccacttttaattcgcatatactctttaaatgccggactgtcttcttttggatatcctttttgatatgtgaatgcatcatcgtcttttccgcagttggtgatcaccagcaaggatattatgaaaatacctaagtatagaaaccatcttttttcattgaaatgtttctatcctttttaatatcaagtcttgcttcaactttgagactgcctgacaatggaacaaaacctcttcaatcccactatgattcaattcctaaatcaactaaataagcggttggctgttgtttgtttttttgtaaatcaataagtacattaacagaacctgctgtaccaattgtctttccgtgataggaaatatacaaaactacataatctttattaaaatattggatattagctatccttgcatcgcccgcgttaaaatccatctcttttgcaatttgtttgaagtcaatcttaaattgagcttcatatttttcatttccttttagataattatccactgtttgtatctgttgaataccatcaggcattacatttgtttcttgttctttagctccgttaatataaacatatttaccgtctttgcttaaataatcatcttttttaatatcaattaattgattggtccttttatctaaaatcatatcatcaaaaaataaaagcaaatatcttcccgatttgtctaccttggtgaataaatcatagtaatcttttaattttccttttgataatgtgttttgcagtttttctctagtgataactgtagactcaatatttgttaagtcttgcgttatgaaaagtcctattgtgctattaatacgatctttcatactaaaatcttgaataaccactgaaaagcatttagaattcactgcatataaattaatctctaattcatcggatttctttactccatagtttttcaaaagcttcggcaaatccaatgtttttttatttttctttgttttgacttgcagttgattgttcgacagcattttaatagcaggaagatgatatttttctttgtcttgaataggatggtgcaacaacttttctaagcgttctatttggtacaaactatttaaagtcgttttaggtttttttgcagtaaacaagggcttataatatacttttaactggtcctgagtatattgaaagtaccgaattgcttggccttggtgattgactgttgaaaataaagtaacatcattctcttctaagatttttttatcagtactgccagtaaggtaggatttcataaactcagttaatccacggctatcctccttaggaaagccttttttatacgttatctcctgattttgatcttttccgcagccagtgattaccagcaagagcactattaatgcggttaaatttataaacctttttcttatcattgaactgctcctattctgcttcttttttgttaacttcccgaatcaagtcaacaaattcagagtcttcaacttcataaatatgtccaggattggttacaccggaaccttttacttcaatctctggtctttcatcaataagattccccaaaatttccccatgttgactttcgactgaaacaatatcatcactatttattttatgcttcccgcttgcggtatagtaaggggaaaaactcaccgtatcctctgttctgtatcctgccgcagcagtaatgtccattttctgaagcttttgatagacctcaggattggcggattttaaatgattaatgtcatcagtcatcgccttgctgtccatatctgtataagcattgctgtagtcttttccctcatcattatttctgttatcttctttaaaatctaaatattcactcgtatccgtagtatgtcttttagcaagaggactgtctgcgagccagcgcgctctatttgccccggtagctaagagatttttatcatatggagttccgattgttgtgatgcttcgcacatggtcagcgtaatccatcgcaaattgcagcgatcttcttccgccatagctgtgcccgaacatatcgatctttgtcttctcattcatcagccccatctcatttagcttttctgctaaatcatcacttgttgcttggcgatgttcattcatatgctctgtttcgtagacgatatgcacccttcccgcttttgctttgtattgttttgtatcctttaactttttcaatccttctactctcttaattactttttcaccatttattatttcaacaatatagtattctcttgttttatcactatttatacgtattataatatcaccgtcttttgctgcttttctaacacttttattgaatccatccccatcatcctcaatcccatgcacataaacagaaacattcttataatccgaaaaatcgccttttacatggtaaactgaattatacaagattgagaggtctgtcaaagcttcgcgcatcggggcgcggtgggtgcgggcgacattgctgaaatcttgttccacctgatcaatgccattttttagattctcgtattggctaattaaaagaacggcgtcactcgaaatattgttgcgttttcttaagtcttccggtgtggggtcttccatagactcaaatttgcgcctggcattctcctggcactcttttaaatcctttatccaatcgttgatttccgatttgatatccgccacattaaaatccattacgttttttgatacaaaattcggaagttctttattttctatcgaaacccatattttattaaaagtatcaagcagacggctggattgggctaaccgcagcagctggttcgcttttctttcatggtttttgagaatgttcgtgatttctttttctctattatgataagccataactctgtttcccttccatcatttcactctttgcagttgctgtgagattatgttatcgacgcgctttaattccttaacgatgtttttagcatttgccgaaagttctttgactctttttttaagctccgtcatgattgagttgatgtgcgactttgcatcagaccagacgtcatcgaatttttcccacggaaattctgtttcatacatcatttctctgagcattgtgtcaaaatggtgcaaaacttcatcaagtgtagatagatttgattcaaactttccggttgcctggtgtaacgattcaccgtttactttaatttcactttgaactctttcagccgaaaacgtatggtttctttctgatctcgactgcggctgaacattggccggcttgtcggattcgtccgtcagttcgaccgcttttgcaaaacagcgtacactgtctgcaaaatataataaacagctgcttgctttactgaaaaagttgatgttgtcgctcatttttttctgcagcgctgctgcggcttttccgctgtgccggtctaattcttcacgaaaaaacaccatgttctcaaatacatggctaaaggcgttttccagctgactaatggttcccgctgccttgtgtgaaagttctttgttgaagcgaaaatgtcccatcgtcattgctccttattttctttttttcctgcttcagcttctgttagcagttcatcaagctgcaattctttttgatcaacatacccgtaatggtataccacttctatgtcctgtttattaaatagaacaagctgctcttttggatcggtaaatccatttggatagtcgacagctgcataatctctgatcacgtgatttgtttcagaaaacatttgccgcccgatgacgagcagacgccttgaatcattatgtaagccgacaacactgccgacaggaagatagttcttttttaacagcataattcattatccctctttttctctgaaattggacatacatacaagttgtaaaaacataggaaaatcatagcaaaaaggtatcatttcattcaacgaactaaagtaccgcgaaattttgcctatttaaatcagagacttttgatttaatgttcgctcattacgcaaggtttgtcggtgtcattagtatgttacagtgaggccttagcactgaaacgattcatcatacttacgggaacttccagataaagtttcacaaaaaaaccgccataataggcggcatcatgaagatataaagcgcgatcgcttacgattctcctctaataaaaagaattttatcactttcaatttttcgtctgttgttctgtgcatcgtcacttcaatcatttttcccgcttgaaaatccggctttcaaagactaagcaacaagcgccctgaccctctcctagacatgacttcatttgaaatgtgaaaatatatttttagcttgaattttacacaatctcgagataaaatacagtcaaaataatagaagcccacttcttgtatataatcagtaatagggtctgattgtttctacctggcaaccgtaaatcgccagactacaaggaagtttgaatagatttgatcatgtaaaaagtgtattgcgcaaacaatatatctatttttcatttgctcttatttttcatgctttctttatcggaacccatgaaaaataagagcttttttattttcaaaaaacattcgggagttggcatcatgtattttctcattaatattttaggcattttcattgtcatgtctgtaatttatttttgttccccgcgaaagaaaagcgtaaaatggaggccgattctctcccttttcatcgttgagcttttggtgacgtggtttatgcttgggacaaaaatcggcggatgggccatcaacctgatcgcctctttcttttcgtggctgatcgcttgtgcaagcgacggcatcgcttttgcctttccgtccgtgatgggcaatgaaaccgttgactttttcttcagcgccttgctgccgattatttttgttgtgacattttttgatatactggcttatttcggaattttaacatggatgattgataagatcggctgggtaatttcgaaagtctcacgccttcctaaattagaaagtttcttttcgattcaaatgatgtttctgggcaatactgaagcgctcgccgtcattcgcgggcaattggctgtattaaaggataaccgcctgctgacgttcggcattatgagcatgagcagcatcagcggatcgattctcggttcttatttaacgatggttcctgcgacatacgtatttaccgccatcccgctaaactgcttaaatgcgttgatcttggccagcattttaaacccggtggaagtcactaaggatgaagacattatttacgtaccgccaaaagaagagaaaaaggactttttctcaacgatttcaaacagcatgatggtcggaatgaatatggtcatcgtcattctcgccatggtcatcggatatgtcgctttaacctcatgtttgaacggtattttgggcttgatcgtagacggtttgacgattcaaaagatcttttcttatatcttcagtccgttcgcattcctgcttggactggcgccgggcgacgcgatgtatgttgcacagctgatgggcatgaaactcgccacaaacgaattcgtcgcgatgatggatttaaaaacgcagctagacgcgatttcaccccatacagccgccgtggccacaacatttttgacgtcgtttgccaacttcagtacgatcgggatgatctatggaacgtacaattccttatttaacggagaaaaatcggcgattatcggaagaaatgtgtggaagctcctcgtcagcggaatagcagtgtcgctgttgagcgcggggattgtcgggctgtttgtttggtagaaaaatagattaaaagggcaggcatctagcctgcctgctttattattaaacttgcctatcccaatggcggtgcctgctgatcgcttcgaccagctttttgccgaagtcgtctttgttcttatcaccacgagaggtgataatgcccggctgtgaagccgcgtgggccccggcggcggacagcaggagatcgaccccttcgcctgcggctccgaccgctttataatgtccgaatgcttcattgacaaaatccgatgcggctttatgcaatttcaggcgttctatgctttcttggccgcccggaatataaacggcatcgtacagcacagaatcgaccgtctgcaaagtgtttccgacttcaatttctgtgccgccggccccttcgattactccgagtgccgagctgacgatgtccggaatgatgccggcttttttgaattctttcaacacacggctcaagtcttcatcatcaaaaccttgttctgctaaaatggcgactgtccttgtctgcggcagtttcaccgtattctcctggctgagcgcaggggatttgaacgtcacgttggagccttcgtctttttcagggggctctacgcctacacccgcagcgatttgcttggcaagctccccgtcaacccggttaaacatatgaacgacttggcggcggacgtccttgcttttgacctttccgacttcaaagcggaacgccgaaatgatatgttctttttcaacgggggacatgctgttccaaaacagcttcgcttgcgaatagtggtcgttaaagctttcgctgcgctggcggatttttttgccctcgactttttcctcgtagtgcacatatccgccttcttcttctgaagcaggcgccggatcgttgttttgaagcgaatttttatgataagcgacaggccctttgttaatcgtcatcctgtgatagccgtcatactggttgttatggaacggacagaccgggcggttgattggaatttcgtgaaagttcggacctcccaatcggatcagctgtgtgtccgtataagaaaagagccggccttgcaatagcggatcgtttgtgaaatcgatccccggcacaacatggcccggatggaaagcggcctgttcggtttccgcaaaaacgttatcctggtttcgattcagcgtcattttgccgatgattttgacagggacgatttcttccggccaaagctttgtcgggtcaaggatatcgaagtcaaacttgaactcgtcttcttcgtcaatcatttgcacgccgagctcatactccacttcatcgcctctttcgatcgcttcccacagatcgcggcggtgatagtcgggatcttttccggcgattgtctgcgcttcgtcccagacgagcgaatggacgccgaggacgggcttccagtgaaatttaacaaagcgcgccttgccttcttcgtttacaaacctgaacgtatgaacgccgaagccttccatcatcctgtagcttcgcggaatcgccctgtcagacattgcccacatgatcatgtgggccgtttcttcattgttggcgacaaagtcccaaaacgtatcgtgcgccgtagaagcctgcggcatttcgttgttcggttccggtttaaaggcgtgcaccaggtcagggaacttgatggcatcctgaatgaagaaaacggggatgttgttgccgacaagatcatagttcccttcttctgtataaaactttgtcgcaaatcctctgacatcgcgtacagtgtcacccgagcccctggaaccggcgacagtcgagaacctgacaaacaccggtgttttcactgacggatcttgaagaaactttgctttcgtatactccgtcatcggctcgtaaacctgaaaatagccatgcgcgccaaaccccctcgcatgaacgactcgctccggaatccgttcatggtcaaaatgggtcattttttcacggaaatgaaagtcctccatcagcgtcggaccgcgcacgcctgcttttaaggagtgctcgtcttcagatacgcgcaaaccttggttcgtcgtcatttttttgcccctgttgtcagaccggtactgttcgagttgttgatccttgctgtgcccattgactttgcggcggccatcattgttattcacttgtcatccctcctcatttttattccctatgtagctgatctggaatgctattttatgatttaccctttctgtcggcgggttaaactctttttatagattcaaagttttgtgtgacaactacacaaaaaaacgaattaaaccgattttaagggcacacatatttcgcaatacggactgttcaccatatcaccaacgtatttttccatgattggcctattgtccaattggtattcattgttttgcagggatgagaaaatatctgaatatgctttttgaatagcttctgctgtatgttcaacctcgtaaataaggtattgtccgccggaaatttcgccttcaaaaacggtatcatcgacttgataatcatgcggtatcacaatacaagcatcaaatcgacaatgatcaggaggcgttgttttcgggttatcttgtggaatcgcaaacagaatggcggattcaagaagatcttttttcttagcccatttttttaatctttccattacctcaatgttggcggggccgtatggaccaactcggcgcatatatgcaatgcggtagtttggaagtgtttcgattttgaatttcataggttctttcttcctttccatcattgttgttcgttccgtttcgaatgtaacacgctttaaagatatttacattcatatttttaaaattttctgcaaattttaaaatgagcattttcaaaccaaaaaagaggatattcagagatcatctgaacatcctctttctttgtttaatcgagtgtttcgccgtttgtagcaatcaggtttttataccagtaaaagctttttttgcgaatgcggcgcaagtctttcaaatcaaattcatcgcggttcacataaataaatccgtagcgttttgaacagccttgatgggtcgaaattaagtcgatggcagaccatggggagtagccgaaaacatcgactccatccgtgattgccagctgaatttgcttgatatgctcttttaaataatcgatgcggtaatcgtcatttacgacatctccgtcttcaagctgatcaaacgcgccgaggccgttctcagtgacgatcagcggcagctggtagcggtcgtaaatttcgcgcagcgtcgaacggaaaccgacagggtcgatctcccagccaaatgcgtttttctttaggtgtggattgctgcttcccctatatacgccttcttctcccgtctgcaaatgctggtctccgcctcgcgcagccgtgtcgctgccatcacccctgcttgcttcagccgtttgcgatgtatagtagttaaacgcgataaaatccggcttggccgaccgcagaatgtccatatccccttcagcgatgaccggtgtgcagcctttttctttcatatatgcccacgctgttgtattgtaccgtccgaatacggccatatccaagtaaagccagtttcggatcgcattatagttaaaagccgccagcacgtcctccggtttcgaagaagcgggatagatgagcgcaatattcggcgcaggaccgatttttgcttccggcagcatctcatggcaaagcttgatcgctttcgcctgtgcgacgagcatgtgatggttttgctgataaagctcttttttcggattttccaagttcggatcgagtgtaccgagtgcagatccgtggaggatcatcatattttgctcattgatggtcagccagtatttgacgcggtcaccgtagctttcaaaaaggaccttcgcatacttttcaaaagcatcaatcgtggccctgtccgaccagccgccttttttctgcaaagcattcggcagatcaaagtggtacatcgtaacaattggttcgattccatactttagaagttcatcgatcaaacggctgtaaaattcgattcccttcggattaatatcaccgtccccgtccggaatgatgcgcgtccaggcaatcgaaaaacggtacgctttgaagcccatttccgcaaataaagggatatcttctttatagcggtggtaatggtcgcttgcgactttaaaatcggttgtcccttccgggtagctttcgcgcgcatcgatgacagaaggcccttttccatcttcgtcccaagcgccttccacttgataagcggaagtagacgcgccccacaaaaaatctttcggaaattgagctaatgttttatatttcatgattattttcctcccttggtgatgaaattaaagtgatgatccgttcttcagttttcacctttttttgatccgttggaatgacatccgtgtattgaccggaatttgtaacgatgatcggcgttttcacgtcaaacccttcttctttcaaagcgtccagatcgaattctgcgagtatatcaccccgtttcacattttgcccctgcacggctttaggattgaagtgctttccttcgagcctgactgtgtccattccaatatgaatcaaaatctcggctccgctttcggtcgttatgccgtatgcgtgacccgtcggaaatgccgttgtcacgatgccgtccgcaggggcggtgacaacgccttttgacggaaccaccgcgattccctctccaagcgcccccgatgcgaacactttatctgatacttctgttaacggcaggacttctccttgcaaagggctgtaaatcggttcaccggcgcttttttcaacaggctcctcttttgtcacctccacagggtcatcaaagccgacaatgtaagtgagcaaaatcgataaaacaaacgaaactgaaatgccgatgataaagccgagaaaacccggtccgtaaaaaatcggaatcgtcaacaagcccggagcgccggaagcgagggcgacgctgccggagtatccgatgatggctccgcctgccgccgcgctgatgacaccgcatacaaacggctttttcagcctgagcgtcaccccgtagacggccggctcagtaatcccgaatatcccggtaacggcagctgatcctgccaatgctttcagcttcttgtttttcgtcttcagcatgacgccaaatgcggctcctgtttgggcaaacacggcggctgccgtcgccggcttaatgtagtccttgccgtggacggcaatgttgttcaaaatgacagggacgatcccccagtgaatcccgaagatgacaaggatttgccataaggccgcgataatcgctcctgccaaaatcgggctgagatcaaaaacggacagaatcgccgccgcgatcccgtttcctgtgtaaacgccgagcggtccgaatacgatcaaggttaacggcaccatcaccgtcaggcagattataggggtaataaagtttttgacgctttcatgaataaagcgcatacataatccttcaagatagctcatcacaaataccgcaaggataatcgggataacggtcgacgtataattcatcaagacgaccggaatgccgaaaaactccgtatgggcgccgctgtttttcagttcgagtatcgtcggatagatcagcgctccggcaatcgtcagcgctatgaacgggttcgctccgaattttttggcggccgtaacggcgagcagcaaaggcaggaaataaaacaggctgtcggctgccgcgtatagaatcgtatatgtcgtctcttccggcgagagccagccggcgtttgtgcaaatcaaaagcaggccttttaaaatccccgctcccgccatgacgccgagcagcggagtgaaaatgctggatacgacatctactaatctaccggcgaggcttcctttctctttttgactgtgatcggccgcagaactttccaacagttgagagatccggccgatttctttatatacttcaggaacgttattgccgataacgacttgaaattgcccgccgctctccaccacggttaccacgccatccgtattttcaagcgcttctctgtctgctttggaacggtctttcagtttgaagcggagccttgtcgcgcaatggactagcgatacaacgttcttctccccgccgacgcgcgccagaatttcttttgccattgattgaacattcatcgttgatcatctcctgtctctcgtaaagccctatcaagctgttaaaaaataaaaaacctaaactaaagcctgtacaaagaaggcttagtttaggttttgcctgccgaacagtaacaatcccgcttaagacaatatgaaaataaaaaaacctaaatcactatgaaaaacaagggcataagagtcccgcttcacagtcatttaggttttgcctgcatcatcagtaacaatcctaacaacctgtataagttgatgtaagtaaaaagtagcatacatttatccaattgtcaacgctttcatttgatatcatcctctatttttgatgaacgactcgctcgatatgaatcgtcaaatacagaagctcttcgtttgtcagctgatgaccgtattctttttcgatatactgcctgattttatttgtacaaacataagcgtcccggtacttatttttgacggtttcaaataaaaagtcgtcccggctttccatataggttccgctgaacagccgctgggcgaaaaatttcaaatgggtaatgaagcggtaatagtgaagcgattcttcgtcaaattcgatatgaaagtgatacttgacgatgcttaaaatctcctgcatgactttcgtaatattgacgatgttcggcatttcttcattcagctcggcgtttacgatatggagcgcgataaaggcggcttcatcctccggaagagctgtccccgtcttcttttcaatgatggccagcgcctctttgccgatggcgaactcatctttatacagccgtttcgtctcccaaagcagggcatttttaatatccagtccctttttatgccgttcgacggcgaaatgaatatggtcggtcagcgagacataaatgctgtcattcagctttttgccgagctttaatttcgcataggagataatttcttcagacatttccataaattcaattggaatttcgtccaacagcgtcttaaacctttctgatacatctttattatcaagcctgaaaatcttctcgattctcgattcatccaccgcttcgccaggctttttttgaaaagcgattcccctgcccatgaccactaattcctgaccctgttcatttaaaacactgatcacattgttgttgatcactttggcaattttcacatcgcgccactcccatcttttaaggggtatttttttatacttcttttttcaaatggtacacattgattgtacaacctttttggcctaggtcaatatatttcagtcaacgtccgaaatgtttgcattttacagaatgcccgcctgtacccgggtttataaaaaaagagccgcaaggcggccctgtaaaaaaccttcttaaaaagtgagcaaaatccccgctgcgactgatgccagacccgcaaaatatacgaagtcttttccggaaagccccgctgtttgatagtaggtgcggtcttttgtaccggtaaaccctctcgcttccatggcaacggcgattctttccgatttgcggatgccttgcgaaaacaacggcagcgcatagcgaataaacgccttccagctgtttttttgcttatagcccctgattttgtgcgccgccttcatttgcgaaagctccgactgaaaaagcgggacaaaacggaagccggccagcaagccataagcccatttaggcgacaatctgcattgatgaatcaggctcataataaactgcgtcaaatcggttgttgacgtaaacaagagaccgtatgtgacaaagccgagcatccgcagcgcgattgtcagcccattgccgacgctttcctcggtaacgcggaaccaggcccattcccaaatcgtttcctcgcctttcccaaaagcggccatcatccaaaatacgagaataaaaaaaataagataaggcagcagccgtttacttaaataagacaaagtccatcccccgaaaaaaatcccgatgacaaccgcaaacagccaaatgaaaaaagtcggtttcggatttgaaacaaacatgagaatgcacatgaccaggaggtgggaaaagagcttggcgctcgggttcaatgccgaaagaagtgaaccattgcttttcatacgggaaccctctcctttctttcgtgcatgaaccggtagtgaagcggcggtatcaatgaaaagcggcggaccaggtcttggtcagagaacaattgatacggcgttccttgatatgccgctttcccttgatgaaatacgatgacccggtcggagtgctcgtctacgatgtccatgtcatgcgtcaccatcacaatcgtcgttccccgttcctgccgctcctttaagcgcttgatcaattcttttgccgtcttttcgtcctgaccgaatgtcggctcgtcaagcagcagcaaatcctggtcaaacaaaagcatcgtcgcaacgcttaaacgccgtttctgcccaaggcttaatgtaaagggatgcgctttttgatgaccatcaagtccgaattcctgcagcaattcagccgttttcctttcgacctgctcctccggccagctccgctgtctcgctccgaacgcgatctcgtcaaacaccgtgtcccgaataaattgaagctcggggttttgaaagacaaagccggccttctcgtaaagcgtacgatcggaccatttcttcagctcccggccctccagataaatgcgcccttttttgaccgcttcaagcctgatcagactttttaaaaacgtactctttccgctgccgttcccgccgatgacggaaatccattcccctcttggaatctccaggttgatgccgtcggcaacgatctttttccgatagccgatcgccgcgtcctctgtgcggatcaatatgtccctgtctgctgacggcctgtttttcgcttcctcctctttcattttcaatgtagaagagagcttgacggcgagcggatgatcatcttgtgtggtaacatcttcccatactgcggggtacagtttggactgccagatgcctgccgctttcatttccggctgaaaatgtttgacgatttcttccggctttccatcagcgatgatctgtcccttttcattgaaaaggatgactcggtccatccactcgatacagccgtccagcacgtgttcgacgaacaccatcgtctgtccgctttttcgggaaacgtcgcggagcaaggcaaagatgtcttgccggctggccgggtccagctgcgccgtcggctcatcaaaaaacagcacttcaggctccaaagcgagcaggcacgctaatgccagcctctgcttcataccgcctgacaaggtttcgatcggcgttttcttatctatctttaaaccgaccagctccatcagctccgagatgatgcggtccatatcttttggcggaacggatcgattttcaaggctaaacgcgatttcctcatcaacatgaagcatgcaaaactgcgaatccggatcctgaaacataacgccggcgctctttctgcggttgacctcgcctctgacttcagcttcgatatgttcaggaatgatgccggaaagcacggacaacagcgtcgattttccgcttccgctcggcccgagtatcagcactttttctccctgctcaatcgacagcgagacccggtccaagactgtttcaggacgatgataaaaacggacggaaaggttactgcatccgagaaatgaacgcatcggcatcatccttcttccggtgttctttcatgatctcatactggttcaggactcccgttttcgcaagcgcttcgacaacggcttttgccagccagccgccgagtacaatgccgctgatgatttggatgataagcgtcaatatcagcgtttgcgtcgtatagtaggcaaaaccgtttgccatcaggctgtatgtcgcgctccccaccgcggctagcgcaccggaaagcataagggtaaacaagttatagcgcttatagcgaaagatcgcaaacgcgatttccgcaccggctccctggaacacaccgattaataatgctgaaagcccaaaatggcttccggtcagcagttcgaccgccgcagctgccgtctcggcaatcagcgccgcacccggtttacggatgatataagcgacaatcgggctggcgatcacccatatgccgaacataaagttcgctccgacgggcccgacgatagctgaaacagggatccacaaggtagaccaccctaaataaatgacgccgcatgccacagacaagatgactgtcatgacgacttctttcatgttccaattcatcgtctcaccgcccccatttccacaggccaatcttcaaccgtataagccatctcccaaaagccgtattcaagctgacagctttgcaaaaagagctccttcattttttctttttcagccttgcccgctgtttcggcccattcatccaggcgggcgcaaaactttgtcgtgattgaatccgttctgtttccgtaaaaacagatccagtcataaaatggatgcgatggatcaggctgaacgtccttcatcagtttttttccgatctcccaatatgtccatggacaaggcagcaagacggctaatatctctcccagcgtaccttcgtgcgccgccgtcagcatatggcggacataatgatgggcggaaggcgcaagcggatagccctgcagagtttcgtactccaccccagcggcccggcacaggtttttgtgcgggtgcacttcgctgtctagcacaaatgaaatctgctcatgaaacatttccatatcttttcgattttgacacttggaaatcgcaattccgtagatttgaataaaggcattcaaatactcgtaatcttgctttacataatgaataagctgctccttttccagcctcccggacgccagccccagtacaaacggatgctcaaaaatggcttcaaaaatagggtctgcctcgcggcgaagttctgcggaaaaactcatgtagatagcctccttagcaatcggttttataggaaggcacaggggggcaagcggctttatacgcaaaaaagccgccccaaaatggagcggccttagtatgatgaaatcattaagacaccggctccacttccctacgctagtatgaactagatcaggttcaaagggtccaagatcgcttcttgtctcagccggcttacggctcccctagtggacttcctattacattaacttttactctacacatcaatggttatgatgtcaacctgagtttttcagttttattcttgtatagaaccgccgggtttcatacagaaagtcggcaatcggaaatatttatagaaaaatataaattttctgaaaccttttccgggcttgttcgtcttatatagtgaagacaaaaaatttggaggggatatttatgatgatgtttatcttgattttgacaatggccgtgtatttgttctattctttcagcaaagacaaccggccggccaaaacaaacaacaggaatcatcagacactgactgttattagggaaaactcttttaccgccccttccaatgatgtcaattgctaacttgatagacaacaagcaagccgcccaatgacgggcggctttttcacgtttttatgattgaaactgttccgcttcagtcgatcccttcagtgcagtggttgatgaagtcccgcctgtcacaacctgggcgacttcatcaaagtagctcgttccgacttcgcgctgatgccttgtcgccgtatagccgtggacttcgctggcaaactcggcctgctgcagatcagagtacgccgccattccgcggtgcttatattggcgggccaattcaaacatgccgtgatttaaggcgtggaagcctgccagtgtgacaaattgaaatttatagcccatttcactgagctgtttctggaagttcaagatcgtgttgtcatccagtttggccttccagttgaacgaaggggaacagttgtaggcgagcagtttgcccgggaatttttcatggatcgcctgtgcaaaccggcgggcttcttcaatattcggctcagacgtttcacaccagatcaaatcggcatacggcgcatacgccaaacctctggcaatcgcctgatcaaggccaggctttgttttgaagaacccttccgctgttcgctctcccgtcaaaaacggtgcatcatatgaatcgacgtcgcttgtgatcaggtctgccgcattcgcgtccgtgcgggcaataagaatggtcgggactcccatcacgtctgcggcgaggcgcgcggcaatcaaattacgtaccgccgtttgcgtcggaagcagcacttttccgcccaaatgcccgcactttttctcagacgacagctggtcttcaaagtgaactcccgcggcgccggcttcaatcatacttttcatcagctcgaacacattcagctgcccgccgaagcccgcttcagcgtcggccacaatcggagcaaaccaatcgatgtcttcctttccttccatatggtggatttgatcggcgcgctgcagcgtgcggttgattttcttgacgacttccggcacgctgtttgccggataaaggctttggtcgggatacatgctccctgacatattggcatcggcagccacctgccagccgcttaaataaatcgctttcaatccggcctttacttgctgcatggcttggtttccggtcaaagcgcccagcgccgggacgaaatcctctgtatggagaagcttccacagcttttcggcgccgcgccttgcaatcgtgtattcaatctcgagcgtgcccctcagccgaatgacgtcagccgcctcatacggccttgtgatccctttccagcgttcttcatgctcccagctttctgcgagttgtttttctttcagcatcgcacattcccccatcacattttttcataagcgggtatcgttagaaactccgcgaattcatcatccaaaatcagctgttcaaataactgtccggcctcttcgaaccggccgttccgaaaacgttccatgccggctgcttcgaagattttctgcatttcttcctctttcatcatcttgaccattccggcggtcactttccggccatcgtcaagaacccctttcggatggcgaatccattgccaaagctgggctctggatatctccgcggttgcagcgtcctccattaagtggtcgatcggagcggcgcctctgcccgacagccatgaagctaaatagcggatgccggcgctgatattggtacggacgcctgcttctgtaattctgcctttcggtacttccagcaagtctttttcctcgacctttacgtctttccgctttctatgaatctggttcgccgacggcatatgctgattgaatacatcgagcgccgtttgaatcatgccgggatgcgcgatccatgttccgtcatggccgtcttttacttcacgttccttatcttcgcggattttggcaaatgcggcttcattgatctcaggtttgtctttagcgggaatttgcgccgccattcccccaatcgcatggacgttgcgtttatgacacgtttgaatcgccaagagggagtaggctctcatgttgggaactgtcatcgtcacggctgagcgatctggaagaatgacttcatccctgttcctgaatttcttaataaagctgaaaatataatcccacctgccgcagttaagcccggctgaatgttccttcaattcgtagaggatttcatccatttcaaaggccgccaggatcgtttcaacgagaaccgtcgctttaatcgtgccctgcggaatgcgcaagtcgttttgcgcataaacaaatacgtcgttccacagccttgcttccaggtggttttcgatttttggaaggtagaaataagggccgcttccttttttgatcagctcttttgcgttatggaaaaaataaagaccaaaatcgaacaggcttgctgacacgggcctgccgccgatcagcacatgcttttcttccaagtgccatcccctcggcctgaccatgataacggcggggttctctttcagctcatagcgtttgccctgttcattcgtaaaagaaatcgtcccgcggaccgcatcccgcaaattaacctggccttcaatgcagtttttccacgtcggcgagttcgcatcttcaaagtcggccataaagactttcgctcctgaatttaaagcgttgatgaccatttttctgtcgaccgggccggtgatttcaaccctgcggtcctccaaatcccgggggagcggcgcgactgtccagtccgcctcgcggatgtgcttcgtttccgccaaaaaacaagggttcttcccttgatcaatttcagcctgcctgatcgtccgcaaatgcagcaattcccgtcttcttcccccgaaatggcgttcaagacgtccgataaactccatcgcttcttttgtcaaaatctcttcataatgcggatttatcgatccggttatatgaattctcttctcctctgttttcatgtctccctacccctttacatgctttgttataaaacagtttgcctactcgccttttttggcaagacagcgctcgcattccatgaagtaagattcagcctgctcctccatcttttcgccgcattcagggcacgtttttttcggaagcgttctgaaaaattccatcggacttttcaagctcatttgtataacctccttttttatagaacagttttatgttttatatttctgttgtagtacagtatacagcgcaaaaatgaaaatgtacacacctttttccaaaaaatatttatttttttccattcaaacaaaaatagattgttctctttttattcatagcttgttcatatttttcttctagaatagggaacataaagaggtgaaagtgatgatgaaaataaaaaacaaacaacttgatgtcattctggttctaattttgttggcagctcttattctgaatacatataacatttggctggacgatgccgccaaccagtattacttggcagcagtcaaaagcatgacgcaaagcttccacaatttcttcttcgcgtcattcgactcttccggattcgtatcagtagataaaccgcctgtcgttttatggattcagactatatttgcgaaaatcttcggcgtgcatacgtggagtgtgattttgccgcaggcgcttgcaggggcgggttccatctatctgctttacgcactgataaagccgaaattcggaaaaggcgccgcccgcatttcagcgctggtgatggcgctgacgccgatcgcggtcgccgtaagccgaacgaataatatcgacagcatgctcgtcttcacgctcctacttggtacatggtgcctgatgaaggcggtcaaacaaggcaggctgatctggcttctcgctgcattcggtctcatcggcctcggattcaatatgaagatgtttcaggcattcatggtgcttcccgcgttcttgctgttttatctcattgcggcccatgcgaattggaagaaaaaaatcgtttcagcggttttatcgcttattgtcctcaccggcatttcgctttcttgggcgcttgcggtcgactatacatcagccgacagccgcccgtatgtcggaagcagccaaaccaactctgtgcttgaactggctttcggctacaacggcactgagcggcttctcggccagacgacgggcaacgcccgcggccatatgaacggctttggaggagacatgcagcagccgaacggcaatgcgcaagctcagaacggaaaccgttcgtccggcggctccaatggacaaaacggcgcgatgcagccgctgggtgcgggcggtacggcagacggcagttctcaaggggcaaacggcggcagccagcagccagccggaggcggaccgggcggaggcaacggcggtcccggaggcaatggcggcccgggcggaggtcaaggcggcggacaaagcatgaacatgttcggcaccggtgacgcaggaccgctgaggctcttccaatcggctttatcgggccaaatcagctggatgctcccatttgcattattaggactgctcggcacgatcatcacctggtttcgcggccgccgcgaaaaagcaggcgaaatgaaagaaacgatcttttggtctgcatggctcgttcctgtcgccgggttcttcagcatcgccggattcttccaccactactacttgattatgatggcgccgccgatcgccgctctgtcaggaatcggatggtacgcgatgtacggcctttacaacaatcataaagactgggcaagctatctgctgccggcagccgttctcacgacagcagcattccaagtgtacattttaagcgcttatacaaaccaaatcggcagcgcttggatgtatgtcatgggaatcctggggctgggtgtcaccatcgccttactgatgctgaagcgacgccatccattcggaaagcagctcaccatcatcagcttgtgcgtgcttcttttgacaccggtctattggtcggcaacaccgatcctttacggagggaacagagttcttcctgaatcagggcctcagctgcaaagctccaacggaggcggaatgttcagctcggacgtggacacaggactgctcacatacctccgggaaaataataccggcgaagagtaccttttcgcgacattgacaacggtaaccgcagccacgtatatcatcaatgccgacgaaaatgtcatggcgctcggaggcttcaacggcacagacccgatcctgtcggtcagtgaactgaaaaacctcatcaaaaaaggaagagtaaaatacttcctgattagtgaaaactcaggcaacagcgagctcgtctcctggatcaaagaaaacggaaccgaaatttcgtctgaccaatacagcagtacagacagcttcgcacagcagggtgcaagaggcggcccaggcgtcggacagcggcaaacgctctacaaggttgagctgtagaaaatgaggaagcccatcggatgagtccgatgggcttttgattatgcttttctgaaaataaccggcggatgatgttcaatatggtaaaggagtttttctccatatagggtcatcgttttccttcaagcgacgcgagattccacatgactcagctacagcgccgacttgatcactttcttgccgtaaagaacggaaagcaagccgaaaatagagtacaggacggtgtacagcaccatcacgatgatcatcggcgtccacagctctgccccgaataggaaccagccggactggacggcgaagtagctgtgagacaggccgataactaatggaatgccgaagttgtagatttgtttgattcgtatccccttcaacagatcgttccgtgtgaaaccgagttttctcaaaatcgtgtaattcggtttctcatcttcgctttcgtccatttgtttaaaatataggatgcatcctgaagtgatcagaaacgttagtcctaaaaagcctacaataaacatggcaaggccgaaaagcgatttttgagctgtgcttgcatcaaggagcgataaatgctgatcgttttgattcactgttgcaaacagctcatttgcctgctgaagctgatcttcatgttttaaattgattccgtaaaaaaggctcggcttctgctgcagctttggatctttgtcttggctaagacgtttaaacagcgcatcatctacaacggcaacaggcaatccgccgctggtaaagttgaaggataaaagggactcttttttcaagcctaaatagtttaatgggattgtctcatgcctgctctttaccttaacggcaccggtctcttttaaagccataagtttctggagaaggtcgttatatcctgagaaaatgacgtctcctttgtgcacgtccatcccggcaatctctgcatcgctgaccacggcgaggggcaatttccccgggtctccagccatattttcaggatctccatcgacaattttttccagattaaaaaccgcttgaatgacatgaatttcctttttgttgtaagaaatgttattttcgcccaaaagttgttcaaaacgctttgcatccttttgatttgtcatggcgaaatcagccgccacattttgttcggcggttttctctgcagaatagtacgaaatatagctcaaggataacaatccgatcgccagcgccgaaacggtggtaatgattgttaataatagggcgtttgatttcatccggaacatgatcgatgaaagggacagcacttcataaatattcaagtagcctcctttgcttttgcggatgatgttggagacaaagctgaccgatcctttatagaagaggtacgttccgatgatgacggttccgagaataaagctcatcgcataaaacagctcatctacggtcttgaattttccgctgaaaagctcagtggatacatagtatccggataaaataaacaagatgcccaataagccgatgatcatttggaaaacggatattctctttaccttatcctccgtagctgatgtcactttaaataaagataaaatgctctgctttttgataaacgcataattcatcaccattacgagaaggtagatgccgcagaatacaatgacggtttgcacaagcgcttcgacggaaaaattcaatttggcttcggcttgaacatctacaattttaaacaaaatcatgagcacgagctttgagatcgaaaacccggcaaacaccccaatgaccaaagagccgaaatacagcatgacattttccaagcttaagatgcggaagattttttgcttcctcatgccgattaattggaataaaccgatttctttgcttcgtcttttgataaatatcgtattggcatacaaaacaaacaccgctactattgccacaaggagaatggaagctgccttcaaagccgctgcgccttttatcgatgccttcacttcattgatcgccggatcatactggagcgtaacaaacgcaaaataaagcgctgcgctgaagatcaacgcaaacacataaaggtaatagttccgtatattttttttcaggttgcggatgatcagctgattaatgctcatgctgaaccccgcctaacacgccttgcgtcttcatgatgtcctggaagaacatctgcctgtcctgtccgcctttattcagctgcgtataaatttgtccgtctttaatgaaaaccactctgctgcagaagctcgcggcgacgggatcatgggtaaccataacgattgtggcccggcgcttttgatttaattggctcagcttgtttaacaagtctgatgcggatttcgaatcaagcgcaccggtcggttcgtcagcgaaaataatgctcggctcatgaataaacgccctggctgctgatgtgcgctgtttttgccccccggaaatttcattcggatatttatccttcagctcgaagatgcctaattctttcgcgacttcctcaaacttttgaccggcttctttttttgatattttcgtaatcgacagcggcagaaggatattttctttcactgtcagcgtatcgagcaaattgtattcttggaagataaatcctaaatgctgcttcctgaactcggcaagctgtttttccttcatattcgtcatctcagcttggttgatgttaatcgttccgccgctcacctggtcaatagaggacagaacattgagcaatgttgttttgcctgaaccagacgggcccataatactgacaaattcccccttttgaatctgaaggtcgattccctttaacacttcgtgtttattgtgcttatttccatagctttttcgtatttttttcgcttctaaaatcatcattttaaaatctcctttttactggatatttttattatagaaaggaaggcagccgttttccttcgattaagcgaacaaaaaagaaaagcgtgtgacatttttgtcacacgcccagcacacgggaaaattcattccgcattggaaaaatcagcgtaaaggttgtacccgttcccggtttagaatcaacctcgatatgaatcaggagcggctttgccgctttttttgccaagtacagccccattcccgtggcggcctgatcatgatgctccgttgttgatgtaaagcctttgtcaaacacgcgcggcatatcttttggatcgatgccccgtccaaagtcttgaacagcgagatgcactttgccatcctgctcatagcttttaatcaaaacatcggatgcttcgctgtatttcaccgcgtttgtcagcagctgcctaatgataaaagacagccacttcgcatcgctgagcacttcccccgcctccagctgtatatcaaacccgatcccttttggaatgcaccatgattgcaaatcttttatttctttaaagatcataggtttaagctctaggacttcaagggacaagtcattttcgataaatgacatccgcttttgatggagctggcggtcgagcagcaggtggatgcgcagccattcgtacgcaagcctcgcttttaaagattgatcctcaatcgtctccatgatcaaatgcatggcggtaagcggcgttttgacttcatgtatccaggccatgagctcatctttttcattctccaatgccaggcgatgctgtgccgcctcttgctttaactgtttcgtttgttcggctatgcttttttcaatcatcgtttcaaaaggggtttccgcctctcgaatgtttgtcacatcgagattgtggtcccattcttcaagacttttataaaacttcgtttccttccgaaagcggacaattacaaaaacgataaaaataaacgaggacaaataggtcatatacaaaatcgacgtaaaaggaatggatgcatcgacataagcgataaacagaaagaggatctgctgcaaaacaaatatggcgatccagcttcgcctctcggtcaaaaacgctttcagcattctcatcatccttcttctttcgccatatagccctggccgaccttcgtctcgatatattgccccaagttcaaggcatcgagtttttttcttaagcggtttacgttgactgtcagcgtgttatcgctgacaaagcgttcatcgttccataggcttctcatcaattcttccctgctgacaattttgtttttttggtcgatcaattgttttaaaatgaacatttcattccttgtcagttcgatcgcccccgccttattgctgacgcggttttgttcgggatcaacggttgcaccgcaccacgtttttttaagaatctcaggctctgtattatagtcgtagacgcgacggaaaatcgcctggatcttggcaatcagcacgtcaaaatgaaacggcttctgaatataatcatccgctccgaactgcatggacatgaccatatcagcaggatgatcgcgcgaagataaaaagagaatcggaacgttggaacgggagcggatctgccggcaccaatgaaacccgtcatatttaggcagctgaatatcgatgatgacgcagtctggcttaatcgccgcaaactcctgcatcacttcgctgaaatcgttgatgccgtatacctcgtatgaccacccggttaaccgctcttttatttcttgaaacagcgattcatcatcttctatcaacagcagtttaaacatttgcctcaccgcgcttttttctattttctaaatcaagtgtatagcaaattgttttcacgcgctacagagaaaaaaaagggccgtcctgtaaaggacagccattctgtatatcacaaactctcgccattcgtttcgattactttcttataccagtaaaagcttttctttctcgttcttgaaagcgtgccttttccttcattgtcacgatcgacgtaaatatagccatagcgctttttcatttcggcggtggatgcgctgaccaggtcgatcgggccccatgatgtgtagccgattaagtcgacgccgtctgcaatggcttctcttacttcttttaaatgatcgcgcaaatagttgattctgtagtcatcctggatggagccgtcttcttcgacgacatcgacggcgccgagcccgttttcaacaatgaaaagcggcttttgatagcggtcgtacaatgtattcagcgtaatgcggatccctttaggatcgatctgccagccccattcggacgattcaaggtacggatttttgacgccgccgagcaggttgccttccgtttttgccaagtcttccggactcgtgcttgcgaccattgacatgtagtagctgaaaccgatatagtcgacggtgttttcctttaagatgtcttcatcaccttcagccatttcaatcgtaattccgttttccttaaagaagcgcttcatatagcccggataagccccgcgcgcctgtacatccgagaaaaacagcgttcttctctcattctccatcgcagcgagcacgtcttccggctttggcgtcatcgggtatgtcgtcgttgcggcgatcatgcagccgattttagcgtccggaatgatgtcgtgccccgctttaacggcaagagcgcttgcgacaaatagatgatgcgccgcttggtacatcgcatttaacttgttttcgccttcttcaaacacaaggcctccgcctgtaaacggcgcatgcagaaccatgttgatttcattgaatgtcatccagtattttactttttctttatagcgggtgaaaaccgttttcgcataatgctcatagcaatcgatcactttccggtttttccagccgccgtattttttaatcagaccgagcggcatttcgtagtgggaaatcgtcaccactggctcaatattgtattttaatagctcgtcaaagaggcgatcataaaattcgagtccctcttcattcggttcagtttcatcgccgttaggaaaaatccgcgtccaggcaatcgatgtccggaatgctttaaatcccatttcggcgaaaagagcgatatcttctttgtagcggtggtaaaaatcgatgccttcatgatacaggttcaatgactccatcgactcatcgaatggatacatgacgccgttcggcgacacatcggctgtcgagagtcctttcccgccgacattataggcgccttccacttggtttgcggcaaccgctccgccccataaaaaaccttcaggaaactttttcgtttgttcagtcatatcatttcacctcatccaaatttgtcaggctttcctctttctacgccagcgcgatcagcgcttcctcaatgtcaacgctttcatctgatttcaaaggtttgatcgactggtaccggtccgtatttgtgatgataaccggcgtgatcaactgatagcctgcatccttaatcgcatccatatcaaatgagacaagctcgtctcccggttttacagcgtcgcctttattgacatgcacggtaaagtgctcgccgttcaatttcaccgtgtcgattccgatatggataataatttccgccccattgtcgcttgtaatgccgagggcgtgcttcgtttgaaaaacggttgtgatcgtgcctgataccggcgacaccactttgccttcttcaggctcaatggcgacgccttttcccatgacttctccagaaaatgtcgcatcatccacttcactcaatgctttgacttcgcctttcagcgggctttgaatgatctctcccgcgcccgcttcagatggagcggctccttgttcagcggcttcatctgaaggaatgtcttcaaaccccaatacaaaagcaaacgccgttgcggcaaagaacgcgatgacgataccgatcattgcctgtataaaagtcgggccgataaacgtcgtaattcccggcaaaccgacgtttccgccaataatatatgctgctacgccggtgatgccgtaaaatgctcctccgacagcggcgccgagaagcgcggatacaaacggctttttcagcctcatgttgacaccgtacatcgccggctctgtaatccccatcaaagccgtgatgcttgtcgtcagcgacaatgatttgaatttcttatttctggatcgcaggaagacggcaaatgacgcgccagcctgccccatattcgccaagaacatcgcaggtatcaagtaatcgtagccgttttgcgtaatgttgttgaacataaccggaatgaaagcatagtgcattcctgtcatgacgatcagcgagaacgttcctgctaaaaggatcatcgtgattaaaccggcattttcaaataaaccgttcacaccgattgacagatagttccctgcaatcgcaccgagcggaccgaccgtaattaatgtgacaggcacgacaaccagcagcgtcagcgtcggtacaaaaatcatcttcaacgaagtcggggtgactttgtcaatccatttctcaacgtaagatgcaatccaaatcgcgagcaggatcggaatgacggtcgacgaataagtggcagcggttacaggcaatccgacaaaggaaatgcttttccctgaaccgagaagcgctgtcagatcgggatgcagaatcgccgctccgatcgccgccgcaacataaggattactgccgaattttctcgcggcactgaccgccagcaaaatcggcaggaagtaaaatgctccgtcgccgatggcggataaaatggtgtggacctggctagtttcgctcatccagccgaacgtgacggcgattgcaatgatccccttgatcatacccgctccggcgatcgccgggagaatcggcgtaaatacgcctgatatcacatcaaaaatggcggacagcacgtttttctttttgctagcttgctgctcgcccgctttttcatcgctgagcccgctgttggcaatgatcgctttatacaccttagggacatcatttccaatgatgatttgaaactgctggccgctgatgttggtgcccattacagccggaagactttccagtttcgcgcggtctgccttcgcattgtcataaagattgaaacgcagtcttgtcatgcagtgaatcacgctctgtacgttctcttcaccgcccacgagttgtaaaatgtccttcgatactttattataatccatatgagtacctcctctttgggggaatctgccggactgaaggtggccgccttcacccggctttttttattggcctgctgccgaaagaatcctcgaaatctcacatcacctccttattttgggtataaaaaaaacctaaattacgccggcttaaacgggacaatgccccagaaagctgtacgcaacttaggttttgcctgcaaaagcagtaacaatccttaagaaacttgctgatattagtttgtaactatactttagcacccgtttttgttcatgtcaacgctttcattacaaatgtctcataaaaaatagaatacatgaaaactaaaaactaagactttataccttcatttcttcgttttctagctttcgccgcctttttcataagcaatgcagggtttcgccttgctttccttcgcgccgccggctctacaactgcttctttcggttcctgctgcttatgaagaatgaatccggcagccataaacggaatccctgataagttcgtgaaaatgtttttaatgcccatcgctaaaataaaagatccccatggagaaaacggatcttttttgatttttacgtaagcggcgatttccaaggcaataaaaatgatcgactgtgctaatatcactatcagcaagcccaaaatgaacaagaggcccaaattaaataatgtgcctgagtagagcatcaatttcagcgcagctacgaaagttccagcctccatatatccgtccgtgacatttggattccaaacagcataagcgtcaagctgatgtttgaaatgaaaaaacaaaaataaaatgaacaaccaatatatgctatgtaaactgatgcctaataaaatgagtctgtctgctgctttgttttgcaatgttgctccttctttcgtttatgattgaagagaatgaaccgtctcttcctgctttggctgaaacgcctttaattcgttgctgtccagatcttcctgtaataagcaaaccttttgaatctgcctgttttgataatggtgaaaatagtagctgcacgtctcgctgcacattaccgccgtatattgggtgtaatcgtcttcgccttgatcagtcataacaacccctttaggaatattcatattggagaggacatgaaacgcggcagagacgccttctgtttcatcggacacaggcttcatgtgctctttcaaaaatgcagccctgacaaagcgggatggcggcgtaaaatctcctggcaatccggacagcccggaaccttgaccaaaagccgacagcgtcaggcctcccatttttttcgcggcaaactgtcccggctgaagaccgataaagttgcgcaaattggtcaaatgccaagggaaatccggactgttcgtcagcacgccgaccggattatcatgaatttgaatgccgtctgccgtcggttcaacaacgacgcttgccccggagcggtccgttaatagccaatgcagcggcgtcaccgtactcagcaagctgacctctctctcaacaatgtttaaggaaacagccgcttttttcacatcctccaaatcgccgcattccgacagcacccatgtcacgaattcgtgcggcgcaagattgcggctttgctcttttgcctcgttttcatacacagcatagcccgggaaataaagcgccgcgcaagacaatcctttttcattcacaccatcggcaaacagagcattcttgagccttctgcccatcccgataaacgcataccggccggcatgctcgctgccgtccgcttcacttttccatttgtagcgacgcggatgcaacagcacctccccgttaagctcaaaatcaaaatccatcgtcctcgccaataaatgctcccggcccgcagtcgtcaacgtgatacttgtacacattgcgcttcatcctttttgtttgatattacacttcgtgaactatttttatgttatcgaattggaaaagattcgtcaaaatgaaaggggttatagaaaaaagccgggttttcatcccggcacataaattcattcaacaatttttcttttttctttaaatttagtataatcatcaactatactttttaaaagtcgatctatagctgtaaataccgtaaggattaagaacatgatatagtcattagcagaatcagcaacctctaaccctattacaattttaaaatcggaaaaactttttgaaatggttataatcaacaataacaggtacccaataatccttctaatattttgttcttccgtattgaaagttgaaaagtaaatccaacttgctaacgttagaggtagggtcaataaaaataaataaaaaatactataaggtatactgttaacttcggttaaaaaagttaaaattaaaattaaaaataaacaatgaaaatacagactcattcctgtttttccaaaaaacacttttaatctatcaaaaatataactatttctattcactttagagatagtattttcaattaaactctcgtattctttttgattttttttctaattcttttttaatatttaaattaaaatcccctataaagatagtacaaaaaagaaagaaagctagtaatccaaaaaataaaaaattgagaagagagttgcttggtgataaaacacaaaataaacttacggcaataaagataatcattaataaaataaaaaagtactcactagctctcaatgtctttttataaattaataaggtatttttttgttcaacaaactttctaaactttttaaagctctccttactcatgtatttgatagaaggaaatataaatttatcaagaacaaagttagatccaaactttactatacatgcaataataattaataaaataagactcatttcatctacctcgtatcaaaattaaaggtgtataccttctacaggttggagacccttagtctttttaaaatccaaactagtttcaaagagttgaagagtatcaattggtttaatgtaattaatatttaaagccatgaactgctcttttttaaatttaacgccaaagatagtcattgttttctcatgtccatccactgtatcaattcttttttctaaaacattaatcgatacagtctcaacaggaattatttgaaagattacttttgctaaacctatagaaagactggcaataaagtttaattggttttgataatattttgttttggttagctttttagttaacaagttcccagcagaagagatgtattcttcttgattcggtaaaattgatgtgtccactaatagattcaataaaacttcactattttcattcgaaataatctcttttatttttcctatagtatcttcaatcttaataatatcttctaaaatttcactataagcaacactgtttttgtcatcaataattttcacaaatttttgttgctttgcccactcatcatattctttcttatatttagtttctgcatcagtaatttctttatttaacttttcaatttttgttttatctaatctaagaattctctcaaagaaattgggtttataattatttaaatcgctttttaattgagctacattaatctctggcggtgactcttttttaatttcttcccaatttatttgcctgctcgttaatctcgtatgaaatgaagttaaatgattgaggtaagcattaagctctaaattatttgaataattgttattattcaagtgactttgtttttgtgatgaagaaatagatttactggaactataagatagacctgtaccgggggtttttgcacttgttgttactttgccagaagtattataagttatcctgccatttttgccccctaaagtcatcccaacactttttttatttatattaagtttgacaccaggcattattttaaaactccttttaaaacccattttatcaacaccccttgttgatttttcttcatagaatctcacgaacaacttatgtagtaaaaaagaccatatatgtattatcgtataatccatcctgaatttccatattaaaacaaccatttgatctaaatcatttaaaaagcacatacctttaatcaggaatgtgcttttagagatgaaattccttttaaaattccgctctttttaaactactcccccaaaccgcatctccctcacgagacaacgcactaaacgtcatcaccttacgctcagaagccgcatccctctgacgcaaaaacacgccatcgtaggtttttccgtcgatcttgagttctattttgttatgccccgtgttcttccacgttccggctactgcgcctgttattttgccattttgattcaagcggatttctttcgattctttaatatctgcggagatgtctttgccgtgcctcaccaattcgtaatcgccaatcacatctgactttttcaccttttcaagcttctctccggcatagcggtgaggggcgacaaccggccagccttgtttgttcatcagcaattggtggacgcggacttcgtgctcctcgccccgtcccgggaagcgggtgtggaagattaaatatgatttaccgcttttttcatcgtaaaaggcagagttatggcccggcgacacatagccgtttttattgttaaatgagaaatttcccatcagtttgacgccgtatggttcgattgaacgatcgtcaaaaagcgttccttctttgccgcggacgtcaatcatcgcgtggccttctgcatcataataagggccgtcagggtttttggagcgggcgacgcgaatgttgtacccgccgtcagcggcaagccccccgaaggacatgtacaggtagtaatactgtgtttcaggatggtagagaatatatgcgccttcaatacggctgtggttgccgccgatcagctttttgccgtatccctgtcccggaagcggaaatccggttttcttgtccatttctaaaataaaaattccgccggaataggagccgtacaccatccacagctttccgttttgatcaaagaatgtgtggggatcgacgacatttgggtgctttgtcgcgtcataaggcgtcccgtcattgctgatcccatccattcccgacttcagaaaaatgcctttatttttgtatggaccttcaatgtcgtctgcgacagcaagcccgagggcggatctcggagaatccccgcggcaggcgttgtaatacatataaaacttgccgtcctcaagctgggtgacatcaggcgcccacaacgtatcagattcagcccattcaaaggtttcttttaattcttcatagacgttcggaatcagaggattgccgtcgtggacactcgaggaaatttgcgtccaattcatcaggtccgtcgatttggccgaagctaaatgggagccgaagacatagtacgtgccattcgctttaataatcgatggatcatgtaccgtcacttctgaaaaaacaggtttttgagtttgtgcagaggcttggtttggcgcgaaacatgcagcaatgatgaaaagcaatgcaaggacttggatgaaacactttctcatattcatttgttctcctctcttttaaaacgctttcattttttgacaatccatcatatgctgcttatccaaggtttattacgagcaaaaaagctcccgacaaaatcggcagcctaagattatttcctcgctttatgcactttcagcaatttccctttcactgtcgtgtttttcatcgcatctaagacgagcggacctttgccgtttaaaatttcaacgaatgaaccttgctcctggatcgtgataatcccgatatcctcggcggagacgccgtcaattttagcaatcgttccgacgaaatcaacggctctcagcttcttcttttttcccccgttaaagtagagcctcatgatttccttatttaacgattcgctcttgtcctttttgagatccggcttcgcattgattttctttagaaaagccgcttttgctcgtgcaatttcttcttttgacggcgcttcaataataggaatgggaaaaccgatatagtcttcaatgtcagcaatcatcctcttttcacgcgcactggcaagagtaatcgcttttccccggctgccggctcggcctgttcttccggtacgatgcacatagctttcttgatctaatggcagctcatagttgatgacatgtgtgatgttctcaatgtcgatgcctcttgccgccacatctgtcgcgattaaatagcggaacgctccccgtctgaaacggttcatcacggcaaaacgatcctcctgaggcatgccgccgtgaattttctcgcacggataacccaaaacggataggcgccgctgcaactcattcacttgctcctgtgtgcggcaaaagacgatgcagctgtccgggttttcaacaatgaacagatccactaaaagcgaaaatggatcattttcgtttacaatgatcagttgatgctcgatgactgcggttgtcgtaccgcctgctttaatctcgattttcaaagggtctttcatatattgaagggatagatgctccacatcctccggaaaagttgctgaaaacagcatcgtcagccgttcttcaggcaaatggcggatgattgctcccacttgatcgataaatcccatattcagcatttcatcggcctcatcgatgacaaggtatttcagtttttctaatggaagggttcctttttcaatgtgatccaatacgcggcccggcggcccgacaacgatatggcatttttgcttgagctccgttttttgccgttcaaaggatgacttcccgtaaacagccgctgcttttattcttttatagcggccgatgttcgtcaaatcctccttaacctgagcggcaagctcgcgcgtcggtgtcaaaaccaaggcttgtggtttgttctcttcccattcggtcagctcgcaaagcggaattccgaacgcggccgtcttcccgctccccgtccgcgatttcaccacaacatcccgctttttaagcaccgcgggaatcacttcgctctgcaccgcagtcggctccttatatcctaagtgatcgagcgctttcgtaatatcgccgcttaatgcatagtctctaaaactggctttgctcatgaatgaactccttttggtcatatgatttccagtggatgacggtgttatgaatgtgattatacgcgaatcatgactgatttcaaaaagacatgaaaaagaggctgcaatcagtgcaaccctaagaaacaccctacagtatcaattgttttcaaaaattaatccgatcatagtaagctcccacagcaaaacagcgatgaaaatgacgcccagtagacgctgtaatacaaaagggaggcgggctaaaacgatttggacttcgtaatttaaagaggaaaccagaatggctacatatcgaaaaaagtcggtgatcagcccatttgattcgtcatatacgttgacttcatatagcttaatgattaatgttggtacaaacaaagaaacaaatgcaaacaccatgttaattgttaaatatatgataagcgcagaattgggatacggtatatcccctgacatcgcaaatccaaaaaataaactaaaaatagaaaaaacaaatatacctattgggatattggtctttcttatagctcttgaaggagggcgcgcaattgtcttttttgtttgaaaaccatataccaatgcaagtaaaatgataaacagctcagcagtgcaaacaaacataaaaaacataacattggcgtttttttcccaataaggtttattcaacaacaatagagcagttaacaatattagaataacattgcttctcagccaaaagaatcggctttttttaaaagagaacataaatagaaatcctttctactataaatcataaaattcattcattgtatccactattttcccaaaatattcgtcgactgccactggtagaagatatagcgagccagtttttttaatattttcataatctaaatgccaaatgaaattatcacttcttaataaaaaagcaacttgatctaatcttgtttgattttgaatatagtcactttctacaaaagaaatattatcgagctcttggttgtttgctaaaaagtcaaaggaaaattgacttatagtcggatgcgttttcgggtcttccgccattcttttaataacgtcagcttcaacctcgtgaaactcatcaaatgaatcttcatccatttcaaaaatttcatgttctggttttttatctgtatatgaatgataaaatgttttcaacatttctaaaaacgactctctgcttcttaaaatcgaaaaactatgattttgattttcgatctcctgcacaatgagttcatctttttgaacatggtgtacaatcagcacccttttccgatggatacaacgaacttttcgatttgattgaatgagtaagtgaatcaggttttctaaccctttttgtaaattagattctgtgtcatcagcccaatatcctctttgttttaaaagattttcggcttgaattgaaaatggctcaatatctttttcatcttgaatcaactgctgatcattgataatatcttcagcagctttttcatacctacacaataaaaatgcggcaacgagttcatttgttgttaatataattttagagtctaacattatactcctccttattacctgaaccagctagtgacaaattcctttgcacctgagagtccgtctgaaattgtatctgtagtttcagaggccttttgacttaaccattcaccagcttccttacctttatcttctatccaacctgcagcatcttctccccattcttttacttgatctcccgcaattatggatccagttataccaataccagctccaattgctcctccaataagggtgccaggacctggacatactaatgaacccagtccagctccgctagcggtcaacgctccaactccagcatccattccaatccctgctgaaaatcggccaaatttttcgaaccaagatttatctttattatcatcactaaaaaactcagctccatttgtagtcaaggagaatattgttccagcataaggtatttttttggcgagttttgtaatactagcttcatccttaaacttcccaacagtccctttcacatcaaccttagtcttataactcttcagttcctctggcttatgctttaggaaactttggctctccaaaattttcttgtaggagatccttgttgtgttaggccccaatccaacaatctttctcaaaaggccgcttggtttattttgaaatttgccgagccatttttttattggtttgcttgagtttggatcgccttttttcaggatgttgtaaacaaactgagccaccttggaatcgtattttccgttagctccttgcgtccatttcggagaggctttcacacggaagtttccttttccgtctttttcaagctcaagcattttcgtcgccagtacattcacggctatgacgccttttgttacggccaacgcgccgtttcctgttccgattaaatcaagccattcagcgattctgcccatcattgtcggatcgtcttgtttttctgctaaatcaacggcttcgtcaatcatttgtttaacgacatctgtttcagaaaagtagttttcaacctctttaatcgtttttttagataagatcgcgcctccctttgaccaagtgttcaccttttcagtgagcttggatagctgagcgatcgaatttgacgattgttttaatatagaattagcatcgcgatcaagctcttttaaatcagacaccgtgttgttcacatgttttttggcttcggaaatatgctcattaaatgatgccaaagagatagatccgcccccaatcaagtggctgattttatcaaattcgtcattaatcgaatcaaccgtatcattcgtttgacgtttcagttctgttaagccctttttgacatcatgcgtcagaaattcttcttttacaaaaccttctgttgattcataagttctgattttcgctttaatatcttttaaattctgtatgtattgatcaataaagtgctgaaaatatagcagcacgggaagatgaagaaccgaaaagtgttctttgatcgcatttccgccttctccttttaatgcatcatcaagctctgcaattttttgtacactttcccttatggcattgatttctttttcctcttgctttttttccttaatcaattggtctatcgcgtcaatgacttcagagacatctaaaactttcaagagaaaaccagccctccttatttcattttttgagagatgtttttatcagtatcaatcaggactttaatgtttgaccatgcgtccttttcaactgaagatagcgcctccttgtatttttttaatagctgctcgtattccttttcgattttttttattttgttcactacatccattgaagaattagcgatatcggcttttgaacctgatatcgaaagtgcgctgatttttgtctgaaggtttgaaaacgccgttttgacttcttctgcttttacctttatttctgccattctttcacctcaatgattgacttgtttttttatatctgtaagctgttgtttttgtatacttagaaacatctccatattagaaatttgcatttcaagattttcaatctcttgctcaatatgcgaaatcagaccatctgtttctctctgtatgttttgatagctgtgtgcaatgtttgatctaatattgataaattgatttgtatgtctgccattccatatatgtgatgtaatatctggctgattgatgagagtggcattgtttgaaagggtgtgaagttcaccggtaatagctgtttttgcttttttcagttcagcgattttgctttgggtatcctttatattgtgagataaagaagaaatatctttttccaaagaagagattttagcagcatggttagacatatcgggttcacctcatttttcagaaaataaaaatccgcacgttactattcgcttattccactgtatttcggttaggtatattgttgctttacgggagaatctaacgttcttgtaaatcagacctttttcatattacaatatcatccaaaataggtaaataggataatggacttggttttcttggattttcttgaatcgatcaattcaagatacaaacgatgttatttaaaatagcgtcctggacttagttcaaatgaccttttctcaaattccgtgacatcaaaaaaacagcacacacccaaaggtatgtgctgttttgcatgttcctctattccgtaatcaccgtatgcacaagcttcggtgcttcggctgtttccgcgatttggatgttgtcgtagacttttgcgatgacgtcatcgacattttcgcggtttgcgtatagggtaaccaatggttcgcctttttcgactgcgtcgccgacttttttgcggagcatgatgccgacggcgaggtcgattttgtcttcttttgttgcgcggccggcgcccagcagcatggccgcaacgccgatttgatcggcgacgatttcagacacgacgcccgcttctttggcaggaacgtcgattttataggcagcctgaggcagcttttctgggttatccgcgacagagctgtcgccgccttgattctgcaggaagtctttgaatttttgcagcgcttttccgtttttcatcacgtcgatcagtttctctcttgcttcgtcaagggtctccgcttttttggcgagaacgaccatttggctgcccaatgttaagacaagctcagtcaagtcttcaggaccttcgccttttaatgtatcaatcgcctctttcacttcaagcgcatttccgatggcaaaccccagcggctgggacatgtcggagatgacggccatcgtttggcggccgacattgtttccgatgcggaccattgcttttgcaaggttgactgcatcttcatcggttttcataaatgcgccggcgcccgttttgacgtcaaggacaatcgcatccgcccctgcggcgattttcttgctcatgatcgagctggcaatcagcgggatcgaattgaccgtgcctgtcacatcgcgaagggcgtacagttttttgtcagcaggcgtcaagtttccgctttggccgataacggcgaccttgtcgcggttgacgagctcgatgaattcatctttggaaagttccacgtgaaaccctttgatcgcttcgagcttgtcaattgttccccctgtgtgtccgaggccgcgtcccgacattttggcgacgggtacgtcgagagccgcgacaagcggtgcaagtacgagcgtcgtcgtgtcgccgacgcctcctgttgagtgtttgtcgaccttgataccttcaatcgcggaaaggtcgatcgtttcgcctgagttgaccatcgccatcgtgagatcggcccgctctctgtccgtcatgtcctgaaaatagatggccatcgccagagcgctcgcttgatagtcaggaatgctgccgtcggtgtagcctttaatgaaaaattgaatttcttctgttgtcaattcttctccattttgtttttttgtgatgatatcaaccattctcattgtgatcaccagtccttttttcaatgtttatcaatagatcaatcctacaacggtcgctgtcaagaaactgacgagcgttgcgccgtacagcaatttcaacccgaagcgcgcgacgacgtttccttgtttctcattcagtcctttaaccgcaccggcgataataccgatcgatgagaaattggcaaatgagacgaggaagacggaaacaatcgcttcggtgcggccgctgaaatggaagctgccttgtgcgagagactgcatcgcgacaaattcatttgagaccattttggttgccatgatacttccagcattcaccgcttcatgccatggaatacccatcaggaaggcaaacggcgcaaaaataaatccgagcagttcctggaatgatatacctagtgcggcgctgaaaatgccgttaatcattgcgatgatcgcgacaaatccgatcagcatggcggccacgacgacggcgactttaaagccgtccataatatattcgcccagcatttcaaagaaggattgtttttcctcttcctgtacctctaccatatcatgttctcgatcgacttcataaggattgataatcgaagcgataataaatccgccgaataagttcaatacgagcgcggtgacaacgtattcgggcttcagcatcgtcatataggcgccgacgatagacatcgagacggtcgacatcgccgaagcgcacagcgtataaagtctgtgtttaggcagcaggccaagctgcttttttaacgaaatgaatacttcagattgccccagtatcgccgaagccacggcattgtatgactccagtttgcccatcccgttgattttgctgagcgcaagaccaatatattttataataaacggaaggattctccaatattgcagaataccgattaaagcagatataaaaacaatcggtagaagtacgctgatgaagaatgtggattcattcacattcaccagtccgccaaagacaaaattcacaccttctgccgcatattcaagcaaatagccgaagcccttggcaaaaccgccgacgagatagtttccgacacccgtgttcagcaatatatatcccaatgcgaattgcagcacgatcatgacgataaccgggcggtatttcactcttttctttccgctgctgaccagccatgcaagccctaagacgacaaataaaccaatgagcccgatgagatatttcatgttttgatcctcctggtgatgtattcgcttacatttttgtatctgcgcgcaggaagcttccgcttcccgccgcactggatcttagtagttatcttcattttttccttctgctccgctgacgatggaaacgcctgcgcttgcaccgatccgggtcgcgccgtttgagatcatggtttcaacgtcctcttttgtacgaatccctccggatgctttgacaccgatgtcaggtccgacggttttccgcatcagggcgatatcttccgctgtcgctccgccggttgagaacccggttgaggttttgacaaagtcggcaccggcagcaacagccaggcggcaggcgcgctctttttcttcgtctgtcaacagacacgtttcaatgatgactttaacaagcgctttaccttttgcggcttcaacgaccgcgcggatgtcggcctcgacaaagtcatcgtttccgtcttttaaagcggcgatgttgatgaccatgtccacctctgtcgcgccttttgcgatagcgtcttttgtttcaaacgcttttgtctctgtcgtgttggcgcccagcggaaaaccgatgaccgtgcaaacgtcgatttccgttcccttcagctcttcggcggcaaattcgacccatgtcgggttaacgcagactgaagcgaattggtatgctttcgcttcttctattaatttcttaatctcggatttttgtgtatgcggtttcaatgctgtatgatcaatgagatttgcaatcgtcatttactagcacttcctttgtataagatagtttcagcataaccgatttttgaacaaatgtaaattatcatatgaaattttgttcaatagaaaataaagtaaaatccaggctgttcttcctggacacttcagtcatcaagcagttctttcgccgtgtgctgatcaataatcagcacattggcatacttgcctttgagcgcaccatgaatagcggcttttttccggctgccgcccgctacgagaatcgaccgttctttttccctcaagtcagccaattcaatgccgatcgtccgcgaatcgatagcatcgctgcaaatgtttccttccgcatcaaaaaagcgcgaacaaatatcgccgactccacgttctttcaggagggctttttcctcttcatgaaaataccccagcctgaacagcaaggcttcatcgcgtaccgtgccgactgtaaataacgcaatgtttgcctgttttcccatttctatgatccccttgatgtgcctgtcctgttccaccatctgtttgacttccggattgtcaaacacgaccggaagcggcaaatacctcggcatcgtttgaaaagcttcggcaaacagctgaatcgtttcagacgaataagtgttgacgctggaatggctgattccgcctttcagttgaacgacctctgcgcccttcacctgtttaggctgcatattttgggcgatttggtacatcgtcgtcccccagctgacgccgacaatgtcgccgtccttgactgcgccgtgcatatattcggccccgaagcggctgagataatgcgtgatggtcgtataatccgcggtcggcgaaaagacaacatgcgcttctagaagcccgtatttttcctcaagcatcgcaccgagcgcatccatatcttcaaacgggtccataacgcggatttggacataccccttttccttggcgaactgcagcagccttgataccgtcggtcttgaaatctgcagctgttcggcgatttgctgctggctgtagtcagactgatagtagagcctcgctgcttcaatgctcaattgctgtttttccttgtccatcacgttcctcccctttagtaacgctttaacccatattatataggttcatgctccttctcatccagctgaattgcaaaatacggtccgtatgcagactcatgcgtcaccgcatatgtccatgtcatatgtttatccgttatatatgcatcttcttctcctttcagatctgcggctatcagttgttcagcatgttcaagaatataggcgtcatccgtgtgctggtagaataaaaagcaatcgcgcttcggctgttcgctaaaggcttgatcggcctgtccgccggtaaaacacggcttcatcccatagctgaataaatgccacaaaaaatggctcaccaagatcgcgtccctttccggaagctccatgcttgcggcaaaacggttttcccacgtttttctcaagtaagagccccacttcggtatttctgtcactttcacattttgtctttcaagcttgctgatgatgtacattcaggccctccgtttattttatttttccaagcgctagcacacccgctagttctcttctacatttccccttttaaaaatcaatacgaaaatcctgctattgatggaaaaacattttattattgggcttacgtcctgtttttggatagtccaaaaagatcaaataaatctagcaatctccattttttcatttataataaataagtcaaaatcattactcaaaaaaacattcggggtgatctatcgtgaaagcacccgtgaggtatatatggattggtatgatcctgtgctttttatccgtcagtctggccgtcggctgtatcaaagctgaagatcagtcagatgatgagaaaaatgatgaagcgcttcagcctgccgaacacttcgtttaccgtcatttaatgagcgatcaggggctgatcaaaaccggcttttccgaccagcctgtttacttgtcggaatcgcttggcttgtggatggagtttttgatcagcaaaaaagacggcgagcatttccatgagcaatatcagcacctgaacgaatccttccttatgaacaacaacctggtgtcatggcaaatccaaaacggtcaggcaagcggggtgaacgccctgatcgatgatctcagaatcatggtgagcctcgatcaagcggcagctctatggggaaacagcgagtataaacaaaccgctcggaacatcggtgccgcattaagaaaatacaacatgaacaacgggatattgacggacttttacgactccgcctctcaatccgcggcaaaagatatcacgctttcctatatcatgccagatgcgctatccatcttgaaaaagaatggagtgataaataaagaactcgaaagtcggaatgccagcattctttatcgcgcccctttgaaaaacggttttctcccaaaagcatacagtacagaaacgaaagcatacacctatgaccatgaagtcaatctcattgatcagctttacgcagcttggcatttacctccgaaggatcaaaaagccgctgtattagcggattggctcaaacagacgtttcaaaccggcggaaaactgtatggccggtattcgctcgatacaaaaaagccggcggtccaatacgagtctccatccgtttacgcgttggcgattttattcttcatcaaccaaaacgaagataaaaccgtcattaaagcgctgtatgatcgaatgaatgattttgaaattcttgattcgtccgagacgtattatgggggatatatgagcggaaatgatacgcattcttttgataatctgctgcccctattagccgaaaggaagcttttaaatgaaaatctcattcaatgaatcgcataaaatgttcgcttatatgacaggacttgcagcagcgcttgcgttgttcatccattatatctcagtccagcggttcgaacccgttctcatcatttgcatcacacttgccatcatcgcagcaggaatatgactcggatcgatttacgcactggctgggaccatcatcgtcctgtttgttctcggcactttgatgatgttttttcacacaggccaaggagaagctgcttcgtctgaaaccggactgcaaatgctcgtcatctggggagtggcgctgttgctgttttcctttatgtcagggagaatacacgacatcgcgatcggacttcaccgctccgtcaaacaccttcaagacgaaatcaaaagctttgttgcgattgacagggtgacaggctttgataataaacagaggatgaagctggagctgtcagaagaaatcaagcgggcggagcggtatggcaactcgtttgtttttttactgcttcatatgcattatttcaaagagttcaaatccctgtacggagaaaaagaaaccgatcgtctctttcaatttgtcagcagtcaaatcagatcatgtgtccgggaaaccgataaaaagttccggcctgccgaggagcggttcggcatcctgctgacacacacgcctgccgaacatatgcccgccgtccttgaaaaactgaagaaacagctggatacgtaccagctgaaaaacggcaagtatgtcaccttgaccttccacgtgtgccacttatcatatcagaacgatttaaagactgccgatcaatttttagaagaactagaaaacgagatgatgatgaatgaactgtaagcggctattacttctatacgcggctgtgcttatcctgtctgcggctttttatgttccggacagcgccgaggcaaagcagcaggagcacggcattctcatcgtctattcaacattggatggaaaagagtcagccgatgtgaaaattctcgaccttatcgccggccatttttcatcccgtgtggccgtcataaaagacgcggatgtcaaagcatcggatctcgcaacaaaagaccgcgtcatctattacggacaaacgaaaagaaagctgagcaaaaagctcgcgcagctgatcagctcctccaaaaaacctgtgatagcgatcggctttaacgccgggcagttcagccaatttgcaggtcttacgctcaaaagcaaagacaatgtgtatcagattcgcagcacaaatgaggaaatcgattcctctttagaaagcggagtccgtgtcctcgacgtatcaggattgaagggaaaagcattgtacacatacaaagctgacgaaggaaaagctcgtccttttggatggaaaaccggcaaaggaaacgtgtacatcgggttaaccgatttgctaaacaacagcctcctcgccgctaaacagctcagacaggcatttggtgaaacggccggcagcacgctgttatatttgcggcttgaggatatcagcccgatgtcggatgaaaaactgctgctccaagccggatcttatctgcataaacggaatattccttttatcctttctgtgattccggtatatgtcaatcctgaaacaggcgacaaagtctatatgtctgaaaagccgaagctggtcaaagtactgaggaagcttcaggatatgggcggaagcgtaattgtccacgggtatacccatacataccgctacagcgaaaccggtgaaggattcgagttttgggatgccaaagccgatcagccgatcacatcggaaaatgcggaagaacccgcgacccttttgcaaaaggaacagagctttccgaatgaagaggcatatcaaaactatttgaagccgttcagaaagaatgaagaaacttacacgcggcagaagctgacgaacgctattgaggatctcaccgcggaagggctgtatccgctcgcgtttgaagcgccgcactatacgatgtcagagcacggctatcaaatcgcctcacaatatttcacaagcttgttcggccaggttcagcttagcgatacaacatggaaaacgtcaggcgccggtccatttgttacgaatccggccatgctccatgggatgacgctctatcccgagacaatcggctatgtcgatcaatcggagcaaaatccgctcggcaaagtcgaggagcgcatctctcaaatgatcgattttgaaggcggagtagccggcgcattttatcatccttatcttggaatgaaatatcttcctgaactggttgatcaaatggaacgcattccaaacagcgaatggctcgatattaaaaagacaaagcaaactgttaacacagataaagtagaaattcacacaagcggagatggaacgattcaagtcaaaagcaaagtcagccccattgagacgtttttcgatcatcaccagcaaagcccgctggaaaaggcgctttggattctctctcttattgtgctcttgtttgttgtcatgtttgtgagctataccctttacttgagagccacattaaaaaaacgaatctttaaggagagaaaaagccgtgggtaatgttctgttcctagtctcgttaagcttaatatgggtcatgcttctgtatcacatgtttttgatgcagggcggattccgccactatatgaccttcgaacggaacattccgaagtggaaagagaacgtgaaggatctcccgaaggtcagcgttctgattccggcgcataacgaagaggtcgtcattcggcagacgctgaaggcgatggtcaacctctattatccgaaggaccggctggagattattgtcgtcaacgacaattcatccgaccggacgggtgacattgtggatgaattttccacgcaatacggctttattaaaatggtcgtgaccaaaccgccgcatgccggaaagggaaaatcgtcggcgctcaactgcggttttgccgagtcaaacggggacgtcatttgtgtatatgacgccgacaacacgccggaaaaaatggctgtttattaccttgtcctcgggctcatgaatgatcagaaagccggagcggtggtgggaaaattccgcgtcatcaatgcggcgaaaacattgctcacaaaatttattaacatcgaaacgatttgttttcaatggatggcacagggcgggagatggaaatggttcaaaatcgccacgatccccggcaccaatttcgccatcagaagaagcattatcgaacagctgggcggctgggatgataaggcgctggccgaagataccgagcttacgatccgggtctacaacctcggctaccacatccgcttctttccggcggccgtcacttgggaacaggagccggaaacgtggaaagtctggtggcgtcagcggacaaggtgggctcgcggcaaccagtatgtcgtcctgaaatttttggctcagtttttcaagctgaagagaaaacggattatttttgatttgttttatttcttttttacgtattttttgtttttctttggcgtcatcatgtcaaatgcgatttttgtcatcaatttattttataatctgcatctttcattcggttttttgtctatcattttatgggttttggctttctttctatttatgacggaggtcatgattacactgagcatcgaaaaaacagaaatgaacaggcaaaactttttcatcgtttttctgatgtactttacatactcgcaggcttggattgtgctcgtgatttattctttattcgtagaaatcaagcaccgcctgttcaagcaagaggttacatggtacaaaacagaacgatacaatcaaaagaaaagcgggtgacttttttgaaatatatcatcatatgtctggcaagcttcttgctgatcacggcgacgggacaagcggctgcagccaaagacgttacagtagacggctcgatcctgggggaaaacagccgggaacaagccaagcagcaagtgctcacaaacgatctcttgactttatacggggcaaaagacagcgccgagctgacgtatcaaataccggcgggcgcctcctctacccatcagcagcttacacttaaatacgaggcctcagaccttttaatctcaccgtcttctttaacagccgtgattgatggcgaaccggtcaaaacggttaagcttgaagggaatgacggaaagaaaacgctgaagctctcgctgaacaaaagccagtcgtctccagggtttcacagcttatcactgaagttctacggagtggttcatgaaggcgtctgcgtcagacaggactcctccgggaactggatcaaaatttatccggacagtcgtctgaatatcggggaaaagaacgaatctaaaggagcggcgctcgaacattatccttatccgttcgcccagtccggcagctccgtggaaaaaacggcaatcgtcattccggaccatccaagttcggctgaaatcgaagcggcagttaaaacagaagcatacctcaaaacggttgacaacagcatcagcacgaagatcttgggtgaatctgacctggcgaagatcgacaggccgacgattgtgatcggcgttcaccatcactggagcggcaaagtgaaaaagctgttgaaacaagcgaaactcgaagcaaaagaagacaagcttttgcttgcgaaacggatgctcaaagcaaaggataagcagcagcctgtattgtttgcggccgcagcatctgatgatgtgctttctgaaaaaatcagcgtcatcaccgacaaaacgtatgccgcccagctcagcggcgacacgctggcaatcggcaaacttcagcagcatagcaaacggggcggcagcaagctgacacttgaggatttcggggcgggggatttgacaatcggttcgggacagacatcttccgagcatttttattatcccgcgccagctctattagacaagaatcagcctgcaaagctttcgcttgcgatgaaaaaatcgaaaacgattcaaaagcaggccggccaaagcgacttagctgcggaacaggcggagctgaaggtcatgatcaatggccagcctcattccgtcggacttgacgatataggaaaagaagacaaaaacggcttttaccatgtttctttaaaagtcgatccgaaacttttgcaaaaaagccgttacattgatattcaatttgccgcttcaggcttgaaagagaacaacccttgctacgcggtgaacgaggacaaatggatttttatcgataaacaaagtgcattgtcttaccatgtcatcgacacgtcagcttcagcagattttcaagcgtggccgcttccctacgcgggtgatcataacaataaaacgctgatgatcctgcccgacaatgcggatcagtcgaagattgatgagctttcgcttgtagtcggctccttcggcagcgaagcccggcaggcattcacagtaaaaacatcctcggaagtcaaaccggatgacgtgaaaggaagaaacgtaatcttcatcggaagcgtcgatcaattctctctgctgaaggaaaaaacagccgaattggctgttccgacggcgaaaaacggaacatttgatgtgtcatcttttcaaatgctgaatgaaacgacaaaacaagtcgcgtttactcaaacgtcgctgtgggattcaaattactcgatggctgttttcgcgccgtttaaagggcaaggcacagcagtcacaaaagaaatgatcaactttttgaacagcaatgatttcgcagcaaccgttgtgaatgaaacggacagccatcagctatttacaaaccatcaacagctgacagcaaaatccgccgaaaccaagacggatgataaacaggaaagcaatcagcagcatgtgctgtacattgccatcctgatcgtaatcatagcggcagcggttattttgatcttgacaacggcaaggcgcagaaaaagaaaggccaatgccggcggagggattgacgaataaaacaggggcttgcttttagcccctgtttttttataagtattcaacctgtttctcatatacacccttcgcaattttagctaaaacatcgattccccttataatatcttcatccgccgcggttaggctgattcgtatacactggtgtgaatgcgccaggcgccgggattgacggtgaaagaaagatgatccgggaacgataatgactccatccgctttcatatactcatacagcgctgcatcggtcaccggcaggtcttcaaaccacagccatccgaaaagcgatccttccccttgatgcagataccatttgatgtcttcaggcatcttgcataaaagcgtttccttgagcagcatgaatttattgcggtaatatggcctgacttcattcagcgacacgtcggcgaggcgcccgtcattcaatactgatgcagccatatactgccccagccttgaagaatggatcgccgcattcgactgaaaagcttccattgcctgaatataccgggacggcccgatggcgattccgatcctttcgccaggcaggccggcttttgaaaggctcatacagtgaatgatctgctcgttgaaaatcggttccatgtcgataaagtgaatcgccggaaaaggcggagcatatgcggaatcaatgaacagcggaacattcgcttctcggcatgcgtctgaaatgaatgctacatcttctttaggcaagatgtttccgcaaggattgttcgggcgcgatagcaagacagcaccgatgcacggatcggtccgcatcctctctaaaaaccccttacggtcgagctcatatcgaaacgtatgatcatccaatttcgatatgagcggagggatcccctcaatcatctcccgctccagtgccgccccgctgtatcccgaatagtcaggcagcatcgggatcaaggcttttttcatcacagatccgcttcccattccgcaaaacgaattgatcgccagaaaaaacagctgctggcttccggctgtaatcaacacgttctcttttcgaatgccggcgctataccgctctgaaaagaagcggacaacacttgcaatcagttcatcggttccatagctcgatccgtattggccgatcaccgaagaaaacctgtcatcgtcaaggagatcggcaagagccgacttccacatggctgacacgccgggcaaaatcatcggattgcccgcacttaaattaatgtatgaccgttcaccgccggccaggacttcctgaatatcgctcatcacagccctgacccctgttttctcaatcattttctctccgattttgcttaatgacggcttcacgcttccagtctctcccgttcaaatcgaagacgggcggtttcgattttcttattgatctcgtcaatgaaatactgttccgggacgctgaatcgctcgccttcccgtcccggaggcaggtattgtctgacatagcgctccgcggcctctttgtatgccgtgtcatcctcgatttcttccagctgttcaatttcggccacaagctttcttaaatcgtccatgcagcgtggaaggtcaagcgacacgcgcttctcttctcctttttgaatggaacggccgttttcaatcatccagctgaacagaaaatagcctgtcccggaatcaaaattccgcgttgcattatgctggctcggatagcgcagcagccgctcgtacaaaacaaattcgataatttcctcccagccgtcatattgccgctcccacaaggtcaggattgcttggcaatcgaccttgacttcttctaaaatgcctgcgaaaaaattcattttcgcctgaatatggagatgaaaaggtttttttccgcaatgatgaaaatagtcgtgaaggtagccccacaacacccttgcttcatatgtgcggtcgggggaaagctgagccgacttgaaaggcgcatgttcaaaaatggccctcgctcttttgagcgtgtcctcatggtaaatgtgataaaacttattaaagtagaaaatcgcgaatgtctgtgatgtgattttctcttttgttttcacattttcagggaagaatacgatgcatttttcttccgtgaacccctttgttccggcgagcagcttaagggattggcagccgttttcaggatgaggcagatcctcttctatcggcctcatcatggcaggttcttcacgaacggctaaaaaggcttcaaaatagcagcctttcgcatgaggcccattcggcgtcacgatcggcgccgcaaaaaaggtcgtctcctgatcatgcggagcccggtaagccgtcaataaccggtcaaaatacggcgtctcccctaatccgcggctgatccaatccaaaacgtcctctttaaacgcctcttttgcagccgttaagtgaaccgcttcataaatggctcctgcgtcttcaatcaattgcagcagaagctgttccgccctttcgtgatgctctgtaatctgtcctttatcattttggtacgtctgcaattcatgtatgttcggtacaatctgctcgttgaccatgtttacaatgtcccctgtcaaagtcgtcatcggcttcctccttcgattgatttaagcccgtggattgtaaagcacatcggtacttccccaaaatctttaatgactttcaaacggtgttcatcggctgctttaatcgtcgtgatgcagccgtcagccgcgtttgaagcgcaggccagggccgcttgagcattgctggtgacaaattggacttgactgctgaacagctttgccagatgagccggagcagggtgtgaagcgacgatttgaatatccgatgccatcgtgtgctgttttgcggcaaacaccatgttgtatgtaggcatcacaaaactgtctataatctttaagtccgctagattctcaaatacgatttgatgcaaaaacgggtaaacggcgcagcctaagaggactgaattttctgtcgatttaacatggagcagcgcttcttccaacgtttcataaagcctgacttccccgcggacccctttatttttgagccatagcaggccggctttttcacagttcgtgcctttgggaccgagcgtatggacaatcatcacggcttgctctttgtgcactttagtcgagatcatcttaacctcctattgtacccgtcaaattattttgataaatgatatgaagctcatcatccagctcccggtagaaagcttcacattcttcataagaatgatggcttgttaatataaaccccggataaccggaaaagtgcgggtacgggaggatctttgcgcctcttctcataaattgaaacacccgcttaacctcctgcctctgtttgacttcttccagtccgtcgattttttcaaaagtgccggagccctgtacaggaatgatataattgccggctgtccttacaggcctgatctcgccttcaaactcgctgctctccagcggctttaatgcattttgcaagacaagctgcataaagttgatgcctgtgctctctttgacgatgtaatgggaaacccctgaaccgccgattctggcgcccacctcgataacataaggtgttccatccttgtccagcctcagctctgtatgagccggcccctggtgaatgcccagcgctgaaacagcgcccgtcacttccttgacgatcgcaaggcgcgtctcttctttcaattgagccggagcaatatagaccccttcttcaaaaaacggccctttgctgttccctttgtatccaatcgaaagaacatgtacgtttccttgaatcgacagcgtttcaatcgcgaattccggcccatcgataaattgctcggctacgatgcccgttttgccgtgcacgaatcgattgaggtccctttggttgacggcctcgactttccggacggcctcctcaagctccttccgatcatcaacacggacgacgccctggcttgagaagccgttgaccggcttgacgactaatggatacgacagtttcctgttttccaggtcagcgagcgtatggaactcgtgaaaaaccggcgtattcaatccgttttgctgaagtatgctgcgggttttatttttattgcggcagttttccattgttgtgaaaggaagccccggcagattcaaagcttcagcagcttttgccgtgaaaggcaaagccggttcaaacagtgtcatcatgccgtcaaacggaaattcgacaaatgtctgcctgacgacatccatcgccgcttcttcatcttcaaacaacggcagcggcacacagcgttccacagccggaagattgcccgggaaatcttcggccgaattgtaaaagaacgtgaccttcaatcctaaacgctcagcttcttcaaaaataaatggcaggtgcttattttgacaaatgatggccaagtttttgtttcgtttcgtcaattttcgcgatcctctcttctttttttaagttgatgaacatcacaccgaatatgacaaacagcgttcctaaataaatattcgcattcagtttttcatccagaaacagaaatccgatatagagcgcaatgacaggggagatgaacaagtgggaagtcgcttttgagatgtgccattttttaagcagataaatgttgatccaaaaacccaaaatcgagccgacaaccgctaaataaagcagcgcataaagactcacaccggaaaacgttcttgtcccgctttcaaagatgaggctgctgatgagcaataccgctccgccgctcagcattgaaagggagttaaagcttaagatcggaagcgaacgaattctctgctgtactttgatttgaataaaagccgagccaaacatcgcacacaaaatcacaatcattgcgacaatttcaataacatcgactttgatcagcagttggttgccaaacacgattgtaatgccgagcaaagccaggcatatcccccatttctgcagtttcgtcgccggtgtccctttgacgaggcggttgatcatcagggcaaagactgaaatgcttgccgctaatatagacaccaacccgctcggcaaataaagagaggcccaataaacagatccgaatggaacggaaaaatacatgatgccgttcaaaaacgacagcactagcagttcctttgacagaacaaactgcctccgtgccaacagaaacgccgcgatcaaaatgcttgcgatcatgaaccgcatgccggcggaccaaaatggaaggctgtcactcagcccggctttttgaaaagcccatgtcgtcccgccgatcaaacataacacgataaataaaatatgaacccgatactttaaaacgtttgtcagcatatagcattcacctgatttagttattgtcttgctgtcatttattttcagaaaataaaatcttttctgatcaaaatggattatgagggaaattataactattatatcaattacagtcaatcatacttttgaacctttagaatatctttacaaatactgcgaacaaaaaaacactcacttcgattaagtgagtggaggcgatattggtttagcttatatttctatcttttgggtgcataccgcttttccggatgtaccgaattctctcatcttatgtttaaccgtttctttgactgcgctgatccctggcgtcatataggcgcggggttcatataaatcgggattgtctttaaatatgctgcgcgttttctcagtccaggccaccatgcattcggtattaatgttgattttcgcatggcccagacggatcgttcttgcgatttgatcagccgggatgcccgaagctccatggagaacgagcggaatgtccgttacccgtgagatttcttccatttccttaaatcccaaattaggctcgccttgatattttccatgaacggagccgagcgcggctgccaaagcatcgataccggtttctttgacaatccgctcgcattcaccgatgtcggcatactgcactccgccgataagcccgtcttccatgccccctacggtgccaacctctgcttcaaccgaaacattgcggaccccggcatatgacacgacctcttttgtcatggcgatattttcatcgattggtgaatgcgagccgtcgatcatgactgagctaaaacccgcgtctatcgcttgcttgcagcgctccggacttttgccatggtcaaggtgaagcacgacgggaacggagatcgacatttcctcaatcaaagccgcaaccattgcggaaaccgttttaaatccgcccaaataatcgatgagccgatctgaagcggctgcgatgacaggtgaccgttcttcttccgctgcctctagaatcgcttttgtccattgaaggccattaatattaaattgaccgattgcataatgatgttcctttgcttcttgaagaagttctttcatggaaacgaaagccacgttcacccctcctatcccgtattaaatcttgaagtattttgaaacaacttcaactgttgtttctttggccgttcgaatcgtttcttccgcgctcagcttatagtattcaggtctgaacaattcaactgatacgacatccgaaaaaccgatgtctttcaaagttgataagtgggcatccaagtcgatggctccctgtcccggccaaacacggtcttcatctcttaaaaatccgattggaaagtcttccgtgtcatcgatatgataaatgaagattttcttgccgtccgccttttttaaatcctcaagacttgagcccattgcatggaaatggaagctgtcaaaaacaaggccgacattatcgcggttcacggtcatgacgatgtcataggcctggctgaacgtattgaccgtacactccgggtgaccgacaaactcgacagcgatctttacgccgtacggctcagcgatgtctgacagctctgtcagcacttcgacggagcttgctttaatatcttcttttaagattttttgttcggtgacaagcggtaccgcgaccacgtatttcacaccaagcattttgcacgtttccatcatgcctttaaattcttcgatgatttcacggtgccctttttcatcgcggttgttgaaaaagacaagggcattcaaggccagcggcttaatatgatgagtttgaaaatactcggctaactctgagagagcatggtcttttaagtactcaggcagcttatccatcgtccggatttcgatataatcgtatccgtgcttctcacagtattcgaggtcttttgcaaggtttgaattttccaacgtcgttgcttcattaaagcatagcttcatattcgattctccttctctcatatccttgtgaagagaagttcggcagggcgccgaactcagggggggcttagcctaataattcttgtttcaatttttcaagcatgaatctgcttgattcatccgctctttcatcgacccaagcaaaaacggcgttcgtcgcaattccgtcgaacttcatctctctcagctttctgaagatcgtatcaaaatcgacctcgccttgaccaatgtccaaatgctggtgaaccgttacttttgcgtcaggcggattgacgatgtagcgaaggccatgagccgctttatgattatacgtatctgcgaataaaacatgtgtgaggcggtcgccggcttcgtcaaacattgtctcgatgtcgcctttgccgtcatcataaaagaatgtatgcgcagtcgagtagacaagattaatccaatccttgtcaagcgcgcggatcatatccaacgcgcctttgtgcgtttcgataaaatcgtatggatgggcttgaagattgagtttaatgccttctttttcaaagattggcagaagctcatccatggatttgataaatttttcttcacttgttaaaggatcgtattttgaaccgctgaattcgctgttcatcaaatcgacttcaagctcgaccgcaatttcgattgcccttttccaattgcgcacggcggcctgacggcgatcttcatcaggacctgcccagtggtaaagcggaaggagcgatgaaagcttaacaccggtatctcttaaaagccgctttaattgtttgattttagctgaatcgactttcggatatttatagaatggacaaaaatcttcgcgcggcgatagttcgatatattcgtagccaagctccgccgttttatagaccgtttcttccaaagtcaaatcatcacgatacatcgatggatccaatgctaatttcatacttttcactcctcggaatgtttttattttttaacagttgtgaacgtttgatagaattccggcttctcctgaagcgccacaggttctttctgtccggattcctgagctttcacacaggcgtccgtcgtcacggcggcgatatagccgtcccacgcagtcggcccgctgacctcgcctttctgttggatcgagtcaatgaaatcttgaatttctacatcgtaagcgtctacaaagcggcgctgccaatccatgaggatatccgtcgagaatttgccgtcttttctgagagagatgcttggtggttcaggaagcttcacgattccgtcctcgccgacgatttcacactggatatcgtagccgtatttgcagttgacatagatttccgcattgatcacgactccgccttttgtttcgatgatgacgatttgcggatcacgcaaatgaggaagcgcgtttttcgattttttcggataaatgacctgaacggattcgtagtcatcattaatcagccagtgcagggcgtctatttcatggacaagcgtatcgacgacagccatatctgttgtatagttgtcgcctacaaccgggttgcggtgcgcacagtggatcatgaggggctcgccgataacccgattgtcgatcgcttctttcagctgtacgtaaccgctgtcatagcggcgcataaagccgacttgaacgagacgtttgcccgctttgacttcttcattgacgatccgcatgcatccttccgcagtcgtcgccagaggcttttcgcaaaatacgaatttgtttgctttaatcgctttcaaaacgcttgattcatgtgccggtccccagcttgttactaagactgcgtctacattttcggctgcgattagactgtcgtcatccggatagaccttggcgttcaggctgtagtccgttacaacttgctgagctgcctcctggttcacatcggtaaccgcgacaatttcgccgccggctaatttatttgtgatgcggttgatgtgttcttttccgattgctcctgtaccaataacaccaatgcgtagtttcattgatagccactccttcaaatgtagttacataatttttcttgtttgcacttgcccagcttgagccggaggagtcccatacagctcttcctgaatttgttcaagcgacttaccggatgtattcggtgcaaaaaagagcccgatgagcatgctggccgttacacatccaaggagaatggccgccataaatgcaattccaaaattcgagatgatcattggaacgaaaaggctccaagccccgattgagatacgaacaaggaagaacatcaatccttgtgcagatgcgcgatattccgtcgggaaaatttcactcgcccataattgatagttggcctgttgccccgccccgttgtttatgccgatcatcacgataaagaggatgagaatcggcatgccctctgccggaagcagaaacaatgaccagccgatcaccgccgcaaatgcggagatcccaaacactgtcttcctgtatttgtctgcaaacggcatgaagataaaagcgacgccaagcccggtgaaaataaacagccccatctgcaaaatatttgccatggtcgctgatacatcgccgacctgctgataaatgtaaggcataaaaaaccccatgacacctgcagccagattccaaaccaagtacacgcccattaagaataaaatgcttttcaaatacttaggctgaagcaaatcgagataagacgtcttcggcttcctgacggcttgagccatttcggattgatcctgccaggcatcggattccggcagccttttccgcagaacataagtaatcagtgcgataacgagcaaatgcccaaacacgattttattgcccaataagcctaaatcaccgagcaggaccgacagcagcagaaccacaaccgctcccgcagcccatgcgacctgtgcaaccccgcaatgacgcgccctgtttttcttaggtgcgttctctgcgatgatcgtccaggaagccgtaatatcagctcctaccgataaaccgataataatgtaaccgcttaacaaaaaggggaagctggtgccgaataaaactaaacaaatgcccagtgcataaaccagcatactgttcgtatagacagcctttcggccaattttgtcggccaaaaagcctccgagcagcgctccgattgctgccgaaatggcgttggcgctaaatgcgccgagcagtccgatctgtgtatcagaaagcttcaggtaactgacccataaagataatcctgccgatcctgcgacaatggagcctgcatcaatgtaatttgccaaagctgctgcgacggttcgtttattgaatggtgagactgctgcacttccattgctcaatttagagcccccttaattggttgctgggacattcaacaagtgacgatcgatgtactttctggcgatcaatgcgtattcaagcgggttggcaacatcgggatcctgctcggcttccactacgatccagccggaatagccgtgctttaaaagcgtttgatatacttctctaaagtcgatgcagccgtcgcctggaactgtgaacatcccttgcagaaacgcctgttggaacgaatttccttcccgcttgcatttctccatgatcttaaggcgcgcgtctttaaaatgaacgtgcctaatacggtcaatatgcttctctaaaatgttcatataatttccatctgaaatgtaggcatgccccgtatcgtacagaaggtgcacaagtgccgggtcagttcccgccatgagccggtccacctcttcctctgtctgcacgcctgtgccgaggtggtgatggtagacaagcttcagtccgtaacggccggcgatttccccgaggtgatttaaaccttcaaatagccgctgccattcttcatcggtgaaataaggcttttctttaaacacgtttttatccaagccctgcacactgtacgtctgttctgatacgaccgccacatcggcatggacgtcttttaagtactggcagtgagccgcaaattccttggctgcttcttcaatgccgtcccgaatgatatagctgctgaaccacttgccggcaatccttagattcctcagctcgagctctttattgagaatggccggttccggaaaaaagccgcccacttccgtgccttgaaagcccgcaacaacaatgtcgctcaacaaatgctgaagtgtgtttcccgcgccgatttccggaatatcatcgttccgccatcctatgggggcgatgccccatagaatttgtgtcttgcccatcctggtgcctcctttaatactgctttgcagattccagcattttttcttttgctttatacgccttttgcacgctttcctgttcggaaacctctgcaacacctacgtgccaccagctgtcatagccgtccgtcatcgttttcggcagcaccttcatttcaatcaatgttgagacatcttgttttttggcatcttccagcgccgcttttaattcttcaatcgtgttcgctttgtaggttttcgctccatagccttcggccactttcgcataatcgacattgagaatctgattgtctgctgttctgaattcacagtagtagctgccgcttccatggtccatttgcagattgttgatgcagccgaatcctgagttgtcaaagagcagcacgttaatttttttattatattggattgctgtaatgagctctgagtggagcatcaggaagcttccgtctccgaccagtgaataaacttctctatcaggatgcgccaatttcaagccgagcgttcccgatacttcatatcccatgcaggaatagccgtattccaggtggtacgtattcggtacgtttgaatgccacagccgctgcagatctcccggcaaagagcctgctgaacaaatgacgacgctgtccggatcaactgtttcattgatggcgagcaatgccgttgtttgcggcagttcggtttgcagcacatccgcatattcgttgagtatgtcttgagaaaagtgatctttaatttcaggagtgaagttttcgcgcttaaatgttaccttgcttaagcggtcgcgttcagcaagccattcgtctttcagctccttgatggttgaaccgaactcgctcttatagccttccaataagccgtgcagtttgccgagcgttacttttgcatcggcaacgacttggaaagcatccagtttataagcctgcattctgctgacattaatgtttaaaaattttgcgttgtcaaagtcaaaagcggtttttgatgatgtcgcaaaatcggtatagcgcgtgccaattccgatgatcaggtctgccccgcgagccgctttgtttgccgccagcgtaccggtgattcccattccgcccaaattgttggcaaaatcggcttctactgtggatttaccggcctgggtttctaccagcggaatattgtaagcttcagacatggcgatcaattcgtcgcgcgcgccggaatatttcgctccgccgccgaccaagatgagcggttttttgctcgacttgatcagttctgccgctcccttcagttcacgctcgctcggctctttgcgatcaacatagtgaacgcgtttttcaaaaaagctttcatcgaaatcataggcctcgccttcaacatcttgagaaatgcaaatcgttgcaggaccagcttttgcagggtctgtcattacttcaaaagcgcgaatcagactgctcatcaactgttcagggcgcgtaatacggtcccaatacctcgaaacaggcttcaatgcatcgttcgtcgtaatcgccgcactgtattcctgctctacttgctgaagaacaggatcaggctgtctcgtggcaaatgtatcggctggaatcaagaggactggaatgttgttcgcaagcgcagtacctgcggctgccacaaggttagctgctcccggtccgactgatgtcgacacggcatagatcttccttctctgcatttgcttgctgtaagccattgctgcatgcgccattccctgctcatttttgccttgaaacacctttaagtggccggcatcctgttcaagcgcctggccgattccaacgacgttcccatggccaaaaatcgtaaagattccctcgacaaacggagtttcttctccatctacatggatgtactgctgatttaagaacttaattaacgcttgtgctgtggttaaacgtattttcttgcccacaaacgatcccacctttattcatattcttcatttaagactgagccgcaataagctcttcaatctcggcgactgtcggcattgcttcagatgagctgtgctttgaaacaacaatcgaggcggaagcgcttccgtatttcagcgcggtttcaatatctttgcctgaaacgagtccgtagaggaaggcggaggcgtatgaatcgcccgctccaaacgttttcaagaccttcgttttgtacgctttcgcccggaagacgtccccggatttgctgtatgcatatgaaccttcgacaccgtgcttgataacgacaagatctgcggaatgtgcaaataaatgctgaacagattcttcattgctgccgccgctcttattttccattacatcaaactcatcacgcgtcccgatgacaatgtctgattgttcggcaacaagcgtatagtagacggccgtttcctccgcagatgtccacgtatatggacgatagtcaagctcaaagaccactttcacttgatgctttttcgccagctgtacggctttcagcaccgcttcgcgggaagggcttttagccagcgccgtacctgacacaagaagcatcttcgatttggcaatatagtcttcgttcacttcagaaggggcaaggtaaagatctgcaacatcatccctgtacattaaaatgctgcattcttcagggcttaaaatttctgtgaaagcaagcccagctttatgtccgtctttatcaaccgccatttgtgacgtatcgacacctgtatttctcatataggtttcgatgaatctgccgtgctggtcatccggaatcttcccgataaatccggtcttcaagcctaatttggaactgccgattgcaatattagccggggagccgccgacatattttgaaaatgtcatcgtctgctccatcggcctgttgtattcgactgcgtttaaatcgatgcatgcgcggccgatcgctacaatgtcaaattctttctcttcattaaacgtatacttcatcttcaacagcctctccttgccttattgttagcgttccaaaatccattcatggtcagggtcgttatgaaacttccatttacgcgtcggccctgccatcacgtttaaataataggatgtgtatccgtcaggcaccccgacaggatggtatccggccggcacgatgacaacgtttccattttcaacagtcatcgtctcgtcgatggaaccgtcatccgtgtatacgcgctgaaatacgaagccttgctgcggatcaagttcatggtagtatgtttcttctaaaaaggactcttcaggcaggttgtcttggtcatgcttgtgcggcggatagctggaccagtttccgctttcagtgtagacttcgacgactaaaagactgttcgctgaaggatctgaatccggaagtatgttatggacggttcgtttattgctgaattttccccggttctcaataccgttgtcttcagctttgatcagtttcgtcggaagctggttttcagaaggtgaatagcacagggcaactcttgcctctgtaacagcggtaatgccgaacttgcggtcatttgacacatatacgctgtcggtcggctttctttcgaaaacgctttctctcgtgccgatattttcaaatgtctgttcatgatcggttgcggtaatctttccggtaagcgcgacgatgcagcattcttgtttgctcagcgattcttcatagctggatcccggtgcaagatcaaggactttaaactcgacataacttagatcggaattcgattttttcacttcgtgtacaagcttcacgccttgtgacagctcattcgcctgcggcttgcgcaacaaatgactcatggataaagcctccttttcaaacttgaaacatgatccgaacagcgcgggaaccgcaccgcccggttttttcacaattaattgaagtcaggcgccggatatcttgcagtgacgacctttttgcgcgtatagaaatcgacgctgtcttttccgttggcatgcaatgtaccaaagaacgaagacttccatccggagaacgggaagaatgccatcggagccggtacacccaggttgatgccgagcattcccgcatcaatgttttcacggaaatagcggatcgcattcgaattcgatgtgaacaagcatgcgccgtttgcaaattcggactggttggcgatctcaaccgcttctttcaagttcttcacacggatgaccgatagtacaggagcaaaaatttcgtccttccagatcgtcatatcagttgtgacattgtcaaagattgtcgggccgacgaaatagccttcatctgtaacattttcgcgtccgtcgcagacaagtctcgcaccctcttcaattcctttttgtatatagccgagtgtgcgtttcttgttgtcttcgcgaatgacaggcccgaggaatacaccgtcgtcaagtccgtttccgattttgacttcagatgctttctgaaccaatttttccatgaactcatctgcaattccttcttcaaccgttactactgcgcatgccatgcagcgttcgccggcagatccgaaagcagcgccgataatatttgttaccgtatcttcaaggttggcatcgttcagaacgatggtgtggtttttagcgcctgtcagcgattgaacgcgtttcagattttcgcttccttttttatagacatattctccgaccggttttgaaccgacgaatgaaatcgctttaatttccgggtgttcgagaatgccgtttactacatcatgtgcgccgtataccacattgaagaccccttttggaagtccggctttttcaaacagttcaactagcttttccgtcaaaagcggcgtccgttcggaaggcttcagaataaatgtgtttcctaacgcaatggccattgggaacatccagcatggtaccatcatcgggaagttaaatggtgcaattccgccgacgactccgatcgggtaccggtagttcgccgcttcaacatcggttgcaattgtagcaagtgaatctcccatcatcagtgaaggcgctccagctgcaaactcgacattctcgatgccgcgtccaacttcacccaacgcttctttcgtgttttttccgttttcaatcgtgatgaggtgggcaagctcctctttatgctgagttaaaagctgctgaaagttaaatagaattcttgcccggcgcggaacagccacttttgaccatgttttaaacgcttcagccgctgtttgcgctgcgtattctatatcctctcgcgtcgaaatcggcacttggcacagcacttctttcgtcgctggattgactacatcttcatatttgtcggttttgctttcaacccattctccattaatatagtttcttaactttctgatttctgccattcttataacctccttgaatattaaacatctcctggtacagatggggcaggtttcaaccattatgtatgaatgccgaacagctcttcattgcacaacggattttcgcaaaaaacaggaattaaacgcttacaaaagaaattaatgaatagaactatgattttatccaaagaaccatgacgcaataaaacgtttacacatcagaaatttctcaacattatcatgttttggtcacttcttggttatattttaatccggccttacccataagtcaatcaaaatcattaaatttttcttttgtaagatttgtagaaaacgttaaaatgatttagggaaacattgtataataaaaagaaacagggcaaatcttgcaaaaaataatcaccaatggtatcattttttaagcaattattggttaacttttgggttcgtcatatatatttagtcaaatatactagaaggagatacttagtatgaagttaatgcggattaaagaaatggaagattatattttgaccaatggcaccgtttcgcttgatgaactatgccaggtctttaatgtttcaaaaaacacggtcagacgcgacattaacaagctgaccgagaaaggagttataaaaaaagtctacggcggcgtaacagcgatcgaaaaaacggccttgatcccttttgaaaacagaaccattcaaaacaaggatgccaagacaaaaatcgcgcgctatgcttcacgctttattgaagaccatgacctgatttttattgattccggcacaacgacccgatccatattggaaactcttgatccaaataaaaatgtaaccgttttaacgaacagcctcgacattatcaacgctgctgcagcgatgcaaaatataaacttgatcatcatcggcagcaactacaaacggaaaacgcagtccttcgtcggcatggatgatccgggaacgctggataaatataatattaataaagctttcatgtcggcaaccggcgcaacacttacccatggactgacaaactccgatctgcttgaatatgaaattaaaaagaaaatatccgaaaaagcaaaacaagtatatttgctggccgaccattccaaattcgggaagtcgaccctgctgacgtacgcgccgtttgacagattgcacgcgatcgtcacatctcaggcgcttgatgaggaatatcacgtgtactgtaaagatcgcaaaattgaaatccatttggcaaaacatgtatagttgaagcggacgcccttgaccggctgtttccaagcggccggccaagtttatttatctacacatcatatcaggaggggaattcaatgaaaaaagttaaagttggcaaatcagacttgcacgtatttccgattggtttgggaaccaatgctgtcggaggacataacctttatccgaatctcaatgaagaaacgggaaaagaattggtgcgggaagcaataagaaacggcgtcacttttttagataccgcctacatatacggcatcggccgttccgaggaattaatcggcgaagtccttaaagaattcaaccgcgaagatgtcgtgattgcaacaaaagccgcccataagaaagaaggagacgattttgtctttgacaactctcccgcatttttgaaaaagtccgtcgaagaaagcctgaagcggctgcaaactgactacatcgaccttttctatatccattttcctgatgaaaatacgccgaaagacgaagcggttcaggcgctccatgaactgaagcaggaaggcaaaatcagagcaatcggtgtatccaacttttctcttgagcagctgaaagaagcgaacaaagacggattggtggatgtgctccaaggcgaatacaacctgctgaacagggaagctgagacgacattcttcccgtatacacaggagcataacatctcatttgttccttacttcccgctcgtctccggattgctcgccggaaaatacagcgaagatacaacgttcccggaaggcgacctgagaagagaaatggaaaacttccaaggcgaacgcttcaaagaaaacattagaaaagtgaaccagcttgcgccgatcgcggaaaaacataatgtcgacatcgcccatatcgtcttggcctggtacttggcgcggcctgaaatcgacgtgttgatcccgggcgccaaacgcgctgatcagctgatcgacaacctcaaaacggcagaagtcaatctgtctcaagaggacattgatttcatcgaccggctgtttgcccgctaaatgatcaggaaacctatcttaaaagataggtttctttatttttaaaatcctgttgacagcgcttccatttttgatatgataggaaagaagttaatacaagtgacggagaatgggagattcacaataagaccctcttgtgccaggggtttttttgtggatctctttttcttcgtcatctaagagggggcgaaagcaatcgtaatgaatagacggcacctttattctgtataacagcttgaaaggagaggtcatgttatgaaaagactagtccgcagcatcttccttataacggccgcaatcgctgcttttggttttggattcagcgggcatgcggaggcggcaagccattcccagccgcagctcaatccgaacaagctactaaatgtcgcgcaccgaggcgcatcggggcatgctcccgagcacacgcttttggcttataagcttggacaaaaaatgaaaggcgattacatagaaatcgatcttcaaatgacaaaagacggccacttggtcgccatgcacgatgagacattggatcgtacgactaatggtacgggttttgtcaaagactatacgctgaaagaaatcaaagagcttgatgcaggctcctggtttaacgaagcatatcctgagcgggcaaaaccggagtacgccgggctgaaagtgcccacccttgaagaaatcatccaaacattcgggagaagcgcgcgctactatatcgaaacaaaatcaccggaagactatgatcatatggaagaaaagctcctggacatcctgaagcaatacaaattgaccggagcagacattcattcaagcaaagtcatcattcaatcttttagtcctgaaagcttaaaaatcattcataacgctaatccaaacattccgctagtgcaattattatggtacgacaaacctgctgccattactgacgccgaattaaaacaatatcaatcttacagcgtcggactcggcatgaactttgaccgcattggccgggcatacgtgcaaaagattcgacgcaccggcatgctggtccatccttatactgtgaataaaaaagaagatatgaagcggctgctcgattggggagcgaccggaatgttcaccaactttccggaccggctgcgcgatgttttgcgcgaaaagaagtaaatgaataaagaaggggaataccatgttaaaactgtttaagccagcaccgccgattgagcggctgccggaagatcaaattgattcggaatataagaaattcagactgcaagtttttctcggcatcttcatcggttatgcggcatactatttaattcgcaaaaatttctcgcttgccatgccttatttgatcgaagagggcttttcaaagtcggcgctcggctttgccttgtccgctctatccatctcttacgggctgagcaagttcgtgatggccacgatatcggaccggagcaatccgaggatgttcctgcccgccggtttgatcctttccgctgtcatcagcctcttgatggggtttgttccttttttcacctcatcgatcgccattatgtttatcatgctgttcttaaacggctggttccagggcatgggatggccgccgtcagggcgtgtccttgtccactggttcagcgtcagcgaaaggggaaataaaaccgccatatggaatgtcgcccacaatgtcggcgggggactgatggcgccgattgccgttgccggcgtcgccatcttctcaggcataacgggatctgctacaggctatgaaggtgtgtttattttgccggccttggtcgccatcgccgttgccgtcatttcttactggctgatccgggatacgccgcagtctgtcggacttcctccaatcgaggaataccgcaacgattattcaagcaaatcgaagaaaacctttgaaaaggaattatcaacgaaagaaatccttttcaaacatgtattaaataataaatgggtgtgggcgatcgcacttgccaacattttcgtgtacttcgtccgctacggcgttctggattgggctccaacctatttaagcgaagaaaaaggctttgacatgagcaaatcaagcgtcgcttattttctgtatgaatgggcggggattccggggacattgctgtgcggctggatctctgacaaatggtttaaaggacgccgcggaccggcaggctttgtctttatggcaggtgttttgatcgcggtgcttgtgtactggttcaacccagccggcaatccgatgatcgacatggcatcattgatcgcgatcggattcctcatttacggtcccgtcatgctgatcggccttcaagcgcttgactttgttcctaaaaaagcggccggcacggctgcaggattgaccggtctgttcggttacctgggcggaaccttgacggcgaatgcgctgatgggtgttatcgtcgatgcatccggctggaatgcgggctttacgcttttaaccgcttcatgtgcaatcgcagcactcatatttgcgatgacttggaatgtgcggggacaggaagttgtgaagcattaacatcaaaaaaagatacatctcgcaagaagctgagatgtatctttttttatttttatgccattactttgcatatatcgttcgtaaattcgacggggtcttcaattggcaagccttctatcagcagcgcctggttgtacaggaggccggtgtacagtttgaatttatctttgtcgttgtcaaaagcattctgcaatgttttgaagacttcgtggtttgtattgatttccaatactttatcagcctttacatgctgattgtcaggcattgcgtttaagattttctccatctcgatggtgacttctccgtcagcggcaaggcatacggagtgagtcttcagccgttttgacgccctcacgcttttcacttttccatccagagtctttttcatctcttcaaacaggtctttgtattggctgtcatccccgtcagattggttttgctcgtcatcgttttcgattccgaggtcgccgcttgataccgacttgaattctttctcttgataattcgccagcattttgatggcgaactcatcgatatcctcggtgaaataaaggatttcataccctttttccgaaaccagctcggtttgaggaagcttttctattcggtcatacgagtcgcctgatgcataataaatgtatttttgatcttcaggcattctggacacatattcctcaagggtgaccagctttttctcttttgatgaatagaaaagcagcaggtctttcaacagatctttatgggctccaaaatcattgtataccccgaatttaagctgtctgccaaacgattgataaaaagactcgtatttttctctgtcatttttcagcaagctcttcagctcattcttgatttttttgctgatgtttttggcaatcagcttcagctgcctgtcatgctggagcatctccctcgaaatgttgagcgataaatcttctgaatcaaccattcctttgacaaagctgaaatggtcaggcagcagatccggacacttttccatgatcagcacaccgttcgaatacagttccagacccttctcgaattccttcgtgtagtagttgaacggaatattttcaggaatgaataaaatcgcatggtatctcaccgcgccgtctacgcttgtatggatgtgcgcgagaggcttgtcaaaaccgtaatgcttttccttataaaacgcctcataatcttcatctttcagttcgcttttgttttttctccaaatcggcaccatgctgttgaccgtctgttcttcctggacttcttcaaattcattttcggcgccttctttcggcttgttgaccgcgacatccatcttgatcgggtagcggatgaaatcagagtatgttttgatgatcgcttttaagcgatgaacatccaggtattcatcatagttttcatcgtctgtattctctttcagcttcagaatgacatcggttccggctgattctttcgcagccggttcgattgtatagccgtcggctccggctgattcccattgatgcgcttcatcgctgccatgggcttttgtaatgacggtgacggtgtccgcaaccataaaagcggcgtagaaaccgacgccgaactggccgataatatcgtgcccgtcttttaattcgttttcttgtttaaacgcaagcgagccgctcttggcaatcgttccaagatgctcttcaagctcttctttcgtcatgccgattccggtgtccgcaatggtcagcgttctgttttctttatctgcggagatttttatgtagtaatcgtctttgttaaatgtcagtgaatcatctgtcagcgctttgtagtagattttatcgatggcatcgctcgcattggatatcagctcccttaaaaagacttccttttgggaataaatcgagttgatcatgatgtccagcaatcgcttggattctgctttgaattctctcttagccatctatccctctcctcttttgctcatatgatatacatatatcgttcgattctgttcacaaattaaataacacactgcctacacgatgtcaattgataaggcagcggtttgacaagcggcattccgcttcatataatgtgttgtgaaggtaaatttgaccaaaatgaggtggaaaggaatgaaaatcttatcaactgttcttaaaagagaattggcttaaagacgggagaagtctgcccttttttagacaagccatctcgggaacagtttgatacgatttgacatcctttcttgctgtattttaaatatgtagcgggtaaggtgtagtttgccttacccgtttttttgccggacaggatagcgatgcttcacgctgttctctttagatggcttgttttttcaaaaataagcctgaaggagagaatcatcatgagtattgttcatgtaacgaatttgacccatatatatggagaccgcatgatctttcaagacgccgggttccgcctgctgaaaggggaacatgccggtcttgtcggtgcaaacggagccggaaagtcgacattgctgcgcattttgacgggcagccttctgcccgatcatggaaacattgaatggcagccaaacattcgggtcggctttcttgaacagcatgccaagctgacggaaggcacaaccattcttcagtacatggagaaagcgtacggccggctgtttgaaatcgaaaaggaaatgaatgggcttgccgaaaaaatggccgatgccggagacaaccttgaagccgtcctgaaaagatacggagagcttcaggctgagctggaagcttcaggattttaccaaatcggaacgaaaattgaggatgccgcacaaggcctcggcttggcggaaatcgggcttgaccaggatgtcacggctttaagcggcgggcagcgtacaaagctgctgcttgccaaactgctgcttgaagagcctgatgtactgctgttggatgagccgaccaactatttggatgccgctcacattgagtggctgactggctacttgaaaaactatgagcacgcatttcttgtcatctctcatgacgaacgcttcttaaatgaaatcacgacggttacattccatctggagcatcatgtgatcaaacgttattccggcaactatcaatattttctgaaggagtatgcgcaaatcagggcacaggctgaagccgcatatgcaaaacagaacagggaaatcaaaaagttagaggcgtttatcgaccggaacagagtccgaaaggcgaaacaggccaaaagcagggagaaagcattacgcaaaatcaagcgaatcgaaaaaccgacagattcttatgtcccaagctttgcatttaaaacggggcgaaacccggcgatgactgtactcaaaacggaaaatcttgaggccggctacacagttccattatttaagcctctttccctgaccgtaagacggggcgataaaatcgcgattattggagaaaacggcgccggaaaatcgacgcttatcaaaacgctgctcggcgacctcaagcctctgagcggcatcgtcacagcaggacagcatttacaggcggcctatttcaggcaggaaagcccagcttctcatgatacaccgcttgaaaaattgcgggcgttctatcctgatctaccggaaaaagacatcaggcagacgctcgcggtatccggcttgacgccaaagcatatcagccagcccctttttacgctcagcggcggtgaacaggcaaaggtccggctggcggagctgatgctttcaaacagcaacctgcttgttcttgatgaaccgacaaaccatcttgacgcatcggcaaagcatgcgttaaagcaagcgctctgcgactataagggaacgattttgctcgtatcccatgaaccggctttttatgaagactgggtgactcatatctggcagattgaagcatggcgccgttaagagtaaaagccggcctttccaagggccggctttttttatttggacaatacaagctcacgaatggcgtgggcaacgccgttttcattattcgtacgcgtttcgtaatcggccgaagcttttacctcagggatcgcattccccatggcgactccgcaacccgcccattcgatcatggacatgtcgtttccgttgtctccaatacacatcacttcttcctgcgcgatgcctaatatgtcggcaagctgctgaacagcatttcctttacttgccgcagggtgaagaatttcataaaagaacggcgaacttttcaccattgtatagcgttccttgacgtcttccggtattgcggcgatcgtccggtccagcttttccggctcatcaatgtacatcgcctttggcgccagaagatcttgcgggatttcttcgatcgtccggaaccggagcggcactttggtgacgtatgattcgtaaacggtatacgggctgatttcccggtttggcgtatacaaataagccgaatcaaaaaagtgcatcggagtatcaagcttttggctgagctcatataacgatttcacatcatcatagcccagtgtcagttctgacacaacttcctgagtatgcgtattttgaacgagcgctccgttataggcgatgacataatcgccgtcttcatttaaattcagttcttccaggtagcggcttacaccgccgaggggacggcccgtgcagagaacgatttttacgccttgttttttcgcggcatgcagggcattccgtacttcctctgttacttcatgaagatcattcaacaatgttccatccatatctatcgcgattagtttgtacattttacactctccctgatcagaatcgagccctaaaatcatacttatgacccataccttctttattgtatcacagcttttcccggtcattttcatctgatgcccacggaaaaaacgccttacagcaaataaggcgtttttcgggcaagcttggcctgcttaaaatatttcttgcagaatcggatcttcatcaagaatgcgaagcgctttttcgcgatagccggcttcatgcaagtacgtatagcggttgggcttgacagtgtgcgacaaattgatcgcctcgcgaaactcatctttgttcagattcagcgttttgacatattggaaaaagcccgttctcgtaaacaccttttcaatccgctcagcccggtgatcctgtacatgggccatgatgtaggtggctaccccgacttgaatgccgtgcatctgcggttttttcgaaattttgtccaaggcgtgggaaatcaggtgctcagaaccgctgatcggcgcgctgtttccgctgatttccgtagcgatgccgcccattgtcaaagaactgacaagctcttttaagaagatcggctgtttaatatcctgcatcggcgtacggacaaagctgttgaccgctttcttgctgagcatcgacgcaaacgcatttacatcgccgaccccgtgccgctcctcaaactcccaatcataaagggccgtaatattggacatcaaatctccgatccccgccaaaataaagcaatccggcgctttttgaataatgctcaaatcagctatgattccgtagggaacccttgccggaacggttgttttttttccttcgacctgaagcgagcaattgctgctcgcaaacccgtcattggatgccgacgtcggaatgctgatgaacggggtccgcttggaaaaggcgatgtattttccgcagtccacaacatacccgccgcccatggcaataatgacatcgcaattcccgatcgaaaatgcccgcttcaaaagctcctgtatgtccagattggacggcagcagaacggcttcaactttaacatgttgaaatgcggttttcagtgaatgctcatactgctgataggaaaaatcgtcaaaaaacatgatcgccttgtcaaactgatgttttctcaatatctcatccaaccggccaagcacgccctcactaatgtccaaaaccgcggggatggctatgctggtaacctggcgcggcattagacgatccgccctttttctttaagatattgttcaatgtcttcaaatgtttcaacggctacaaatggcaccccctgctgacgcagcaaatcctggagcgcatcctttgcaaacgtaacatccgcaaatttagccgggtgcgaatccggttcactgtcgcctgcaaaataaaccgtctcatactcttctttcagcttttgaatgacctttgatttatcaatcccatagcgctcagagtaatgccaatgattctcatcaatgtccatatgaacattgtcttctttaaaaaagcctttatttgaatagacctcaacgtctgtaatcccgtatttctttaaaatataatgaatgtaataatccgtgccggcgcttaaaatgtagaagtcgccgccgcttttctggacatgctgaatgaagtcaggcacatattcatcaatcggtatggaatggatgtcatcaatgattttttgttcgctttgattaatcgaagcaaaaacggttcccaaaaattcgatatcttttaattctccggacttccacttcttgaacaattcacggccttcgggaaaatatttatcaatgaccatccagtaaaaatcctgtttggaaatcgtcccatcaaagtctgatacaaatgcccatttcttcatgctgcatacctcttttctatggtattttaaaagattagattcattatacaaaaagtttgtgaatcattgaacataatattatttcttttttgtgtactttcgttcacaagctgaatattcgtccccctgaaaggaggcgtatataatcattcttgatctgtacgctgcttacctttctctgttacggcaaatttccgcttcatcgttttgatgttttccgccttgcgaaatctgagcgcagaccagtcttcatcaattgcaatttggcgaaccggttcatagccctggtctgcaagcagtccggctactgtatcgcggctgcagtccgatcctttgtagactttcgatgattttttcgggtagcaaagccaaaacagaccgtcttccgccaaatgacgttcagcctccttggctaaagcctgcagctttgcgttggtcgctgcgaatacctgaacaaaatcatattggtccgattcggcgtgatgatgaacagggccttgaaattcagcgatgacgccgctgtatgcctcaggcggattcacaatcagtacaggctgtccattatccttgaactgcaattttttgatcaccgggttcgtttctgccatctctcatcagtcctttttctgtttatagtaacaaattaaccaaaaccacactaatcatacttagcaaaaaaagtgatagacgagagagggattgatctgctatatttacattgataatgcgaatcattatcacttaggaaatgtcatatgtttcacatcaacaggagggtcaagtgaaaaagaacttattgataatcggtttagttatgctgttgtgtatagtggtcagcgcctgcggaagcggcaatgcgtcaaacggtagcaaagaaaaagcggctgaagaaacgacaagaacatatcaatcaacgcgtggaagcgtgaagattccaacacatccaaagcgcatcgtgacagacttttatgccggtgaactgttcacggtcggcgccaatgtcgtcggctccggctcgtggtctttctccaatccatttttaaaggaccgtatgaaagatgtaacggatttaggcgacccgattaatgtggaaaaagtcatgaagctgaagcctgatttaattgtcgtgatgaacgatgataattacgacaaactgtccaaaatcgcaccgactgttgtgattccttataacacggcgaaaaatgttcaggaaactgttaagatgttcggcgacattgcaggagctaaagaagaagctgaacaattccttgccgatttcgaccggaaatcgaaagcagcgaggaaaaaaatcgctcaagtcgtcgacaaaaatgctactttcggtatttatgaaaacacagaaaaaggccaattctgggtgttcaatgacaacggcggccgcggaggccaagccgtgtacaacgcgctcggcttaaaggcgcctgaaaagattcaaaaagacatcttcaaaaaaggcgaaatcaaagaactttccttggaagtcgtacctgaatatgcagcagactacatgttcgtgacagactataacccgaacggcgacagcaaaacgctggacaagctgaagcagtcttccatttggaaaaaccttgacgccgtcaaaaacaaccgtgtctttatcaacgactttgacacgttctatccgtacgatccgatctctgtcagcaaacaggttgatttgattacggagatgctggtgaagcgcgaaaaggagaataagtaaaaaagctggaatttccagctttttttattgttttctttcttgaatgcttgaaaacctaaaagcaaattgaaagatcaaatagaaaggaatgtagaaaagaaaaaacatcatgatttgaaataataaccctttcaaactaaatggatatgaaatgtcatgaaacaaaaaagataatgccatccaaacgacaaaggcagaaaacgcagctttaaagccgagtcccctcttttttctcaacagacctttgctcacgagcctaatagaatagtagccgctgccgatgaaaaatagaatgatcagcaacagattgctcggtatttcgtatgctgtcgtgataaaaatgaaaataaaaatcagtgaaagaaggagcacaaacccttcaaatccaatttttctctcctgttcagcctttttattttcattcattatgttcgcctcctttctattgttttccatttaaaaaaacagaagccatgttaacaataatcatccataaaaacaatgatttaacacgcatgccgctgcttcagcccatcactcctgtttcacgtgaaacaaaaaatgcatcgaaaaaatatatggaatcaagtgtgtgaaaatgaaaataataacaaaaaaaggagagatgatgatgggaattgaaaaggttggacaaatcggggtgccggttcaagacttggagcgggctgcggcattttatcaggatgtattgggcctgtcccttttatttcagacagatcgcatggctttctttgagtgcggcgaagtgcggcttcttctcagccttccggaaaaagacgaatttgctcatgcaggctccgtcatttattttcaagttgaagatttgccggctgtatatgatgaaattgcaacaaaaggcgtctcttttccaatagagccgcatgtggtggcgaaaatcgagcaaacggaaacctgggtggccttctttgaagataccgaaggaaataccctagctttgatgagtgaggtgaacatataaaaatgaaaaacagctgatccctcagctgtttttcgtttttacatcatcacaagccgattgacaggtgcgatttaattcacaggcggcgcattttcctttccggcttcgtttgacaaattttataagcgtccatgccgcataactaaagataagcgctccgatcgtaatattaaacagcatgctgtcacatccttcctatgataacccaagcagtcgtccgccctgataaatcaggaacgcgatcgcatatgcaatggccagtccgtaaacaatggacaagaacatccactttttcgagtttgtttcttttttaatcaccgctactgtcgcgaggcatggtacgtataaaagcacgaaagccataaatccgtaagcggccaacggtgtaaattgttcagccatcatgccttgcagctgggcttcgggtacaaaatagatgatgctcatcgaagcaacgacaacttccttcgcgagaaaaccggttaatagtgatgccgctgcctgccatgtgccgaatcccagcggcagcaatagcggtgcgagcactcccccgatcatcgctaaaaaactgtcatccatcgcaacgtccgttccgccgggtcccgtatacgacagaagccaaatgaggacagacccgccaaaaatgtaagtgccggctttgcggacgaagcctttgcccttctcccatgttgcccgccacaatgtacgcgcttgaggcaaacggtacggcggcagttcaatcacgaagaacgacttttcttctttgagcttggatgaggataaaaacttcgccagcaccagcgctgcggcgatgcccagcacatacaaggaaaggacgacgaaagcctggtgggccgcgaaaaaagcccctgcaaacagagcataaaccggcagccttgccgaacaggacataaatggcgtcagcataatcgtcaagagtctttccttaggctgctctacagtccgcgcagccatgacgccgggaacattgcagccgaagccgataatcagcggaataaaggctttgccgtttaaaccgatcgcctccatcaggcggtccatcaccatggccacacgcgccatatatcctgaatcttcaagcaccgaaatgaagaaaaacaggataaagatctgcgggacgaacacgagcacaccgccgacaccggcaataatcccatcgagaataagcgcctcgataaacgggctggctcccattgccgacagcgccgaggccgtccattccgtcagcggtcccccgatgaaaccgtccagtgcatcagacaatggaacgccaaaccaatcaaacgtcagcatgaacatgagatacatgaacaacaaaaaaatcgggatgccaagcacctgatgcgttacgatctgatccacgcgttcagtcagcgtcagttttcgctctgactgatattgcacagaagttgacaagatgcggtcaatccatcgcgatctctcattgtaaatatgctgatgcagcgatcttacggaatgctcctgatgaaggcgtttttcggtctcctcgtaaatttcctttaatctttcgctgtcggccgcgtcctccagctgttctttcattttcgagttgccttccaaatattgaagggccatccagcgctttaaaacgccggggagttcgggtatgatcgattcgatccggccaatcgcttcttccactgcgcttccgtaattgatgacgagcggctccgccctcttttccttttcaaaaagcaaatgcctgctcagttcatcacatcctttgccgctgcgggcaatcacaggaattaccggaacacctagcgcatcagacattttttgatgatcaatgaagacgccgcgctgtcctgcgacatcgatcatatttaaaccgatcgtaagcggatgcccaaattccaggagctgcacggttaagtgcaagttccgctttaactgtgatgcatcgacaatattcaatatatctgaaaatgaatcattgagcaggaagtctgtgacaaccccttcatcgcgggacagcggactcaatgtataaacaccggggagatcgactatcattccttgtttatgacggagcagccccacctttttctcaacagtcaccccgctccagtttccgacatactcataggagcctgtcagcgcattaaacaatgacgtcttccccgtattcgggtttccgaaaagggcaatctgccggctgttcatagcttttcaatcctgatcttttttgcttctccaagccgtatgccgagacactgcccgcctgactcgaacatgaacggaccgccaaacggcaatttgcgcttcacgcaaatttcatcatcttctttcattccgagctgtatgagtctgagctgaacaagttcattcacgtctgaaaaatctatgattcttgctctctctttttgttttaattcggctaaaaccatcgttgaggcctccgtattctgaaaatgataatcgttatcataatatgattataggcaataagtcaccttccatttaaaaggagatgtgtcaaaaccggaacatttttatgagaatataaaaaagcgaaaaaccccggcgatacaatctttcgctctggcttttcgctctatcaagttatgtcgttaacctgcatgatggcgcactttttgctccattcgcctctttttcggcacataaatttttccgacaaacatatagccgtacttcaatttattgacggcccaggatatgaaaaccgcagcgcctgtagaaatgaaaaacaaaagcaaaacagccgataccgtaccgatgctgtcaagggcggttaagatgaccaacccgaaaatcaggataaaagcgtgcagtaaataaatagaaaaagaatagttgctgatcatcataatcagcttcggtaccgacttcagttttgaaaacaggtggaagcataagaaaatgatgcttgtcgaataaagcaggatatccggacgctttgacgtcaccgcgatgtcttggccgaagtaggaaaccgctacaatgaaacatccggtcacagcagccgccgcatacaccgcatgcctgtaccgttccagcaatgccaaaaagcgctcgtaattcttgccgcaataataggccaaacaaaagtaaaagagccagccgggaaacggcacccacgaaaaaggaaacggcgcctcctcctgaacgaccggaggttgaatgaacgtgaaatagctcaaataagccgctgtgaccgcaaaagaaatcgaaagcacccatttaggcgaagccttttgcaaaaatgaatggaagcacatgtgcagcaagtaaaattgaaaaatgacgagaatgaagtaaccgatgaaattccccaagaatatattcgccaacagttttttaataatgaccgatgcatgaaattgctgcatcatcagacctgcggtcataaaagcatccaaaacagcgataaatagaaaagggatgaaaattgttttaaaccgcttttttaaaaacccttccggaacaccaccaggataggcatgcgcgagcaaaaattcggaaatgaaaataaacgccggcgtactgaacatcaggagcgttctgaaagattcaacaacccggaaaaccgcatctccgagcatgtccgcccgcaccatgagcaccattgatatcgcatgaagcaaaacaacgcttaaacaggagatgcagcgaatgacaaaaatttcttttacttgcaaatcgatcactcctctttcaaatttgaaataatatcaaattaacataatcatccaaatgaaggaagaggcaaaatacataggtatgtttatcccaaatttgccggctgcaagtataaaaaaaagattagacacgtagtctaatcttttttaaatcgccgcttttatctgttttgtatagtagaagcggacgatgaagtaatatatgacctggatggcgaagaacacgccgagcaccattgcagattccttgaagaggttgtactgaaaggcatgcgataaagcggtcagcgccacagctccatggacaagggcaacagcgataggcgcgaagaacaagatgccgatctgcctgttcagcactttatgcagttcgcggtctgttaagcccattttggcaatcgatttgaatttctgcttatcatcgtccaaatcagtgtacaaccggaaatagaggaagcttcctgctgaaacgaagaagacgattccgataaacagtccgacaaataatatcgggccataccctttgcttatattatatacctcataatctacagccccgaaatacatgtaatccagtttcttttgcaaagcctccccggctttcactaaagccatgccgtcagcttcctttgcctgccatgcatagaaccggttttcgcttttcggttttttcagctgtgcgaaatctttgtctgtcacaatataatagctgggttcagataacgcttttgaacggatcgtttgatcagccttcagttgttttccatttgcaaaagggattgacgaagggagctgctggtcatcatctccctctaagccgatcttgacctcatactcggcagccgccgcttttccgtcttcaagcttgacgtggtcggctccgacgagatcggcaaacttgttatagtcagattctttcacaatcagcatgtcattgccgccgacatcgaaatattgaaggacagctgaagctttgtctgttttgatatttctttcatccagtgtgtcattgatgaaagccacgtctttttcgatgtgtttgtttgtttccggcggcttatatgagaacgtatgcgggttcatctctttaattccgtttgtcaccagagtttggaaaccgtacagcgtcccaatggcgctgaatgcgacagtagagataatggccaccataaaaaacgtccgcgcattgtctttcatcctgtaagacagatcagaaaacaaaatcatattcgttttccgccaaaacagggtttcccgttttttgagcctgcggatcacataaacactcagctgcgtaaacagcagatatgtgccgataatgacaacaatcgtcaccggcaccatcgccacaagaacgcctccttctttgacaatcaaagcggtgtaatagcctccggcaagcagcacagcagcaaccagcgtaagcaaggcagatgctttcggctcccctttggagattttgttcccttttaacagaacaatcagcttctcgctcctgagcacaaacgacacaagaaaagagataaataagaacagaccgttaaaagaaattaacgtcacaatcatcgccatcaacgggaagtaaaaatcgagcttgttatcaataatcaggacattttccgcagtgagcagtatcaatttggcgaagacgagcccgagcacaatcccgccgattgtcgcaaaaaatccaatcagcatattttcaagaaataccatcatgcgaatttggcgcatcgacatcccttgaatcattaaaacgccgaattccttttttctcgattgaagaaatgaactcatcgagtacagcacaaagaaaaaagagaagacaaaaataatgccgccggcgaccagcaggccaaaggatgcatgctgcccgatgccggaagtcaaagaatcactggtcatcaccgggtggaaagcaaaaatcgcaaatgcgaaaaaaaccatcaccgtaaacatgctgctgagaaaataagcggcatacagccttttgttgcgaatgacattgttaaacgcgaactgacgaaaggtcatttgcatcccctcccaacaaggacagcgtatcgagaatcttttggaaaaacgcttggcggttatcgccgcggttgatctccgaatacagctttccgtccttaataaagacgacccggttgcaatagcttgccgcctgagggtcatgcgtgacaagcatcatggtcgctttttcattgcggttgatcgactcaagcatttccatcacatctttggatgactttgaatcaaggttgcctgtcggctcatcggcaagcagaagcttcggcgaatgaatcatcgctctcgctacagcggcgcgctgggcctgaccgcccgatatctcatatgtgcgctttttcatgatctgggtaatcccgagcttttcggccaattcgtttgccctccgcttcatttccttgaccttttcgccgtcaagcgtcaaaggaagtacgatattttcttcaacggttaatgtcggcagaagattaaagtcctgaaacacaaatcccagctctctgcggcgaaatttagccaatttttcttttttgagaacatgcgggttttggccgctgatcaatatttcgcccgtcgtcggctcatcgatcgttgcaatcatatttaatagggtcgtttttccgcttcccgacggccccatgatcccgacgaattcacctttatcaattgttaggttaatatctgttaacgcgcggtacgcaatttttccttcgtaaatcttactggcttgtttgacctgaagcatcacaagatctcctttcacctttaactttcgatctgtgaccagtttacctaaatctcttgttgatgaactatcgattcttctttcactttcattacatcgatgtaaggttttgcgtagccgtgaaaatcagccgaattgtcgtgcctttcccttcttgtgaatcaagttcgatccggtggccgagctggtcagccgccgattttgccaagtaaagacccattccggtcgattctctgaaacggcgtccgttttctcctgtgaaaaacgggtcgaaaacccgcttttgatctgtatccgggatgccggcgccgaaatctgccacttccaataccgcttccgaatcattttcgtatacagaaataatgactgtattgcttttccccgccgaatatttgaccgcattgttgacaaactgggaaatgatgaaaaacagccacttttcatctgtttcgacggtgatgccttttttgatttctttgaacttaggataaacttgactgcgaatgtaaaagcgcttgttttcgcgattgacctcgtgaacgatatccgccaatgcgaccggttttatacgaaaatcctgttcgatcgtccgcagtctggccatatagagaatcgtattgaggcccgttttcatccgctcggtctcctcgcggatgctggatgattccggttcatccaaattttgagccgtcagttcgatgaccgacaacggcgtcttcatttggtgcacccattgatccatgaaagtcaaatgctctttttggccaagctccagcttctttaattcttggcggtattgcttgtactggcttttcagcagctgttcaagcgcttccgacaaaggggattggggctgattcgattgcctgaaggtgtcatccaatgactccagcccgctcgtcatccgtttgtagaacttccggcgcgtatagtaatggtagaaaagatagaagccaagaaagaaaaagccgagaaaaacggcataaaaagccggtctgatgtgctgatacccatcaagccagtacactgacagcattgtgataaactgcagcgcctgcacggcaatcaacaaatagtgctctttgaaaaaaagcttcattcctctcccgccttcacccaggatacattcaagcgatagcccgcgccccgcactgtttccactgcatcttcaataccgagctcctgaaacttttttctgacgcgcgtaatgttgacattaagcgtgttttcatccacatatgcctgatcatcccacagcttggccagcaaatcttcgcggcctgaaattctcggatggcgttccattaagctttcaataatatccgcttcttttttcgtcaaagcagccgtttgaccggcaaatgtcagttcaagtctttccggatacagccgcagcccttctttttccagcagccgttcctccgccttcgccgcgtattcgccgtaagccctgcgaagctggctgcgtatttttgccatgacgatctcggcgtgaaacggcttggtgataaagtcatctccgccgttttccaatgccatcacctgatccatttcacctgtccgcgcagaaataaacaagacggggcaaatcgattcctggcggatttgccggcaccagtagtagccgtcaaagctcggcaggttaatatcaagcagaacaagatcaggcgccgtgcttctgaactcatccatgacacggtcaaagtctttcactacatgaacgttgtatccgtatttgacaatatgcgattttaacaaatctgcaattttcgggtcgtcttctacaatcatcactttttgcatctcggtctctccttttggtttggatatattatgacacgaagcggtctgataaacaaaaactgccgcgatccgtcctaccttacaatcatgtaagtgtattgtaataggaatcaatatcttctctctgcgcttttttataaaataataccatccacaaaactgaatgaaagaggagacggtatatgaagacacgggcgggcggcctgattgccgcggttctgatcgccgttgccggcgtttttatcctgcagaaagcgacaggaggccttgtgccgctggccgatgattatatacaaggccagggaaagcctgaggcttattatctcaaagctgaggatcatgcagaaaagccggataacggaaagtacaactacacattaaccggctatgacgcgagcggacacaaacagcagattgaggcagaggcagacgaaaaactgcatcccggcgctttcatcaaagtattggcgtacggaacgaaagccaaaagcttgactgaagtacacgaagaagaaatccccgagggcgctttggctgccatgaaaaccaattaaaaccccatcgccggatggggttttctgcttaatatttaaatcgattgataatggtttgaagttcttcagccaattgggacagcgattccgctgcatatgagatttcttccattgaagccagctgctcctgggttgaggaagcaaccgcttttgtgctggctgacgtttcctgtgatccggaagccaatgtttgaatggtgttttgaaccatttcgacacctgatgtcagctgctgagtagaagccgcgacttcttggatttgagaagcaacctgttccaccaagtttaaaatttcgttgaaattaccggtcgtctcctgcgacaaagctataccggagctgacattttcttgaacgactttaatattatttaccgtttctaccgattcattttggatcgttgtgaccaatgattgaatgtggttcgctgacttattcgtttcgtccgccaatttccggacctcttccgccacgacggcaaacccttttccttgctctcccgctcttgctgcttcaattgccgcgttcagcgccagcaaattcgtctgctccgaaatatcggtgatgagcgaagaaatgttgctgatttccgccgtgctggacacgagcgcctgcaggccgctgccggccgagtcgactgacttatcaatgaagttcatttgttcgagcattttatgaacggactcggagccgatttcggctttgtctctcatcgaagacgacagatccgctatgctgcctgtattggaggcaacggatgataaacggtccagcaattcatgaattgcttctgaactcttttctgtcatttcgctttgcgtcatgttgctgtcggcaatcgcctgcatctcttcggaaatcagttcggaagtcgatttcgattcctccgcgcttgcggacaactgttcagaggatgcggcgacttgctcagacgagctgctgatctgcttcacaatttgcgtcagcgactggacaaaagcattgaaagaattggcaagctggccgaactcgtctttatttttgacgatcacttttttcgttaaatccgcctcgccgtgggcgtgtcctcaagctgctgattcaggcttctcaacggtaccagaatagacttcaagagcagcagactcaaaacaattcccaatatcgctgatactcctgtgacagcgatgatgacccattcgctcatcgtcccattggctctgatctctgctttcagatcatccacctcttgttccaggctttcgaccagctgattgacagacggatcgaggacatcttttcttaatgttctttcctctccgaaatggatcgattccgcttttttaaggcttgaagcgtaagtctgcatgacttgttgatttaaatcccaataagccttgaagttttctttaatttcttcgacgttcgctttgtatgatttttcccggatcagttttccggcccggtcaagactctttaaaacatcgtcggccttgtccttcattccttcactgtattcatcgtctccggtcataataagggctctctcgtcattcgacaagccggtcagacggtattgaatatgcttaatctctttttgaaattccatcttgtccttaagttcttcattctttttcaccgtagaagaaatcataaaaacagaggagattccgattccgaggattgaaacgactagaattgatatgattcccagcagttttgttttcactttcattatggtgatcctttctcctttatgtcatcaatgatgaaaaacagttttcaaatcaaacatcttcttccctccatagtatcgacatatttcgtcaaaatttgagaaggtgcagaatataagccgaagaaaaagctctgccgggaaggcagagcttttaatgaattggtttacttggcgggcccgccgatttggtatgttcatagaagtggtgaaaataatcatttgtctctgctttgatgactttccaaagcagcaggatggcgatcaggtttggaatcatcatcagcgcattcgccatatcggcaaacgcccagacggtgacgaggttggcaaccgtcccgatgccgcaggcgaggatgtagaccagcctgtagcccgcaattcctttggcgcctgccaaatattcgaagcacttttctccgtaaacataccagccgacaattgtagagaagccaaagaaaatgaccgacagagacacaatgtattcgcctgccgcgccgagtactgaagcaaaagctgcgcttgtcaatgccccgccttccaggctggcattatgggccacgcctgatatcaagccgccggacgggtcccagaaaccggtaatgataagggttaaaccggtcattgtacacaccacgatcgtcacgataaatgtcccggtcattgcgacgagcgcctgttttaccggatggtctgcgcgcgcatttccggcgattagcgccgccgtcccaaggcctgcttcgtttgagaaaataccgcgggataccccgttccgaaccgcttcagatacggcaattccaaggaagccgccggctgccgctacagggtggaaagcataataaaaaatcagcgcaaaagccggaataatcttgtcataattcaaaatcagaatcaagatcgccccgcccatgtaaagaaaagccatgatcggcacaaagaagctggcaacggtgctgatccgctggatgccgccgaagataatgacgctgacgagaatgacgagaatcagccctgtcacccagttttcgatgccgaagctgttcttcgtaatatcagcgatcgtattggattggacactgttgcctatccccaaagcggcaaaagctccaaacagcgcaaaggcgatggcgagtcctttaaatttgcggccgagtccgtgttcgatataatacatcggcccgcttgaatattcccctttttcattttttacgcggaatttaacagccagcaaggcttccgcgtatttcgttgccatccccaacagcccgacaacccacatccaaaagatcgaacccggtccgccgagtgtcaatgccgtcgcgacacctgcgatatttccgtttccgatcgtagcggcgagcgctgtcatcaaagccttaaaatggctcacatccccttcggcagccgcgtctttgctgtcttctttgccaaacccgatcttaaacgcatagatcaggcggcgaaattgcagtccttttaaaacaatcgttaaaaataagcctgtcccaaataataaaattaaactgggcggcccccatagtaccttattaatcttgcctagtatttctaagatatccatatgactcactcctgacaaagataacgctttcatagctgcatgagatattctatcacaatggaaaatggttatgtttgtgaaacgacacaaaatgtaatcgcttacatttgtttttttaacaaagctattttttaaagaaaaaaattttaatagataacttatctcctcaagcctttcaccttattcaacgttcaccaatttgttaaatttcacaaaaaagcgcttacatttttaattttacacacgatgctcttcccgattcagagatttatactagcggtagaatcatatttcatttgagggggacgacatcatgatcattggaattcctaaagaaattaaaaacaacgagaaccgtgtagccattactccggccggagtagtcgcgctaaaaaaaagcggtcatcaagttttaattgaacagggagccgggcttggaagcggattcgaggacgccgactacaaagcagccggggcggacattttggctgaagcgaaagatgtgtggggaaaagcggatatggtcatgaaagtgaaagagccgatcagctctgaatacggctatttccgaaaaggacttgttttatttacttatctgcacttagcggctgaacctaagcttgcgaaagcgcttgtggacagcggcgtcacagccatcgcttacgaaacggtcgaagtgaaccggacgcttccgctcttgactccaatgagtgaagtcgccggacgcatggcttcgcagatcggcgcgcaatttcttgagaaatcaaaaggcggcaaaggcatcctgttatcgggcgtacccggtgtaaaacgcggcaaagtcacgatcatcggcggcggagtggttggtacgaacgctgccaaaatcgctgtcggacttggcgctgacgtcactttgatcgacttgagcgctgagcgcctccgtcagctcgatgaccagttcggcaaagacattcaaacgcttatgtccaatccgctcaacattgcggaagccgtaaaagactcagaccttgtcatcggcgccgtcttaattcctggtgcaaaagcgccgaagcttgtcacagaagagatgatcaagtcgatgtcgccaggttcagttgttgtagacgtggcgattgaccagggcggcattatcgaaacggttgataaaatcactacgcatgacgatccgacttacacgaagcacggcgttgtccactatgccgtcgccaatatgccgggagccgttccccgtacatcaacgatcggcttaacaaacgtcaccatgccttacgccttgcaaatcgcaaataaaggcgttgaacaagcagtcgccgaaaatcaggcgctcgctctcggcgtcaacgttgcaaacggaagcatcacctacaaggccgtcgcgcgcgaccttggatatgaatatgtatctgtagaagatgcatttcaaacggtaaccgctggttaagcggattttatctcttgagaacattttaacaactctttctgactgtcctttcacgaaaaaaggctggatgatatccggccttttttccattctgctttaaacattcaaggccgctttccggcaaacggcgtcgccttcatctaagaaaccggccacaagtcaatttttgaatggtgttcccgtatcaacatattgaaacacatgaagcgacggcaatggacgtcctttaaaatcaaacaatgcctgattgtctacggcgctgccgccaaaccactttcctgcgtcttccgggtcatattcagcagcatagcttgtagcccagcctgatccgtatgtctcccaaagcgctttatttttctcgagccggtgagccggtcctaccggaatccatgccggttcccaatagaaaacgccgattccggcttcacctacgtcgctgaccgcttgaatcacatcacggaccgcgttcgcctgcccttgaacggtgaccggataattcagcgtttggccgtttttgggagctgtatttccgtgtccgtctccgtcttcagccgtatacgtataagatgtctcagcaaccatgacttttttgccgtacgtatctgcgacagatgtcaggacggatgttaaattcttcagcgtgccatgccaaaacggataatacgagcttgcaaacacatcgtagtctacatgatgccgatgaagcgtctcggcaatccaagcgtaccttcctgacgtctccggattggtaaaatgcaaggcgactaggatattcgaatccgtctctcgcaccgcttgactcccggcgttgaataattggctcatcttcgcccaatccgtttcaccggcaaggcccccgtttgtttcgttaccgacctgcaccatgccgatgtcgatgcccgctgctttcatcgctttaaggctttgttttgtatattgataaagcgccgtctttttatcttcaaagtttaggttcgcccatgctttcggcgctttctgtttcgccgggtccgcccagaaatcggaatagtggaaatccgccagcagcttcattccgttggcagtggcccgttttccgatctgaatcgctttttccagatcattattgccccctccgtagccgttgccgttggcatcatagggatcattccatatgcgcacccggacataattgacgcctgcttccttcagcgttttgaatatatcctgtttctttccggattcattgtaaaaggcgacgccgctctcttccaaagcgatgatgctcgaaacatcaaccccttttataaaatccttgcgaagccctgaaaccttttcaacataaaggtcgctttttgccgtccctgaatctctggcggcttccgccggaccgcttgttccaaatgcgcccaaaacaaatatcagcaccacaaaaacagccagcacgttcttcatcaatctcgcttctcccctttcataatagacacacaagcaaaaagaaaacgctttcattattcgcccggagaaacatccaccttaaagcggatgtcctcccaggcctattcttttgcttttaccgctattctggcctcatatttttccaatgtgacttcgccggccagcgtttctccggtcagcatatctttaactgccgacgccaacacgacgggctgacgtttttccgtgaaattcatgatgaaaatatagtcattttcctcatcctgtctgacttgaacggagacgccaggctgatgtttcacgtcaagagccggttgaatcgcaagctctttaatcaatgttccataaaaatcccgatgaaattggctgcttaaacgcgcaccgatataatacgttttcccctgtttgtatggatggctcgtcacagccgtcgtgtccgcataaaagtcgtcctcatagaatccctcgggatctgccgtactgagcttcagcacggtcgcgtaatctttcagctcatacgaccggttttgataacggaccgcatttttatcgcccggatagagtgtatcggtttcaacaggctccatgccaaacatctcttgcagatcttttggccatccgcctaaataggtcagatcagattcgttgacgattccgctaatataggtcatcaccaatgtgcccccgttggcagcaaatgcctttaagcgcgcgattgtttcttcgcttgctaagtaaagcatcggaacgatcagcagccggtacgatgaaaaatcctgttccttcgtaatcacgtcgactggaatatcacgctcccaaaacgcgcggtagtgctcgtgcagggtttggggataccgcttggttttcatcccgaatccttgtgcatcttggagggcccaatggttttcccaatcgtagagaatcgcgacatccgcaggccggatcgttccggtgacttcagacagcgcttcaagggtttgcccgacttttgccacttctttaaacacgcggttctcggaacaattgtcatggccgacaaccgcaccatgaaatttttccgatgagccgcgggatttccgccattgaaaatagaggatgctgtcagatccgtgtgcgatcatctgcacagaagacaggaggtgcatgcccggccgtttcgctttattaaaatcgtgccaattgacagcgcttggcgtcgattccattaagagaaacggctgctgtttcaggctgcggtacaaatcattgataaagccaactttcatggccaaatctgctgtgctttcccaatcgttgtgccaggcggggtacgcgtcccagctgatcacgtccaggtgcttggcaaacttgctgtagtccagcccttgaaacggaattaaatcatgcgtgtccgccataaaattggtcgtaatcggaatattcggcgtgatttcctttaacggaacgatttcattttgaaaaaaagagatcgtctggtcagtgacgaagcgtcgccagtctaaattcaagccgtgcaccgcattttccccgatcggagacggcgattcaatctgtgaccaatcgttgaaggtgtggctccaaaaaggcgtccaccatgcgtcattcaaagatttaatatcatggttgtacttctttttcagccagtctctgaaggcgtgctgacattgatcacaatggcattctcctccgtattcgttggaaacatgccacatcaaaagggcatgctggctgccgtacctttcagccagcatgcggttgatctctttcgttttttcacggtatacgtatgaagtgaagcaatgattgtgccttccgccgtgcagctgtttgacgcgttcagcattcacgcgcagcacttccggatacttttgcgacagccaagcaggacgggcgccgctcggtgtcgccaatataatccggccgccgttccggtgaatgctctcaaaaatatcatccagccattcaaacgtatagacgccttcctccggctcaagggcgctccatgaaaaaatccccactgaaaatgtattcgtatgggcaagcttcatcagcttgatgtcatctgcaagaatatccggacggtcaagccactgatccggattgtagtctcccccgtgaagcatgtatcttgcttgggtcgtataaatttttggcataatactctccttttttagaccattttctccttcggactatcctttcgttccgcctgccgtcaatcctgacacaaagttcttttgcagcatgataaagatgacggctaccggtatgctgatcaaaatagcgccggcggcaaacgtcgtatagctggctcccatcacctcattgactaaattgtataaaccgatcggcaatgtatacgactccggtgtccgcaatatcgtcgaagacaaaacgaaatccccgagcggcccggtgaatccgttcatggcaacgaccgcgatcatcggtttggatagcggcataataatctgcaggaaaatccttgtattgcttgcgccgtcaatcttagcgctctcatccaaatcgatgggaatggagtccatataccctttcatcaaatacgtgttcatcggtatgagcccgccgatgtacagcaaaatcagcagccaatggctgttcatcattccaagcatctgcgctaaaacgaagagcgcaaccaaagccgaaaattgaggaatcatttgcagcagcaagaataaaactaaagcgtttttccttcctttaaaacgaaaccgtgaaaaagcataagctgtaaaagaaacgctgatgaccgatccgatcatcgtaaagatgctgattttcagcgagtttatataccattgcccgtattggaggctctctttgccggcgaataattctttatagtgatccaatgtcggatttgccggaatgatagaagtgctgaccaaactgttgccgggattaaagctggcccccaccgtccaaagcagagggtatatgataacggctgtcataaaagccaacagagaataggtcagaaggagccgaaagaatcttcttttcttcatacgttaagccccctctttgaaagaatttgtccgtctgaactgccacagtgcaattgagatgacaaagaccgacagcaggatcgtcaatgcggcggctaaagagtactggctcgactgcatcgtcaatttgtaaatccaggacaccaggatgtcggttcctcccgctgttgacccgggaacagccggaccgcctccattgaatagataaataatattgaagttattaaaattaaaagtgaattgcgtaatgataatcggcgccatcgcgattaaaatcagcggcagtgtaatatgcctgaatttcgaaaacgcagacgctccgtcaatcgtcgccgcttcataaaggtcatccggaatcgactgcagaacaccggttgttacaatgaacacatacggaaatccgagccagccctgcataagaataagcgccagcttcgtccaattggcattcgtcatccaaggaatcggatcgatgccgaatgcggcgaggatttgatgattgaaagcaccgaagctgtcattaaaaaggccggcaaacacgagaatggtaacaaaaccgggcacggcccaaggcaagacaagaatcgtccggaaaatttttttaaagcggacttccttctgattgacgacaaccgccaacaaaattcccaacccgacttggagcgtggaagcgacaagcgtccaaacaatggtccaagctaaaacatccaaaaaggtcgaccgccaaatatcaacggtgaaaatttcggaaaacgttttaattcctacccaatcgacaaggcgggcaggcggagaatggtagaggttatagtttgtaaaagctaatgcaaagctgaacaaaatcggaaaaacaacggcaaaaaccaggatgaacagcgatggcccgctgatgagatacggatatccctgagctattaaattatgatattgttccttgagtgaactgagctccttttgttcatcgcgcctctttccgttttggtaggcgtcccgcaaattggcgtaatagacagccagcccaaaacaggtgacaatcacagcaataatgccttctgccaatagaaaaatcgagttgtcgcgcggcacttcggttccaagcgtaaacaggccccacagccccatattcagcaaatcgccaaaaaccgcaaagaacgagacgcctaaaagaaggaataacagaccctttatccattgtttattgtagaattggcccagaccgggaataattgataatagtaaagcttttttgcgatgctgcaccttctccttcacctctttatatggacgtgcttataataaatggcgccaaacttaagacaagtttgacaccaccgcccgcggcttatttgctgccgctgtgcttcgctttgatctgtccttgtatcgtttccgcggcttgatcaagcgcttttttcggttcggcttttccggttgcaattgtttgcagagccgcatccgccggcgtccatacttcattcatctcaggaatattcggtgtcaactctgagtactgagattgctcggcaacggcttgagccgcttcgctttttgtgacggcaggatcatccgccagttctttgactgcgggaacttcttttgtgatctcatatctcttctttgagttttctttattggcgaggaagacgactaattgttcggctagatcggcattcttcgaataagcgcttacattgtagctcttcacgccgacaaaagaactcatatgcttgccgttggacagtttaggcagcttggcaaccccgtaattgatacccgcttttttgaacggttccaggttccacgggcctgaaatgatcgctgctgcttttccttccgtaaacagcgattccagcacattgatgccctgctccccaataattccggcagggaacagcccctcttggtaaaacttctgaatgtactcggcgccttcgactgcacctttgttgttcaagcctaggtcggccggatcataagtgccgtcggcatcgcttttaaaaatgtagccgccgtaccctcccatgacgctctgtgcataataaatctggtcaaacagcgccaggaagccgaattttttgccgtcagccgtttttttggaatactcataccattcatccagcgttttcggcagttctttttcagaaattaaatctttattatagtagagcatcgtcgtttcgaccgctttcggcaggccgtagaccttgccgtttgtcacctgcgatctcatggcaggttccgtatagatcgattggatctctttgtccacctttaattccttgatcaaaccttccgttaccgctgtcccgatttggtctccgggcatcgttaacacatccggacccgttcccgccggtccatccatccgcaagtcttcgatctgctttgcgtaaggcttttcaacgactttgacagatacgccgtgctctttttcaaattgggcgacggcatctttaatgccttcgcttttctctttatcttcccagaccacgagttccttttgcttcgagtctgatgctccattgctgctctctttaggcccgcaggcagttaaagacaaactgagagcaatgacactgctgattccaacatattttttcatattcatcatttgtctcattccttttattggagtgaaagcgctttacaaaaacaatatagcatgtcttaggaaaagtgtaaacaattattttacttattccagtaaaatgttttacgaaaaaagcgcggcttgtgaacagcagcccgcgcttttttaattggtgcttttcctgaccaccagttcggcaccgatatatagcgtttttaaagcttttcttttttgaagtatttgttccaaaagcaattcaatagcgtttttgcaaagctctttaatatcgatatggaatgtcgtcagcgggggagatacgtatttcgctacactgatgttgttgatgctgatgatgctgactctgcccgggatggcgatccctttttcatttaaggcctgaaggcagcctacggcaatcggatccgccgctgtaaaaaaggccgtcggcagcttttctcccaatgtttcaactgctttgtccatcagatggtagccgttttccaccgaaaaacccctccggcaaaaaataaagctttcctccaagagccctttttccttcatatattcgcgaaacgttcgttcccttacgtccatttcgtcttcatctgtattggggttgtggtacgtacctccgataaagccgatcttttcatgccctttctcaatgagaaaatctaccgttttcctcgtcatctgctttaagtccggcctcactgaatcaaagtgattcggatcaggcgtcgaatcgataaatacaccgtgaggcgtcatctgtcttaatcggattaattcatcatctgaaaacgagccgacggcaatgaatccttctatgttttcgggaatggcgtcaatgcctcccgaaattttatacgttgccagttcgacgttgaattgctttgcgagcttctcgatttccagcctcatcgttttaaaatacacgtcttcgagctcttccttatccgtcagccagtacagaaacgcgatgttttttaccagtgtcctgatcgttttcttgcggtagttcaggctttccgccacttcaaatattttctcccgcgtctcatcgggtacggaaaggctttcgtcgttattcaatacgcgggaaaccgttgagatggaataccccgccttttctgcaacatcttttatcgtcgccacgattgtaaaacctccatatgaacacctttattttaaatatcaaattttttagtaaaatattttactaatttaacgttgatttgcgtaaaagtcaagtgctgattgccctatccccgccaataaggattttacatgaaaacgcttcatttgaaaaaacactttttattgcaccaatcgaaaacccgtagtaaactggggttgaacttaattaaattaatttattaagtctggtacgtcaaacgaataggaggatatatgaatactgcagccgctttatcaaacgactttcgttctatttttaagacagaaaagacaccgcgaaccttttttgctccgggaaggatcaacttaatcggcgaacacacggattataatggagggcatgttttccccgcctcgatttcatttggcacctatgcccttggcgtgaagcgcgatgatcaaatgatccgcttctattcaaagaacttccctgacgaaggaataattgaatgcagcttgagcgatttagcctttgaccagtccgacggctgggccaattatccgaagggaatgttccttttgacgaaagcggcaggccatcaaatcgttcacggcgccgatattttgtattacggaaatattccgcagggagcgggcctctcttcttccgcatcgattgagcttgcgacaggcgttttgttaaaagggctttatgatttgcagacagacacgatctccatggtgaagctcggacaaaaagtcgaaaacgaatacattggcgtggggagcggcattatggatcaattcgcgatcggcatggggaaaaaggatcacgcgattttgctagactgccgtacacttgattacacatacgctcccttcgtgttgaaagaacacgatgtgatcatcatcaatacaaacaaacagcggacgctggccgggtctaaatataatgaaaggcgcgcccaatgtgaagaggcgctcggcgatctgcaacaggagttgtcgatcgcaagcctgggcgaattgacgatggaaggatttgaagcccatcagcacctcatcagaaatgaaatcaatcaaaaacgcgccaaacatgctgtctacgaaaatgcccggacgctgaaggcgcttgaaaaacttcgcgaaggcgacctcgccggatttggcaagctgatgaatgaatcccatttgtcattaagggatgattatgaagtgacggggctggagcttgatgccattgtccaggcggcctgggaacaagacggtgtccttggcgcccgcatgaccggcgccgggttcggcggctgtgcgattgcgattgtagaaaaagaccggacagacagctttaaagaacgcgtgaatgccgtctaccgcgaaacggttggctatgatgccgctttttatactgcggcaataggcgacggcgccaaagaaatatagaaaggggaatggatatgagcgtgttggttttgggcggtgccggctatatcggttcacacgccgtgtaccaattaatagacagaggcgaaaacgtcgttgtcgttgacaacctcgagaccggccaaagacaggcagtacatcctgatgcgatcttttatgaaggggatgtgcgcgatcgcgatttcctccgcacggttttcgaaaaggaacgtattgaagaagtgatccattttgccgccagttcacttgtcggcgaatcgatgaaagatccgctcaaatattacgacaacaatgtatccggaacacaggttttgcttcaggcgatgctcgagcacgatgtaaaaaaaatcgtattctcctcgacggcggccgtctacggagagcctgaatcggtgccgattacagaagacatgccgacaatgccgacaagcacctacggggaaacgaaactgatcatggaaaagctcatgaagcggactgaagaagcccatgggatcagctttgtgtctctcaggtacttcaatgttgcaggggcaagggagacgggagaaatcggagaagaccaccgtccggaaacacacctagtccccctcatcctgcagaccgctctcggccaaagaccgcatataacgattttcggcgatgactatgatacgcccgacggcacatgcatccgcgactatgttcatgttgaagacctcattgacgctcatctgtcggcattagactatttaagaaaaggcggcaaaagcgatatattcaatctcggcagcagcgaaggattttcggtgaaagaaatgattgatgcggccagaaaggcaaccgggaaagacattaccgccgagatcggcaagcgcagagccggcgacccgagcatcctgattgccggctctcacaaggcaaagcaagttctgggctggaggccttcgcgcacatctgtagcaaagattattgaagatgcatggaagtggcattcctcgcatccaaacggttacaggaaggaagtgtcaacatgattgaacaagacatagccggactcattcaaaaagcgcttgaagcagggttaatcgaaccggctgacgtgaactacgcgcgcaaccaagtgatgaatctgctgggcttggaatcgtttcctgaggaagccactgctgcttccggcgactccatcccagaccttttggaaaaactcgcagcctatgcagtcgaacacggcgtgataaccgacgatctagacgcgaaagacatgctggcggcaaatgtgatgaactgctttgttgcaagaccttctgtcatcaatgcagtgttccagcagaaatacgaacaatcgccgctggcagccaccgaatatttttatcagctcagcaaaaacagcaactatatccagacgaagcgaattgaaaaaaatatttcgtatcagatggatacgccttacggcacaatggatattacgatcaatttgtcaaagccggaaaaagaccctgaacaaatcaaacgggaacgcgccgctgcaaaacaatcgcgcagctatccgatgtgcctgctgtgcaaagaaaacgaggggtatgcgggacgaatcgggtatcctgcccgggcaaaccacaggattattaaagtcccgctcgccggagaaaactggtattttcaatattctccatattcttactataacgaacacagcattttattttctgagcagcatcggccgatgaaaattgataagcttgcctttcacaggctgcttgcttttactgagctgtttccgcattattttatcggatcgaatgccgatttgccgatcgtcggcgggtctattttaagccatgaccattatcaggccggacgatatgagtttgcgatgacgcgcgcggaaggcgcgttctcctttcaaatcaaacagcatccggccatcgaagcttccgttttaaaatggccgatgtccgtcatccgcttgaaaggaactgcgatcaacagccttgttgaagcggcggaccatatttttcagacttggaaaaactactcggatcaacaagcggatatctcggcttttacagatggcacgccacataacacgattacgcctatcgcaagaaacgtgagcggcgtttatgaaatcgaccttgtgctcagaaacaaccggacatctgccgagcacccatacggcatattccatccgcatgctgacgttcaccatattaagaaagagaatatcggcttaatcgaagtgatgggcctggccgtccttcctccccgcttaaagaccgaattggcggcagtgaaagaattcctgctcggtcagtcagatgccgttgaagcgcatcaccgggaatgggccgaacagctcaaaaccgaatacggagagatgtccgaaccggagcaggctgaatcaattgtacgaaaagaacttggcaagaaatttgtcaaagcccttgaggacgccggagtattcaaagaccgcaaagctttcatgcgctttatccgcacagtcaatcatcaggggtaaggcttgaccggtgttaaaataggcgaaaaaataagcttattttagcaccggatcaaacagctccgccagcagcaatgaaacggctccgtaaagcgtcgcttcatcgccgagcttcgttatcgtcacttctgtctgcctcgcttcggctgttaaagctttctgctgtatcgtttctcgtatcgccggcaatatgaacctcccgcccttcatcactcctcctcccagcacgattttgcccggattgacaagatgaatgaaattggtcagcccgattccgatgatcacaccggtttcctgaaaaagttcgatacatgtttggcagccgttctcggccatttcaaacaaatctttggctgtcaggctgtcagtgctttctttcaaccgctttttcccccgttcggcaattgcttttccgctcacaatcgtctgcaggcagccgcggttgccgcactcgcacttttctccattgatatcaatgatcatatggcccagttcacccgcgatcccttcagctccatggtacagttttccgttgatgacgatccccgcaccgacgccgcggccgatattcacggcagccatgctccctgcgtcatcgcggccgccgaaccacgattcgccaagcgccatcgcccgggcatcgttttcaactcttacggttaagttgaattcttgttccagcacatctttgatggggatattggttaagtttaaaatcggtgcgatgcgcgacattcccgtttcagcatcgaccacaccgtgcattgcaatgccgatcccgatgatcttttcttgctcgacatcggcacgtcccaaaatggcatagacactttcttttaaaacttccatgaacctctcgtttgtcagcggttttttcagcaggctggatgtccgctgcagtatccctccggctaaatcggttaagatgcactccaccgtctcaggcccggcatcaatgccaatgacataataggcacctgtgttgatgtggagcatggtcggcttccttccgccgctcgaatggccgagcgtgctttctttcacgagcccttgttcgatcagctctttgacaatgcttgagaccgtgggaggggtgatctttgtttccttggcgatctcggctctcgaaatcggctctgaagttctgattttattaagaatgatcgatttgttcaccgatttcattaattgaaatgtaccgcgctgcatgtgaaatcctccatttacaccatatcgtaggttttattgtaccatggttaattaattaaattaacaaacgaaaacaagataggtgtttccgaaggctttgtacaacattgccacagaaatggtcaaaacataaagggcacctgctccctttacttttttgcttcaggggggctttcaaagcgcttctgcaaaacaaatggtttctaaatggaaaaatttttcaaaaaatttaaaatgaaagtgtttgcataatcaaaataatcgcgttatcatacttgtatacaagtatactcgtataactaggaaggtgagtgtatgagcgaatctaaaggccttttatatccggagaagtggctttctagagcttcaactggtgttcgcgtcgcatgcgagctgagaatgcgcattatttccggtttaattgaaagcggtaccattttatctgaaaataaattggctgcggaattctcggtgagccggtctcccatccgcgaggctttaaaaatactggcatcggaaaaaatcatccgtttggaacggatgggggccgttgtcatcggtttaaccgaaaaagaaataggagaaatttatgatgtgcgcctggtgatggaaacattcgtattcgaacggcttggacaggccaatgtcgacgaactggtaacagacctcagcaaaatattggagatgatgaaagtctccatcaaatacaaagatgccgacgagttctcatttcaagacgtcttatttcacgaaacgattgtccgctccatcaatcattcttacattttgatgatatggaacaatctcaaacctgtgatggaaagctttattcttttatccatgcgggcccgcttaaaagaaaaatacgaagactttgaacgaattctcgataaccatgaactttatattcaagcgatcaaaacgaaagacagggatctgatgcttaaatccctacatcaaaatttcgatgacgtacaaggtaaagttgaagatctatggctgtcgcaacaaatgctggcgaaaggagccgaacaacaaaatgactagttatatgttaggcatagatatcggtacgacaagcacgaaagcggttttattcagtgaaaaaggggacgtgatccaaaaggaaagcatcggctacccgcttcacacgccggacatctcgaccgctgaacaaaacccggatgagatctttcaggccgtcatccagtcaacggcgaaaatcatgcagcagcatcccgacaaacagccgtcattcatttcattcagcagtgcgatgcacagcgtgattgcgatggacgaaaacgacaagccgctcacctcctgcatcacttgggcagataacagaagcgaaggctgggctcataaaatcaaagaagaaatgaacgggcacaatatctacaaacggacgggaacgccgattcacccgatgacgccgctaagcaaaatcacgtggattgtgaacgaacatcctgaaaccgctgccaaagcgaaaaaatatatcggaatcaaagaatatattttcaaaaaactatttgatcaatatgtcgttgatcactcattagcttcggcgatgggaatgatgaatctcaaaaccttggcctgggacgaggaagcacttgcgattgccggcatcacgcccgaccacttatcaaagctcgttccgacaacagcaatttttcataattgcaatccggaactggcggcgatgatgggaatcgatccgcaaacgccgtttgtcatcggcgcaagcgacggcgtgctgtccaacctcggcgtcaacgcgattaaaaaaggcgaaatcgccgtcaccatcgggacaagcggcgcgattcgcacgattatcgatgagccgcaaaccgatgaaaaaggcagaatcttttgctatgccttaactgaaaaccattgggttatcggcgggccagtcaacaacggcgggatcgtccttcgctggatcagagatgaatttgcttcatcagaaatcgaaaccgcaaaacgcctcggcattgatccatatgatgtcttgaccaaaattgccgaacgcgtcagaccgggtgccgacggactgctgttccatccatacctcgcaggcgaacgggcgccgctctggaatccggatgtgcgcggttcattcttcggcctcaccatgtcccataaaaaagaacacatgatccgcgcggcattggaaggggttatttacaatctgtacaccgtcttcctggcgttgacagaatgcatggacggtccagttgcccgaattcaggcgaccggaggcttcgcaaggtctgatgtgtggaggcaaatgatggccgatattttcgaatcggaagtcgtcgtgccggaaagctatgaaagctcttgtcttggagcctgcattttgggactgtacgcgacgggaaaaatcgattcgttcgatgtcgtctccgacatggtcggaagcacgcacagacacgcgccgaaagaagaatcggccaaagaatacagaaaattaatgccgatctttatcaacttatctcgagcactggaaaacgagtatacacaaattgcaaattatcaaagaagcttaaccagcaaaaaataggggaagaattggaggcgttatcatgccattattaatcgtagcaatcgggattgtcgcattattgcttttgattatggggttaaaactgaatacgtttgtttccttgattatcgtatcgttcggtgttgcattggcacttggaatgccgtttgacgacatcgtcaaaacgattgaacaaggccttggcggaacgctcggccatatcgcattgatcttcgggctcggcgccatgctgggcaagctgatcgcggattcagggggcgctcagcgcattgcgaagaccctcgtcaacaaattcggggagaaaaacatccaatgggcggtcgtcatcgcctcctttatcatcggggttgctttattcttcgaagtcggattggttttattgattccaattgtattcgcaatttcaagagaattgaagatttctattttatacctcggaattccgatgacggcggccttatccgtcacacacggcttcctgcctccgcatccgggaccgacggctatcgcgggagaactcggcgccaatatcggggaagtgctgctctacggtatcattgttgcaattccaaccgttcttttggccggacctttatttacgaaactggcgaaaaaaatcgtaccgcaatcatttgagaaaatgggcagcatcgcttcactcggtgaacagaaaacgttcaagcttgaagagacgccagcctttggcatcagcgtcttcacagctatgcttccagtcattatcatgtcgatttcgactattattactctcattcaagaaacaatgggacttgcagacaacagcttcctggcagcgattcgtttaatcgggaatgcctcgacttcgatggtcatctccctgttggtcgcgatttatacgatgggtatcgccagaaagatcccgatcaaacaagtgatggattcctgttcaaccgccattactcaaatcggaatgatgctcttgatcatcgggggcggcggcgcattcaaacaagtcttgatcaacggcggagtaggcgactatgtagctgaattattcaaaggaacggccatgtcgccgatcttgctcgcctgggtcatcgccgcgattctgcgcatctctttaggttccgcgacagttgctgcattaagcacgaccggactcgttcttccgatgctcggacaaagcgatgtcaatcttgcactggttgtgcttgcaacaggggccggaagtgtaatcgcttcccatgtcaacgacgcgggcttctggatgttcaaagagtatttcggcctgagcatgaaagaaacattcgccacctggacactgcttgaaacaattatcgcggtggccggattaggatttactttattgttaagtctatttgtataaaaaagttttagtgaaggagcaggtactacatgtgcaatacaatcggtgtcataggtttgggggtcatggggagcaatatcgccctgaacatggcaagcaaaggcgaacaagtcgccgtctataactacacaagggatttaaccgatcaactcgtccaaaaaacgggaggccaaacagtcaagccatactatgagcttgaagatttcgtacagtctttagaaaagccgcgaaaaatctttcttatggtcacagcaggcaaaccggtcgattctgtcatcgactcgctcgtccctctgcttgaagaaggggacgtcatcatggacggcggcaactcccactatgaagatacagaacgacgatatgacagtttgaaagcgaaaggaatcggctacttgggaatcggcatttccggcggcgaaatcggcgctttaaaaggcccatccattatgccaggcggagaccgggacgtctacgaaaaagccgctccgattctcacaaaaatcgccgcccaagtggatggagatccatgctgtgtctacatcggtccgaaaggcgcgggtcattttgtcaaaatggtgcacaacggcatcgaatacgcagacatgcagctcatcgccgaagcatatacgtttttaagagaaaagcttcttttgccgatagatgaaatcgctgacattttcgacacgtggaatcaaggagagctgaacagctatttaatcgaaatcacggcggagatcctgcggaaaaaggatgagaagacgggcgctccactcatcgacgtcatcctcgacaaaaccggccaaaaaggcacgggcaaatggacgagcctgcaggccgtcgacaacggcattccatcatcaattatcacggaatccctgtttgcccgttacctgtcatcattaaaagacgaacggacagctgcggaaaaagtattggccggacctgcaacagaagaacggcgcctggatcaaaacgtgtggatcgaccgcgtcagacaggcattatatatgggcaaaatctgcgcctatgcacaaggcttcgctcaatacaaaatgacatctgacctgaacggatggaacctgccgttaaaggacatcgccctcatcttccgcggcggctgcatcatccgcgcacaatttttaaatctcatcagcgaggcgttcgacaaacagccggacctgtccaacctgctggtcgcacctgacttcgctgaaaaactaaaagaataccagtccggcttgcggaaggtcgtctgcgaaggcatcagctcaggcatctcattcccgtgcctaagcactgccctttcctattacgacggctaccgcacaggccgctcaaacgcaaacctcctgcaggcccagcgcgattatttcggcgctcacacgtatgagcggacggatatggaaggcgtgtttcatacggactggtattaaaaactgcaccccggatctcggggtgcattcttatttcactcaaatggattttcatactttgttcaacatttcacaaacttacatttcaaattcgtgctatgataaattcagcaacagaaaaggaggactgatgccaaaataaaccagatatccgcttcagggataaaaatttttaacctaacttgtgaaatttttcacaaactttaccgacttcattcatccctggacatcctgttgtaatcaaattcctattcattcactggagggtttacaatggcaatcgaagaaaaggacatgaaacaaaagcaaaatgccacaaacatgattgatcagctagtcgaaaaaggcctaaaggcattggaagaattccgcagctttgatcaggagcagattgatgagatcgtcaaacagatggcgcttgccggccttgatcagcacatgcctctcgccaaacttgccgtcgaagaaacgaagcgcggcgtttatgaagataaaatcattaaaaacatgtttgccacagagtatgtctaccatcatatcaaatacgataaaacagtgggcatcatcaatgaaaacgaacacgacggagtcattgaaatcgcggagcctgtcggtgtcatcgccggcgtgacgccggtgaccaaccctacttccaccaccatgttcaagtccctgatagcgatcaaaacaagaaatccaatcgtgtttgctttccatccatccgcccaaaaatgcagccgtgaagctgcgagaatccttcgggatgcagccatcagggcaggagcacccgacaactgcatccaatggatcgaaacgccttctctggatgcaactcaagccttaatgacccacccgaacgtttccctgatcctcgcaacaggaggcgcaggcatggtgaaatccgcttacagctccggaaaaccggcccttggcgtcggacctggaaacgttccatgctacatcgagaagtctgccaacctgaagcaagccgtcaatgatctgatcttatccaaaacatttgacaacggcatgatttgcgcatcagagcaggccgtcatcatagacaaaggcatctactcagacgtcaaagccgaaatgacaagaaacaactgctatttcttaaataaaaccgaaaaatcaaaggtcgagaaattggtcatcaatgaaaatacttgcgcggtaaacgctgatatcgtcggcatgccggcattcaaaattgctgaaatggccggtatcaaagtgccgcaagatacaaaaatcctcatcgccgaattagaaggtgtaggtccggatgacccgctgtccagagaaaaactgagccctgttttagcgtgctacaaagtcagcgggcttgaagaaggattaaaacgcgccgaagagatgctggcgttcgggggaaccggccactcggcggtgattcatacgaacgatcaagaagccgttaaagaattcggcttaaggatgaaggccggccggatcattgtcaatgcaccgtcgtcacaaggagcgatcggcgacatttacaacgcctatatgccttctttaacgctcggctgcggcacatatggcgggaactccgtctcgtcaaacgtaggggccgttcatttaatcaacacgaaaaaagtggcgaaaaggaatgtcaatatgcagtggtttaaagtgcctccaaaaatctattttgaaaaacacgcaacccaatatttagcgaaaatgcctgacatctcaaaagcgtttattgtgaccgatccgggaatggtgaaactcggatatgtagaccgcgcccttcactacttaagaaggcgcccggattacgttcattgcgaaattttttctgatgtcgagcctgatccttcaatcgaaacggtgatgaacggcgtcgacatgatggccaaattccagccggatgtcatcatcgccctcggcggaggttcggcaatggatgccgcaaaaggaatgtggatgttctacgagcaccctgatgctgaattctttggcttaaagcaaaaatttctggacatccgcaagcgcatcgtcaaatacccgaaactgggaggaaaagcaaaattcgtcgcaatcccgacgacatcaggcacaggttctgaagtcacttcattctctgtcattacagacaaagaaacgaatacaaagtacccgctggccgattatgaattaacaccggatgtcgcgatcattgacccgcaatttgtcatgaccgtgccgaaacatatcacggccgacacaggaatggacgtattgacacacgcaattgaatcatacgtatcgtgcatggccaacgactatactgacggcttggccatgaaggccatccagctgatcttcgaatatctgccaagagcatacaaaaacggcagcgacgagctggcccgcgaaaaagtgcataatgcatcaacgattgccggaatggcattttccaatgccttcctcggcatcaaccacagcttagcccataagcttggcgccgagtttcagatcgctcatggacgggcaaacgccatccttctgccgcacgtgatccgctataatgcagcgaagccgaaaaagttcacggcatttcctaaatacagccacttcatagccgaccagcgctacgcggagattgccagaacgctcggcctgcctgcaaaaacaactgcagaaggcgttgaaagcctcatccaggagatcatctcgcttgccaaagagcttaaaattccgatgagcattaaacaaaacggcgtggatgccgccgcattcgaaagcaaagtagatctcatggccgagcgcgcctttgaagatcagtgcacgacagccaatcctaagctgccgctcgtttcagagctggctgagatttaccgttccgcatataaaggagtttagccaaagaagccgtccttccgacggctttagtttgttgacaaaatcccaaaacgacttttagttttgggattttgtcatcctttcagcgtgattgaaaacccttgcagtctaggaaggccgagcatcggagcgcagcgaatgttggaattcgtgagcaccgacgcgcaggactgacaacgaatgcgagggtttgtcgacacgctgaagccgtccttccgacggcttttcattttattttcaattaggcctctttattctcacttctctatcatttgtgccaatcatactatatgaaaattatgaaactccaactcttttctttagctgaaatacttaacaaaaaattaaaggtctttccccttgacaaaaaatatttattatttgataatttgtatataattataataattacagagaaataaagtttacaattttatttctcttaaactacattcaggaggacgatattatgtctctaatcggaaaagaagtacaaccattcgcagcaaaagcttacaaaaacggtgagtttatcgatgttacacacgaagatctgaaaggccaatggagcattttctgcttctatccagcggatttctcatttgtttgcccgactgagcttgaagaccttcaaaaccactacgaagctctaaaagaactaggtgtcgaagtatactctgtttctacagatactcacttcgtacataaaggatggcatgacagctctgagaaaatcggcaaaatcacttacgcgatgatcggcgacccatctcaaacgatctcccgcaactttgaagtgctgaacgaagaagaaggtcttgctgaccgcggaacattcatcatcgatccggacggcgtcatccaagctgttgaaatcaacgcaggcggtatcggccgtgatgcgagcatcctgatcaacaaagtaaaagcggctcaatacgtccgccaaaacccaggcgaagtttgcccggctaaatgggaagaaggttctgaaacactgacaccaagccttgacctagtaggcaaaatctaaggagtgcattcaattggtacttgaagcaaatatcaaagcacaattaaaccaatacatgcagatgattgaaaatgacatcgtccttaaagtcagtgcaggcgatgacagtgtctctaaggatatgctggctcttgtagaagagctggcttccatgtcatcaaaaatcactgttgaaaaggcgcagctcgacagaacgccaagcttcagcgtcaatcgtgccggagaagatacaggcgtgacattcgccggggttccgctcggtcacgaattcacatctttggtgctggcactcttgcaagtaagcggcagaccgccgaaagtcgatcaaaaaatcatcgatcaaatcaagaacatcagcggcgagtaccgcttcgaatcttatatcagcctcacatgccacaactgcccggatgttgtgcaggcattgaacatgatgagcgtgctcaacccgaacatctctcacacaatgatcgacggtgcggcatacaagtcagaagtcgaaagcaaaaacattatggctgtgccgactgtatacttgaacggcgaatcctttggaagcggccgaatgacgcttgaagaaattcttgcgaagatgggcagcggcacagatgcgtctgagctttctgataaagaaccgttcgatgtactcgttgtcggaggcgggcctgccggcgccagcgcagcaatctatgcggcgcgcaaaggcatccgtacgggaatcgttgccgaacgcttcggcggccaagtccttgacacgatgagcatcgagaacttcatcagcgtgaagcgcaccgaagggcctaagcttgcggcaagccttgaagaacacgtgaaggattatgatatcgacgtcatgaacctgcaacgagcaaaaggcctcgagaaaaaagaccttttccatctagaactcgaaaacggcgctgttctgaagagcaaaaccgtcattctttcaactggcgcacgctggcgcaatatcggcgtacccggcgaacaagagttcaaaaacaaaggtgtcgcatactgccctcactgtgacggaccattgtttgaaggcaaagacgtcgccgtcatcggcggcggcaactccggcatcgaagcggcgattgaccttgcaggcatcgtcaaccatgtgactgttcttgagtttgcgccggagctgaaagcagacaaagttctgcaaaaacgtctctacagcctccccaacgtgactgtcgtgaaaaacgcccaaacaaaagaaatcacgggcgatgaaaacgtaaacggcattacttacgtagaccgtgaaacaggagaagaaaaacacgtcgagctccaaggcgtcttcgtccaaatcggtcttgtgccgaacacggaatggctgcctgaaaccgtcgaacgcaaccgcatcggcgaaatcgcagtcgacaaacgcggcgaaacaaccatccctggattgttcgctgccggcgactgcacagacagcccgtacaaccaaatcatcatttccatgggatccggagcaaacgctgctttaggcgcgtttgactacctgattcggaattaatctataaaaaacgctatgctgaagttttcagcatagcgtttttctgtattcccgcaaccacggctcattcgattttggcaatggaagcatccctcaagcagcgcacctcggcacggaggcgccctctttgtagtcataaccccttataatagaattcattttctcatcttctttaatttggtactataaatatagtagttttaatattagtcatcatgaatagaggttacttgaaatgagaaaagaacagtcttttatgaactcaactgctttctttatcatcatttgtatgttaggcgggatactttttcttttaacgaagtgacatgaactttagatctatattactgagaagtatacgtataagaagacattagtccacgatgtcatatcaacttatatcagccatctcagcttatcaggtttttccttcatgcagttgaacgtggaagaagcgaagtactttgaattggagacttaatcgcccaaacattacattcgagcattctttcaattgatgaacagcctcagttttgataagcgaaaggccggcgtcaatacaaccggccttatttctgcggcccctcttttaatgaaccaacccatacagttcctgcgctcactttataccactcatcttttccgtcattatcttttgaataggacatttcttttatgcgcagcacatcgccgctgcttctcaatcctagttcgaggtcctcctccagatcagatagccggtaatacacggtatgaatatgaggttcccattcaaatgcattcagctcatgttctaaaggttcgtatattttcaaagagaacgcttctttttcttcttgcttgtcgaaagaaccactgtaaaaatcaatcgcttctttaagcagccacaatttgtgaacggataaaatcaggctcatacaaccaaattttcaagtagaaatcttcattttcagctttcaattgcttatgccattcatgatagacatcgatcatcgcctccaaaagcaagcgtttataccataatggaggagtcactgtttgaagcccgtaaaaaggggatatccataatttaacgtaatctctatgatgatctcttaaatattccatattcaattgaatattgtctgatttccaccattctattcttcgtttcagtcttttccagcctcttatttttttctttgccgaaaaatacatattgacctcccttcgcgtaacaaaaacggcgcaagagaccgcccccttgcacctaacaacacgtcatttacttataataattataatcattaaatgtcgcgatcatatcgttttgcgttccgctttttccgcgattcgtattaaagtaaagcgtcccgtcatcaaaatcgacagcctctatttcaaaaagcgtgtatgcactgctggtaattctgaaagataaatcgctgcgagtaaacaattccttcgaaaagtcctgaatcgggtttgttttttgctctttaatcatttcattgatatttaaagggtacgtcaatataatgctcacatttgaagcattgccattgctgtccggttttgtaagcggcacatacaatgtcccctggtaaaaggaaattccttgctgaatgaaatgcgaaacatccattgtctgatgattcacaacagctttcgaatagtttaatttaaacgttgcttcatagtcgaattttccggttgtatcattgaatgtcccaataaagaacctttttcccgatcttacgataaatttatccgtcccaaccgagtatgtgataccgccaatcgacaaattcgaaccttgataattcagcacatatgttttagccactttataagtatttttcgttgtatcgacgctgagcttcacgattttattggcatacttagtgccgtcagacatcggcgccacataaacgctgacgcttttatcgcccgcagatgctttgacagccaagtcattggcgtgccctaaatcatagctcgtagtattggtatccgaatttttaagaagtgcaacggttctattgcttgccgtaccgctcattttcacagagaataactgcgtcgtgtgattcgtgttattcaattttgcagcgtagatcacattgttattgcggtcgacgcacatcccctgcatcgccgtgaaataccccgacttagacatggaaacataatcggtatacgtattaaagtagcctgattgcgcatatgcagccgtccccgcaaagctgctgagagctaagataaccgctgctatgaaaacttttggttttttaaacaccatgccatccccccttaaatgatttccatattatatccttgaaggaatattgcgtcaatataagattgatgtccccctcctttctatgcaatatgccctcagaaagcttcctgtttgttaaaatttagattaatttatcataaatatggtactattattttaaaaaagagattcagaggctgaaacaatgaatgaacttgtgtttgaaaagagagaatttactcaagaccatgtgaatgttgtaaaagcaatgcatataaataactatccgattgtttatatcctttataacgagaaaaagaaaccgactgcatatattggacaaacggttcaagctgcacggcgtttgaaaaatcatatagatgatgaaaagcgaaagagtttgaatcgctttattttaatcggccatgagaaatttcatcagtctgcgacatacaatattgaatcaaatttaattaactattttatcgccgataaccgctaccagctgcaaaacgtaagccagaccaggtctagggaaatgcacaattactatcagaaacccttttataatgaaaatatctttcaagtcatttgggagaagctgagaaaagagaaaattgtgaacgattctcttgaaaaccttaggaataaagacatttataagttatctccttataaagagctctcgcctcagcagcttgatattaaaaataagatccttgatttctgtaaagaacgtatacaaaaagaaggaaatcatgtcattgttattgaaggagatgccggcacaggtaaaagtgtcctgttaagctctctgtttaatacgattcaagatttggctaagagtgaagactcttttttgaaagaaacagataattacttgctggtaaatcacagcgaaatgctgaagacttataagagcatcgccaacagcttaccgaatttaaagaaaaagagtttcatgaagccgacaccatttattaatgagaagaccaagacgggagcaacagcggatatcgtattagtagatgaagctcacctgcttctgacaaaggaagattcctataaccatttccgctaccaaaaccagctggatgaaatcattaagcgaagtaaaatcactgtggtgatctttgacccaaaacaagtcttaaagattaaaagttattggaacgaaagattgctcgaggaaatcattaatcagtatgatgcgaaaaccgtaaaactgacagaccaaatgagaatgaacgccaatccagaaacaatcaagtggattgacagctttgttgaaaagaaagttcttccctttccgactgaagactcctccttcgagcttaaaatatttgaagatgctgctgcgtttaaaacagctattgaacgcaaaaacagtgaagacggtctctcccggattgtctcgacctttgattatttacataaaaaagataaaaagacttacatcgttgatgaagaagggattaacatgccctggaacagcacccaagataaagtgacatgggcggaaaatccgaattctattaaagaagtcggctccatttataccgttcaagggtttgatttaaattacgtcggcgtcgttctcggcccttccgtaagctatgatgaagaaaaagacgaactggtaattgatacttccaaatacaaagatacaggggcattcgtgttacgtacagatttgtctccagaacagaatgaacaaattaaagaacaaatcatcctaaattcaataaatgtcctgatgaagcggggcatacaaggcctctatatttatgcgacagatcctaaattaaaaaagagactactcgagttagaaaggggaaaatggtcatgaacgatatccaaagcctgatcaacgcaatcaacgaattcagagatgaacgaaactggaggcaataccataacccaaaagacctcgccatctcaatttccatcgaagcagcagagctgctcgaagacttccaatggatcagcagtgaagaagcactcaaagcaaataaagaaaacatccgtgaagaaatcgcagatgttttgatctactcattcatgctgtgcaacgatcttggactggatgtgaaagagattgtggaagagaagattgtgaagaatgggaggaagtatccggttaatcataatggttgagactctccttttaagtagagagagcttctttcacaattgaagaccgctctctctatctccatgatgcgttgattattatggcgctctgctcggttatcttcccgtaatccccctccttcatttgctttacacccttcgattctttctacagcgttcgctagcttcctgttatttttaaagaaatgacatttgtcatccgattttcatgacatcacttactaaaatccgcctccctcaacttatacaatgaaatgagtaaatcaggaggtggcctgtagccatgagcaatgttgtaagcttaacgaatgtgacaaagacattccgccaaaaaacggcggttgatcagatagatttttcaattaaaaaaggagaaattgtagccattctagggccaaacggagccgggaaaacaacaacgatttcaatgatattggggctgttaaaaccgacggcaggcaacatcacattattcgattccatgccgcatgaaaaacgggtgcgtgaaaaaatcggcacgatgctccaggaagtcagcgtcatgcctggtttgcgtgcaggtgaaatcatcgaactcatccggagctactatccaaagcctctatcctttcaaaagcttagaacgttgacaggtttgacagacaaggatttaaaaacacaggcagaaaagttgtccggcgggcaaaagcggcgtctaggctttgccttggcgcttgccggcgatccagaactgatgatctttgacgaacccacggtcggcatggatatcacttcaagaaaccgcttttggcaaacggttcaatcgctcgcagagcaaggaaaaacgatcattttttctacacactacttacaggaagcagatgatgccgcgcaacgaatcttgctgtttaaagacggcaagatagtagctgatggaacgccgctccaaataaaatcaagaatatcgaagcattcggtttcatttatagttgatccggaacagtcactcgagaagctgtatcagcacccagaaaccgaacagatttttcgtaaaaacaaccgggtttacatcgacacggccaatacggacaaaatactggaactcattttctcagaaaagatcggcgcttatgatattcaaattgagcgcggaaatctcgaagaggcatttcgccagctgacaagcaaaggagacgagtaaaatgaatgtatttcagatgcagtgcagaatggaaatcaaaagaatgcttcgaaaccgctattttgtcttttggtcattggccatgccgattgctttttattatatttttacaaatgtcgtcaatacgaatgctccagaccctgcggcatggaatgcgcattatttaatgtcgatgacaacattcagcgtcatgggctcttcgatcatgacgctcggcatccgcatggttcaagaacgcacccaaggctggtcgacgttcatacgcgtaacgcctcttcccgaccacatttattttatcgctcaaatgtcggggcaaagcgtcattcatattctttcgatcacagtaatcttcttagccggcgccttgatcaacggcgtttctttatccccattggaatggttcctgtgcggattgtgggccctgcttggctcgctcccgtttctggcgatcgggacattgatcgggatgatgaaaaaagtggatacagcagccggaatcagcaatgtgctgtatatggggctcgccgtatgcggagggatgtggatgccgcttgaaattatgccaaaaatgatgcagaatatcggccattggctgccgtcctatcattatggcagcggcgcctgggaaatcgctcgaggtcaaatgccaaactggaaaaatattctcttcctattagcctattcaatcgttattatgctactatctaaatatataagaagaaaacaagaagcggtgtgaacaagaatgaaaaaaaacttcagcatgtttccgaaacggtacggcttttttccttatatctttttaatctatttactgctgcccatttcttatttgacaaatcagacctcgggaatcaaacagctgatcggttttggactcgtgctgcttttcttggtgacgtaccgccagcttttttttattccgccgcaaaaaaaattatttacttattggctggccatccagctttcaatcattttaatctacactgtattttatgatatcaacttagtatttttaggctttttttcagcgaactttatcggctattaccgggaaaaaaagacgttccggtgcggccttgccagcctggttgttgtattggtcgccccttttatctatcatctgctgaatgatcgttcactgcaaaaccagctcttttattttctgccttttctcgtgattatgctcatttcaccatacggcatccgctccatgaaccgccgcatggaactggaacaaaagcttgatgaagcaaatcagcatattaaggaactggtcaagcgcgaggagcgtgtacgaattgcccgcgatctgcacgatacacttggccatactctttcactgctcacattaaaaagccagcttgtccagcgcaccatcgccagcgcccccgaacgggcgcgaacagaagcaagagaaatggaaaccacatcaagagcagccttaaaacaagtccgggaactcgtgtctgatatgaaaacggcaactattgcagaagagctcatccacatccagcaaatcctgcgggctgcggacatcacattcgagtacatgggaggttccgatttttcaaatatccctcctgtcacacaaaacatagtcagcatgtgtatacgcgaagccgccacaaatatcgtcaaacacagccgcgccacccattgcaccatttccatctctcaaacagatgataaaataagcattaccatcaaagacgacggaatggggatggatcagcaaacaccatttggtaacggcttgcgcggaatgaaggaaagacttgcattaatcgacggcgctctcgacgtttcaacccatgacggcacagttttaagcatcgccgttccaaatgtaaagaaagctgaaggaaaggaagcaatccaatgattcgtttatttattgccgaagaccaaagaatgctgttaagcgcgctgggatccttgcttgatcttgaagaagacatggaagtgatcggccaggcgacaaacggcgaagaagcgctcaccgctattctgaagctagaaccggacgtctgcctcatagatatcgaaatgccggtcaaaagcggactggaagtggccgaagagctcgcaaagcaaggcgcaaaaacgaaaatcatcatcctaacgacgtttgcgcgtcccggctacttcgaacgcgccgtcaaaagcaatgtccacggctacctgctcaaggacggggaaatcgacgatctcgcagacgccatccgaaaatgcacggaaggcaaaagaacctttagtccggaacttaccttcaacgctgtccgcgaaacaaacccgctcaccgaacgcgaacaggacatcttgcgactggcatatatcggaaagacgacaaaagaaatttctgaggagcttttcttgtcgtcagggaccgtccggaattatatttctgagattatgcagaagctggatgcgaaaaaccggatggaagcggcaaggattgcggaggggaaaggatggatttgagtggggtcttgagataagcagccatcatggtacaatggtattttaggagctttgacattggccttatagcttatcaactaactccttttaacattcacactcctgttttaagaggtatttccttagtcgattaattcaccagaatattcttttggttgttcaatgtcgctcttttctctgtatcactcagtgatataccttgtttgattggagtccaatactcatatgcatactcggtatcccattcaatccatttagaaactaccttactaaaatctcgtacctgtgttgacatatcaacggcttatctttatacatactcttaatatgattaagctctgtcttctcctctccttttcgaaatcaatacaaccattttcttcaactatttttattagtccttcttgaaacgattgacaatattcagcttcttcatttataagcttttgattaaaaatactattcagaaatttctctttcctatctgtaataatcaccgtataactaatcgaaaattatttcgctcggaccaaccagggtgccgtcatgatcccgggcgaaagacgaacggtccgtgacgtcaagcacggaccgaccgccaattgtactgaaacgccctgggcttcatccgacatcttacctccggtcaaattcgccgtttgctggctctatcaaaacaccaacgtacagcaaacagatgactcagcggcacaacaagcaacccatacaccgcggccactagtacagcccctatctcatcaggcctttggagcaaaacaacaacgcccacaaggccgaccccaacaagcatttctttggctacacggctccggagaatccgtacccatgactggcctgccacccgcagcggaaagtcacgcttcgcctgcagcagcgcggttatcaatgcactaatcgcagcagcgacagtgaaagcaataactaatgcaatcagcgcaagattcaacaaccatacaacgtacgctgcgaactgcgcgcggagaatcccctcttcggcaacatagacaactttcagttcaccgttgatatctcgatcacgcagtgccttcacgtcaaggccgtgtttccctaacaattcctgcgtagcagttacaccagtgaatacgatgttgctacctgagaccatggaagtcaaagcagaatcgttataagtatcgtagagcgagggcacgacaacaactaggacatcgtccgcaaagtgaagtctttcccctcctcctccttgggctaccggcaaccggaatccgtcgatcggccgcaagaacttgaacttaccgaactgctcatcggaaagctctttcctcgacaaaagctcggcctcttctcgaatcattttgacaagcccttttggaatgctatgataaggcacctttgtaacagcaggctgtggtgcatccatggtcaccatatcaagccaacgctggttcacgtaagagatggccgagtactctccaaaatcggctggcattggcatttcttgagtatatgtgtaggaaaaagctaccttatcaagcgattccgcatcctttaccagtttaccaatctgcggctccatgtggttcatctcgtcaacgtctgtcgcaaacacaatcgcaacttgatctgcgagtttcttccactgagccatttcagcagctatagctgaggaatgtttgtatgcggaccaagcaggtccagccgcagctaccaccaggaggaacgttaacgcctggatcacgatggcagctgaacgcaagcttttaacagcaggttgtctggtggcgatcatggtagcgctaggccatgcggaagctgacatgatcagcgtagccaacagggatacggtaataacagcgacctgcagactgaacagcgccttgaggaaggtaccgacatatatccagccatgaaacaaacctacgtagcaagacgcaaccagtgctacagccaccgccgaaaccagcagcgcccccccgaacccggccaggtcctgaacctgaatccgcgaggtcgggcacccgcccagaacccgaagagcacgcccacgcgctcttaacgacaaccagaacaatgcaagcgccgcaatcagcgcaaatgctgcaagtacagcggcagcaaatcctctttctcgcacaacgaattcaaggcttttaaaaatggacgcatccccgcgaccgaccttcacgccttcacttttcagcgtgtcctcaaactcgctcaagtgagccttttcaccggtcacgagatagaacccatcggggtaggaggtttcaagccggtccttaccgacaatcttgcctgcaccatcgccgccaaaccaagtaaattcgtcgggcagatctctatcgttaagtgctacgtagacctggccatcgccgtcgcttgcaaggtctggcgcaaccttgaccagcccaagattccagcgtgcatcgagcttctccagcttcgcaaacgcttcagtaatagaaagccccgattcgctgaaatcaaggtttaacctgctctcggcaccaatcgcctgaggaaagtctcgatcatataggtcggtgataatcgccgccagtagcgcaagcagagcaaacaacgcgcccgcgacagccactataatacgtttatacacaagctggacctccaagaactatttgaaaattgccatgctaagccccggcgaacacaaccggtatcgccggggactggcgtaattgcctggattaacagataatgttcccccttcatttcattcctcctcatttattcaactatttttgtcaatatttctactcctcaactcgtttgtctctgcctccaatcaatcctccaagggctcatatgtaaagcctagccagcgcctcttgcttggcgtagttggtctgcatcaggttcatactgcttgacaaaaacggggagccagtcttgccgtaaacagcaggaaacgattacaccgagtgaattgtgtagaagttgagttagcgcttcaccaggtgcactgggaccccaaacccgtcacggcggctgagcaggtcggagattgcgtcatgctcggatcttgaaccatagctaaccatgaccagcccttggttctcgtcatcaggacacggctttcctacttcgaccgtaatgtcatcacccaaagctttaatctcctcgacgaggtcttgatgtctggaaagcgctgcattggcctctgttacgttcggcagctgatcgcacggcggatgagtgtctcttgacactgtgatccatccgtttaggaatgcaattgttccaactgcaagcaataatcctatgacgacaccgataatgatcttcgtggttgatttcatgagttacctcctaagttgccgggatcgttggtcgacaatggttttgacgaactgctggaaccgaccttatgccgagcaccacacgcgttgatcatctcagagtcgtgcgtagacacaataaccgtgcggccacgcgcagcgaagtccgcaaacagatcgataacctttcgccgattggttgagtcaagcgaggcggtcggctcatcgacaaacaagaatgcagcgtccttgtagatggcacgagccagtgcgagtcgctgcttctcgcccccactaaggtggctagccaactcgccttctcgaccctggagacccgtctgctcgagcacctgcgccaaccgctcttggtttcccgtgacacgccgcccaaggatgctcgcctgcatggtgacattgaatgccaccgactcctcatccataatgccgtaatcctgaagaatgaacgccgcatgatcacgccaaaaccgccgccgcgccgcagtaccgtagcttgtgacatcgtgtccgtctatcaagatgcgtccctgattaaccgggagcaatagcccgaggcagtgcaaaagtgtagtctttccacatccgcttggaccaacgagggctgtcatgacccctggcgggcactgaacggtctcaccatcaagcacggtccgcccaccaattgctactgaaatgccctgtgcttcaatcaacatctgtacctcccatcaaattctacgctataaaaagcggcactcatttattccattcctcctcatttacttaactatttttactcttcaagccgattaatcatcacccacctaccacattaataggggaacgtttttttctctcttgtagacagtgtcgtgacatactatctcttcttcgtcacaaacattaattccttttacaactagcaaatttcacttgttgtaccataagtaacctattgactgccggggcacaaagaatttgtttcttgtcaaatttgctgaataacggccggcatcaacactaaacctggaaaagtagaggattgcaccgcataaaataacttactgctaaggctaccaagataaaactacaaaattaaataaacctattgctttccaaaaaaatgttagttgcattttatgttttttcctgcagatatgcactatcttttgtggagatgctttggcagtacaccgaaagcatctcctttttatatagatacattaatttaaaaattttaagaataaatactcggggcgcataaaatgccgcgcccctcaaagcggggtattacccctattgaattctcagagtttatgaaactttgcaatcaccggaataaaaaactatcaatcggtaagtgcttctggtaaattgctcccgcatcgacacggtagtgggcgaaaagacaagctaactcgaccggtaatccaaacctaaaatccggtatgtccttaccaaaataaaaacaatgaatatagatttaactctctcgaaaataacggcctgctgaaatctcgatttcatagatagggatgattgccgtcagcaggtgcaagaagtgtaaacaacaaagcccgcgtcatccactataatacgcttatgcaaagcgggatctcccagaacttttctgggtcttgccatgctagccccgttgacagcaaccgttttccctttgattagttggtgcgatagtagtaacgacccttaagaccaggtgagtttatggctccgacataggcattagagtagcggcccgcagccgtatcaatacttctattcgttttatccacttttccatcgatgagcttttgcactgtcgagccgtggacctttgtcgggtggttgtactcagaacggagcccggcgtttacgaatccatacctccatgtaccaccttccgatgggtactggtagtgataacccggattcacccatgcaaatgaaggcaccgtagcgcctcccaccaaagcgatggacattgtcaacacggcgagcgtcgctttaattgtccgagtcaaaggtttcctcttttttttctcatacaaatgatttttcattatttcattcctcctctttcattcgactaataaatttactctataagttagtttgtcaccgcccacataccgtgtcgatgcgggaagagttttttccctcgttggcggtgccatgatcatgactcctctttgtcaccagacatcaattttttcctccatgaccaaccctcgatccgaggtcatttggtcacgacttgtccacttcgacgaaatactgtcacctagcattttgatcacctcctcaataccctaatggctggcaagcaccacagtgtcctttactgcattcggttagtgaccgaatggtgcatgtcagaaacctcctaatctgttaaaagacctgctttttccagtttggattagtcagaaaatgaaagaagaagaacaaaagcaagtcaccaaattcaaatcttatctacctgaactggatgtattatgctgactcctgaagatcatttgatccggttagccagtgagaacgtggaccgtgtggctctatcattcagaaatactccgaatgtggaggaactcgcacaatccgcctatgctgtttaatttatggttatatatatcacgggtgtttcagcttccggaaaattcagacggctatccttaaatctgttcactggttgtaaaaggggagcgtcgtggttttcgcactatcagcgattttcggaaaagcaatctggatgtgttccaaaattgttcacgcaaaacagataaatcgttatgtaagcagataaaatggtaatctcagcgtttcgaaaaagaggtcaagcagatggtggaagaagtcaaagaagcggatgtcaaagatgaaggactgctctctcttttcccgaagacgatccgccgcaaaattcaatatcgtagaaatcggcttgcaaaagccaacgcggcattacaagaactggaagaacgcacacctgaagaaaaatagccaacgctacaaagatcaaatcaattttactgatgattagcgtcccatatcctgtctcaaaaagcctataattcacaagtcggtgttgaaggcatatgatttggcctagaaaagaataacagcagaagcttccggatgatttgggacagtgtcctggataatatagagacaaaacaggtgaaacgccaaacaactactgcggatgccaaacactatagtcctgaaaacatcctgccaaagaaacaaatcaaacaagatacctaaatgagagcaaataaacgaagaatccatatgacaaaagcagtttttatttgggtccggggaccctaacaccaactctctttaactcaaattaactaattttataataattgtaaaacaaaactgattcaagaggtttcctgattttttaaaaattttggtcaaaatgtattagatttgctaatgtataaaactcttagagggtatcagaatggatatttagattattttccctttttgttatataaaaatgaaaacttaaattcccatcttcctttaaatgcttaaccgattcagaaaattgtagactgttttaatgtattcttaatgtagcaaattgttggggattttctatttgcatttgagaggtgtaaaaaaagacaagcctaattgcttgtctcctgagtaattgtgtgtttctcctattcttaaggtaatatggataagttcaaattaaaattttccatcatttatgataaggctcccctcgattaatcctaaaagcccgataaacctgctcgagcaaaatcagcctcatcagctgatgcggaaatgtcatccgtgaaaacgacagcttctcatctgcgcgcttcaggacggcgtcgcttaagccgagcgagccgccgatgacgaaggttaccttgctctttccatatgtggcgagtctatccatattatcggctaattcttccgaacttttcatttttccttcgatcgccagggcgatgacgtgggcgtctgggctgattttggagagaattcgttcgccttctttgtctttgacgattttcatgtcctggtcgcttaggttttccggtgctttttcgtccggaagttcgatgatgtcgacttttgcgtatgccgaaagccgttttacgtattcatcgattccttgttttaaatatttttcttttagttttccgattgctacgattgatatattcacaggtcatccccactttaagaacaagttattcagatgcattatccacaattgtggataaaggttgtgtatttagtgtccgatcattcgttccccactatatatactgcaggcttatcacacaattcacaggttgtggataaactgtgtgtatgttcgatttttctgatttccggggccaattcttcctcatccacatacatgtcaatgaccgtttcaatatgctcttcgcaagacttcataaaagtccctccaatatctgtatcattgggctcttttataaaaaagctccttattcaatataccctatttatgcacatgttagtaggttttagcatgacttcacgcggttatccacaagcttttatattcctctggataactctgttctctccaaataaaaaacaccagccaatctcgctgatgctttaatcttgtttttatactgcttctcttttttcctgaacaactaaagaatgctgatttgtaatatactgcaaatatgaaacgttaagaatgaaagtccaaaacccgttaacctgcttttccgacagcccaataaacgcttttctaaccttaaatgcactatataaatttaccgtccaaaaaaggaggaatgagagctgcgggagaaagctgtgtccggggcgcagcgggagaagcaaaatgctgttgctgtatggcagcaggtcttcactttgaaatgtgattgaataaaaagtccaaaaaggctccaaaattgaaaagacgcttaacagcagcgtcactttaatggcgacatacgggagcttaatttggcatcgttctaaattctttcttcttgagagaaaccaatacgggatgtatatgccggacgttatgatcgttaataacaccgcatataagggttttattttcggaaattcctctaattccttactcatgctgaaacactcttctttccttaaaactgttcttccaggtctttttatccttgtcatctatacttttccactttccatatcaaaatgtactatattgaatccaataaatcaaaatccattgaagtgttaaattgggattttcttaggtatatggattcttttttttgactagaataaaaaaactatatccttttgcccgttccttatttcgtgttcatctgcagaaattcgacaatcaataggacattattcgtcatatttttacctttgtaatatgcaatctgtcattacgcaacataaaggggttctatcgaatcattttgtctttttttcgttatttttcgtatctctcaactaggaataatgacacgctatgttccatgtggaacattggatatgaaaaaagatcaaagctttcacagctttgatcttacagtctcttgctcatatgcaaatctgtcgtctcgaaattcattttttcatatagtcgcttcgcttttttattatgggcgaatacatgcagggacagctttttgactcctaattgctttgcctcctcttctaagacggctaaagcctgctggccgattccctggccgcggtacgcttcataaagcccgaaatcgtaaataaacgcttccttttgagggtggtgcggatcagcgtagatccaaacccagcctgcggcgttcccgctgtcgttcatgattgaccatagataatggttgatcgtttcaataccgtttggcaaaagggccgcaaactgctcttctgctttctccatcgcttccgccactgtccatgtgcccgcttttactttctccatggcgtaatgctggatggaataggtctggtatatcttaaagtcctcttccgtcattggcgtcaaacggatttccggcttttttctcggtttgttcaagtcaattttaattttcgatttcaacatcaaattgtacttcacttccttgtttatagatcatgatgctttgctcagccattcgcttttcggctcggaaagtttattgattctgtgctgaatgtaaatgatattcaaaaggaaggcaaaaatcgatccattcgcaggttctttgcctgaaagcttgtttaatgaagcagtcaccaccagtgcgcagtatatcaaaacacctgcggacagaatcaaaatcacgcggtcgagcagcatatacaggctgtaatgcatgtcaggaaaagcgatttttgctgatattctaattggaatagaaaataaatgataaaatatgatagcttttaacgtggtgtagggaatatcatgataaggcagcaaatcgaagctttttttcctggatagaaaccagtatggtatgtaaacccccagtgtgatcagacatagcacaaaaacggacaagatacttctgctctttacattagacagcgttttcaacgcagcctgcacattgtcgttcatatcattcctccggacactcgttttccaaacaaatgaattgaatgaattttttcatagcagcggcacaccccctcaatatattcttttctcttgttttagacaatatgacttaggtaccaatgtgacaaaagaaccatttttgaagaggttgctgtcttcacgattagctgaaaaatgtgtgacaaccgtttttatgtcataagaatgacacaaaagcaagagcctgactggaaaatcaggctcttttgtctaacgctatatactttttcgaagagaaatccgccagttgatgcctgtgccaatatggtatgttttagcaaatgatccttggttgagggcaatgcccaagcggtctaatgaattgatataaacaaccggcttgcctacaggcatatcggcaaacgaccggccaaatgccaacgtttgctgatagacttttgtgtcttcatgcttgatgacgacttctactggatctccgtattgaacatcaagtgacttgaagagcgtccggctgatattcgtccaaaggtttccaaaccggacatctaaaatatcgatcgttccggttatccaatcattttcgatgtacgcttccatgaccggcagtttgacgatggaatctatagaaacttccggaccgatcctgtcgaagctgagagcgccggctgccagtattgccccggtgtaggcgtaaatgtcgcgtccatggaatgtatgtgattcgcctgattttggaagcctgttttgcgcttcatcaagatagcgcgcctcggcaattccattttgccggctgatgtgggtgagtgttccgttgtctggtgtgatgatatattgattggaagaggttctgactgcgacgctgcggcgttctgagccgacccctggatcgacgaccgacacgaagacagtgccttcaggccaataagaaacggactgcagcagccgataggaagcttcacaaatgtgaaaaacgggaatgttgtgcgtcaaatcaaaaatccgaattgaactgtcaaccgaataagccacaccgtacatcgcatttaccgccccgtcatcaaggccaaaatcagattgtaatacaagtgcatgctgactcatcctatctccctttccgccctgatctttaaatcctgcattaaatcggccatttgtcagaatattaaagtcatcatatcgtacgcaaaattgaaacgcaatatgatgctttgtccattttttataaactataatttttgcagggcaaaaacttggaattcacacccaaaaattcgattattcactcagaaaaaatctcatttcactctccaaaaatcacattttttccttttgacgatcattcgttgggcgcttcataataaaaaaacagcccggccgtaccggccagactgtctttatcagcttcctaattgggatcgggtcagctttacttctgttgtcttttcttttccgccccgcaggtatttgatttttaccttgtcgccgacgtttttggtgtaaagctttttacgcagatcaacgatatcgtaaacacggtcaccgttaaattcgacgatgacatcgagctctttcagaccggctctgcctgcaggagataccggctgaacacccatcacaactacgcctgatgttacgtttttcggcagtttaagcgtttcctgccagtggtagcttgcgatatcgccaagtgatttcatctcaattccgagatacggccgtctcacttcaccgtacgtttccaaatcttcgataaccggaatggcaaggttggccggaatgctcagaccgatgccttcgacggctgattcagcgattttcatcgaattaatgccgatgacttttccatcaatattaaacagcccgcctccgctgttacccgggttaatggcagcatccgtctgcagtacttcggcgttccagtccggctgtccgtctccgttggaatcgaccggcacagcgcgttcggttcctgagatgattccttgtgtaacagagcctgaaaactgcaggccgagcgggtttccaatcgcgatgacaggctcgcctgtcttcactttatcagaatctccaaattcggcagctgcttttattttgttgctgttgacttgcaggacggccagatccatcagcttatcgctgccgatcagttttgccggaatccgtgttccgtcattcaggctgatttctatttgggacgccccttcaatgacatggtggtttgtcacaatgtgggatgtgttgccgtcctttttataaataacgcccgagcctgttcccgcttcgctgtcaccatcccatacacctgtcttttggatgttgataacgccgacaacagaatcagaaaccttagagaccacttgcgtgacttcattattcacgttgacggatacattgcggaccgtcccgccctgctgtgctccttggccgccgcgcgcttcgatgacttgcagattatacggcagccatccctgctgcgagagatacggcaaggcaaacaatgttaaaagagcgccgatgacggcgccgaccaggcttgaaaacaaaaagcttctccaacttctcaccggcttttcccgaacgaatttttcctcatcatgattaaactccactatattcaaatcctttcaaggaacgatatatgtatatagtgtggatcatctgcctgcagattaatcattcaatcaggaaaatttacaccgctacgagaggcgtcggtttcttaggatcggtatcatataagtcaaacgtttctcctgccgcaaatcctttggcagccagcgtttgctgcacagacattcttgccagctctttcatgttgttgtcctggcttaaatgagccaaataaattctcgatgtctcatcgccgattacatcggtcattgcgagtgccgcgtcctcattggatacgtgtccgacgtcgcttagaatccggcgcttgatgttccacggatagcggcccatttgcagcatgccgacatcatgattgctttcaaaaacaaaagcgtttgccgagcggatgatgcctttcattctgtcgctgacatagcccgtatccgtaatcaaagcgagctttcggccattgtaatgaaaaacgtaaaacatcggctctgcggcatcatgggataccccgaacgattcgacatcaagggagccgaatgacttgacggtttccattggaaaaacgaacttttggccgttatccattttgccgatatgcccttccatcgccttccacgttttttcattggcgtaaacgggcagctcatattttcttgccagcacgccaagcccttttatatggtcactgtgctcatgtgtaacaaagatgccgtcgagctgatcaagctttcgatcaatttgcgccatcagcccttccatcgccttcccgctaagtcctgcgtcaactaaaaaagcgtggtcatcggtttccaaatataaagcattaccggtactcccgctcgcaagtacgctaaattgcaggctcatggtttctcactccattatgatttttcctttttctcttgtgattgaagaagcgctccgtcccgtgcatccacgataaattcttcgtgaatggttttatcgtccgttttgcgctccacttcgatccgccaaacgggcacgaaaatttgagcgcttgccagcggatactgcgtgaaatagccaagctcggctgatttaattttgctgtacttcttcaaataatccgggtagtacaaagcttcaaccgcgccgactgcagagatcagattttccgttttgacttctttaatatcctgcagcattgactgcttataagacacgacttcgtttttattattcaggtacagaacgacttcgcccatctcgttgttatcatcattttgccggtcctgaaaaatgtaattcccattataggtttggaagaaaacgatctgttttccggacttatcgaccttccaaagcttgtacttattgccgtcgataatctcttcattcacgatttcccttgcttttgtcttcatatccgttttcggaagcgcaatgggtgtttcaaactccatttctatttctgtcaaagcgttctcttttgcggtattcattaacgccttcggcttttgcccttttaacgatttaatctcgctttgcttaaagactcgcttttgtgcagagattgaggagccttttgacgtctctttagacaaattgccgtatgaaatatggtctgctttcatatcctcctgcagcgttgatttttctaaaatcggaaactgattgttgctgcgcttatcaaagtattgaaaggccaaaaagatatcaaggatgaggaagacgataatgaagattgtttttgttctattccactccattttctatgccctccttcaccgctgaatccttctttgataccggctttaccgtaccgtttattttaatgcaccatgtcggcacaagtttgacaagagggtcttgttcctctgatactgagaccatttcataggcggggaaaatttgctcaatcttatcaaagtcatactcttcattgtcttgcaggaactgaatcaattcttctccgctcatgatttctttatcctttttgctgaccggatttgcgtttgcgcccaagacatatgtcgggtgtttatagtccaatatgtcgttgtttgcccagcgaagttcaatcgatgtcgttccgaaaggctggttttggctgttaacgaccggcagctgatccataaacagattaaagttgatctgctgattttcattcaaaccgaaaaattgataatcatccgtccagcttcccgtgtcgtttaaatatttgaagcttttattgatcagctctccattttgataagaagtactcggttccaggttgcggtgctggaacttaatctgtctgttgttcgagtagatctccaaaaggcttgttccatccgtatataccggtctgtttaagttggtttcctgccgcacggtttgcggatcatcaaataaagcttttttaaaacgcgtcgggctgatcgtttctgtaaaatactctttttcagacagcttcagccgattaaccggaagcaagacatctctgcgcgaattgattgcaaaatcctcataaagaggcatctgcgacttttctttttcaatgtctgaaaggatgttgcggtaatttgccgattcaatcaccgcttcaacaaccgtctctttgctgaaggatacaaaatagatcttcttcatgccccgtccttcattgaaaggaagaacgattctgtcaaaagagttgtattcataagaattggcggaccatttgaaaagcggctgcagcacatcgatcggaatgttgtcgctgaagacgagatccaatttggagtctttatttttagcgtatagccagtttttgaactgctgcctgtcaaatttgtccgagatatcctttaacgatttgacttcccatcgtcccatgtcatcccagagctgagaatagagcgtcgtgtcattcagcaaataatgctgtccattctcatgaatgaacatttgctgcggtttgacggcttcatttaacaactttgtctggtttgtaatcggctgtttgtcgctgacctgagcctgtgagtcttcaactttttcgtaattcccctgaaatccccaaatattaaaagtaaaaagaagactgatcaaaaccaaaagggacagtattatcgttttaattgtttcacgcttcatcccaatcatcctcttgttcttctttatacggcagggtaaatgtgatcgttgttccttttccttcgatgctgtcggcccagatgtcgccgccatgggcttgtaccatttcttttgcgatcgcaagaccgagtcccgtaccgccgagtcttcttgttctggctttatctacacggtagaaccgctcgaagatcttctccacgtcttttctcggaatgccgacaccttcgtctttgacactgacataaagaagctcttcttcttcatttacatcaacagagaacgtgatatggcctccttcaggggaatatttcaatgcatttgaaatgatattatccagcacttgcgtaatcttgtccggatcgatttcaacatacaattctctatccggcagattgctgataaactcaacatgctgctctttcgtcatttcaaagcgttcaataatcaatgagaagaaacggataaaatgaatccattctttattgaattgataatctttgctatcaaactttgaaagctgcagcaggtcgttgacaagcctgatcatgcgctctgtttcattctgtgtcacattcaagaagcgcggcgcaatgtttggatcctgccatgccccttccgcaagcgcttctaggtagctgcgcatcgttgtgagcggcgttctgagctcgtgggagacatttgcaacaaactctctccgctcttgatcgatctgctcttgttctgtgacatcgtaaatgaccgcaatcaatccgtcgatctttccgtgttctttttggatgaccgagaaattgacgcggagcacagacgtccgttcttcctgttcaatttcaagaagcagggaatcctgctgttcaaccaaatcttcaaacgtgtattcgtcttcaaggccgagcagcgaagtgatcggcatttcaagagccgtttcacgtgaaacatttagaagctccagcgccggcgtattaagcaaaataatcgcgccatttcggttagtcgcgataactccgtctgtcatatacgcaataacagaagatagtttttttcgttcgccttctgtcatggactgagcttctttcagctctcttgttaaataattaaacgttgtggccagctggccgatttcgtcgtttccgtacttcctgacttttcttgagaaatttcctttcgccagttcaatggcctgttttctcatatctgacagcggatgtgtaatcgttcgcgcgacaaaaatcccgagaaaagcagtgattccaagcgcaataaaagttccagacgctaaaatggtgttgatcgtccggatttgattgtagacattatccatcgatgccacgacgtaaatggccccgattgtctcttgattcgattttttaatcggtgtgaccgaaatccgcactttgctgtcccgctccgggtcgaaaaatttattttcgtatggaatgccgacaagcagcgtccttttgataatgccctctgttgtctttttccccgccacctcccggttataaggattggaggtcgcgatgacttcatagcttttatcaatcagactgacttcgagaatttcgccttctttgctgaaatcatttagaatccgctctgcatcttccttcaaggtagacgaggaagatgtgcttctatccttcgtcatttcctgttccagataatacgataggttgttcacccgctgatcaagagagtcattatatgatttaagaagtgacttctccatctcattgacaaagtagacgccgataatctgcatggcgacgataatcagcagaacgtatattaaggtaaacttaaaatgaatcgagcgaaaaaaacttactttattcatttgtgtattagtcctgttccggatttctcaaatagtagccgacaccgcgccttgtaacgatccagcttgggtgactcggattatcctcgattttttcgcgaaggcgtctaaccgtaacgtcaactgtccggacatccccaaagtagtcgtatccccacacggtttgcagaagatgttcacgcgtcatgacttgcccgatatgttttgcaaggtaatgcagcagttcgaattcccgatgtgtcagctcgattgtctcgtcgcgttttgaaacgacataggcatccggaaaaatgacgagcgatccgatttgaatttcgtttgaagacgattcttcttcggcaggagccgctgtgttctgtcttctcaggttcgctttgacacgcgccagcagttcgcgggtgctgaacggttttgtcacataatcgtcagcgcccagttcaaggccgatgactttatcgatttccgaatcctttgctgtcagcataatgatgggcatatcatattttttgcggacttcacggcacacttccacaccgtctttattcggaagcatgatgtcgagcagaatcatatcagggttgagatcctcaaccatctgaagcgcttcattgccgtcgtatgcgcaatggacttcatagccctcttttttcagattaaactctaaaatatcagcaatcggcttttcatcatctacaactagtatctttttttccattattcattcctcctggttcagagtttggatacagccagcggatggctgtctatgttttatatcaaagtacactgcatgtcatcattaaaaaaacactttctagaaatcgaaatagatttcttatacattataacgtttatgaagcaaaagttaaaaaaatagttcaaaggaaaacgtttggaaattaaatccacgctttatttttccgcttttatcacaacaattaaatttttgtgactttttttactgaaaaatgaaacattttatgcttcaaagccgtctatatagtaacgtcttcttcttcggccgggttaccggcctccctttttttctccttttcattccttcagcatttttatttcattgatttcagctaaaagaaaacgcatctgcttaaaaacagacgcgctttttagagtggctcgggacggaatcgaaccgccgacacacggattttcagtccgttgctctaccaactgagctaccgagccgggtatgtatgtaactttttataaaatggcggtccggacgggactcgaacccgcgacctcctgcgtgacaggcaggcattctaaccaactgaactaccggaccttgcatgattacagtacctgcttcggagaagaatcgtggtctcctccgaagcaagcggggatttagcaataacgctaaagtaaatcaatgacccgtacgggattcgaacccgtgttaccgccgtgaaagggcggtgtcttaaccacttgaccaacgggccagggaaatggtgagccatgaaggactcgaaccttcgaccctctgattaaaagtcagatgctctaccaactgagctaatggctcaagattaaatgacacccttaaaataacgacgtccacatctcaggaagctttttcgggatgtctctcgatgtgtacgctgaagcgaattctccgaagcgtattcggacgtgctctaccaactgagctaatggctcgtctcgttgttttcgcaacaacgagatttatattatcatagaacgaacagaagtggcaatatatttttttatttttttctattattttttcccttcgtgatgatactccgccccttcgcggttcagccagtgcatgattccattcggatggaatacagacaacagccggtcagcttcatgaagcggcacccacttggcttcaacaatgttctcgtcaaacgtgatggcatccggacggtcggtgatccgtgctctaaagacgatgaaatatacatgctcgctgctgatcaccgcttcatttacggctaaaatatcaagaggctgaattccatagccagtttcttccttcatttctctcgccgcggcttccgtcagcgattctccagcttccaccttgccgcccggcaatgtccatgattgatttttcttgtttttcaccatcagaatgttgttctcttccgcgaatgaatatacaacatcgacacgttccatccgtttgccctccttgtcattgaaaaacaaagcccctgcggactgcagaggctcttctagaatttagttcggacgataaacgcttctcaccacatttgtttgagagcggtcaggaccgactgagaaaatggaaagcggaatgcctgtcagctgagaaactcgctcaaggtaatggcgggcattttcaggcaggtcgctcaagcttttcgcgcccgtgatatcttcggtccaacccggcatttcttcatagacaggctcacattcagcgagcgcttttaagcttgccgggaactcttccaggatctcgccgcggtatttgtaagcgacacagattttcaatgtttcaataccggtcaatacgtcaattgaatttaatgaaaggtcggtaattccgctgacgcggcgggcatggcggacaaccacgctgtcaaaccagccgacgcggcgcggccgacctgtagttgttccgtattcgcggccgacctcacggatttggtctccgatctcattgttcagctctgttgggaacggaccgtctccgacacgcgttgtgtaagctttcgacacaccaacgacgtgctggatttttgtcggtcctacacctgagccgatcgtcacgccgccggcgacagggtttgaagacgtgacaaacggatatgtcccttggtcgatatcaagcataactccttgcgccccttcgaataagacgcggcggccgtcatcaagtgcgtcgtttaagacgacggacgtatcgcagacatattgtttgatctgctggccgtactcatagtattcgtctaaaatgtcttctattttaaatccttccgcatcatacattttttctagcagacggtttttttcttccaaattgcgggcgagcttttcttcgaaaacgtccctgtccaacagatcggcgatccggattccgacgcgagcggctttatccatataagccgggccgattccttttttcgtcgtgccgattttattggcccctttccgctcttcttcgaccgcatcaagctttaagtgatacggcagaatgacatgggccctgttggagattctcaagttgtccgtgctgacgttccgctcatgaagataagccagctccgttaccaatgctttcggatcaacaaccattccgttgccgatcacacacgttttatccttataaaaaataccggatggaatcaaatgcagtttgtacgttaccccgttgaatttaatcgtatgtcctgcgttatttccgccttggtaccgtgcgattacctctgcattttcggaaaggaaatcggtgattttgccttttccttcgtcaccccactgcgtacctacaacaactactgaagacatatccgtgcacctccgttaaccttttcaaacgatatcaatatcaaacacattcagtttatcagtgtcatcccgtaaagtcaattgtaaatccgaacattaattttaacgttgaacatttttgttcgttattataaagcgaatttcatatattttctttttaatagacagtctgtaagtcaaatctaaaaaaaaccgtttttcttggacaaagatacataaaaaaccgacaacgcaaatattcaataagtaaggagggagatgccgatggagacggtattaatttttgcatcagttttatcgccgatcattttggctttggtcgaattggtgaagaagacggtcaaaatgccgaaaaatttgattccgctcgtttcactcttgataggtttgctgatcggtgccgcagcatatccttttacagaccttgaactggtgctccgtttatggtcaggaggactggccggattaacagcgacgggtttatttgaaatcggtaaaaaccgcaatgcaagaaaaaagaaaaatccctgagaacatgtctcagggatttatgcaccaggcgcaacacccgcgtcatcaaaccggcgttccaggttgacgaacttattatattcttttacaaaagcgagtgagacggtcccgaccgggccgttcctttgttttgcaataatgatttcaatgatgtttttattctcagattctttgtcatagtaatcatcacggtacaggaacgcaacgatatcggcgtcctgctcgatacttcccgattcccggatgtccgacatcatcggacgcttatcctggcgctgttcgacgccccgggaaagctgtgaaagggcgatgaccggaacttcaagctccctcgccagcgctttcagcgcacgggatatttccgatacttcctgctggcggttgtcacttgatctgccgcttccttggatcagctgcaggtagtcgatcaaaatcatgccgaggccgttctcctgctttaaacgtctgcacttggaacggatttcgctgacgcggattcccggtgtgtcatcgatgaaaattccgctgtttgataagcttcccatcgccattgtcagcttgccccaatcctcttccgtcaggtttccggtccggagattctgggcgttgatgttgccttccgcacagagcatccgcatgaccagctgctcggcgcccatctcaaggctgaagatcgcgacgctttcatcggttttcgtcgccacgttttgggcgatgtttaaggcaaaagcggttttgccgactgacggacgggcggctacgatgatcaaatcgtttctttgaaagcccgccgtcatcctgtcaagctcggtaaaacctgtcggaatcccggtgatgtccccttttctgttgtggagctgttcaatattatcgtaggtttgaacgagaacatctttaatattttgaaaggccccggagtttttgcgctgggcgacttccataatcgttttttctgcttcgcttaagaggtcttcgacttcatcctcccttgtatatccgtcttgggcaatcgtcgttgccgtacggatcaagcggcggagaatcgatttttcttccacgatttttgcataatactctatattagccgcagtcggcacagaatttgcaatatccgtcaaataagaaatgccgccaacctcttccaaaaggtccgtgttcgcaagctctgatgtcaccgtcaccaggtctacaggctcgccgcggtctccaagaacaagcatggcgttaaatattttttggtgcgacattctgtaaaaatcatctggaatcaagacttctgacgccaaagttaaagctgatggttctaaaaaaacagcacctaacacggcctgttcggcttcgatattttgcggcggcagcctgtcattcagaagatctgtcatgttaagcaccgtcctcccatttaaaaataacccaacgtctattttaccatttttacagaaaaaaaatagactcttgcagaatcgcatgttgtagaaatattttcatagaaagggagaacagctgtcggaatgtttgcttccctgatctatacgggaaacaaatcagtaaacaagtttcgggaggttgtttttcatgaaggtttatacggtatcaccaaatgccgagacagacgggtggtttttgaaactggaagatacggcgcctgttgagctttatgatacaaggacagaggccgtggaaaaaggagaagagatggcgaaagagaaccgtcctgcgaagcttgtcatctatgaccggcaggacaacaaagaagacgaacggtcttattaaacacctcggccgaggtgtttttttaaagattccacaattaatccacccggctgttccaactgtttttcaagagaatgctgaccatcaaatcggtcgcatgttggtacaaatcccattcttcataggccgcaaatttcatccgcagcgtttgcagcacattgcgcatatctttgtactcttcaaatgtgtaaagcccttttgctctgatctgctgttcatacaatttctttttcagctccgatatcgtcgatttcaagacgatcacctccgctttatttatatcgcttttttctttttcttccaactcacttgtcatatgatgttacaatatatattggagtcaatattcactgttgcgtactctgcgcgctggggtacaatataaaatggaggactttatgaaacctttacaaatttctgccgaaacggcgcaaaaactttcggaaaccttaaatcttcctcttgaacaaatcatgcatttgccgcagcatatcctgcttgcgaaaattgccgaaattcagaagaaagatcaatagtaaccttggatgatggtccgggtttctttttcatgtcacttttccacctggaagcaaaggagaatacagcatgcattacattgacgctcgacgcgcccgtttgaacaatatctttttgattgcaggaatcatatttatcgcttttaatttaagaccggctattacagctgtcgggccattgatcagttcgatccgctcggatatggatttgacgaacggcatggccggcttcttgacgacgctgccgctgttatcgttcgccgtcctgtccccggtcgcccctaagctcggacagaagcttggcaatgagagaaccctctgggtcggattggtcatcttattgatcggaattttgctgcgctcttacggagaatctattacattatttgcaggaaccgcattgatcggagtcggcatcgcaatctgcaatgtgctgctgcccagcctgatcaaacataaatttcctgacaaagcgggaattatgacaagtttctatacaacagccatgtcgatttttgcggcgctcgcatcagggatcagcattccgttgtcgcacggcttagcgtggggatggagcgcgtcgctcatggtttgggcgggcctcgcgtttgttgcgattttgatctgggttccccagctccgctatcatgatacgggaaaccgcacggtcagcttaaaggcagacggccaaacggtctggcgctcgaaaattgcctggcaggtcacattctttatgggcatacagtcgtttttgttttactgcacgatcgcctggctgcctgaaattctccgctcgcacgggatgagcatgtcgcttgccggctggatgctgtcgctgatgcagtttgccagcctcccgtcgacatttttgactccggttctcgccgggcggtttcaaaaccagaaaagcatcgtgctcgccctcggcatcctatacttggcggggatgtcagggctattgtacggaggcagtacagcgatgctgacgctatgggtcattttaatcggaattggacaagggtccagcatcagtttagccttgactttaatcgggctgagaagcgaaaatgccgatcaagccgcggcattatcagggatgtcgcaatccgccggatatttgctggcagcgattggtccaagctttgtcggttttctttacgatcacatgcactcatggaacggaccgattttactgttcatcggcgcgctggtcgctttgatcggtgcaggactcggtgcgggaagaaatcaatatatctatgctaaagcagcataacgaagccggcagataagccggctttttttttggaatataacctgacaaaccagcggccaaataaaccgtgatgccgtatgatcagatttgacaaaaataattcacttattggtctagacaactagagttgtaatgttctatactgatgataacgttttcaagaaaggacttttgactgtgaaaaccaaaccatctcaacgctatatttttaaacatcttcatatttacagtgaaaatggaatgatagaagacggttttcttctgacgaatggagaaaaaatcgaggcttacggaccaatggctgatattccagcttccgcacaaacggcagaacagctgacatttccggagaacttcaaagtgctgccgggcatgatcgatgtccacattcacggggcaaacggcgcagatgtcatggacggaacagccgaggctttgcaaacaatggctgaagccctgccgaaagaaggaacgacaagcttccttgcgacgacgatgacccaagataaagccacgatcgagcatgcgctggcaaacgttcaccggtatagggaagccggcggacggcccggaacagccgaagtattaggcgttcacttagagggcccttttatttcagaaaagcggtgcggcgcccagccgccggatgacattatagcgccggatctttcgttatttaaagaatggcagcgcatctcagggaataacattaaattagtcacacttgcgccagagctggaagggtctttggaactaatttcctttttgaaggaaacaggggtcatcgcatccgcaggccattccgacgccggactcaaagagatggaagccgcgattaaggccggcctctcccatgtcacccatttgttcaacggcatgcgggggctgcaccaccgcgagccggggactgccggtagcgctcttctgcatgatgaactgaaggctgaagtcattgccgacggcatccatgttcaccctgccgtcttcaagctggcatttcagcaaaaacagaaagaaggcatcattttaattacggatgccatgcgcgcaaaatgcttgaaaaatggaacctatacattaggcggacaggaggtgttcgtaaaaggcgaaaaagccgtattacgggatggtacgcttgccggcagcatcttgaagatgaaccaggctgcactgaacatgatggattttacgggatgttcactcgaagatatcgtctacatgacagcagtcaatcctgccagacagcttcatatttatgaccggaaaggcagcatacggagcgggaaagatgccgatttgatcattttaaatgaaaaaaatgaagttgtgatgacgctttgcaaaggcgtgattgctttcagcaaaagggaggtttcaccatgaagatcattgaagctaaagattatcaggacatgagccaaacagccgcccgattcatcatcgagcaagtgaatcgcttatctgcacctgttctcggccttgcaaccggaggaacgcctctcggcacatatcaggttttaagggaagatcatgcgcgtaataaaacgacttacaagcacgtctatactgttaacttagacgagtatgtcggcgtttccccggatcatgaaaacagctatacattctatatgaaaaaacagcttttcgatcacattgacatcccgctcagccacacccatcttccgaacgggatggcttgtgacctggatgccgaatgcagccgctatgaagcgctgatcgagcggcttggaggcattgatcttcaagtgctcggcctcggcttgaacggccatatcggatttaacgagccgggcaccccattttcatcgaaaacgcatacggttgaactgacacaatcaacgaaagaagccaatgcccgctattttgattcctatgacgccgtcccgtcgcaagcaataacgatgggcatttccacgatcatgaaaagcaagcagatcctgctgctcgtttcaggagagaaaaaagccggcatcttggcgaagctgctcactgaagaaccaaatgaagacacccccgcttccgtcttaaaaacgcaccaagacgtcgtcatcatagcggacagcgatgctttatcaatcgtgaaagaaaggggtatggccttttgatcaaaaaagattcccacattccgatttactatcagattgagaccgaaattaaaaagcttgccgaaacaaaagatttgaaacccggcgacctcattccttctgaaagagagttcgcagaaaaatatgaggtgagcaggatgaccgttcgacaggcggttaacaatctcggcaatgaaggcattctcgtccggcagcggggaaaagggacatttattgccgagccaaaaattgagcagcctctcaaaggattgacaagcttttccgaggacatgaaatcaaggggcatgaggcccggcacgaaaatgctcggcttcggcgtcatcccgtgcgaccagagcacagcgcgcaaactggagatacgtgaaggggcttccgtctatgaagtcaaacggatccgcctcgccgatgacatcccgatggcttatgaaatctcctatttgcccgccgacttcattaacggcctgaccgaagacattatgagcgcatctttgtacgactatgtcgaaaatacgctctcccttacgatcgaccgggccgcgcaaacactagaaccggcgattgcctctcaggcagagagcgagcctctcgacatagaggaaggcgcaccagtcctgctcattgaacgcttgagctatttggacgacggcagaccgtttgaagtggtcaaatccgtttacagaggcgaccgctataaattcgtcattgatatgaagaggaaagaccaatgaggaagacagaggatacgaacgacaaaagcacagcacttgatgaaatgaatgctttagatatcgtcaccttgatgaatgaggaggatcacacagtccctcgcgccattacgccctgccttcccctgatcgctgaagcggcggagacgattgtcagccgttttgagcaaggcggaagagtgtttaccgcaggcgccggcacaagcggcagaatcgcagttcttgatgccgcggaactgccgccgaccttctctattgacgagagccgttggaccggcctgatcgccggcggatatgacgcaatgtggatgcctcttgaagaaaatgaagatgaccgtgaaaaaatcgtcgctgacctgaaagcgcaatcattctcgaaagatgacgtcttaatcggagtcactgcgagcggttcgaccccttatgtcctcggcgctttatcctatgccaaacagatcggagccgcttctgtttcgatcagctgcaacgcggatacagaagcgggcaaattaagcgatatcgcgattgaggttcaaacaggaccggaaattatccgcggttcaacgcggctgaaagcaggaaccgctcagaaaatgatcttgaacatgctgtcaacagcggcaatggtgaggcttggccgcgtctatcaaaacgagatggtgaatatgaggctgctcaatcaaaaattagccgggcgcgctgtcaccattctgatgaataccaccgggttatcggaggatgaggctctgcaagctttaaaagaaagcggcaatgacatcaaggcagcgatctttatgacgttgacaaacggaacgcttgaagatgcccgccgctgtttatcccatgaaaatggacatttgaaaaaagcgattcaatatcatcgaaaggggttttaactatgttgggatttcttcaaaatatcggccgcgcgctcatgctgccgattgccgttcttcctgctgcgggcctcctgctcgcactgggacgggaagacctgttaaacattccgtttatcgctgcttcaggacaatcaattcttgaccaacttccgatcatctttgcgataggcgttgcgatcggattgtcaaaggatggccacggggccgccgctctgtccggagccatcggttattttgtcctgacaggcggcttagcagccatcaataaggacctgaacatgggagttctcggcgggattattgcaggcgttgtcgccgccgtcatgtataaccgctttaaagatgcaaagctgcctgactggctcggtttcttcggcggaaaacgcagtgttccgattatgacagccttctgttccatcattcttgcaggcattttcggcttcgtctggatttatgcacagcaggcaattgacgccattggaggatggatcattcatgcgggggcattaggggtcgggatattcggtcttttaaacaggctgcttttgccgctcggccttcatcacatcttaaacaacatggtctggatggtctttggagaatttgcaggcaaaacgggtgacatgaaccggttctttgccggagatccaagcgccggcgcctttatgacagggttcttcccgatcatgatgttcggtcttcctgcggcgtgtctggcgatgattgccgctgcgaaaaagcatcgccgcaaagcaacggccgggttgctgatcggattggcgttcacatcatttttaaccggaatcacagagccgattgagttcacattcatgttcctgtcgccacttctcttcggtattcatgccttgttaaccgcaagcgccatgaccgtgaccaatatgctcggcatccatcacggctttaccttttcagccgggacgatcgactatctcttaaactttggaatcgccacaaagccgctgctcttgctgccgcttggtcttgtttacggcattatttatttcatcatcttttatttcttgataacgaagctcaatttgaaaacgcctggacgagaagatgacgatgagcaggaaaacaccgctgtcagccctgacacaggatcgtctaaatacgaaacccttgcggacaaatacatcgaagcgcttggcggaaaagaaaacatcgagacgctgaacaactgcgtgacccgcctccgcctcaaggtccgcgatgcttccaagctggatgaaagcgcgatgaaatccatgggagcgaagggattcgtcaagctcaatcagcacgaggtgcaggtgatcatcggtacagacgtcgaattcttggcgaatgaaatgagaaaacgtacggaataaaagataagccccttctgaggaaggggctttgttactttatgattgctctttcacgtgaactttcagtgttgcttgtacttccggatggagcttcacgggaacattcgtatatcccaatgagcgaatcgcatcgtttaattcgattttgcgtttgtcgacttttaactgatggcctttttgcagcgcatctgcaatttgtttgcttgtcacggagccgaataaacggccgccttctccggacttggctgaaagctccaccgtaatctcctcaagctgttttttcagctctttcgcagatttcagttcttcagccgcttctttcttctcttttttcttctgaccttcaagcgcgctgatattggcggatgtcgcttcaacagccagcccttttttgatcaaaaagttgtgcgcgtatccatccgctacatttttcacttcgccttttttccctttgcctttaacatcctgtaagaaaattaccttcatttctgaatgcctccttcgaaatactcgtcaatcgcttctttcagtcggcggagcgtttcttcaaccgtgatatcggtcagctgtgtcgcagcattggttaaatgaccgccgccctcgagcgcttccataatgatttgaacatttacttcgccgagcgatcttgcgctgatacataccgtgttctcgtctcttctcgccacagcaaatgacgcttcgacatcgctcatagacagaagagaatccgcggcttgtgcaatgataacctggtcaaagtattcgtccgcctcatcgtccggcagcgatgcaatggcgatgccgttttgataaaaaacggtatgctggataagcttcgcccttttaatataatgatcggccgtttcttttaaaaacttttgcaccaatacagtgtcagcgccttttgcgcgcagataagacgccgcatcgaacgtacgggagccggtgcgcagcgagaagctcttcgtatcgacaataatcccggccaaaagagctgttgcttcgatcatgttgatttttaagcgcttcggctggtattcgagcagctctgtcacaagctccgctgtagatgaagcgtacggctccatatagacaagcagcgggtctttaataaactcttcccctcttctatgatgatcgataacgacgatattttcaattttattgaccagcctttcttcaatgacaaaagaaggcttatgcgtatcaacgatcacgagcagcgtgtcgtcttttgcgatctcaagcgcctcttccggcgtaataaacctggaccacagttcttcgtattttttaatctccccgatcagtctttgaacacttgaaccgatctgattggagtcgatcacgacaaagccgtctttgccgtttgcctgtgcgaccttcaaaatcccgatggctgatccgatcgaatccatatcgggaaacttatgacccatgattatcacattgctgctttcagagacaatctccttgagcgcgtgtgaaatgacccgggctctgacgcgcgtccgtttttccataggattcgtcttaccgccgtaaaacttcactttcccgttcggctgcttgattgccacctgatctcctccgcgtcccagcgccaagtcaaggctggattgcgccaaatcgccgagctctttcaacgaggcaacagatgcaccgattccgatgcttaacgtcaaggaaatggtatgaacggatgtcttctcccgaacttcatcaagaatcgaaaactttgatgcttctagctcgcttaaaatatgttcgtttaatacgccgatgaaccgctcagaggaaacccgttttaagaaaatgccgtactcttgggcccactggttcaaaagcgatgttacttcactgtttatcgagcttctggtctggtcatcaagcccttgcgtcacatcgtcgtaattatcgagaaagatgtaggcaagaaccgttctttcattttcgtattgtttttcaatctgcgtctgctctgtgacatcaaagaaataaagcagcttttcttcccgtttgatgaccacattaaatttccgctcattcagcgtaatcgtttctgtgtccacttcctgcttaatcaaagggacgacagattcacaagtatcataaagcgaccggccgacgagcgtattttcattaaagcatgacgccataaaaggattggcccactcgatatagtactgatcgttaaacagcatgatcccgatcggcatttcaagcagcgcctcttctccgacttttttcagacgataagacagcgtcgatatataatcgtccagctcttttctgatttgggagtcggcccgcttcaaaaagtacaaaatgacacccagaatcagaacgccggccgcccctgccacccaattaaaataaatgttgatgaggacagaaatgattgtgacgacgattaaagaatatatgggatatcgaaataacggtttttcataaaaacttggcactcaaatcaactcctcaccattggagaacatcgcggctacgattttttcactctttctctcaagttaaagcctatatcaattatacctaagatgcgaacaaggtacagcaggggcgaaaacaacccgataattaaaaaaagaaccggcaggacagttggcagtttcttggcatggcaaaagtaaaacacaaatgaaaacccttggatgaccaagacaaagcccatgatgagactcgcatttaacagaacagagtaatatacactgccctcttcaacgggagccagcgacagaagaatcgtcaacaaatagatccaaataatgctttgcggaagtctcatatccctgaacggtttcagagacggtatttgtatgatgcgccgaagcaccggctttgcgagcagatgattcaaaaacgcagtgattccggaaaatatcacaatggccgtcggatataaatattgcgcctgtttgaattgctcatttaacaattcaatctgcttagccacttctttatcatttccaaactgtttgatactcgattcaaaggttttgaatgtttcattatatgcttgattggccgtctctattaagtttaatccaagaaactgaacgctgatgataagcagcaggacgaacgaaaccatatatgtaacggctgctgcagcaatcgcttgggccggctcttttcttctgtagtaaaagcccatgatcacgcccgcggcacttactggaatagcaaacatcagtccgcctaaggaaccggcaatcaatgaaacgggtaaactgaccaaccccaccgaaatccccggctttagaccgtgcctgatcgtttgaaccattgcaggcagcggcagcgtcaataaaagaatggttccgatgaaaggaatatagaggctgatcatcagcaaaacggcaaaaatactgaccatgatagcgccttctactaaagctcttgtttgtttcacttgttcacctcgtatgttgaaatgtcatgaatcaaaaagagcagcatagacgactgctcttttctaacgtcgcaatttcattttcaaataaagacgatgagatgagcaggtctcggccttctctcattgtttctttattctaacataaggtcaaatcgcaagtaaaacgatcataaggcttgagaaagcgagtgaatgttccatgtgaaacagtgtcagtcgagaaaccccgatttttctttatttttctttctcgcctttctgatcagcaacaatataatcaaaactgcgaccagaagcgtcacgcgaagccctccgctcaaaaatagaaaaaagtccttcaacatatccaacacattgatcacctctcactgttgtcacttagatgcaaaaatcccgtattatttgacttcccctttccaaaacggtctaaaacgtccctcagattcttcttaacctttagacggtaatgggcatatgctgactaagaaaaagcaataaaggagaatatgaatgacaacaaaaacattggcttggcatgaaacgttggagttgcatgaactaatcgcggcacagtctgtcggattggtgaagatcaagaaaagcatgaagaaaatcagcgaccctcagttaagacagctatacagcgtgtcagcaaaagcattggagcaaaatttaagagagcttcttccctttttgccaaaagctccggcatttcagcgggaggatgaacgggctgacttgtattttgatgcgggtgatctgttggtgctggcgaaaacgaccgttcgaaactatgcgattgcgatcacggaaacgtcgacgcccgagctcaggagagtgcttgttaaacaaatcaatgcggccattaagttgcatgaacaagttttttattttatgtaccaaagaggcttatatcccgcctataacctcgtcgacctgctaaaaggcgacgccatgcatgcgcaaaaagcgatatcgatgagataaaaaagccagcgaggatagaatcctcactggctctgttttttgctattttacgattaaaaccggacacttcactcttttcgccactttatggctgacacttccgagcaccatttcctgcaaagtgttcagccccctgcttccgataatcacgatatcaacatcatgatggttggcgtacgatacaatggccgggcccggatccccgtgctgcatcgtcatttgatagggaacggccgcctgttttaatttattttctatcgacagcagcctgctgcgccgttcgcgttcgagttctgtacggttttcgctatgcaggacttcatgttttgctttcgcataatccaatacataaatcatgtcgacgaccgcttcgtttgacatggaagccagatgaatcgcatgatcggcagctctttcagaatgcttggaaccgtcagcagccagcagtatatgtctatacacccttcatcacccgtttcttagtgatttgacactgaacgatgaggttgatcataggttgctaatttttcgaccagcttccagctggattcatttaatccaatcaagtcaacatctattccttgctctttcattttcaaaacgactttttcgatagccgccacagcggaatcatcccatatatgggcctcagaaaaatcaagaatgacctttttcgtttgctctcccgttttaaaggagtttacgaaatcttgaaccgatgcaaagaaaacttgtcctttgatgatgtacttgaccgcgttttcttctgacttttcttcaatttttagtttggagattttcgctacgaagaagattgcgcttaaaatcacgccggcgaaaaccccttttgataaatcgtgggtggccataacggtaacgacggttacaatcatgacaatggaatccgtcagcggcacctttcttaacatgctaaacgaagaccagtcaaacgtcccgatcgataccataatcatcacgccagccaaagctgccatcggaatttgtacgacccagtcgcccagcaccatgattaaaaacattaagaagacaccggcaacaaaggtggacaagcggcctcttcctcctgattttacattgatcacagactggccgatcatcgcgcatcccgccatgcctccgaaaaaaccggcgacaatgttggcgatgccctgtccgcggctttccctgtttttgtcgctttccgtatccgtcatatcatcaacaatagaagaggttaataatgactcaagcaagccaacgatggaaagcgcaaaggctgttggaaaaataatggccaatgtctcaaaattgaaaggaatattgggaatcataaaggcaggcaatgattgcttcatttctcccaaatcaccgacagtgcgcagatcaaaatgaccgaaaatggcaaatacagtcatcgcaataatggcaacaagtgcagatggaacggcttttgtaaagcggggaagaacatagataatcaacaacgtaataccggccacaacatacgtcatattcgaaactccaacaaaatgaggaacctgcgccattaagattaaaatggccagcgcatttacgaaacctaccataaccgaccgcggaataaatttcataaagcgcgcaatcttcagcaccccaaatattaattggatgattcccgttaaaatcgtagcagcaaataaataatcaagcccgtgatctctgaccaaagttcccatcaaaagagccatcgccccggtcgcggctgatatcatcgccggacggccgcccgtaaaggaaatgacaacggcgatacaaaaagatgcgtacaaacctaccatcgggtctacacccgcaatgatggagaacgctatggcttcaggaatgagagcaagcgctacgacgatacccgaaaggatatccccccgtacattagaaaaccattcgctatttaattgtttaacattcaaagattcaacacctcgttcgtgatcatttgcttctaactctcatagaagccatctgtttttaacatgtttcactttagcaaacctgtatcaaaatgtctatatggttttttttgccgcggccgtttactccccgcactcccgtggaaataaacacgaagaaattaagaatgtaattttgaaaagagtccaatctaaggattagagggggtttcaacatggcgcaagagctggaaaaacggccggggcatacaagatggtatatttcttctttattaagcagcatgatcattttaaattactttgaccgtgttgccatttcagtcgcagctcctgcgatacaggattcctttcaattgacggcaacccaattaggcatcgtcttttccatctatacctactcatacacgctgatgcagattccggtggggagtctcttggataagtacggcgttgcctgggtgacaagggtcggaatgaccttgtggagttttctaaccattatattggcttttttacagggaaaactgcttctttatattgtcagatttttaatcgggctgacgagtgcttcagcttttcctgccgcatccaaagcaacggccttatggtttccgcctaatgagcgcggccttgccaattccttgtttgactcggcagccaagttcgcgaatgtcatcggcgcgcctctcgtagcctttttagttacgacattcgactggcgagccgcttttttaacgatcggaatcattaatgtactgttcaccgtatttttctggttgtattatgaacagcccgatcggcacaaacgaatctcaaaggaagagctccattatattcaaaagcataatgccgtatcagaggaagatatctcggaacggacgcttattgctttaaaagcgatgctgacaaaccgtaaagtatgggggctgatgatcggatttacgggttacggctatacattcaacctgctcttaacctggctgccgaccttctttaaagaaacatacggaatggacattatgtcctcagggctgtttacagcggttccctggctgatatcgacggtttccggaatcgttgtgggcggatggctcgtcgattttttaattcaaaaggggcattcgaatacaaaggtataccagaccattatcgtaatcggcatgagccttggatttgcctttctgggagctgttttcacgcacaacatcacgattgcgatcatttgcatttccgtcggcttagccggaatatctgcgaccgcgcctatcggctggtcgatatcagccgatattgcaccggttggttccatctctctgctcagttcaatggtcaatttggcaaataacttattcggagggattatcgcggtttcattaacgggctatctggtcgatgtgaccggttcatttacgctcagctttttagtagccggatttgtattactgctcgggctcgtgttctacctcgcagtcctcggcgatataaagcgaattcgtattggcaagcagaaaacctgaatgctgaaggaaacgacccggcttttgataaataaaaaaagaacaagaccgcattgggtcttgttccttttatcggcttactcgcctgctacgtatggaagtaaagccatttgacgagcgcgtttgattgcaacagtcaatttacgttggtatttcgcgcttgttcctgttacacggcgtggtaagattttaccgcgctcagagataaattttctaagaagatctacatctttgtagtcgatgtgcgtaatgccgttggaagtgaaataacacactttacggcgtttcgcacgaccgcctctgcgtcctcctgccatcgttatttccctcctttctgttctggttttattttattcgtccgtcatccattaaaatggcaagtcgtcatcagagatgtcaatcggctttccatcatttgcgaatggatcgtcattgaagctgttgccttgattgcgattctgattgttttgactgccgccgaatggagccggttcattttgtccgccgccaaagtgttggcctccctggcctccgctgtaaccgccggaaccagaaccgccgcctttaggctccagaaattgaacactttcagcttgaacttccgtgacgtatacacgctgtccctgctgattttcatagctgcgcgtttgcaaacgtccatctacacccgcaagacttccttttttaaggaaatttgcaacgttttcggcttgtcttctccagacaacacagttgatgaaatcagcttcacgttcaccctgctgattcgtaaacgtacgattgacagcaagcgtaaaggtggcaacagctgcaccgctaggagtataacgaagctctgggtcctttgtcagtctgccgactaaaacaactcggttaagcatattgagagaccatccttttgctttagagtatataattcaattctgtttattcttcttctttaaccacgatgtggcgaatgatgtcgtcactgattttagctaaacggtcaaattcttgaactgcttcagctccagcttgaacgtttaagatttggtagaatccgtcgcggaaatcgttgatttcgtatgcaagacggcgtttcccccaatcttttgtttcagtgatctccgcaccgttagttgttaaaatgttgttaaaacgctcaacaacagcctttttagactcttcatcaacgtctgggcggatgatgtacatgatttcgtactttctcatttgtatttgcacctccttttggactaagcggcccattatattgggcaaggagcaataatcctattactcacaattttatattatatcaaagctcttgtcctatttcaactgcgttatacattgaaacggaaatgaatgacatcgccgtctttaacaatgtattctttcccttcaaggcggacttttccggcctcttttgctgcggtcatgcttcccgcttcaagcagatcgtcgtaggcgaccgtttccgcacggataaatccgcgttcaaagtccgtatggatgatgcccgcacattcaggggctttcattccttttttaaatgtccaagctctgacttcctgttctcccgctgtaaaataagtagcaagtccgaggagggagtaggacgctttaatcagctgatcgagaccggattcttcaatgccgagttcttcaaggaacatcgccttctcttcgccttcaagctctgcaatttcggactcaatctttgcgcagacgacgatgacttccgcattttcagcagctgcaaattcccggaccttctgaacgtactcgttacctgaaggatcagccacttcatcttcgctgacattagctacatataagacaggttttgtcgtcagcagatgaagctgcttcaacaccttttgctgctcttcggagaactcgacagagcgggccggcttttcctgttcaaacgcctcttttaactttgtcaaaatctcaaattcaaacacggcttctttatctttttgcttggccatctttccgacccgcccgatccgcttttccacggtttcaaggtcagccagtatcagctcaaggttaatcgtctcgatatccgaaatcggatctactttcccggacacgtgtgtgatattgtcatcggcaaaacagcggacaacatggcagatcgcatctacttggcggatgtgggacaggaacttgtttccgagcccttctccttttgatgctccttttacaatgcctgcgatatcggtgaattcaaatgcggtaggaacggttttcttcggattgacgagttctgtcagcttttgcagacgctcatcaggcacctctacgatcccgacgtttggatcaatcgtacaaaacgggtagttggccgattctgccccggcctgagtaattgcattaaataaggttgatttcccaacgttaggcaaaccaacaatcccagctgttaaagccattgtttcatctcctctataatgaacatccgtgtgtagtcgtaaatgttaaacctgcaacaattataaggatgattacaataaaagacaagctgacaaaacttgcttttcaatcatacaaactagatgaaaattcatttttcattgagacagaaaaaaagcataaggaggtccgccaagattaactttcggactcctcatgcttaactaatatctttttcagctttctttgaaactctttgcgcgggatcatgacgctgtgtgaacagccctcgcacttgatccggatatccattcccatccgaatgatcttccagcggtttgtcccgcagggatgcggctttttcatttcgaccacgtcattcaggccaaattctttatcggccaacatcgttcacctctttgcttccttgttgtgaccttattgtacaaaaaaccacggtgaaagggcaattcttcacaatcttaactgtatttatttccatttactcaaaatcggatatagtaaaatatttaccaataaatataaattcaataatccgtaaattggatataaaaaagcgattaaatttgaaaatccgattgacgtaaaaggagccatgatcgagagaagcaggatgacgatcacccatctcggccagttcacaaaggacagaaaacggctggacagaccgagaatgctcgagatcgtcgtcgtatagattgcgacgcaaagtacagccgtcataaaaataaaaatcggaaaaggcgcgccctccaaaaccgcgaataaaggaatttcataatgggccagttcaccggcaagctctacaagggtctcattgtacatgtatgaaatagccccaaacaccaggccgcttaatatgctggcaatctttgcttctccgacccccttcatctctttgccgaccgcagataatacagcgacaacagataatatgttcagggaagtgaatgcgatgccggcaggccagttgtattgatgagtcaagttgagcagccacggctgatgatgagctgtttgaaaagaaatcagcgcatacagcagccccgccaccaaaatcgggattaagtagctattaacggacaatatgccattgagcccccacaaaaacaacaaccctgtgcataaacaaaacaagatgacgccagtccaaaacgggatatgaaagatttgcagcgttaccccgcctcctgcaatcatcacaatcgtcgtcgtaaacaaatacaggatgatcagcacatcgtatactttagccagcatcggaccgattaatgtttcgagcacaggcagaaaatgctctgatttttgttcatagctgatcttcatcacaatataggttgacaggctgaacatgatcgtaaacaacaggatagccagtccgctttcatcaccaaaaaactgccatatttcctggccggatgcatatcccgcacctattaagcttcctaaaataagaagcatccacttcatcccggctctccacacgatttgctcaccccaacaatatagtttttaagcttgtttctccgctcatgacactatattgccggtcctctataaaaattcatgaaacccttttcgacttttctcttacaaatgaataaattatattaatataacaaaatagaatatcgtatcctctcttagtaaagtattttttccggctgaccaaatcgactcatccaaagcataaaaaaagagacagctggatatactgtaaacaaccatacatactcaaaaaacacaccaaggcactgctgttaccatgatgacaaggatgtgaagcctatgaatcgaaaaggcggaattttttctcaagaaccaatgaatgaatatatttctcatacggatccgctagctgttaaacaaatagagaaagtcctttccgtctatttaaaggaagccggagaccggcccatcgtgatcgtttgcatcggtacagaccgctcgaccggagattcgctcggtcccctcgtaggaatgaaactctccgcaaagcagctgacacgttttcatgtctatggaacgcttgccgacccggttcacgccgtgaacttaaatgaaaagcttgatcatattcatcagcagcatcaaaatccttttatgatcgcgatcgacgcctgtcttggacgaaccaaaagcgtggggtctttccaaatcggcaaagggcctttgaagccgggagcaggcgttcagaaaagtttgccggaagtcggccacgtgcatattaacggaattgtcaatgtcagcggttttatggagtattttgtcctgcaaaatacaaggctcaatcttgtcatgagcatggcaaatgtgcttgcggacgggctgtcgcatctggaaaagaccggatcgcagcggcgccatgtgtcaccaattgaaagaatgaccggaagaatgtcataaaaaaaccatctgtacatgatcagatggtttttaagcttatgcgtcttcttgagccaataattcgagaatacactccaagtcttcatttgagtagaattcgatttcgatcctgccttttttcttttgctttttaatggtcaccggtgttccaaaatagtttcgcaaatacgattcccgttccttgatcactgcatctttgacttgtttcggcttctttgtttcacgtggaacatcagcgttcaactgttgaattaacttttccaactggcggacgttcaactgttcggacacgaccttttgaacaagcggctcaagctttttcttgtttttcaatccaagcaatgttcggccatggcccatcgataacgtaccgttgtcgattaacttttgaacgtcttcaggaagtgtcagcagccgcaagtggttggcgatgtgaggcctgctttttccaagccttttcgccagctgttcctgggtcatatcgagatgtttgagcaaagattcataggcttttgcttcttctagcggagacaggtcttctcgttgaagattttccaatagggcaatctccatcatcagggattccgacagctcgcgcacaatcgcaggaatggtttccaatccggccttttcagcagcccggaaacggcgttctccggccacaatgtcatagcctttaattgactttctgacgatgatgggctgcaaaacaccgtgctgcaaaatggactccttcaaatcttttaacgattggtcatcaaacgtttttcttggctgataagggttgggccgcaagtcttgcagcttgatttcctcaaccgtttcttcggataaatcaacatttgaaaacaatgcattaatcccttttccgagacctttaggcattcgcagccacttcctttgctaattctaaatagacttccgctcctctggaacggggatcatataaaatgatcggctttccatgactcggcgcttcactgagccggacattccgggggataaccgttttgtatactttatcgcggaagtactttttcacttcttcgatgacctgtatgcctaaattcgttcttgcatcaagcattgtcagcaatacgccgtcgatcatcagatccgtatttaaatgtttttgcacgagccggacagagttgagcagctggctcagcccttccagcgcataatactcgcactggaccggaatcacgacggaatcggaagccgtaagcgcattgattgtaagcagccctaatgacggcgggcagtcaataatcatgaaatcatagttttgtttgaccgattccaaagcccttttcagccggacttctcgggagatggtcggaacaagttcaatttccgcccccgcaagctggatcgttgcaggaatgacatccaagttttctacggatgttgttttgatgacatctttcacatctgcatcatctactaatatatcgtacacacattgatcaacatcagccttttcaacgccgataccgcttgttgcgtttccttgcgggtctatgtcgactaacaaaacccttttcccgatgtaagctaagcaagctcccaggttaacagaggttgtcgttttaccaacgccacctttttggtttgtgatcgcaataattttccccacaatgtcacctactttcacattgaacaagtttctctcatttctctattttaacaaaaaaagaatcggccgtttgctttttttgagtttttgttttttgaaagagatctgttttgtttatttttcgacaaaaagaaacagtttttttatcttagaaaaaagagaagaaacgctcaaataaagtgaaagatagttttaattttatatcagtataaaaaatcccccctgtgttggggggatttcaatcaatctgctgcgggcattttccgggtggcgatggcaatcctgttccaggcatttattgtgacagctgccatgatcagttcggctgtttcagcttctgtaaaatgggtcctgacttcgttgtatatttcatccggcaacccgtgctcgccgattcgcgtaacggcttcagtcagcgccaatacagcccgctctttttccgtgaaaaaaggcgcttcccgccacgcattgagcgcatatatccgctgttccgtttccccgttctgtcttgcatccttcgtatgcatatttaagcagaaagcacatccgttcagctgtgaagcccggattttgatcagttcctttaaaatggggtcaatgccagaagaagcctgcgctttttcaagctccagcattcctctgtatccctcaggatttactttttccattagaaatctcgtttccatgtctattcctcctttaagtgtttcacttatataacaagagagaaacggagtttgtgacaaaaaacgttatattttaatgtgcttcagtttatcgggatttgacacgataaacacatttttgacggaatcgccttccggattccaagcaaagcaaaccgcgtaagccgggcggttgtttttcatgatcaaaacgcccttttggtcgttgatatcgactggcataaagcggccggaaaagcttccctttgaaacaactcccgtaaaaaacgcataaatgcggctctttccatagatcggtctcaaagcgctgcgcacttttccgccgccatctgtatacaatacggcatcttcaatcaatttcttggaaaactcctcaaaattacctgttttcgctgattcgataaacagctgggccaattgctgttcttcaaccggctgtgaaaataccgaaatatcctcgtttaatttctgtttcagccggctgtggatttgacgacagttcgcttccgacttcccgataatggacgaaatttccttgtaatgatatccaaatacttctctaaacatcaaaacggctctttctacaggatttaatcggctcataactaccagaaaagcataggataccttttctttctcttcaacgtactcagccgggatttgagctgaaagcgccacctgcggttccggaagccattccccgatatatacctcccgcttcttgcgggcagactgcagttcatttatgcagcggtttgtgattgatttcgttaaatatgcttgaatatggtcaatttgaccgatatctttttcctgaaggtctgcgaacaattcttggatgatgtcctctgcatcttgaaaagacccgagcatacggtaagcaatcgaaaaaagcaatgaatgatattgtcgataatattccatagacgctcccccatagatattttgcctaaaaaaataaaagctctatagggagcttttatttcggtattcgaatcgtaaactgaatatattcttcaaattcctcttcttccgtattcagtttgacgccgctgtcttccaccattgataaggactggcgaatcgtattcatcgcgattctcgcgtccctgctgtacgcttttctctttggtttaggcttgcgtttatcctgctcaagcattttgacgacacggtcttcggtttgttttacatttaaactcttttcaatgacttcatgcagcagcttgacctgaaggtcgggctgtttcaacggtatgagcgctcttgcgtggcgctctgaaatttcttttttcaagatcgcttcctgcacctcttccggaagctttaacagtctgagcttattggcgattgttgactggccctttccaagcctttgtgcaagggcttcctgcgtcaaatcgtgaagctctaaaagccttgcataagcatgcgcctcttcaatcgaagataattcttccctctgaaggttttcgataagagcgacagaagcggtctctgtatctgaaaaatccttaataatagcgggaaccttctcccaatcgagcgtttgaaccgcccgccagcgccgctctccggctatgagttcatattggccttcccgctctgtttttctgacgacaatcggctggataatgccgtgtgtatgaatggttgcagctaattctttaattttttcttctgagaaaatggtgcgcggctgaaaacggttaggaattatatcgcctactggaatctcttgaatttcttctttattcgtatcatgttcagcaatctctgcttcttcttccttgtcgccaagtccgaagagacgagagaatgaatgcttcatgtacctacaccacctttaaacactgccatttttataattctattttctcatgaattttccttctgtgacatcacgaaatttgaagaaaacgaataatttaaccttcaataggagatttattaggtgttccaggctttcttggaaatttcttcggtgtctgcgattgttttttgatgacaatgatgtttctttcgctttcttctattggcagctgaaaagaatgtacggtttcaattttgcctccaagcgttttgatggcttttttgcccgtttcaatttcttcatcagccgaagcggcttttaatgctacgaataaaccgtcttttttcacaagcggaaggcagagctcgctgagaaccgaaaggcgggcgacagcgcgtgccgtcacaacgtcatagctttctctgtggtctttcgatcttccgaatgtttccgcgcggtcatggtaaaaagctgtgttttccagcttcaaagcggctgacagctgattcaaaaagtgaatccgtttgttcagtgagtcaacgattgtgacgtgaaggtgaggaaagcagattttaatcggaaggcttggaaatccggcacccgctccaacatcacagagagtgttcatctttttgaaatcaacataaaaagaggcggcgatggaatcgtaaaaatgctttaagtacacttcttttttctcggtaatcgaggttaaattcattttttcgttccattcaacaagccattcgtaataagtctcaaattgctccagctggaaggaggaaagggaaatgcctttcttctccaaaccggctgtaaattgctcaatgttcatgccgtcaccctttctattccgcaaccttggcaatccgtccctgctctaaataaacgagcagtatggaaatatcagcaggattgacgccggaaatccgtgaggcctgtgcgacagacagcggtctgacctctttcaatttttggcgcgcttccgttgcaatgcctttgatcgcgtcatagtcgattctgtcaggaatctttttattttccattttctttagtttttcgacctgctgcaaggacttttcaatatatccttcatacttaatttgaatttccacctgttcggcaacgtcgccggcgactttttgttcaggcggcgcaagagcagtgacggtttcataattcatttcaggccgcttcatcaggtcggtcgcgcgaatgccgtctttgagctcgctgccgcccagtgaacggatatattcctgattttcctttgtcggtttgataataacagaatgaaggcgttttttctctgcttcaatggccgcttttttctcttgaaacttttgatatctttcttcagaaatcaagccgatctgatagccgatctcggtcaggcgcaagtctgcattgtcgtgacgcaggagcagcctgtactctgcacgcgaagtcagcaggcggtatggttcgtttgttccttttgtcacaaggtcgtcgatcaatacgccgatataagcgtctgagcggctgagaatgacctcttctttgccgagcgctttccggcccgcattgataccggccataattccctgtccggccgcttcttcatagcctgatgttccgttaatctgtccggctgtgaagagtcccggaatttttttcgtttccaatgtcggccacagctgtgtcggtacgatcgcatcatattcaatcgcataccccgcccgcatcatttgcacattctcaaggccgggaatagttgaaagcatttttcgctgcacatcttctggaaggcttgtcgacaatccctggacatagacttcctgggtgttgcgcccttcaggctcaagaaagatttggtgtctcggcttgtcgttaaagcggacgaccttgtcttcaatagacgggcaatatctcggtcccgttcctttgatcatgccggagtacatcggtgaacgatgcaaattgttgtcaatgatttcgtgcgtttccggacttgtatatgtgagccagcatggaagctggtctgtaatatattccaccgtctcatacgaaaaggcccgcggcacttcatcaccgggctggatttccgttttgctgtagtcaattgaatgactgttgacccgcggcggcgtccctgttttaaaacggacgaggtcaaagccgagctcttcaagatgttcagacagcttgatggacggctgctggttgttcggtccgctggagtatgacagatcgccaagaatgattttccctctcaaaaatgtccccgtcgtcagaacaacggtcttagaacggtactccgcccctgtctgggttataacgccccggcattccccgtcttcaataagaaggcgttcgaccattccttgcagcatggtcaaattcggttcattctcaagtgtctttttcatttcatgctgatattggaatttatcagcctgagcccgaagcgcccgaacggcaggtccttttcctgtatttaaaagcctcatttggatatgcgttttatcaatatttttagccatttccccgccgagcgcgtcaatttcgcggacgacgattccttttgcaggtccgccgacagacgggttacatggcatgaaagcaaccatatcaaggttaatcgttaagacaagcgtttttgcgccttgtctggctgacgccagcgccgcttcaacaccggcgtgtccggcgccgacgacaacgacgtcatattggcctgcttcatagcccatatgctttgttcctcctttattttcctaagcaaaattgagagaagagctggtcgatcagactttcgtgtacagcatcgccaatgatctccccaagaacttcccagcatcttgttaaatcaatttgaaccatatcgatcggcacatcgttttcgatgccctccaatgcgtcagtgatggcgcgcttcgcctcatgcagcagtgaaatatgccttgtattgctgacatatgtcaagtcgccgctctcgatcgcgcctgtgaaaaacagcgattgaatggcttcctccagctcatcaatcccttcctcttttaataaggaagtcgtcacgacaggctgattcccagccaattcccgaacccgatcaagatcaagcttttgctcaagatcggtcttattgacaatgacgatgatgtccattcccttcgttgcttcaaagagcttgatgtcttcatctgaaagggactcgctgtaattgaggacaagcaaaatcaaatctgcttcttttaatacctgtcttgaacgttcaacgccgattcgctcgacgatgtcttcggtctcgcggatcccggctgtatcgacgagacgcagcggcacgcctctgacattcacatattcttcaatgacatcccgcgtcgtgcccggaatatccgttacgatcgcttttgtctcgtggacgagactgtttaaaagcgaggacttgccgacattgggccgcccgatgataactgtcgagatgccttctcttaatattttaccctgctctgaagtcgtcagcagcgcctcgatttcctttttgacctttgtcgctttttcaatcagcatcttgtgcgtcatttcttcaacgtcatcgtattccggatagtcaatattcacttcaacgtgggccaatgtttcaagaatctcggccctcaaccgtttgatcagtgaagacagccttccttccatctgattcatggccacattcattgcccggtctgttttggccctgatgagatccatgacagcttcagcctgggaaagatcgattcttccgttcaaaaaggctcttttcgtaaattctcccggttccgccagacgcgctccctctctcaaaacgagctgaagcacctggttgacagtcacaagtccgccgtggcagttgatttctacaatatcttcccgcgtaaaagttttcggcgctttcagtaccgaaaccatgacttcttccacgactttttccgtttccggatcaacgatatgaccgtagttaatcgtatgtgaatcgacggaactcagcctttttccgcgaggtcctttatacactttatcggcgatcgcaagagcctcagggccgctcatccggacgatcgcaatcgccccttctcccatcggcgttgaaatcgcagcgatggtatccatggctttcacctctctttttcattcctatatctattatccccatttgccgggtcatcttccaaacatcgtatacggatgaaaaacttttattgtaatcaaaatttaaagataacatagtttcaattgaagtggaagtgacttgaaccgttatccacaaccgttctaagccatcattacttactttaacttatccacatgtgaataacaattaaatttcattttcatcaacagcttacgcctgaaaaaatagaacttaaactgattttgctgcatttcatcgattttcaacggcaaaaaaaccgaagccccaattttgggaacttcggttttcatgttattttttatatgagatgacaaggtgccggttatggtcttcaccggtagagtaagtttcgatatgctgcgagtagcccgcaagcgtatcatggatgaccttgcgctcactggaaggcatcggctccaggtgaatgtcttttttctgcctggccgcctggtcagcaagcttcaatgccagctgagcaagtgtttccttccgctttgcgcggtatccttcggcgtcaaccaccgcttggatatatctgtcggaatgacgattgagcacgagctgcgtcagcgtttcaagggcatttaaagtttgtcccctttttccaattaaaagagctgttttgtctcctttcaactgaaaaaccactcgtttagactcctcttctgccgtcacctgggcttgtattcccatattcgaaattacattttccaaatattgttttgcttctttaaccgggtctattttttcccgaatgttcacgactgcagaccgatgaccgaaaatgccgaataatcccttttttccttcatcaactacgtcgacttcgacatcatctgcatgaaggcccagctgttcaagcccggattgcactgcttcatcgacggtacgtccagtagcagtcagttccttcactttttcttacctccggatttttttcctccggctgccgcttcctgtctctcagcctttagatcaggccctttgataaagaaggtttgagcaatcatgaataagttaccgactacccagtacagggaaagagccgccgggaaactgatcgcaaatacaacgatcatgatcggcatcagccaaagcatcatcgccatctgcggattttgctgcgctgttcccgccatcatcagcttttgctgaatgaatgtgaacacaccggcgagaatcggcaaaatgaaatacggatcacgctccccaaggtcaaaccataaaaagctgtgttctgcgatttcccgcgttctcataatggcatgatagaatccgattaaaatcggcatttgaattaagatcgggaaacatccggcaagcgggttaaccccgtgcttctgcatgagagccatcgtttcctgttgaagcttctgctgcgttttttgatctttagaactgtatttttcacgaagtttttgcatttcaggctggagagcctgcatcgctttcgaactcttcgtctgcttgatcatcagcggcaaaattaaaagtctgattaagatcgtgacgatgataatcgctagtccgaagttttcattcgttaaatttgctacatacgtgatcagctgtgacaacgggtatacgatatacgtgttccaaaacccttcgctttctgcagtgatcggctggttgatttccgtacatccagctaaaagcacgataacgccgatcatactgaacaataataaaattcgcctcttcaacaacatttcctcctaaatcttcattcttcaaccggtattattcggttatgaccattaaaaagacatactttctcgtattttatcatctttctcccccgaatgggcgacgacatttttctggagctaaaggaagcgcttaaaaatgaggggccataacttcttttaacccggactatgatggctgattcggttttttccggtagacaaacgactttctgaaaagatgctgcaaactttttttcgtctcttcatatgataattcagctgcaggctttcttgcgatgataatgtagtcattttcttgttttaatagattccgctcttcctggatgacctggcgaatcagccgctttacccggttgcgcacgactgcgtttccgattttcttgctgaccgacagtcccacccgaaactctttcgcttcaggctggtgaagcacatataaaacatattgccggtttgccatcgattttccctttttaaatactttttgaaaatcttcatttttctttaatcgatttcgctttttcatatcttctttcactccgataacaagctggcaaatgggcctggtcattcctctatgtaaaaaagaccactgacattattcagtggcctaagctgataatacttttcttcctttgcggcgacgacgtgctaatacaagacgtccatttttagaactcatacggctgcgaaagccatgaactttgctgcgcttacggttatttggttgaaatgttcttttcatgtatgacacctccctcgaggaatagctgttaaagacagtctaatttattatattgggatgagcagttcattgtcaacttcgctcacacatttcttttttgcaccataataggataacacatatcaattttctt

SEQ ID NO: 2 - DNA, 1341 bp, Bacillus licheniformis
atgaaaaacatatcggatctttggaatcaagctttggggcagatcgaaaaaaaattgagcaagcccagctttgaaacatggatgaaatcgacaaaggcccattcattgcagggcgatacgctgatcatcaccgcaccgaacgagttcgccagagactggcttgaatcaagatacctgcacctgatcgccgatacgatctatgatctgacaggagaagaattgagcattaaatttgtcattcctcagaatcaaaatgaagaagattttatgccaaagtctccaatcaaaaaaatgtcgaaagaagaaccggctgattttccgcaaaacatgctgaatcccaaatatacatttgatacgttcgttatcggttcaggaaaccgattcgcccacgcagcgtctttggcagtggctgaagccccggcgaaagcttacaatccgctgtttatttacgggggagtcggacttggaaagactcacttaatgcatgcgatcgggcactatgtcatcgatcacaatccatctgcaaaagtggtttatttgtcatctgagaaatttacaaatgagttcattaactcgatccgtgacaataaagctgtcgattttcgcaatcgctatcgaaatgttgacgttcttttaatagacgatattcaatttttagccggaaaagaacagacgcaagaggaatttttccatacgtttaatacgctgcatgaagaaacaaagcagattgtcatttccagcgaccggcctccaaaagagatcccaacgcttgaagaccgtttgcgctcccgttttgaatggggattgatcactgacatcacgcctcctgatctggaaacaagaattgcgattttaagaaagaaagcaaaagcagaaggacttgatatcccgaatgaagtcatgctttatattgccaatcagatcgacagcaatatcagggagctggaaggggcattaatcagggttgtcgcatattcttccttgatcaataaagacattaacgccgatctggctgctgaagctttgaaagatatcattccttcttcaaagccgaaagtcattacgatcaaagacatccaaagaatcgtcggccagcagttcaatatcaagctggaggatttcaaggcgaagaaacggacaaaatcggtggcttttccgcggcagatcgctatgtatctatcaagagaaatgacagattcttctcttccgaagatcggcgaagaatttggcggacgcgaccacacgacggtcatccatgcccatgagaaaatatcaaaactgctgaacgatgatgaacagcttcagcagcagattaaagaaattaaagagcagctgagataa

SEQ ID NO: 3 - DNA, 1137 bp, Bacillus licheniformis
atgaagtttacaattcaaaaagaccgcctggtcgaaagtgtccaagatgtgttaaaagccgtttcttcaagaacgacgattccgatcttaaccggtattaaaatcgtggcctctgatgaaggggtctctctgacaggcagcgattccgatatttcgattgaatcgtttatcccgaaagaagacggcgatttagagatcgtgacaattgaacagcccggcagcattgtgcttcaagcccgttttttcagtgaaattgtcaaaaagctgccgatgtcaacagtggaaatcgaggttcaaaatcaatacttaacgatcatccgctccggcaaagcagagtttaacttaaacggtttggatgcaagcgaatatccgcttttgccgcaaattgaagagcatcacgcttttcaaattccgaccgatctgctgaaaaacctgatccgccaaaccgtttttgcagtgtccacctcagaaacacgcccaatcttgacaggtgtaaactggaatgtcactggcggtgaattaatatgcactgcaacggatagtcatcgtcttgcgctaaggaaagctaagctcgacattaacgaagacagttcatacaatgtcgtcatcccaggaaaaagcttaaccgagctcagcaaaatccttgatgaccatcaggagcttgtcgatattgtgattaccgaaacacaagtgctgtttaaaacaaaaaacgttctgtttttctccaggcttcttgacggaaactatccggatacgaaccgcctgattcctcaggaaagcaaaacgaacttgattgtcaatactaaggaatttctccaggcgatcgacagggcttcgcttttggcgagagaaggacgaaacaacgtggtgaaactttccgcagccgccaatgagtcgatcgaaatttcttcaaactctccggaaatcggaaaggttgttgaaacggtgaatgccgagcagatcgaaggggaagacttaaagatatcctttagtccgaaatatatgctggatgcccttaaagttcttgaaggagaggacattcatgtaagcttcacaggcgctatgaggccttttctgatccgtacgccgaatgacgattcgatcgtccaattaattcttcctgtccggacgtattaa

SEQ ID NO: 4 - DNA, 216 bp, Bacillus licheniformis
atgacaaagacggtggctattgatacagagatgattaccctcggccagtttttgaaattggcggatgtcattcagtccggaggaatggcaaaatggtttttatcggaatatgaagtactcgtcaatgacgagccggataaccgccgcggacgaaaactgtatgtcggagatgtggtgacgattgaaggattcggttcatttcaagtcgtcggctaa

SEQ ID NO: 5 - DNA, 1113 bp, Bacillus licheniformis
ttgtatatccaaaatcttacattatcgtcttaccgtaattatgagcgccttgaccttcaatttgagaacaaagtgaacgtgattatcggagagaacgctcaaggaaaaacaaatttgatggaagcgatctatgtgcttgcgatggcgaaatcccatcggacgtcaaatgataaagaactcatacgatgggatgaagactatgctaaaatagaaggcagggtcattaaaaaaaacggttctgttcccattcagcttgtgatttccaaaaaaggaaaaaaaggtaaagtgaatcatattgaacagcagaagctgagccagtatgtcggggctgtcaacacgattatgttcgcgccggaggatttaaatctcgtaaaaggaagtcctcaggtcagaagaaggtttctcgacatggaaatcggccaagtatcacctgtctatcttcatgacctttctctttaccaaaaaatcctttcacaacggaatcatttcttgaagcagcttcaaacgagaaagcaaaccgatcaaacgatgcttgacgtgctgacggaacagcttacggaattcgcggcaaaggttgtgatgaaacggcttcagtttgtcgatcagcttgaaaaatgggctcagcccattcattccggaatttcaagaggtctggaagagctgacgttaaagtatcatacgtctcttcacgtatcagattcgcccgatttgtcgaaaatgatcaatagttatcaagaaacgttttctaaattaagagataaagaaatagaacggggggtatctctttcaggtccccacagggatgatgttcttttctatgtcaatggccgtgatgtgcagacttacggatcgcagggccagcagcgcacgactgcattgtcgcttaaattggctgaaatcgacttgattcaggaagagataggagaatacccgattctgcttttggatgatgttttatcagagctggacgactatcggcagtctcacttgctccacaccattcaaggccgcgttcaaacattcgtaacaacgacaagcgttgatggaattgatcataaaaccttaaacgaagcggaaatctttcgtgttgaaaatggcacgctatcggactga

SEQ ID NO: 6 - DNA, 243 bp, Bacillus licheniformis
ttgtatatccacttaggtgacgattttgtcgtctcaacgcgtgaaattgtggctatttttgattacaaggcaaagacatcgccgattgttgaggagtttttaagcaagcaaaaacagcggattgtctcttctaacagcacgccgaagtcaattgttgtcacattacaatcgatttatttttctcctttagcctcaggcacgttgaaaaaacgggcgcaatccaagccggaaatcgattcataa

SEQ ID NO: 7 - DNA, 1920 bp, Bacillus licheniformis
gtggcaatggaacagcaaaataattacgatgaaaatcagatacaggttctagagggattggaagccgttcggaaaagacccggaatgtacatcgggtcgacaagcggcaaaggtctgcaccatttagtatgggaaattgtcgataacagcatcgatgaagcattggccggttactgcactgaaatcaatgtcgcaattgaaaaagacaacagcatcacagtaaaagacaacggacggggtatcccggtcggtattcatgagaagatgggtcgtcccgctgtggaagtcatcatgactgtcctgcacgccggaggaaagtttgacggaagcggatataaagtttcgggcggtttgcacggcgtcggtgcttctgttgttaacgccctttcaaccgagctggatgtaacggtttacagagatggaaaaatccattatcaggaatttgaacgtggcgttccgaaagctgatttgaaagtcattggagatacggaagtgacgggaacgaccacacacttcaagcctgatccggaaatattcacggaaacgactgaatacgactatgatacgctcgccactcgtgtccgcgaactcgctttcttgacaaaaggcgtcaaaatcacgatcgaagacaagcgagaaggaaaagaacgcaagaatgaatactgctatgaaggcggtattaaaagctatgttgaacacttgaaccgttcgcgggaagttattcatgaagagccggtctatattgaaggatccaaagacggcattacagtcgaggtggctcttcaatacaatgacagctatacaagcaacatttattcatttgctaacaacattcatacgtatgaaggcggaacccatgaagccggctttaagaccggtttgacgagggtcatcaatgattacgcgagaagaaacggcgtattcaaagaaagcgatccgaacttaagcggagaagacgtccgggaaggtttgacagcgattatttcaatcaagcacccggatcctcaatttgaagggcagacgaaaacaaagctcggcaactcagaagcgcgtacgataacagatgcgctattttcagaagcgcttgaaaagtttctgctagaaaacccggattcagcgaaaaaaatcgttgaaaaaggggttatggccgccagagcacggatggctgcaaagaaagcacgcgaattgacgcgcagaaaaagcgcccttgaagtgtccaatctgccggggaaacttgctgactgttcttctaaagacccgacgatttccgaactttacatcgttgagggtgactctgcgggcggatcggcaaaacagggccgcgaccgtcatttccaagcaattttgcctttgagagggaaaattttgaacgtcgaaaaagcccgcctggacaaaatattgtccaacaatgaggttcgttctatgatcaccgcccttggcaccggaatcggggaagatttcaaccttgaaaaagcccgctaccacaaagtcgtgattatgacggatgccgacgtcgatggtgcacacatcagaacattgctgctgacctttttctaccgctacatgagacagattatcgaacaaggatatgtctacatcgctcagccgcctctttacaaagtacagcaggggaaacgcgttgagtatgcgtacaatgaccagcagctcgaagaaattttaaaagagcttccgcaaaatcctaagccaggcctgcagcgctacaaaggtttgggcgagatgaatgcgacacagctttgggaaacgacgatggatccagaaacgcggacattgcttcaagtaacgctcaaagatgcgattgatgcggatgaaacctttgaaatgctgatgggcgacaaggttgaaccgcgccgcaacttcatcgaagagaatgcccgatatgtaaagaatttggatatttaa

SEQ ID NO: 8 - DNA, 2469 bp, Bacillus licheniformis
atgagtgaacaacataagccccaagttcaggaagtcaatatcagtcaggaaatgcgcacatcttttttagattacgcaatgagtgttattgtttcccgcgctcttccggacgtaagagacggtctgaagccggtgcacagaagaatattgtatgcgatgaacgaccttgggatgacaagtgataagccgtataaaaaatccgcgcgtattgtcggcgaagttatcggtaagtaccaccctcacggtgattctgctgtttacgaagccatggtcagaatggcgcaggattttaactatcggtacatgctcgttcaaggccatggaaacttcggttctgttgacggcgactcggctgcggccatgcgttacacagaagcgagaatgtctaaaatatcaatggaaattctgcgcgacatcaataaagacacaatcgattaccaggacaactatgacggttcggaaaaagagccggttgttatgcctgcgagatttccgaacttgcttgtcaacggagcggccggtattgctgtaggtatggccacaaacatcccgccgcatcagctcggtgaagtcattgacggtgttttggcggtcagcaaaaaccctgatatcacgcttccggaattgatggagatcattcctggacccgacttccctacagcagggctgatcttgggaagaagcggtatccgaaaggcctatgaaacaggccggggatcaattacgcttcgagccaaagctcaaatcgaagaaacatcttccggcaaaccggtaatcattattacggaaataccgtaccaagtgaataaagcaaggctgatcgaaaaaatcgccgatctagtgcgcgataagaaaatcgacggcattacggatctccgcgatgaatcagaccgaaacggaatgcgcatcgtcattgaactgagaagggatgcaaatgccaatgtactgttaaataacttgtacaagcagaccgctcttcaaacatcattcggcattaatcttttggcgcttgttgacggccagccgaaagtattgagcttgaagcagtgtctggagcattatctcgaccatcaaaaagtcgtgatcagaaggcgtactgcattcgagcttcgcaaagcggaagcgcgggcccatattcttgagggcttgagagtggcgcttgatcaccttgatgaagttatttccctaattagaaattcgcaaacggctgaaatcgcaaaaaacggattgattgagaagttttctttgactgaaaaacaggcccaggcgattttggacatgcgtctccagcgtttaacagggctggaacgcgaaaaaatcgaagaggaatatcaaagccttgttgagctgattgcagagctaaaagcaatcttagcagacgaagagaaagttcttgaaatcattcgggaagagctcacagaagttaaagagcgctttaatgatgagcgccgtactgaaatcgtgacatcgggccttgagacgattgaggatgaagatctcatcacgcgcgagaatatcgttgtgactttaactcataacggatatatcaaacgtctgccttcttctacttaccgcagccaaaaacggggcgggaaaggcattcagggcatgggtacaaatgaagacgacttcgttgaacacctgatttcaacatccacccatgacaccattctcttcttctcgaataaagggaaggtgtaccgtgcgaaaggatatgagatccctgaattcggacggacagcgaagggaattccgattattaacctgcttgaagtggaaaaaggagaatggatcaacgcgattattccggtaggcgaatttgatgacgagtcttatttgttcttcacgacaaaacacggaatatcaaaacgcacaccgctttctcaattcgcgaatatccgcaataatggattgatcgccttaagcctccgcgatgaggatgaattgatcgctgtccgcctgacggatggaaataaacaaattattatcggcacgaagaacggtctgctcatccgtttccctgaaacagatgtaaggcaaatgggaagaacagcagccggcgttaagggcatcaatctgacagatgacgatgttgttgtcggcatggagattttggaagaggattcacacgtgctaatcgtaactgaaaagggctacggaaaactgacgcccgcttcagaatacagggtgcaaagccgcggaggaaaagggctgaaaacctgcaaaatcacagaaaataacggatctcttgtgacagtgaaagcaacgacaggagaagaagatttaatgatcatcacagcaagcggcgtgatcattcggatggatattaaagatatctccacgaccggacgcgtcactcaaggtgtgcgacttatccgcttaggtgaacaagagcatgtcgcgactgtcgctttagttgaaaaagatgaagagaacgattcagaagaacaggaagcggatgaatcataa

SEQ ID NO: 9 - DNA, 978 bp, Bacillus licheniformis
atgcaagataaaggatggaaggatttaaagctattttattcggtcgaaacagcccagcattttcttgaaatggtatataaaaatcaaggaatggaagatgccaaaaaaaattcctataaaaacggagagcggtttattttttttcttaaacatgcggaaggcttttacaagcaagccaaaatcgctacgttggaaatcaaaccgattttattattttacggcatggcacagctattgaaagcctgcctgttaacgacagatccttcctatccaagccatacttcagtgctcgcccatggcgtgaccactagaaaacgaaaaaaacaaaattaccgcttttatgaagatgaagtaaaaatccaaaggaacggcctatgtatgcacgtcatcaggtcccttttccaattatccggattggaagatgaacgattcaatatgaagcagcttttggcgagaattccggagatcaataaagtactggcatttcaaagaaaaccgaatccaatagtaaaagcagccgtcgaagaccggctcatttggctgccaagcgagacgcccgatgcttacaatatgtcgtcaaagcgtttcatcgaacatgtcgaataccatttaaactggtctttctgccgtgaagaaaaagaggggatcattttttccgccgctcaaaaagaatgccgtcccagcacttcgactaccttgctttatgatttggaacatggcgcatattattttccggctgaacgggatcgctttttaaagctcccggaaatattggtgcattacttggttgcttacaatttaagcatgattgccaggtatgaaacagaatggtggtatgaccttcttcttcaaagtgccagcgatgattatgtcatcatccaacagtttttacatatagtcgagtcaaagttcccttattatatcgctgaattgcttattcgaaaaaaagaaaacaacaaaaaagaccagcttatataa

SEQ ID NO: 10 - DNA, 1467 bp, Bacillus licheniformis
atgtgggaaagcaaattttcaaaagaaggcttaacatttgatgatgtattgctcgttccggctaaatcggaggtacttccgcgcgacgtcgatttatcggtagagcttacaccgtctctcaagctgaatgttccaattattagtgcaggcatggatacagttacagaagctcaaatggccatcgcgatggcaaggcagggcggactgggtattatccacaaaaacatgtcaattgaacagcaggctgagcaggttgacaaagtcaaacgttcagagcgcggcgtcattacaaatccgtttttcctgacaccagagcaccaagtttttgatgcagagcatttgatgggcaaatacagaatttccggtgttccgattgttgacaatgaagaggatcagaagctggttggaatcattacaaaccgtgatctgcgatttatttctgattactccatgaaaatcagcgatgttatgacaaaagaagagcttgttacggctcctgttggtacaaccctggatgaagcagaaaaaattcttcaaaaatacaagatcgaaaaactccctcttttagatgatcaaggtgttttaaaagggctaattacgattaaagacattgaaaaagtaatcgaattcccgaattcagcgaaagatgttcacggccgcctattggttggagcagcggttggtgtaacaggcgacacaatgacacgcgtcagaaagcttgtggaagccaatgtcgatgtgatcgtcgttgataccgcgcacggccattcacaaggagtattggataccgttaagaaaatccgcgacacttatcctgaattaaatatcattgccggtaacgtcgcaactgccgaaggaacaaaagcgcttatcgaagctggagcaaatgtagttaaagtcggtatcggaccggggtcaatttgtacaacccgcgtagtagccggtgtcggtgttccgcaagtgacagcgatttacgattgtgcgactgaagcaagaaaacacggcgctgcgattattgcagacggcggcatcaagtattccggagatattgtcaaagccttggctgccggcggtcatgccgtcatgctaggaagccttcttgccggaacatctgaaagcccgggcgagactgaaatctatcaaggcagacgctttaaagtttatcgcggcatgggttctgtagctgcgatggaaaaaggaagcaaagaccgctacttccaagaggaaaacaaaaaattcgttcctgaaggcattgaaggccgtacgccttataaaggccctgttgctgataccgtttatcagcttgtcggcggtttgaaatccggcatgggctactgcggaacgaaagatttgcacgcattgagggaagatgcgcagttcatccgcatgacaggagcaggcctgcgggaaagccatcctcacgatgtgcaaattaccaaagaatcgcctaactataccatttcctaa

SEQ ID NO: 11 - DNA, 1311 bp, Bacillus licheniformis
ttgaaaagcaagagattaaagcagctgatcatgttaatcgttgcttttgccgtgactgtaggtgcattttctcctatgtcaactgcaaaagctgcaaatgatccaatcaatgtagacgcgaaagcagcaatcctggttgaagcttcatcggggaaaattttgtacagtaaaaatgccgaccagcgtcttcctgttgccagcatggcaaaaatgatgacggagtatcttctgttggaagcgattcacgaaggcaaagtgaaatgggatcagaagtacacgcctgacgattatgtatacgagatttcccaagatcgttcactatccaatgttcctcttcgtaaagacggatcatacactgtaaaagagctttatcaggcgactgcaatttactctgcaaacgcggcggctattgcactttctgaaattgttgccggttctgaatcgaagtttgtagagttaatgaacaaaaaagccaaagagcttggaatgaaagatttcaaatttgtgaatgccacaggtttggaaaacaaggatcttcacggcaaacatccgagcggaacaaatgccaatgaagaaaatgaagtgtctgcgagagacatggcgctccttgccgatcatttagtgagcgattatccagagatcctcgatacggcgagcattgccaaaacgaagttcagaaaaggcacagacgatgaaatggatatgccgaactggaactttatgctgaaaggccttgttcagcaatatgaaggtgtggacgggctgaaaaccgggtcaaccgactcagccggatcatgctttacggctactgctgaaagaaatggcatgagagtgatttccgtcgttctgaatgcgaaaggcgaccttcatacggcgcgatttaaagaaacgaaaaaaatgctcgattatgcatttgaaaacttcactatgaaagagttttacgcaaaaggcgcacaagtgaaaggcaacgaaacagtcacagtcgacaaagggaaagaaactgaagtcggcatcgtcacagaaaaagccttttcaatgcctgtgaagaacggtgaagaaaagaattacaaagcgaaagtgacgctgaacaaagacgagctgaccgcacctgttaaaaaaggtgagaaagtcggtaccttgacggcctcctataagggagaagaaaaggactacggatttctcggcagcgatgtatcaggtgtaaacctggtgacaaaagaagatgatgagaaagcaaactggtttattttaacgatgagaagcatcggcggctttttgccggtatatggaacagcattgttgaaatggtaa

SEQ ID NO: 12 - DNA, 885 bp, Bacillus licheniformis
atggctcaaacaggtactgatcgcgtaaaacgcggtatggcagaaatgcagaagggcggcgtcattatggacgttgtcaatgctgaacaagcaaaaatcgcagaagaagcaggagccgtcgcagtcatggcgctggagcgcgttccggctgatatccgtgcggcaggcggagttgcccgcatggcagatccgactattgtcgaagaagtgatgaacgctgtttcaatcccggttatggcaaaagcacgcatcgggcatatcgttgaagcgcgtgttcttgaagcgcttggcgttgactatattgatgaaagtgaagttttgactcctgcagatgaagaatttcatttaaataaaaacgaatttaccgttccatttgtatgcggatgccgcgacctaggagaagcgacgcgccggatcgctgaaggagcttcaatgcttcgtacaaaaggcgaacctggtacgggcaatattgtggaagctgtccgccatatgagaaaggtgaatgctcaagtgcgcaaagtagtcggcatgagcgatgacgaactgatgacagaagcgaaaaacctcggcgctccttatgagctgctgaaggaaattaaagccgaaggacgccttccggttgtcaactttgctgccggcggtgtagcaacacctgctgatgctgctctaatgatgcagcttggcgctgacggcgtattcgtagggtccggtattttcaaatccgacaaccctgcaaaattcgcgaaagcaatcgtagaagcgacgacgcatttcacggattacaagctgattgccgagctttcaaaagagcttggaactgcgatgaaagggattgaaatctcaaatctgctgccagaacagcgtatgcaagagcgcggctggtaa

SEQ ID NO: 13 - DNA, 591 bp, Bacillus licheniformis
atgctgacaattggtgtacttggacttcagggagcagtaagagaacacattcgctcaattgaagcatgcggagcggccggaaaagtcatcaagtggccggaagagttaaaggaaatcgacggtttgattttgccaggaggcgaaagcacgacgatgaggcgcctcatcgatacgtatcagtttatgaagcctcttcaggaatttgccgcatccggaaagccggtatttggaacttgtgctgggctgattatcctggcgaagaacattgccggaactaacgatgcccatctcggggttctggatgtaacggtagagcggaattcctttggaagacaggtggacagctttgaagcagacttaaccgttaaaggacttgagggaccgtttacaggcgtatttatccgcgctccgcacattttggaagcgggcgcagatgtagaagtgctttcggaacacaacggaagaatcgtcgctgccaaacaaggaaatcttctcggctgttctttccaccctgagctgacggatgatcacagaatgacgaaattatttgtcgagatggtggaaaagcataaacgggaagccgtcgtataa

SEQ ID NO: 14 - DNA, 1278 bp, Bacillus licheniformis
atgcttgatgtcaaactgctgcgggcaaattttgaagaaatcaaacaaaagcttgcccacaggggagaagatttatcagattttgatcaatttgaggaattggatacaaagagaagagaattgatcgtcaaagtggaagagctgaaagggaagcgcaatgaggtatctcagcaggttgccgctttaaagcgcgagaaaaaagatgctgaccacctcattaaagaaatgcgcgaagtcggtgaagacattaaaaaacttgatgaagagctgagaacggtcgagtcttcgcttgataaaatcatgctgtctatcccgaacatcccccacgagtctgttccggtcggtgagactgaagacgacaacgtggaagttcgcaaatggggcgaactccctgagttttcgtttgagccgaagcctcattgggatattgccgatcaattggatattctcgattttgaacgggccggcaaggtaacgggaagccgtttcgttttctataaagggctcggcgccagacttgaacgcgcattgtataactttatgcttgatctccacgtagacgagtacggctatacggaagtcatcccgccgtacatggtgaaccgcgcaagcatgacaggcaccggacagctgccgaagtttgaggaagatgcttttaagatcagggaagaagattatttcttaattccgacggcggaagtgccgattacgaacctgcatcgcgatgaaattttgtcagctgacgagctgccgatcaattatgcggcgttcagtgcgtgcttccgttcagaagcaggctctgccggacgtgatacgcgcggtttgattcgccagcaccaatttaacaaggttgaactggtgaaatttgtgaagcctgaggattcatatgaagagcttgaaaaactgacaaatcaagcggagaaggttcttcagctgcttgagcttccttatcgggtgatgagcatgtgtacgggcgatctggggtttaccgctgcgaaaaaatacgatattgaagtatggattccaagccaaaacacatatcgcgaaatttcatcatgcagcaactttgaagctttccaggccagacgggcgaatatcagattcagaagggaagcaaaaggcaagccagagcatgtccatacgctaaacggatccggcttggcagtcggcagaacggttgccgcattattggaaaattatcagcaggaggacggaagcgtcatcatccctaaagcgcttcgtccatatatggggaacagagacgttattcaaccataa

SEQ ID NO: 15 - DNA, 1131 bp, Bacillus licheniformis
atgaaaatcgtaatcgcacctgattcatttaaagaaagcatgacatcgcttgaggcggctagaagcattgaaaaaggctttaaagagattctgcctgacgccgaatacgtcaatattccggttgccgacggaggcgaaggaaccgttcaggctctggttgacgctaccggaggagatattgtatatcaaacggtcactggccctctcgggaagcccgtaaaggcagcttacggcctgcttggtgacggaaaaacggctgtcatcgaaatggctgaagcgtcaggccttcacctcgttccacctgaacagcggaatcccctgttaacaacaacgagaggaaccggagagctgattctggatgctgcggaaaaaggagtgtcccagatcatcatcggactcggcggaagcgcgacaaatgacggcggcgcgggaatggcttcatcacttggcgtgaagtttctaaaccgcgctggagaagagattgaaaatgggagcggtgcactagctgagattgccaaaatcgatgtgagcggccttgatccaaaattaaagcatatccaattcgaagccgcctgtgatgttgataatcctcttacaggtcctcgcggtgcctccgctgtatttgggccgcaaaaaggagcgaacagtgaaatgacggcccacttggatcaaaacttaaaacattatgctgcagctgtcaaagcagagctgggatgcgaaatcgattcactcccgggagccggagcggccggaggattgggagctggcctgtgcgcctttttaaaagcggaattaaaaagcggtgttgacattgttttagatactttgtctttttctgaacgcattaaaggggccgatcttgtaattacaggcgagggaaaaatagacggccaaacggtcagcggaaaaacgccggccggcgtcgcaaaacgcgcctgcagcgaaaatattccggttattgcatttgccggatcgctcggtgaaggctgcgagcttgtttatgatatcggcatttccgctctcttttcgatcgtgcccggcatcagctccttggagaacgctcttgccgatggaagttcaaatcttacgcgctgtgcgcgaaatgtagccgccgtctggtcactcgaataa

SEQ ID NO: 16 - DNA, 1269 bp, Bacillus licheniformis
atggatattcaaatcaatgcaataggcgccttatgcgcattagtcatatcaatctttctcattctgaaaaaagtcccgccggcttacggcatgatgatcggcgcattggccggaggcttaatcggcggcgcagatttaatagagacgacggatctcatgatagcaggtgctaaaaacatgattcccgcggtgctccgcatcttggcggcaggcgtgctcgccggcgttctgattcaatccggctccgcagcggtgattgcggaaaccattgtcaatcagatcggagaaaaaagggcgcttcttgccttaacattggcaacagccatcttaacaacggtcggcgtattcgttgatgtcgccgtcatcacagtcgctccgatcgctctggcgatcgcgaggcggacctttatcagcaaagcggccattctgttggcgatgatcggcgggggaaaagcgggcaatatcatgtcgccaaaccctaatgccattgccgcttcagatgcctttcacgtccctttgacatccgtgatggccgccgggatcatccccgctattttcggattgggcgccacttacttgctggcaaaacgcctttcaaataaaggaacaaaagtagctgcaaatgagattgagacccaaacggcacaacaactgccggcattttgggcggcggtcagcggccctgtggtctctatcctgttgctcgccttaaggcctgcggcaggaattacgattgatccgattatcgctctgccggctggaggcctcgtcactgcgatcgcatcggggcaagcgggcaaactgagggattttgccgcttcaggactgtcaaagatgtcaggcgttgccgtgatgctgctcgggactggaacccttgcaggcatcatcgccaactccaaactcaattctttaatcaccgacacccttgtcggcttgggtctgccgtcgtttctcttggctccaatctcgggcatgctgatgtcaatggcaaccgcctcgacaaccgccggcaccgctgtcgccagcagcgtattcggcccgacattgcttgatcttggcgtcgccggcctcgcaggtgcagcgatgattcacgccggagcaacggtgctcgaccatctgcctcacggaagcttttttcatacgacgggaggcagcgtattcatggccatgaaagaacgattaaagctgattccatatgagtcggtcatcggcttaatcctaacgattatctcgactttgatttttggaatttttcaattctttatttaa

SEQ ID NO: 17 - DNA, 1119 bp, Bacillus licheniformis
atgaattacctatcaaaagaattggcggaggaaattgtcgaaagaaccatgtcgattattcggcacaacattaatatgatggatgaaaacggggttatcatcgcttcaggagaccgttcgagaatcggtgatgaacacgcaggagcgaaggacgcacttgcagctgaaaaggttatcagcatcacgcccgaagaatactcggctttaacgggaacgaagcccggcgtaaaccttcccatcgtatttcatgatgaaataatcggcgtcattggaatcacggggccgccttctgaagtcagccgttacggagaacttgtcaaaatggcagcggagctaacagtcgaacaggcatttttaacaaaacagctgacatgggatcaaaggctccgcgaagaaacggtcatccaaatgattcaggggactgatctagcatcccttgacttctttgaacgtgcagagcgattaaacataccgcttgacggccagcgtacttgtcttgtgtttgagctcccatcggctgatatgaagccggcgtttattaaaaaacttgaaaagcatttaaccgcgaaagatttgtacgccaatatttctttaaaagaggtcgcagttattctggcaggcgcccccactaaaagcaggtctgatctcttttcagcttggaacggctggctcagccaatggaaaacagtcagaggcgcgcttggcgagcaggctgaccagcttcagcagctgccattttcctatcaaagtgcaaaacaaacgctcaagattgctgaaaacaattgtagtttatacgattatcgagagtttgcgattcctgttttattatcaaaaatagagcatccggatcaggagattcactttcaaaacatctggcatcgcctttcccaagcagatcaaaaaggcgaattaactcataccctcctctgctacatagaagaaaacggcgaaatcggggaaacttcatcaagactctttattcaccgcaacaccttaaactaccggctcagaaagattgaattggcaacggggtgtaatccaaaacggtttgacgacctattcaaactgtatacagccattactcttttttcacccttttgtgcaaatgaacaattttaa

SEQ ID NO: 18 - DNA, 423 bp, Bacillus licheniformis
ttgtggaaacattttataagccgtttgcctcaagattacacgctgaacagacctattgaaacaggaaagcttcagaaagcagaagaactcctcggcgtctcttttcctgatgaactggtcagccttttaaaaatgacaaacggcattaatgatactttcggggatcatctcatttggcctgcggacagaataatagaagagaatctagacatgagatgtaccgactgttttaagccgtttgattgtctgctctttatagcaggtgcgggcaatggcgattaatttgcttattctattttaaacggctccatacggaaaaatgatatttatgtttggaatcatatagacgacagccgaatatgggtcgcaccttctttaaaatcattcataaaaggctggatcgacggaacaatcaccatttaa

SEQ ID NO: 19 - DNA, 642 bp, Bacillus licheniformis
atgagtgtatatgatattccgaaagatgctatcattactgttgcaggaacggtaggagtggggaaatccacattgacaaaagagcttgcaaaaaggctcggatttaaaacctctcttgaagaggtcgtgaataacccttatttggaggctttttaccaagactttgaacgctggagctttcacctgcagattttcttcttggcagagcgcttcaaagaacaaaaatacatttacgaatcgggcggcggatttgttcaggaccgttcaatttatgaagatacaggcattttcgccaaaatgcacgccgataaaggcacaatgtcaaaagtcgactataagacgtatacgagcctgtttgaagcgatggtcatgacgccttacttcccccgccccgacgttttagtctatttagagggcgatttggaaacgattctcgaccgcatccaaaaacgcggacgggaaatggaactgttaaccgacagatcgtattgggaagaaatgtacactaggtatgaaaactggatcagcggatttaacgcctgtccggttgtcagagtcaatattgatgaatacgacctgttcaacaactcagcctctctcgatccaatcattgaaaaaatcagtgaagccattcaaagataa

SEQ ID NO: 20 - DNA, 624 bp, Bacillus licheniformis
atgaatacagcccctttcattgctgtcgaaggccccatcggcgcgggaaaaacaaccttggccagcatgctctccgaaaagctctcactctctttggtcaaagaaatcgtcgaagaaaacccttttcttgataaattttatgatgaaaaagatgaatggagctttcagcttgagatgtttttcctctgcaatcgctataagcagcttgaagaaaccgagaaaaagtatttgcatcatcacatgcccgttgtttcggactatcatatttataaaaacctcatttttgccgaacggacgctggaaggcaaaaaacttgagaaatacagaaaaatttatcagctgcttacagaagatctgccgaaaccaaacgtcatcatttacataagagcgagtcttccaactttattggaacggatcaaaaaacgcggacggccgtttgaacaagaaatggacaagcaatacctggaacagcttatcaatgattatgaggcggccattaagcaatttaaagaatccgatccgccaatacccgtcattgaaattaacggagatcaggaagacttcgtaatctcagaagccgttttcaatcgaattgccgatcaagtaaaggagtatatagaatga

SEQ ID NO: 21 - DNA, 1284 bp, Bacillus licheniformis
gtgaaaagaggcgataccctttaccaaatcgcgaatcgttaccgaacaacagttaatgaaattgtcgcgacgaatgaaattccgaacccgaatcggcttgttgtcggacaaaccatcgtgatcccgatcgccggcgagttttatgaggtcagacagggagatacattagcatcaatcggagcacgctttaatatttctccggctgaactggcgaggatcaaccgcattcaggttagcgccgttttaccggtcggactgctgctttacatcccccctcggccaagacggaacattgaaacaaacgcctatatcgaacctcggggagaaagcgtaagccccactttgcagcaggcggcaagagaggcttcgccatacttgacctatctgggcgctttcagcttccaggcgaagcgggacggcacactcgaagaaccgccgctgaacaacttaaaagaaattgccgacagacatcggactacgatgatgatgattgtcaccaatctcgaaaatgaagctttcagcgacgaactcggcaggatcattctgacggaccagaatgtaaaaaacagattgctcgataacatcgttgcagcggccagaagatacggttttaaagacatccattttgacttcgaatacttaaggcccgaagatagagaagcctataatcagtttttacgggatgcccgggcccgcttcaggcaggaaggctggctcatctcaaccgcgcttgctccgaaaacgagagcggatcagcccggacaatggtatgaagcccatgattaccgggcccacggcgaaattgtcgatttcgtcgtgctgatgacatatgagtggggctacagcggagggcccccgatggcggtatcgccgatcgggcccgtccgggacgtgatcgaatacgcactcacggaaatgcccgccagcaaaatcgtcatgggacagaacttgtacggctatgactggacgctcccctatacgccaggcggaccgctggccagagcaatcagcccccagcgggcgattgagatcgcgagcgagaacaatgcggcgatacagtacgatgaaacagctcaggctccaaacttccgctatacggacaatgccggcaaacagcatgaagtatggtttgaagacgcccgctcgattcaggcaaagtttgatctgattagggaattgaatttaaggggaatcagctattggaagctcggcctgtccttcccgcaaaactggctcttgatagccgatcaatttaatgttgtgaaagagacgttcccaagttaa

SEQ ID NO: 22 - DNA, 543 bp, Bacillus licheniformis
ttgtccaattcagctctcattatagtcgacatcattaatgattttcaattcgatatgggtgacgttctttccaaaaagaccagaaatatcaccgagcatcttctggcattaaaagaacacgcagccaaaatgaaatggcctatcatatacattaatgaccattttggaatttggcaagcggatattgctgccattatcaagaaatgcaaaaacggcaggagcgaatatatcatcgaccggcttgcaccgaatgacagcgattattttttaatcaaaccaaagcactcagccttttacggcactgctcttgaaacattgctgcatgaacttcatgtcgatcatttgatcatcactgggatcgcaggcaatatctgcgtattatttacggcaaacgatgcttatatgcgggagtacgagattacgattccgcgcgattgcatcgcctcaaacaatgaaaaagacaacaaatacgccttgacgatgatggaaaatgttctgttcgccaatatcacgacggctaaggcgattacctccgaaacttag

SEQ ID NO: 23 - DNA, 483 bp, Bacillus licheniformis
atgacacaagacgagttttatatgaaagaagcggtcaatgaagcgagaaaagccgaagaaaaaggcgaagtgccgattggtgctgtactcgttctggatggggaaattatcgcccgcgcccataatctgagggaaaccgagcaaaggtcggttgcccacgcggagatgctcgtcattgaagaggcatgccggaagctggggacctggcggctggagagagctgttctttacgttacccttgagccatgtccgatgtgtgccggagcggccgttctttccagaatcgacaaagtggtgttcggagcgtctgatccgaaaggcggctgtgcagggactttgatgaatctcctgcaggaggagagattcaatcatcaggctgaagtcgtgagcggcgtaatggaagaagaatgtggcaggatgctgagcgattttttcagaaagctccgcgcgaaaaagaaagcagaaaagcaaagcgagctgtga

SEQ ID NO: 24 - DNA, 1701 bp, Bacillus licheniformis
gtgagttaccaggctttatatagagtgttcaggccgcagttgtttgaagatgtagtcggtcaggagcacatcacgaaaacgttgcaaaatgcccttttacaaaagaaattttcgcacgcttatctgttttccggaccgaggggaacgggaaaaacaagcgccgcaaaactgtttgccaaagctgtcaactgtgagcgcgctccggtcagtgaaccgtgtaacgaatgctccgcgtgcaaaggcattacaaacggttcgatttcagatgtgatcgaaattgacgccgcttctaacaacggtgtagatgaaatacgcgacatccgcgacaaggtgaaatttgccccgtctgccgtcacgtataaagtatatatcatagatgaagtacatatgctttctatcggcgcattcaacgcccttctaaaaacgcttgaagagccgccggagcattgtatctttattctcgcaacaacagagcctcataaaattcctttaacgattatttctagatgtcagcgatttgattttaagaggattacctcgcaggcaattgtcggacgaatgaaaaaaatcgtcgaagctgaacagttcaaggtgcaggacggagccttagacatcatcgccagtgccgcggacggcggcatgagggatgcgttgagcctgctcgatcaggccgtatcattcagcggagaagagctgacggtggatgatgcgctgctgataacaggcgccgtttcacagcactatattggaaagctcgcctcaacccttcacgaaaaaaatgtttccggtgctttggaaacattgaacgaactccttcagcaggggaaagatccggcaaaattaatcgaggatatgattttctacttcagggatatgcttctttatcaaacggcgcccgatttagaaggcgttcttgaaaaggtgaaggtggacgaagagttccaaaccctatcccggcaaattcccgcatcagacctttacgaaatgatcgatatattaaataaaagccatcaggaaatgaaatggacgaatcatccgcgtatcttctttgaagttgcggttgtgaagctctgccagggaccaaaagcaggggcatccgcggccgcccagccggaagtggacaatctcgtcaacaaggttcggcagcttgaacaggagattgagaggcttaaaacacaaggtgtgcaggtctcttctgctcccgcccaggctaaagaagcgtcccgtccgcaaaaaagcataaaaagcgcgtataaagcgcctgtcggccgcattcatgaaatattaaaggatgccacaagaccggatctcgaaaaattaaagggctgttggggacaattgcttgcccagctgaaacagcagaataaagtatcacatgcggcccttttaaatgacagcgaaccggtggctgcatcttcaaaagcatttgtcctcgcattcaaatacgaaattcactgtaaaatggtagctgaagacaacaacggagtcaggacaaatctggaacaaattttggacggaatgctcggcggaaggatagatatagttggcgttcccgaagcccaatggggtaaaataagagaagaatttttgcaggatcaccagccggaagattctgaagcaaacgaaccgaaagaagaagatccgctcgtagcagaagctaaaaaactgttcggagcggaactgattgaaattaaagaataa

SEQ ID NO: 25 - DNA, 325 bp, Bacillus licheniformis
atgcgcggtggaatgggtaacatgcagaaaatgatgaagcaaatgcaaaaaaatgcaaaaggatatgcaaaaggcacaggtggagctggcagaaaaagtactcgaaggtactgcaggcggtggaatggtgaccgttaaggtgaacggccaaaaagaagtcatcgacgtcatcatcaaagaggaagtcgtagaccctgaagatgttgaaatgcttcaagatcttgttcttgcagcgacaaacgatgctttgaaaaaagttgacgaagtaacaaatgaaacgatgggtaagtttacaaaaggaatgaacatgccgggtttattctag

SEQ ID NO: 26 - DNA, 597 bp, Bacillus licheniformis
atgcagtatcctgaaccaatatcaaagctgattgacagctttatgaaattgccaggaatcggacccaagacggcggtccgtctggctttttttgttcttagtatgaaagaagacgtcgtgttagattttgcaaaagcattggtaaacgcaaagcgcaatttgacatattgctcggtctgcggacatataacagatcaagatccttgctatatttgtgaagatacgagaagagacaaatcggtcatatgtgttgttcaggatcccaaagatgtcattgctatggagaaaatgaaggagtacaacggactgtaccatgttttgcatggagcgatttctccgatggacggcatcggtccggaagatattaaaatacccgaattgctgaagcggttgcaggatgatcaggtgactgaagtcattctcgcgacaaacccgaatatagaaggagaagcaacggccatgtacatttcaaggcttttaaagccgtctggtatcaagctgtcacgaattgcccatggacttccggtcggaggcgatttggagtatgcagatgaagtcactctttctaaagcgcttgaaggcagacgtgaaatgtag

SEQ ID NO: 27 - DNA, 225 bp, Bacillus licheniformis
atgggttttcttcggaaaaagaagcttagaaaagaatttgataacaagctggttgaacagctgatccatcaaaaggaagaatggaacaggcaaaagcggctgattgaaaacagcctagagccttccccagaagttctttacgaattaaaggttgccgaggcaaagtactttttttatttgcgggaagcaaaaaaaagaaatttaaggatcggcagctggaagtag

SEQ ID NO: 28 - DNA, 267 bp, Bacillus licheniformis
atgggatctgttatctttatcggggcaattgtagctttggttgccctgttgtttttttcaaaagcatcatttaagcctttgcgattaatcggaagaatagcggttagatttgtagtcggcgctttgtttttgttctgtgtgaatctgtttggcgagagcgtgggcattcacgtgccgattaatattgtaacaaccggagtgagcggattattgggggttcccggtgtagcagctcttattgtcattaaacaatttatcgcaatataa

SEQ ID NO: 29 - DNA, 189 bp, Bacillus licheniformis
atgagtaagtctaatcatggggaaacgtgtatcatttgcgaggaaaataaaaccgaaggaattcatctttatacgaaatttttatgttcggattgtgagaaaaagattgtatctacatcaacatcagaccccgaatactctgattatgtcaaaaaattaaagagtctccgtacgccgccattatattct

SEQ ID NO: 30 - DNA, 636 bp, Bacillus licheniformis
atgaaaccgattcttcattttatgattcgtgcaactgctgcaagtgcattgtccgtgctcctttggtttacaagcttcttcgcgtttaaccagacttttctgctgtcctccgcttacgcagccggagcctggattgccgtttatcttggcgggaaatggtacggaacctatttatttttaaaagaaaaccagcttacaaggcgggaatatgcctatataaaacagaatttgcgggaagctaagctgaaaattgcccggttaagaaaagccttatttgcagtcaaaaacattcaaactattaaacagaatctagaaattcttcggatcgtcagaaaaatttacagcatcacaaagaacgaaccaaagcgtttttatcaggttgaacgcttttattatcaaagccttgattcaattgttgaactgacggaaaagcatgcgtttttggcgtcacagccaaagcgcaatgcgaatcttgaagtttctttaagcgaaacgcgtatgatgatcgataagctcgccaagcaattggaagacgacctttatgacttgctgaaaacagacattgaccacttggagtttgaactggacgtcgcgaagcattcaatgaaaaaagctgatggaggaaagctgaaatga

SEQ ID NO: 31 - DNA, 1194 bp, Bacillus licheniformis
atgagcgaatataaaccatcgttacacaaaactggcgcacagcttgaatttgatgatttgctttccgatccttttggacaaggagaagcgcctgtttccggcgtggaggaaaaactccgcgggcagcaagtgaatctggttgatacgttatctgaagaaaaacgccggcaggcatttcaactggccgaacagattgacccgaaaaaccataacagcattactctgtatggaacgcaagctcaatccaaactcttgaacttctcacatgagatgctcgagcacgtccaaaagaaagatgtcggtgaaattgggcaggttttaagcgacctcatgaaaaagcttgaacaggtcagccccgatgaattgaaaactgaaaaaaggaacttcttttcccgtttgtttggaagagtatcccattctgttcaagaagtgttatcaaggtatcaaaaaaccggcgctcaaatagatagaatcagcgtaaaacttgagcattccaaaagcgcgctgatcaatgataataagatgctcgaacggctttatgaaaaaaataaagaatattatgaggcactgaatgtctatattgcagccggtcagctgaagctggaagaattaaatcataaaaccattcccgaattaaaagagaaatcgaaaactgaacatcaccatatggccgttcaggaagtaaacgatatgattcagtttgaagaccggctggaaaagcgggtttatgatctaacgttaagcaggcaaattacgctgcagagcgccccgcaaatccgtttgatccagcacacaaatcaagtgctggcggaaaagattcaatcttcgattatgacagcaatccctctttggaaaaaccaggttgctattgcgctcaccctgttgaggcagcgccgagcagtagaggctcaaaaacaggtgtcggccacaacaaacgaactgctcttgaaaaatgccgagatgctgaaggccaatacgatcgaaacggcaaaggaaaatgaacgaggctttattgatattgaaacattgaaacaagtgcaggacaatctgatcggtacacttgaggagacgcttaaaattcaagaggaaggccgttcaaagcggctgcaggcagaagaagaaataagggcaatggaagatggtctcaaggctaagctgctggacatgaaagaaaaccaaaaccgtagatcataa

SEQ ID NO: 32 - DNA, 1443 bp, Bacillus licheniformis
atgaagacacctttatatacagcattggtgaaccatgctgaaggacatcattattcttttcacgttccgggacatcacaatggagatgtcttttttgatgaagcaaaaactttttttgaaacgattctcaaagtggatctaactgaactgacaggactggatgatttacatgagccatctggcgtcatcaaggaagcacaggatttagtttcgcggctttacggagcggaagaaagcttttttctcgtcaatggttcgaccgttgggaatctggctatgatcctggctgtttgtcagccgggtgatacgatactcgttcagcgtaactgccataagtctgtatttcatgcgattgaactttcaggcgcccatccggtttttttgacaccggaaattgatgaggcgatggctgttcccacacatatactgtacgaaacagttgaagatgcaatttcacaatatccgcacgcaaaagggatcgtgttgacatatccaaattactacggccatgcagttgatctgaagccgatcatagaaaaggcccaccaacacgatatttccgttttagtcgacgaggctcacggcgcccattttgtgctgggccatccatttccccagtcgtcgttgaaagcgggcgctgatgccgtcgtccagtccgcgcataaaacgctcccggcgatgacgatggggtcctatctgcatcttaacagcggcaggatcaacagggacagactggcatactatctgtccgtgcttcaaagcagcagtccttcctacccaattatggcatctttggatatagctagggcatacgccgaagatatcttgaaaacaaatcgaacagccgatattgagaaagagctcatcaatatgagagaagtcttttctcaaataaacggagctgatattgtcgagccggctgatgcccgtatccggcaagatccgcttaagctgtgtatcagatcagcgtacggccactccggttttgaactgaaatccatatttgaagcaaacggcatccatcctgaattggcagatgaaaggcaagtcctgttgatcctgccgcttgaaggaaaaaatatgcccgcgccggaactgatcagcacaatcagtaaagacatgaaagatacagcagttcgaaatgatcttcctgccggaatcggaatcccttctgaaaaagtcacggctttgccttaccggaaaagcaagttgtctgccttcaaaaaagaatcggtgccttttaccgaagcagcgggcagaataagcgccgaatcggtcacaccttatcctccgggcattccgttgatcatggcgggtgagagaataacaaaagagacgatcagccggctgacgcggctcgtcgatctgaatgtacacattcagggcagcaatcagctcaaacaaaagcaattaactgtatatatagaagaggagaaatcatga

SEQ ID NO: 33 - DNA, 639 bp, Bacillus licheniformis
atgaacggtttatttattacttttgaagggcctgaaggtgcggggaaaacgacaatccttcaggctgcggcagaccaattgacgaaaaacggccattctgttcttgcgacaagggagccgggcggcattgaaatatcagaacgaattcgcgaggttattttaaatccaagccatacagcaatggatcccaaaacagaggccttgttgtatgcggccgcaagaaggcagcacctagtcgaaaaagtaaaaccggcgcttgaagaagggaaaatcgtcttatgcgaccggttcatcgacagctcgcttgcttatcaggggtatgccaggggactcggcattgatgaagtattttctgttaatcaattcgcgatcggcagcctgatgccgaatgtgacgatttatttcgacattgacccggaagagggaatcaaacgaatcgatttaaatgatgcaagagagaaaaaccggcttgatttggaaaaactccactttcatcagcttgttcaaaaaggctacgaagaagttatgaaccggttccccggacgatttcggattgtggatgccagccaaagtgttgaacttgtgttaaaaagggtaaataacatcattgaggaagcattaaaagaaaatcagttgtga

SEQ ID NO: 34 - DNA, 330 bp, Bacillus licheniformis
atgaagttaattatcgctgttgttcaagaccaagacagcaaccggcttttaaaggctttgaccgatcacaattttcgcgtgaccaaactggcgtcgaccggcggctttctgaaatcgggaaacacaaccttcatgttgggtgtagatgatattcgagtagacaaagctttaagcttgataaaagaaaacggaagcaagcgggatcagctgattgcccctgtttctccaatgggcggaaatgctgattcatatgttccttatcctgttgaggttgaagtgggcggagcaaccgtttttgtactgccgatcgagcaattccatcaattttaa

SEQ ID NO: 35 - DNA, 441 bp, Bacillus licheniformis
atgaaaataagtcaagaactgcgtacaatgatagagaaacagcagactccgcctgcaagaggagaaaatgtttctgcttcatttaaagagaagatgaatatacaaagcggcaagcttcgagttgaacagctgacaatgcttttaacagatattgaagcgttcggaaaacgcctctcaaaatcgagaaacttcaaagatttggccaggttcaaaggcttgatcaaacgatttgtaaaagagaccgttgaaaacggtctgacggtggagaattcaagaagcttcgatctgtacggaaacagccggacattaagcattgtgaaagaactggacgaaaagcttgtgcaattaactgaggatcttatggatcaagaaaaatcctctatcgaacttttggaacgcattggcgaaataaagggtttactgataaacctttacacatag

SEQ ID NO: 36 - DNA, 990 bp, Bacillus licheniformis
atggctacaacctggacagaaatgcagaagcttcagccacgggttatgaagcttttgcaaaatagtatagaaagaaatcggcttgcccacgcctatttatttgaagggcgcaaagggacgggcaaattagacgcggcaacccttctggcaaaaagctttttttgccttgaagatggagcagagccatgtgagtcatgcaggaactgccagcggattgaatctggaaaccatccggacgtacacgtcgtccatccggacggcctttccattaaaaagggacaaatccaggcgcttcaggaagagttttctaagaccggtttggaatcgcataaaaagctgtatattatttcccatgcggatcaaatgacggtcaatgcggcgaacagccttctaaagtttttagaggaaccgagcagcgatacaatcgctgttcttttaacggaacagccgcaaaaattgctcgatacgatcatatcgagatgccaggttttatcctttcagtcgctgcagcccgaatcgattgaaaaggaactggttaaacaagaggtctcaccgaatattgcagcccttttgtcgaatatgaccaacaatttatcggaagcgctcgaattgagtcgaaatgatcagtttgcagagtcgcgagcgaaagtgataaaattgtatgaagtcttacaccagcgaaaaggacatgcttttttctatattcaagatcagtggatgccctttttcaaggagaaagaccaccaagaaatgggtcttgatatgcttttatttatatatcgcgacgtgttgtccattcagttgggacatgaagataaaatactatttcaggacttattccaatcattaaaacagcatgcgctgcaaacaacacaacaaagagtgacaaaccagatacttgctgttttagaagcaaaaaaacggctttattccaatgtgaatgctcaaggattaatggagcacttggttttaatgctgcaggagggataa

SEQ ID NO: 37 - DNA, 828 bp, Bacillus licheniformis
ttgtacaacgttattggtgtccgctttaaaaaagcgggcaaaatatattatttcgatccgaacggatttcagatagataaagacagctgtgtgatcgtcgaaacggttcgcggtgttgaatacgggcaggttgtcattgccaacaagaaagtagacgagaacgatgtcgtgctgcctttaagaaaagtgatcagagttgcggatgaacgcgaccgcctgatcgttgaggagaatcaagaagctgcgctgtccgcctttgatgtctgccagaaaaaggttaacgagcacggccttgagatgaaactggtcgatgtggaattcacttttgaccgcaacaaagtcattttttattttacggctgatggaagagtcgattttagagaactcgtcaaagatttggcatcgatctttaaaacgagaatcgagctgagacaaatcggcgtcagagatgaagcgaagatgctcggcggtatcggaccgtgtggaagaatgctttgctgttccacgtttttaggtgattttgagcccgtttctattaaaatggcaaaggatcaaaatctgtcgctgaatccgacgaagatttccggactatgcggacggctgatgtgctgtctaaagtatgaaaacgatgaatacgaaacagccaaagaacagcttccggatatcggggaagtgatcgccacgtccagcggcccggcaaaagtcgtcgggttgaatattctcgaacgcattctccaggttgaactgacagactgcgacaaagttgttgaatatacgtgggatgagctgttgcaagaaggtgtcgtatctgcacaaaccacagattaa

SEQ ID NO: 38 - DNA, 363 bp, Bacillus licheniformis
ttggataaaaaagaattgtttgatacagtgataagtttagaagaacaaatcgggtccctttaccgccagcttggagatctcaagcagcatatcggggaaatgattgaagaaaacaatcatttacagcttgaaaacgagcatttgcgcaagaggctggaagagacggatcaaaggctaaaaagcgtaaaatccgatgaaaaagagataaaagcagaaaagacagggcatgctgatattggagagggccatgataatttggctcgcctgtatcaggagggcttccatatttgcaacatccattacggaagtgttcgcaaagaaggagactgtctgttctgcctctcgtttttaaataaaaaataa

SEQ ID NO: 39 - DNA, 744 bp, Bacillus licheniformis
atgattcaattaaaagatgatgaacgactggattatttactggcggaagatatgaaaatcgtgcaaagcccgacagtttttgcattttccttagatgctgttctgctgtcgaaatttgcttacgttccgatacaaaaaggaaacatcattgatttgtgcacagggaacgggattgttccgctgcttctcagcacccgcacaaaagccgccatcaccggggtggaaattcaggaaaggctgtatgacatggccctccgcagcgtggaatacaacaacctgcaaaaacagattcatctcatcagggacgacttgaaaaatatgccgcaggtgctcggatacaataaggccgatgtcgtcacatgcaatcctccttatttcaagacgccgaaaaaaacggagcaaaacctaaatgaacatttggccattgccagacatgaaatctactgcacgcttgaagatgttattcgcgtcagcagcaagctattaaagcagggcggcaaactcgctctcgttcaccggccggggaggctgctcgaaatctttgaattgatgaaggcctttcaaatcgagccgaagcgggtccaatttgtttacccgaaaaaaagcaaagaagccaacaccattttagtagaaggaataaaagacggccgacctgacctgaaaattttgcctcctttgtttgtgtatgatgaacaagatcaatatacacatgaaataaggaagattttatatggagacgaatag

SEQ ID NO: 40 - DNA, 294 bp, Bacillus licheniformis
atggagacgaatagccattacttttacgtgctttcgtgccgggacggcagcttttacgcaggctatacaaacaatatcgaaaagcgcctgaaaacgcataatgacgggaagggcgccaagtatacgagggcaaggctgccggttaaactccattatgcagagtgcttttcaacgaaacgagaagcgatgcaggccgagtactatttcaaaaaattatcgagaaaaaacaaagaacgttatatagaagaaaaaagacgggagggtgttgattatcaaccggcaaaagagttttga

SEQ ID NO: 41 - DNA, 879 bp, Bacillus licheniformis
ttgattatcaaccggcaaaagagttttgaccaaaaatcagacatgggtatgttatatctcgtaccgactcccatcggcaatttagaggatatgacatttcgggcggtttctgtgttaaaagaggcggacattatagcggcggaggatacgaggcagacgaagaaattgtgccatgtgtatgaaattgagacacagcttgtcagctaccatgaacacaataaagaaagcagcggacataaaattttggaatggctgaaagaaggaaaaaacgtcgcattggtcagtgacgccggaatgccgacaatatctgaccccggggctgaaatcgtccgcgattttatcgaaatgggcggctatgtcgtacccctgcccggtgcaaatgcggctttgaccgcactgattgcctcaggcattgcgccgcagccgtttttctttttcggctttttggaccgcagcaaacgggaaaggaaaaaacagctcgaggctttgaagaacagacaggaaacgatgattttttacgagtcgccgcatcggctgaaagaaaccttggcggccatcagagaggtattcggcaatcggcaaatcgcattgacaagggaactcacgaaaaaattcgaagaatttatcagaggttcgatcgaagaagcactcacatggtctgaacaggaacaggtgcgcggagagttttgccttgtgatcgaaggaagccgtgaagaaacgattgaagaggcggtctggtgggagcatctttcagaaaaagaacatgtcgagcattatatcagcgaaggatatccttcaaaagaagccattaaaaaaaccgcggttgaccgcggcgttccgaaacggaaaatttatgacgcttaccatattcaaaactaa

SEQ ID NO: 42 - DNA, 285 bp, Bacillus licheniformis
atgaaatctacaggtattgtacgtaaagttgatgaactaggacgcgtggtgattccaatcgaacttcgccgtacgcttggaatcgcagaaaaagacgctcttgaaatctatgtagatgacgaaaaaatcatcttgaaaaaatataaaccaaacatgacttgccaagttacaggtgaggtttctgatgacaaccttaaacttgcaggcggtaaattggttcttagccctgaaggcgctgagcaaatcattaacgaaattcaagcacaacttcaatctcaaaaataa

SEQ ID NO: 43 - DNA, 1989 bp, Bacillus licheniformis
atgccgcaagaaaaaaatacgttttacatcactacacccatttattacccaagtgggaagctacatattggacatgcctacacgaccgttgcaggtgatgcgatggctcggtataaaagactgagaggctttgatgtcagatacttaactggtacagatgagcacggacaaaaaattcagcaaacggcggagaaggaaaacatcactccgcaggaattggtcgatcgtgcggcagaagacattcagcagctttggaaaaagctcgacatatccaatgacgacttcattcggacgacagaggaacgtcataaaaaagtgatcgaaaaggtatttcagaagctgcttgacaatggtgacatatatcttgatgaatatgagggctggtacagcatccctgacgaaacgttttacaccgaaacccagctcgttgatgtcgagcgaaacgaaaaaggcgaagttatcggagggaaaagtcctgacagcggccaccccgttgagctaatcaaagaggaatcttacttcttccgcatgggaaaatacgcggatcggcttctcgctttctatgaagaaaatcctgaattcatccagcctgaatcccggaaaaatgaaatgatcaacaactttatcaaaccgggtcttgaagatttggctgtttcccggacgacgttcgactgggggataaaagtgcccggcaatccgaagcatgtcatctatgtttggatagatgcgctgtttaattacattacggcacttggctttaatacggaaaacgatgaaaattatcaaaaatattggccggcagacgttcatcttgtcggtaaggagatcgtccgcttccataccatttactggccgattatgctgatggcattggaccttccgctgccgaaaaaggtttttgcccacgggtggctgctgatgaaagatggaaaaatgtctaaatcaaaaggcaatgtggttgacccggtcacattaatcgacagatacggactagatgcattgcgttattatcttctccgcgaagtgccgttcggttctgacggcgtatttacaccggaaggatttgtcgagcggattaactatgatttagcgaatgatttaggcaacctgctgaacagaacggtcgccatggtcaacaaatactttgacggccggattcagtcgtatgaaggcccggttaccgcttttgacgaaccgttgtcatcattctcgcaaaagacaattgaagcgtacgagcaggcgatcgaaaatatggagttttccgttgcgctttcatcattgtggcagtttgtcagcagaacgaataaatacatcgacgagacagccccttgggtactggcaaaagataaggataaagaaaaagagcttcaatcggtcatgtaccatttggcggagtcattgcgcatcactgctgtattgctgcagccgttcttaacgcagacgcctgaaaagattttcgcacagcttggcgttacggatgcgtcactgaaaacctgggacagcattcaaagcttcggccagctgaaatctgtgacagttcaaaaaggagaaccattgttcccgcgtcttgaggcggaagacgaagtcgcttatatcaaatcaaaaatgcagggaacggctccaaaagaagaaccaaagcaagaggaaaaagcacctgaacggcttccggaaatcacgatagacgattttatgagcacagagctcagagtggctgaagtcattcatgctgaacccgtcaaaaaagcggatcgtctgttaaaactccagcttgatttaggctttgaaaaacgccaagtcgtttcaggaattgccaagcactacaaacctgaagagcttgtcggccggaaagtcatttgtgtaacaaatttaaaaccggtcaaactaagaggagaactttctcaaggcatgatattggctggagaggacaatggcgttctctcgcttgcggaggtagacagttcattagcaaacggaacgcgaatcaaataa

SEQ ID NO: 44 - DNA, 768 bp, Bacillus licheniformis
atgttatttgatacacatgctcatttaaacgccgagcaatttaacgaggatttggaagaagtcattgctcgggcaaaggaagaaaaagtggagcacattgtcgtggtaggattcgatcgtccgacgatcaagcgtgcgatggaattgattgaagaatacgattttatttatgcagccatcgggtggcatccggttgacgcaattgatatgaccgatgaagatttggcttggatcaaagacctgtccgcccatgagaaagttgtggcgatcggagaaatgggacttgattatcattgggataagtcgccgaaggacgttcaaaaagaggtgttcagaaaacagatcgctttggcaaaagaagtcggcttgccaatcgtgattcacaaccgtgatgcaacggaggatgtcgtttctattttgcgggaagaaggggccgaggaagtcggcgggatcatgcactgttatacaggaagcgctgaaattgcacaagagtgcatcgatatgaatttctacctatctttcggcggacccgtcacatttaaaaacgccaaaaaaccgaagcaagtggtcaaacaaataccaaatgaccggcttttaattgagacggactgcccgtatttaacgccgcatccatacagaggaaagcggaatgaacctagctatgtcaaacttgtcgccgaacagattgccgaattaaaaggaatgacttatgaagaaatagcggccgtcaccacagaaaatgcaaaaaaacttttcggcatcagctga

SEQ ID NO: 45 - DNA, 1197 bp, Bacillus licheniformis
atgaaaaagctgttttccgtaaagcttagcaaaagcagatggattctgattgctgctggactgcttgtcgcagggagcggaactgcttacggagcacatgagctcgctaaacagcaagtcaccatttcgataaacgggaaaaagcaggatgttcgcacgaatgctaaaaccgtaggtgaactgctgaaaagcttagacatcgagacgaggaaagaagatcacatctctcccgctgaagatacaaaattaacggcgaacatgaatgttgaatatgttgccgcaaaacctgttcatttcacggtcgacggacaggaaaaggaaatctggacaacagcgggtacagtcggcaaacttctgaaagacttaaatttagagttggcggaacacgatcaaattgacccctcagttgataaagaaataacgaaagatatgaagctgactttgcaaagggcttttaaagtaaccgtaaaggatgccggtaaagataaagacctatggacgacttcgactacggtcgctgactttttaaaacatcataagatcagcataaaaggcgatgatgaagttaagcctgcgcttgataaaaagctgacgaaagatcaggcgattcacattactcgtatcaaaaaagtcaccgatgtagtggaagagaacatcccttttgaagtccggaaaaaagaggacgattcacttgaaaaggggaaagaaaaagttgtacaggacggtaaacatggcaagcttaaaaagcactatgccgttgttatgaaaaacggcaaggaagtttccagagaactgattaaagaggaaacggcagccgaaagcaaagccaaaatcatcgctgtcggtacaaagcaagccgcagtggctaaagtcagcgcgaatgtatcgcgcggaaatcaatcctcaggaaaggaattttatgtatcctctacagcttatacagcaagctgcaacggatgctcaggccacactgcgaccggcgttaatttgaaaaataatcccggcgctaaagtgatcgctgtcgatccgagcgttattccgctgggttccaaagtacatgtagaaggatatggctatgcggttgcggccgatacaggctcagccatcaaaggccgaaaaatcgatgtattctttccgaataagtctacagcttaccgctggggaaacaaaagagttaaaatcaaggtgttgaactaa

SEQ ID NO: 46 - DNA, 561 bp, Bacillus licheniformis
atgaagattaaagaaatcattgttgtcgaaggccgtgatgacaccgctaaaatcaaatcggctgttgatgcagatacgatcgaaacgaacggatctgccataggggaagacgtcatcaaacggattcggctcgcccaggaaacgcgcggggttattattttaaccgatcccgatttcccgggggaaaaaatcagaaaaacgattgcagaaaaggtccccggctgcaagcatgcatttttgcccaagcatttggcaaagcctaaaaataaacgcggaatcggtgtcgaacacgcttcgcttgaagcgatccgcgaatgcttaatgaccgttcaggaggaaatggaagcgacggaacctgagattgaggcccgggatttaatcgaagccggcctgatcggaggcccgctggcaaaacaaaggcgggagcggctcggcgaaatattgaatatcggctatacaaatgggaaacagcttcaaaagcggctgcaaatgtttcagatcaaaaagagtgattatttaagcgcactggatgctgtgctgcgggaggaagaacatgaataa

SEQ ID NO: 47 - DNA, 879 bp, Bacillus licheniformis
atgaataaagatatcgccaccccaattaggactaaggaaattctcaataaatacggattttcattcaaaaaaagcctggggcagaacttcttgattgacacgaacatattggacagaattgtcgaccatgccggtgtgacggagcgtacaggcgtgattgaaatcggtccggggatcggggcattgaccgagcagctggcaaagcgtgcgaagaaagtaacggcctttgagatcgaccaacggcttctgccgattttagaagatacgctttctccgtatgataatgtgactgtcattcaccaggatgtcctgaaggccgatgtccgagcggtaatggacgaacagtttcaagactgcgatgaggtgatggttgtcgccaacctcccgtattacgtcacgactccgatcatcatgaagcttttagaagaaaatctgccgctgaaaggaatcgtcgtcatgcttcaaaaagaggtggcggaccgaatggctgcaaaaccttcttcaaaggaatacgggtccctttccatcgcggtgcagttttatacggaggccaaaacggtcatgaatgtaccaaagaccgtatttgtccctcagcctaacgtagattccgcggtcatcaggcttacgctgaggaaagagccggctgtggccgttcaagatgctgcctttttctttcaagtcgtaaaagcaagctttgcacagcgtcgaaaaacgcttttcaacaacctcgtcaacaatctgccgaatggcaaagagaataaatcaaaaattgaaagagcgcttcaggattcacatatcgacggaaaacgacgcggagagtcgcttagcattgaagagttcgccgtcttatctgaccgcttgagagaagtccttctttaa

SEQ ID NO: 48 - DNA, 882 bp, Bacillus licheniformis
atgcaatttaaaataggcgatatggtcgtcagaaaatcttatcgaagagatattttatttcgaattataagaattgatcaatcggcaaatggagaacctgtagccgttttgcacggagatgaggtcagattaatcgctgacgcgcatttgggggatcttgagattgtccgcgaggctgagcggcagatgagaaagcgggaagaagaaacgagaatgaaggaatccctcgatcttctccgccaggattacaaactccttcacgataaacatgagtaccgcgccacaaaccaatataacaatcaacagcagtactttcatatgcccggaagagtccttcatttagacggggattcggcttatttgaaaaagtgtctggcgctctacgaaaagatcggggttcctgtatacggcattcattgctatgaaaagaaaatgtcatcagtcatcgaggaactgatcgatgaataccgcccggatcttctcgtcattaccggacacgatgcctattctaagcagaagggcgatattaacaatctggatgcctacaggcattcaaaagattttatcgaaaccgttcaaaaagcgagaagaaaaattccccatcttgatcagctcgtcatttttgccggcgcatgccagtcccattttgaatcactgatcagagccggtgcaaatttcgcaagctctccgtccagagtcaacatccatgcgcttgatccggtctatatagtcgcaaaaatcagcttcactccgtttatggaccgcattaacgtctgggaagtgctcagaaataccttgacgagagaaaaggggctcggaggtattgagacgcggggcgtattgcgtattggaatgccatataaaacaaaagcaaacgattaa

SEQ ID NO: 49 - DNA, 261 bp, Bacillus licheniformis
atggcgaaaacgttgtccgatattaaaagatcgcttgatggacatttgggaaaaaggctgacgttaaaagcaaacggtggccgccgaaaaacgattgagcgttcgggcattttagctgagacgtacccttctgtttttgtgatacaactagaccaagacgagaattcgtttgaaagagtttcatacagttatgcggatattcttactgagacggttgaattgaggttttccgatgataaaaccagctcagtagccctttaa

SEQ ID NO: 50 - DNA, 126 bp, Bacillus licheniformis
atgtttgctgctttttgttttgcctttttttatccaaaatttttcggggaagttctgcacaaatcgagcaaagctaatacatgtcacttgttttatgatgagtcagacggatggtatgatacttga

SEQ ID NO: 51 - DNA, 186 bp, Bacillus licheniformis
atgggcagacgtcgaagcatcatgtcagaggaattcaaaaatgaattggctaaagatcttggattttacgatacggtaaaaaccgagggctggggcggaattcgggccagagacgccggcaacatggtgaaaagggccatcgaattagccgaacagcatatggctcaaaatcagcaaaatcattaa

SEQ ID NO: 52 - DNA, 870 bp, Bacillus licheniformis
ttgcgtattttagagaaggcgccggctaaaattaatttgtcgctcgacgttcgccgcaaacgtccagatgggtatcatgaagtagagatggtcatgacgacgattgatttggcggatcgggtcgaattaacagagctggcagaagataaagtaacggtttcttcgcataaccgctttgttcccgacgatcagcgaaaccttgcttatcaggctgcaatgctcatgaaagaacgctacggcattaaaaaaggggtttccatttttattacgaaagtgattcccgttgctgcgggccttgcaggaggaagcagcgatgcggctgccgtcttcagaggattgaaccggctgtgggatttgaagctttcgatgaatgaactggctgagcttggcgctgagatcggatctgatgtctccttttgcgtacatggaggaacggctcttgcaacgggaaggggagagaaaatccgtcatatcgagactccgccgcactgctgggtagtgctggcaaagccgacgatcggcgtatcaactgcagaagtgtacaagcagctgaaagtcgacgagattgaacatccggatgttcaaggtatgattgctgcgattgaagagaagaattttcaaaaaatgtgtgacaagctcggcaatgtactcgaatctgttacattgaacatgcaccccgaagtcgcgatgatcaaaaatcaaatgaagcggttcggcgccgatgctatgctgatgagcgggagcggccccactgtgttcggacttgttcaatacgaatcaaaagtgcaaagaatctataacggattaagagggttttgcgatcaggtttatgcggtgcggatgatcggagaacaaaatgaacttgattaa

SEQ ID NO: 53 - DNA, 834 bp, Bacillus licheniformis
atgaagtttcgtcgaagcggcagattggtggatctgacaaattatttgttgacccatccgcatgtcttagtgccattaaccttcttttcagaacggtatcaatctgctaaatcatccattagtgaagatttaaccatcattaagcagaccttcgagcagcagggaatcggaacgcttcagaccgtgccgggagcagccggcggcgttaaatacattccaaaggtaaaacgcgatgaagcggaggaatttgtaaagtcgctcggtgagtcattgatcgattcggaacggatattgcccggcggatatttgtatttaaccgatattcttggaaagccctctgtattaacgaaggccggcaaaatttttgcttccgctttttcagacagggagatcgatgtcgtgatgacggtggcgacaaaaggcattcctttggcatatgcggtagccagctaccttgatgtgccgacagtggtcgtcagaaaagacaataaggtaaccgaagggtcaacggtcagcatcaactatgtgtccggatcatccaaccgcattcagacgatgtctcttgcaaaacgaagcttgcagacgggctcgcacgttttgatcatagacgactttatgaaagcgggaggaacgatcaacggcatgatcaatcttctcgatgaattcaatgcccatgtagcgggcatcggtgttcttgtggaagctcagggagtcaaggagcggctggtcgatgagtatatgtcccttttgactctttctgaaatcgatatgaaggaaaaaaaggtggaaatacaaaacggaaattttcagcgtttttttgcagaagatgaatag

SEQ ID NO: 54 - DNA, 378 bp, Bacillus licheniformis
atgacaaaggttgttcagacaaaagaagcaccggcggcgatcggaccgtattcacaaggaattgttgtcaacaatatgttttacagttcagggcaaattccgctgaccccgtcgggtgaaatggtgactggagacatcacagaacagacgcaccaggttttccgcaatttaaaagccgtgctgaaagaagcgggcgcctctctggagactgtcgtcaaagcaaccgtgtttctggcggatatgaatcaattcacagaggtgaatgaagtttacggacagtacttcgatacccacaaaccggcgagatcatgcgttgaggtggcgaggctgccgaaagacgcgcttgttgaaatagaagtcatcgcattagtgaaatag

SEQ ID NO: 55 - DNA, 117 bp, Bacillus licheniformis
atggttttggtctcaaaatcatcttttttgtttggaaaatttgtcaattcagtgtttttttatcccaatattacaaaaatatttttaattatgcaggaaaacaaaaaaagccgttga

SEQ ID NO: 56 - DNA, 294 bp, Bacillus licheniformis
gtggaagttaccgacgtaagattacgccgcgtgaataccgatggtcgcatgagagcgattgcatccatcacgctggatcacgaatttgtagtgcatgatattcgtgtaattgatggaaacaatggtcttttcgttgcgatgccaagtaagcgtacacctgatggagaatttcgtgatatcgctcatccaatcaactcaagcacccgcggaaaaattcaggacgcggtgttaaatgaatatcatcgtttgggtgacgttgaggaaatagaatatgaagaagctggagcttcttaa

SEQ ID NO: 57 - DNA, 1371 bp, Bacillus licheniformis
atggataagcggtttgcagttgtgttagcagctggtcaaggaacaagaatgaaatcaaagctatataaagttcttcatcctgtttgcggaaaacctatggtcgagcatgttgtcgatgaagctcgcaagctatcattagaaaaacttgtcacaatagttggacatggtgcggaagatgtcaaaaaacagctcggggaaaaaagcgaatatgccctgcaggctgaacagctcggcacggcccatgccgtcaagcaggccaagtcgattcttggaagcgaaaaaggaacaacaatcgtcatctgcggagataccccgcttttaactgccgaaacgatggaagccatgctcacggagcatcagaaaaaagcagcaaaggtgacgattttaaccgctgtagcggaagatccgacaggctacggacgcattattcgcaatgaaaacggcgatgttgcaaagattgtcgaacacaaagatgcaacagaagaggaaaggcttgtcaaagaaatcaacacaggcacctactgttttgacaacgaagctctttttcaaacgatcgagcaggtttccaatgacaacgtacagggggaatattatcttccggatgtcattgagatcttgaaaaatcaaggtgaaactgtagccgcttatcagactggcaacttccaggaaacgctcggagtcaatgacagagtcgccctatcacaagcggaaatctatatgaagcagcggatcaataaacgccacatgcagaacggcgtcagcttaatcgatcccgacaacacatacatttcaccggaagccgtgatcggcagggataccgtgatttatcccggcaccgtcattaaagggcgggttgttatcggtgaagacgcggtcatcggacagaacagcgaactggaaaacagtacggtcggcagcagaacggtcattaagcagtccgttatcgtggacagtgaagtcggcgacgatgttacaatcggaccgtttgctcatatcaggcccgactcaaagatcggcaatgaggtaaggatcgggaatttcgtcgaagtgaaaaaatcggaatttggtgatcgcagcaaagcatctcatttaagctacataggggacgcggaaatcggaacggatgtcaatctcggctgcgggtcgattaccgtaaattatgatgggaaacataagtttaaaacgaaaattgaaaatggggcatttatcggctgcaactccaatttggtcgctccggtgacaatcggcgaaggcgcatacgtagctgcgggttcaacgattaccgacgatgtgccaggccgggctttgtcaattgccagagcaagacaagtcaataaggaagactacgctgagaacatacacaaaaaataa

SEQ ID NO: 58 - DNA, 951 bp, Bacillus licheniformis
atgtctaaatatgaagacgacaatttgaagattttttctttaaactcaaatccgggtcttgcgaaggaaatcgcggatatcgtcggagttgagctgggaaagagttctgttaaacgctttagcgacggtgaagtccaaattaacattgaagaaagcatccgcggctgcgactgctatgtcatccaatcgactagcgcgccggtgaacgagcatatcatggagcttttgatcatggtggatgcgctgaaacgcgcgtcggcgaaaacgattaatatcgtgatgccttactacggctatgcccgtcaggaccgtaaagcgcgttcccgcgagccgatcacagccaaactcgtggcaaatctgctggaaaccgccggagctacccgtgtgattgcacttgaccttcacgcgccgcaaatccaaggtttctttgatataccgatcgatcatttaatgggtgttccgattttaggaaattattttgaagagaaaaatttcaaggatatcgtgattgtgtcccctgaccacggcggtgtgacccgtgcccgcaaattggcggaccgcttgaaagcgccgattgcgattatcgacaaacgccgacctaagccgaatgtagccgaggttatgaatatcatcgggcatatcgaaggaaaaacagccattttaattgatgatattattgatactgcaggaacgattacgctggcggccaatgcgctcgttgaaagcggcgcagaggaagtgtatgcatgctgtacacatccggttctttccggtccggcgatcgaaagaatcgacaattccaaaattaaagagctcgttgtgaccaacagcattgagcttcctgaagaaaagaaaatcgcgaaattcaagcagctttctgtcgcaccgcttctggcagaagcaattattcgtgtgcatgagaaacaatctgtcagcttcctgttcgattaa

SEQ ID NO: 59 - DNA, 627 bp, Bacillus licheniformis
atggcaattttaaaagcggaagaaagaacggattccagacggtcttctttaagaagaattcggcaatccgggtatgtgccgggtgtcatttacggaagaaatctggagaacaaatccgttgcgttagacagtatcgagcttttaaaaatcttgcgcgctgagggcaaaaatacgattatcaacttggatataaacggtgaccaacactctgttatggtgactgagctgcagacggatccgttaaaagattcaatcgtacatgccgattttaaagtggttgatatggaagcggaaatggaggcgacggttcctgtaaaccttacgggtgaagcagagggcatcaaacagggcggtgttcttcagcagccgctttacgagctgtctgtcacagcaaagccgaagaacattccgcagacgatcgaggttgatatttccagtctcgaagtcaatgatgttctaaccgtcggcgatattccgaccaaaggcgattattcatacaaccatgagcctgatgaagttgttgcatccattcttcctcctcaaaagcaggaagaaacagaagccgaatcagctgctcaagacgttgaggaaccagaaaaaggcactgaagaggaaaaagaagaataa

SEQ ID NO: 60 - DNA, 567 bp, Bacillus licheniformis
atgcttgtgtttgcaggattgggcaatccgggtaaaacatatgaaaatacgagacacaatgtaggttttatgacgattgacgagctctcgaaagagtggaacattccgcttgataaaacaaagttcaacggacaatacggaatcgggtttgtttccggcaaaaaggttctacttgttaagccgcttacatatatgaatttatcgggagaatgtttgaggccgcttttggactattacgagatccctgttgacaatttgaaagtgatttacgatgatttggatcttccgaccggaagaatccgtctgaggacgaaaggaagcgcaggaggccataacggcatcaaatcgacgattcagcatctgggaacaagtgagtttaaccggatcagaatcggaataggccgtccggtaaacggcatgaaagtcgtcgattatgtgcttggcgcttttacagatgaagaagagccggcgataaaagaggccgtcagacaatcggccaaggcctgtgaagcttctttggaaaaaccttttttagaagtcatgaatgaatttaacgcaaaggtataa

SEQ ID NO: 61 - DNA, 231 bp, Bacillus licheniformis
atggctttacattattattgccggcattgcggcgttaaagtcggaagtcttgaccattcttatgtaaacagtgaacagttaggctttaaccacttaacaaatgatgaaagaaacgatatgatttcttatatggataatggggatttacacgtgaagacgatatgtgaagattgtcaagaagcgcttgagcgaaacccggattatcaccaatatcattcatttattcaatag

SEQ ID NO: 62 - DNA, 3534 bp, Bacillus licheniformis
ttgaacaatattcaatcctatataacaaaaagcgatgattttaaatccatcgtcaacggcttgaacgaagggctgaaggaacagctgcttgcggggctctccggatctgcccggtcgttatttacagccgctcttacaaaagaaacgagacggccggtatttttaattacgcataacctttatcaggctcaaaaaattacagatgatttaacagggctgataaaagatcagcctgtccttttatatcctgtcaacgaattgatttcttctgaaatagcggtggcaagccctgagctgcgctcgcaaaggcttgatgtcttaaataggcttgcaagcggtgaaacgcctatcgttgttgctccggcagcagccgtcagaagaatgctgcctcctgtcgaagtatggcaaaacagtcagattcacattgagacggggcgcgacattgacacggaacagctgctccagaagctcgttcaaatggggtatgagcgtacagatatggtggcggcgccaggcgaattcagcatacgcgggggcattatcgatgtctactctttgactgaagaaaatcctgtccggattgaattgtttgatacagaagttgactcgattcgtatattcaatacggatgatcagcgctcactggaaacgcgcgatgaagtaacgatcggccctgcgaaggaactgatcgtgcgggatgaagacaggcaaagggcgcttgaacaaatcgatcaaggccttgccaacagccttaaaaagctgaagctcgataaacaaaaggaaattctcgaccaaaatatcgcggaagacaaagagcggctcaaggaagggcatatcggccaggaaatggtcaaatacctttcttatttctatgagaagcctgctagtttactagattatttcccgaaaaataccttgcttatactagatgaaataagccgtattcatgaaatggaagaccagctgcaaaaggaagaggcagaatggattacgagcctgcttgaagaagggaaaatccttcatgatacatcgatgtcatttccttttcacagcctcatttcaaaacagtcccgcccgattttgtattactcgctgtttttaaggcatgtgcagcacaccagtccgcaaaacatcgtcaatgtttcaagcaagcaaatgcagagctttcacggacaaatgaatgtgctcaaaaatgagatcgaacggtttaaaaaatcgaaatatacgacggtttttctcggagacagcaaagagcgcgtcgaaaaactagcatctgtactgtccgactatgacatcgaagccgcacaggccgaccaggatgcagcgctcgcccaaggccagatttacattatggaaggcggtcttcaatccggttttgagcttccgatgatcaagctggccgttatcacggaggaagagctgtttaaaaagcgtgtcaaaaagcaggcgcgcaaacaaaaactgaccaatgccgaacggattaaaagctactcggagcttcagatcggcgattatgtcgttcatgtaaaccacggtatcggaaagtatttagggattgaaacgttggagatcaacggcattcataaggactacctgaatattcactaccagggaagcgacaagctttacgtaccggttgaccaaattgatcaggtgcaaaaatacgtcggttccgaaggtaaagagccgaagctttataaactcggtggaagcgaatggaaacgggttaagaaaaaggttgaaagctctgttcaggatatcgccgatgacttgatcaagctctatgccgaaagagaagcaagcaaaggctacgcgttttcacccgaccatgaaatgcagcgtgaatttgaagccgcatttccttatcaggagacagaggatcagctgagatcgatccatgagattaaaagagacatggaaaaagaaagaccgatggaccggctcctttgcggcgatgtgggctacggcaaaaccgaagtggcgatccgcgcagcttttaaggcgattgcagacggaaaacaggtcgcgatccttgtgccgactacgatcctagcacagcagcactatgaaacgatattggagcgctttcaggactacccgattaatatcggtttgctcagccggttccggacgagaaaagaagcaaatgaaacgatcaagggcttgaaaaacggaacggtagacatcgtgatcggcactcacaggctgttgtccaaggatgtcgtatacaaagatcttggtctgcttatcatcgatgaagaacaaaggttcggtgtcacacataaggaaaaaattaaacgcattaaagcgaatgtcgacgttttgacgttaacggcaactccgatacctcgaacccttcatatgtccatgcttggtgtcagagatttgtcagtcattgaaacgcctccggaaaaccgcttcccggtacagacgtacgttgtcgaatacaacggggccttggtcagggaagcgatagaacgcgagctggccagaggcggtcaggtttacttcctgtacaaccgggtggaggatattgaaagaaaagcagaagaaatctcgatgcttgtacctgacgccaaggtgacgtacgcccatggaaagatgacagaaaacgaactcgaatcggtcatgctgaacttcttagagggagaatcggatgtactagtcagcacgacgattattgagacgggcgttgatattccaaacgtcaatactttgatcgtatttgacgcagacaagatggggctttcccagctgtaccagctgaggggccgcgtcggccgctcaaaccgtgtagcttacgcttattttacgtaccggaaggacaaagtcctaacggaagtggctgaaaaaaggcttcaggcgattaaagaatttacagaactcgggtcaggatttaaaatcgcgatgcgcgatttgacgatccgcggcgccggaaaccttttaggtgcgcagcagcacgggttcatcgattctgtcggtttcgatttatattcgcaaatgctcaaggaagcaatagaggcgcgcaagggagatgcaccgcaagctgaaaagtttgagccggaaatcgatttggagcttgacgcatatattccgcagacgtatgtgacagacggcaagcaaaaaatagatatgtataaacggtttagagcgatttcaaccattgaagaaaagagcgagcttcaagacgagatgatcgaccgcttcggcgaatatccgaaagaagtagaatatttattcgccatcgctgaggcgaaggtatatgccatcaaggaacgcgtcgagctgatcaaacaggataaagacgccgtcagactgacaattgacgaaaaagctagtgccgaaattgacggtcaaaaactgtttgaactcggcagcaagtacggcagacagatcggccttggaatggaagggaagaaattgaaaatctcgattcaagtgaaaaaccgaaaaccggaggaatggctggaaacgcttctcgacatattgaagggccttcaaaacgttaaaaagcaaacgatcgcttcatcgtaa

SEQ ID NO: 63 - DNA, 537 bp, Bacillus licheniformis
atgaaagcaactggtatcgtacgtcgaattgatgatttaggccgggtcgtgatcccgaaggaaatccgcagaactttgcgcattcgtgaaggagaccctttggaaatatttgtggaccgggatggggaggttattttaaaaaagtattctccgatcagcgagctcggcgactttgcaaaagagtatgcagatgcgctttatgacagcatgggccattccgtgctgatttgcgaccgggatgtgtatatcgcagtatccggggggtctaaaaaagactatttaaacaaatcgatcagcgacatggtcgaaaaggcgatggatcagcgcacttctgttttggacggagacgcgaagacgattcagcttattgatggtattgacgaagaggttgcttcttataccgtcggcccgattgttgcaaacggcgacccgatcggagcggttgtcattttttcaaaagaccagtcaatcggcgaagtggaacataaagcggttgaaactgccgccggctttttggcccggcaaatggaacaatag

SEQ ID NO: 64 - DNA, 1593 bp, Bacillus licheniformis
atggggtttttaaagggccaaagacaattgctttggcaaggcgcctttgtactttcattggcggggatattatcaaagatattaagcgctgtatatagagtgccttttcaaaatatagttggagatgtcggtttttatatttttcagcaggtgtacccgatgatcggaatatctgtcatgcttgccacctccgggttcccggtcatcatttcaaagttgctgaatgattacgggtccgcaaaccgggcaaagattctccgcgtgtctatgctctttttatcggctgtcggcctcggcttttttctactcttgtttgccggagctggagccatcgcagggtttatgggcgatctcgaccttgccggggtgatccgcgccgtgtcgttttcttatttgctgcttccgtttgtgtctttgctgagaggctattttcaaggaagcgaacggatgctgccgacggcactttctcaaattggagaacagacacttcgggttggggcgattcttgttttgacgtggtggctcgtcaaaagcggcttttccttatatgacgccggtgcaggggcggcctttggctctcttgtcggcggccttgcggcgtttttcattctcgccgtgttttgggccaagcgtgaaaagaaagccactgccgtccgaattgaggccgggacgggtgatattttaaaacagctgtgtctgtattcggttacgatttgtaccgccggcctcatgctgatcctcatccagctcgtcgacgcattgcacttgtattcattgctggccggacaaggaatggacgaacttcaggcgaaacatacaaaaggagtgtatgacagggggcagccgcttttgcagctgggaaccgtttttgctgcgagcattgcgacggctcttgtcccgtcccttacgaaagcgaagaaaaagggagaaactgcagtgctggaggaaaagatccggtattcgctaaaaatgagctttgtcatcggcactggagcagccgccggtctgatttgtattttggagccggtcaatgtcatgctgtttaaaaacagcgatggaacggctgcgctccaaattttcagcgcgtcgattctctttgcatcgctggcgatgacgatgactgctgttttgcaaggactcggcaatacatgtcttccggctgtattcgtctgctgcggcattttggtgaaagccgtattgaacgagcttctgatccccggtttcggcatttccggcgctgcttttgctactatgatgtcatttgccgctgttgcggggctcaatttttttcagctgaaaagaaaaggctggattaagctgtcggaatacaggatagcgggtgttttgttgtcggctgtgatcatgtcggccgctctggcggtgtggctttttgcatttgaagcggccataccacataaaagcagatggatctcagcggcggaaagtcttagcgcagttttcgtcggcggcgttgtctttttgtccggtatcttcacattgcgcgtgttttcagaaaaagaacttgagcttgtgccttttggcagcaagctcctgacattaaaacgagaaaggggcggcaggcatgggcggtaa

SEQ ID NO: 65 - DNA, 1470 bp, Bacillus licheniformis
atgggcggtaaaatcacggtagtcggccttggggcaggcgatatgaatcaattaaccctcggtgtatataaacggctcacacaagcggaggttctttatgtcaggacgaaagaccatccattaatagaagacctgaaaaaagaaatagcggagattcatttttttgatgaggtctatgaaaagcatgatcaattcgaagatgtttacgaggagatcgtagagcggctttttgaggaggcgaagcagggggatgtgctctatgccgttccaggccatccgttcgtcgctgaaaaaacggtccagcttttgcttgagaggcgtggggctcatcaggccgatgtcgtcgtcgagggaggccacagctttattgatgcgacgttaaatgctttgcagatcgatccgattgacgggtttcagtttgtcgatgccgtccggttttcagccgacgaagtcgagctccgtcatcatttgattatttgccaggtatatgatcaaatgacggcttcagaggtcaaactgacgttaatggaaaagcttcctgatgactatgaagtcgtcattgtaacagcggccggaagcagcatgcaagacattcggacagtgcctctttacgaattggacagaagcgtgggcatcaataatttaacgagcgtctatgtgccgcctgtcaaagacgaagagattctccaccaggaattttcgatgttccgcagtgtcatcagaaagctgcgcggaccggacggttgcccttgggaccgaaaacaaacccatgagtcgctcaaaaagtacttaatcgaggaatgctatgaggtgctagaggcgattgatgaagaagatcccgaccacttagtagaggagcttggcgatgtgatgctccaagttcttctgcatgcgcagatcggcgaggatgacggcctttttacaattgacgatgtgattcgcggcatcaccgcaaaaatgatcagaaggcatccgcacgtcttcggagaggtctctgttcgtgatgaggccgacgtcatggtaaactgggaagagatcaagaagcaggagaaacaagcggacgataaatccctcctcgacgatattccaaagccgcttcctgctttgtcaaaagcgaacaagcttcagaaaaaggcggcaaagaccgggttcgactggtcgaatgtccaggatatttgggataaagtccaggaggaaatgaaagaattttcttcagaaatttccgaagccgaacagcacagcaaaaaaatgaaagaagagttcggcgaccttttattcgcgctcgtcaatatcggccggttttataaaattgaaccggaagaagccctcgcgatgacaaacgccaagttttacagaaggttcacatatattgaacaatctgcaaagcgcatgggcaaggatctggaaagtatgacgcttgaagaaatggacgaactgtggaatgaagcgaaaggcattgaaaggagctga

SEQ ID NO: 66 - DNA, 264 bp, Bacillus licheniformis
atgagactcgacaaatttctcaaagtatcaaggctgattaaaagacggacgcttgcaaaagaagtggctgaccagggaagaatttcgatcaatggccagcaggcgaaagcaagctctgttgtcaaagcgggggacgagcttgcggtgcgtttcggccaaaaacttgtaaccgtcaaagtcaatgaattgaaggatacgacaaaaaaagaagaagccgctgatatgtataccgttctcaaagaggagaagctgggaggagaatag

SEQ ID NO: 67 - DNA, 309 bp, Bacillus licheniformis
atgaatgtatattatgatcagcacaacccttccggcggggcatctggtcctgaacataatgtgacgatgaagggccgcaagcttctggatatatccggtgtcaagcaggtcgagagctttgacaacgaggaatttttacttgagacggtaatgggcatgcttgcagtcagaggcgaaaacctgcagatgaagaatctcgatgtggaaaaaggcgttgtctccatcaagggaagagtgcttgatctcgtctatttggatgagcagcagggggagaaagctaaaggattttttagcaagttgtttaaatga

SEQ ID NO: 68 - DNA, 627 bp, Bacillus licheniformis
atgacgctgaccacacagttctatacgatgctggccatggccggaatgggggcatggcttggcgcttcccttgacacctatacccgttttgtcgttcgctcgaaaacagcaaggtggctgttgtttctccatgactttttgttttgggtagtacaaggcctcctttttttctatgttttgctgagcgtgaatgaaggggaattccgaatttatatctttctggcggtcatgcttggttttgccgcttatcagagcctttttaagcaggtctatatcaagcttttggaatggatgatttccttttttatattcatctccaggctgggctcaaagatgatgcggatgatggtgtttcggcctgttgtatggacgtttaaagccattttagccatcattctctttacaatgagaaatatctatgttctttttcgtttttttgcggtatgtttatataagatattaaaatttgcaggatacccgatttattttatactatatcaatgctgcaggcttcttcccgccccggttcggggattgttgagacgctttttgcaaaaaggagcaggatttttcgaaaaggggaaggaactattcataacaattaaggcaaaacttttaaaaaaatga

SEQ ID NO: 69 - DNA, 378 bp, Bacillus licheniformis
atgaatgatcccacaagacgcaacatatcgcaaatacagaacgaatacaaagagcagatggagcgaaaacagcagcagctgaaaagaaaaagacgcggtctatacagacggttgatggttttcggcgccgttgtgctgctgtcggcgattgtgattgtcagctcgctctggtcgcagacttcggatatcagcgcgaagcaagagaagaaagctgagcttttgaaacaattggaacagctggaagcaaaaaaatcggatttgaaagatgagattgtgaaattaaaggacgaggactacgttgcagagcttgccagaaaggattactacctctcaaaggatggcgaaatcatcttcaagtttgaagataagagcaagtag

SEQ ID NO: 70 - DNA, 399 bp, Bacillus licheniformis
atgtcgattgaagttggcagcaagttgcaagggaaagtaacaggtattacaaatttcggagcgtttgttgaactgcctggaggatcaacaggtcttgttcatatcagcgaagtagccgataactacgtgaaggacattaatgatcatctgaaggtcggtgatcaagtagaagttaaagttattaatgttgagaaagatgggaaaatcggcttatcgatcaaaaaggctgtagaccgtcctcaatcatcaagacctgcgagacctaaaaatgatttccgctctaaagaaacgtttgaacagaaaatgaataagtttttaaaagacagtgaagatcgcttatcgtctctaaaacgcaacacggaatcaaaacgtggagggcgcggagcaagaagaggttaa

SEQ ID NO: 71 - DNA, 2490 bp, Bacillus licheniformis
atggaaaaagcggaaagaagagtgaacagcccaatagctggacctgctgttcaaaaattgtattcatggtttggcagcatgacgaagcttatgatgcagcatttatattccctctttttttataaagggctgatctatatggtcatcggttttttattgggacgagccttcattctgtcagaggtcattccctttgctcttccatttttcggagcgatgcttttaatcaaaaaagataaagctttccttgcatgcctggcgcttcttgccggagctctgagcatatcgcctcagcattcgctgttcgtgcttgcggctctgtttgcatttgcgatatgtacaaaaatgacgtcccttattataaaagaccgtgtcagaacgctgcctgtcgtcgtctttttggcgatggctgtgacaagatgcggattcgtatatgccgaatacggaacggtttcaggttatcactatattatggctttcgttgaagccggattatcgtttatcctcacattgatttttctgcaaagcctgccgattgtcacatcaaagcggcagaaacagtcgctgaaaattgaagagatcatttgttttatgattttaatcgcttccgttctcacgggcttgacaggcgtttcatttcaaggcatgcaggctgaactgatattggcccgttatgtcgtgctcgctttcgcgttcatcggaggcgcaagcattggctgtacagtcggggttgtgaccgggctgattctcagcctctcaaacatcggcaatttatatcagatgagcctgctggctttctcaggccttctcggcggtttgctaaaagaaggaaaaaagttcggcgcagcggtcggcttattgattggatctctattgatttctctgtacggagaaggttcggctgaattagtgccgacgctttatgaatctctgattgcaatcggcctgttccttttaacccctcagtcgattacgaaaaaagtggccaagtatatacctggaacgactgagcacgcccaggaacagcagcagtatgcaaggaaaatccgcgatgtcaccgcccaaaaagtcgatcagttttcgaacgtttttcacgctttatccgaaagcttcgctaccttttatcattcagctccggacgatgaaggaaaagaaaaagagatcgatctgtttttgagcacggtgacagaacattcctgtcagtcatgctataagaaaaacaagtgctgggttcagaactttgataaaacatatgatttgatgaaacgggttatgcaggaaacggaagaaaagcaatattttaaaaaccgcaagctgaaaaaggagtttcatcagcactgctccaaatcaaagcaagtagaagcgctgattgaagacgagctgactcattttagggcgaaccagacattaaaacaaaaggtgcatgacagcagacgtctcgttgcagagcagcttctcggcgtttctcaggttatggcggacttttctcgggaaataaaaagggaaagggagaagcattttattcaagaagagcaaattcgggatgcgctgcagcacttcggcatcgagattcagcaagtcgaaatatacagccttgagcagggaaacatcgatattgaaatgagtatcccgtattgcaacggccatggagagtgtgaaaaaatcatcgctccgatgctgtccgatattttggaagaacaaattatcgtcaaagcagaacagtgcgccggccatccgaatggatattgtcatgttgccttcggttcggcgaagtcatacagggtggtgacaggagccgcgcatgcagcaaaaggcggagggcttgtctccggcgacagctacaatatgatggagctcggcaccggcaaatatgccgccgccattagcgatggtatgggaaatggcgcaagggcccattttgaaagcaatgagacgatcaagctgctggaaaagattcttaagtcgggcatcgacgaaaaagtggcgattaaaacgattaacagcattctttcattaaggacaacagatgaaatttattcgacattggatttatcggtcatcgatcttcaggatgcgagctgcaagtttttgaaaatcggctccaccccgagctttattaaaagaggcgatcaaattataaaagtgcaggccagcaatctgccgatcggcatcattacagaattcgatgtcgatgttgtcagcgagcaattaaaagcgggagaccttttgatcatgatgagcgacggaatctttgaagggccgagacatgtggaaaatcatgatctgtggatgaagcgcaaattgaaatcgctgaaaaccgaggagccgcaggaaatcgccgacttaatcatggaagaagtgatccggacaaggtcgggtctgattgaggacgacatgacggtgattgtcatcaagctggaccataatacgccaaagtgggcctccattccggcgccggcttttttccaaaagaatcaagagatttcttag

SEQ ID NO: 72 - DNA, 738 bp, Bacillus licheniformis
atgaaaaaggggcatttgaatcaaatcctgcttttgacggacggctgttcaaaccgcggcgaagacccgcaggccatggctgcctttgcgaaagagcagggaattaccgtgaatgtgattgggattatggacgagcatgaaatggatcaggaggcgatgaaagaagtcgaagggatcgctctcgcaggcggaggagttcaccagttggtttacacgtcgcagctgtcgcagaccgttcaaatggtgacaaaaaaggcgatgacgcaaaccattcaaggcgtggtcaacagtgagctcaaacaaattctcggcaagcataccgaaatggatgaactgcctcctgataaacgcggtgaagtcatggaagtcgttgacgagcttggtgagaccgtgcatcttcatgtactggttcttgtcgatacaagcgcaagcatgaatccgaagcttccgaccgttaaagaagcgttgatagatctttccatcagtctcaattcaagaatcggcgaaaacgaatttgcgatgcttatatttcccgggaaaaaacaagaggtcgaacttgtgctcgattggaccccgaagtttgaatctctttcttcaatattttccaagctttcagccggtggcattacaccgacaggacccgcaatacgagaggcgattcagcattttaacaaaatcggctcaagaaggagaatgttagaagacgatgaaaaacgcttcgacgagtttggcggctag

SEQ ID NO: 73 - DNA, 1035 bp, Bacillus licheniformis
atgaaaaacgcttcgacgagtttggcggctagtctaaagccgggtgcagccgttgttggaaagtggaacaatcattcctacaagatcatcagacagcttggaaaaggggcaaatggggttgtttatctggccgattcaagaaagggccgggttgcattaaaagtgagcgatgacagcctgtccattacctcggaagtgaatgttctgaaatctttctcaaaggcccaggcaaaagcaatggggccttctttttttgatgtggatgacatgatggttacaggcaccggcaaaaaactttcattttatgtcatggaatatattgaaggtccgcttcttttaagatatgtaaacgaaaaaggcgaggaatggactccggtgctgatcagccagcttctctcaagcctgtcggcgattcatcgcgaaggatgggtgtttggagatttaaagcccgagaatttaatcgtgacgggtcctccgccgcaaatccgctgcattgatgtgggcgggacgacaaaagagggccgggcaattaaggaatatacggagttttttgacagaggctattgggaattcggcactcgtaaggctgagccgtcgtatgacctgttttcagtcgccatgattatggtgaactgtgcggtgaaaaaagaattcaagaagacagcaaggcctcaggagcagctcatgtcagtcattgacggacatccgtttttaaaacggtataaaccggttcttgcttctgctttaaaaggaagctatcgaacagctgatgaaatgaagggagatcttctggaaatcggccggccgccacgaatgcaaagcagccgccagtcgagaacagcccgttcctcatcggcatctgccccgtcgcaaggcctgcggcataagcaggggacgcctcagcagcaaaggttaaggagcgggcgcagaaagcaaagaaacccttctaaatccggcggtgtttttgaaacgctgttgatcgtcgtaagcgttcttgccctttactttgcgtatatcgttctcttttttatttag

SEQ ID NO: 74 - DNA, 1431 bp, Bacillus licheniformis
gtgaaaagtattgaagatttcatgaaaaaatacgaactgtcatttgatggagtgacgctgattgcaggtgtctccggcggacctgattcgatggcgcttttgcatgctctgcaccatacggttcccgcttctgcaacgctgattgccgcacacgtcgatcatatgttcagaggcgaagagtccgagcgtgatatgcggttcgttcaggactactgcgaggcggaaggcatacaatgcgaggcggtgcaaatcgatgtcctggcatttgccgctgaaaacaatctgaataaacaggctgctgcgagagaatgccggtatgcgttttttcaagagttaatgaaaaggcaccgggccgaatacctggttctgggtcatcatggagatgatcaggtggagacgatgctgatgaagatggcaaaaggcactgtcggaatcgggcttgccggaattcagccaaagcgccgttttgacagcggctggctgctcaggccgtttctgaggctgtcaaaggatgatcttttggcttactgcaaagagaatcgaataccgtttagaaccgatccgagcaacagtgaggatgattacaccaggaaccggttcaggcaccatgttctcccttttctgaagaaagagtcggaagatgtccataaaaggtttcaatccgtcagtgaattcctgacagaagacgaattatacttacaggcattaacgaaagacaaaatgaatacagtaatcacaagcaagtcaagttcaggcgtggaaatcagcatcgaacgacttcttgcgctccctatgcctttacaaagaaggggagttcatctaatattaaactatctttatgaaaacgttccatcagcgttttcagcccatcatattcaagtgtttctggattggatttcacaagacggaccatccggttcccttgattttccgaatgggttaaaagtcgcaaaatcttatcatacatgtttgtttacatttcagcgtttacaatgtgaaaatgtttcctatcattatgaaataagcggggcaggcgaagaagaactgatacttcccggcggctcctcccttcatgtgagcggacccggttcaacccggaagctgcaaggaaatgatgtttttgcaacaagtcccaagcaggttcagtttcccctttacgtacggacaaggcaaaacggagaccgagtcaaacttaaagggatgaacggctcaaaaaaggttaaagatatatttattgatgaaaaagtgcctctttcaaaaagagacagctggcccattgtaacagacgcggttggaaacattatctggatacctggtctgaaaaaaaccatttttgaggaacttgatgttacaaacaacgatcgcattgtattacaatatagacagcatgaaaagtgtagggggctagcaaagaatgaaacaggatattga

SEQ ID NO: 75 - DNA, 540 bp, Bacillus licheniformis
atgaaacaggatattgaaaatatcttgatctcggaagaagagatccaaaagaaagtcaaggagctgggcgcgactctgacagaagagtacagcggcaagtttccgctggcaatcggtgtgttaaaaggagccatgccgtttatggctgatcttttaaagcatattgatacatatctggaaatggatttcatggatgtatcaagctacggcagttccacggtttcttccggagaggtgaaaatcataaaggatttggacacatctgtagagggccgtgacatcttaattattgaggatatcatcgacagtgggctgaccttgagttatcttgtagagcttttccgataccgcaaagcaaaatcgattaagatcgtaacccttcttgataaaccaagcggacgaaaagcggatatcaaagcggattacgtcggctttgaagttcccgatgctttcgttgtcggatacggtctcgattatgctgaacgctatcgtaatcttccgtacatcggagtgctgaaacctgcggtttatgagagctga

SEQ ID NO: 76 - DNA, 1920 bp, Bacillus licheniformis
atgaatcgggtcttccgtaataccattttttatttacttattttattagttgtgatcggagttgtgagctacttccaaaccgcaaatccgaaaacagaaaatatgacgtatagtgactttgtttcaaacctagaaaacgggaaggttgaaaatgtctccatccagcctgtcaggggtgtgtacgaggttcgggggcagctgacgacctatgagaaagatcagtatttcctgacccatgttcctgaaggaaaaggggcagatcaaatcattgatcaagtgaaaaaaacgaagatacaaatagaacctgcgcaagaagcaaatggatggatgacgttctttaccaccatcatcccttttgttattatcttcattcttttcttcttcctgcttaatcaggctcaaggcggcggcagccgtgttatgaactttggaaaaagcaaggcgaagctctatacagaagaaaagaaacgcgtcaaattcaaagatgtggcaggagcggatgaagaaaagcaagagcttgtggaagtcgttgatttcctcaaggatccccgcaaattcgccgagctcggtgcaagaattccgaaaggcgtgcttttggtcggacctccgggtaccggtaaaacattgctggcgaaagcatgtgccggtgaagcaggggtgcctttcttcagcatcagcggatctgacttcgttgaaatgttcgtcggggttggtgcatcacgtgttcgcgacttgtttgaaaacgccaagaaaaatgcgccgtgtctgattttcatcgatgagattgatgctgtcggacgccagcggggagcaggccttggcggaggtcacgatgaacgtgaacagacgctcaaccagcttcttgttgaaatggacggattcagcgccaatgaaggaatcatcatcatcgctgcgacaaaccgcgccgatattttagaccctgcattgctgcgcccgggacgttttgaccgtcaaattactgttgaccgcccggatgtcaaaggccgtgaagctgtacttcaagtacacgcaagaaacaagcctcttgatgaatccgtaaacctaaaagcgatcgcgatgcggacgccagggttctcgggtgcagaccttgaaaaccttttaaatgaagcggctcttgtggcggcgcgtcaagataagaaaaagatcgatatgcgagacatcgatgaagcgacagaccgcgtcatcgccggacctgcaaagaaaagcagggtgatctcgaaaaaagaacgcaatatcgtggcttatcacgaggcgggacacaccgttatcggacttgtcttggatgaggcggatatggtgcataaagtaacgattgtaccgcgcggccaagcaggcggatatgccgtcatgcttcctaaggaagaccgttatttccaaaccaaacccgaacttctcgataagattgtcggcttgcttggaggccgtgtagctgaggaaatcatcttcggcgaggtcagcacgggcgcccataatgacttccagcgcgctacaggcattgccagacgaatggtaaccgaattcggtatgtctgaaaagctcggtcctcttcaattcggacaatcgcaaggcgggcaagtattcttgggtcgagatttcaacaatgaccaaaactacagcgacgcgattgcgtatgaaatcgataaagaaatccagcgcttcattaaggaatgttatgaacgtgcaaaaacaatccttactgaaaatcgcgacaaacttgagctgatcgctcaaacattgctggaagttgaaacgctcgacgctgagcaaatcaagcatttgtctgagcacggaagacttcctgatcgaacatactctgatgatcaggagaagacagatgatgtgaaagtcaacatcaataaacgagatgacgaagagaaaaacgaggatgaaaaagagtaa

SEQ ID NO: 77 - DNA, 189 bp, Bacillus licheniformis
atgaaaaagagtaatgacgctttttcgtctcttcaggaaaactgccaagctctgcttttggcagttttcttttttttatggctgaaaaaatccgctttggaaaatctttctcctcaccggtttgattcgtttacaaacagaatcggcatcgtgtattgtatgatggtagaatgttttatgtccaagtaa

SEQ ID NO: 78 - DNA, 777 bp, Bacillus licheniformis
atgttgcttgttatagatgtaggaaatacaaacaccgtccttggcatctaccacgaaggagagctcgaatatcattggcggattgagacaagccgccataaaacggaagacgaattcggcatgcttcttcgttctttatttgattatgtcggactgatgtttgaccagatcgaggggattattatttcatcagttgtaccaccgatcatgttctccctcgaaagaatgtgtatcaaatattttcagatcgagcctcagattgtcggtccgggaatgaaaacaggattaaacataaaatacgataatccgaaagaagtcggagcagaccgcattgtaaacgcagtagccgctattcatctctatggcagccccttgattgtcgttgattttggaaccgctacgacgtactgttacattaatgagcgcaaggaatatatgggtggtgcgatcgcgccgggcatcacgatttcaactgaagcgctttattcaagagctgccaagcttcccagaattgaaattgcacggcctgatcatatagtcggcaaaagtacggtcagcgcgatgcagtccggaattctttacggctatgtcggacaggttgaaggcattgtcaaacggatgaaatggcagtctaagaaaaatccgaaagtcatagcgacgggcggccttgcttccttgattgcagacgaatcggactgcatcgatattgttgacccgttccttacgttgaaggggctagagctcatttatgaacggaatcgtgttgaaagtgtatag

SEQ ID NO: 79 - DNA, 870 bp, Bacillus licheniformis
atggattatttagtgaaagccattgcatatgacggcaaagtgagggcatatgcagcgaatacaacagaaacgattcatgaagcccaaagaaggcataacacatggcctaccgcttccgccgctttaggaagaacgatgacggcggctgtcatgctcggcgccatgctgaaaggcgaagacaagctcaccgttaagattgaaggaggcggaccgatcggcgcgattgtcgctgacggaaatgcaaaaggagacgtcaggggatacgtgtccaatccgcacgttcatttcgacttaaatgaacacggcaaacttgacgtcagaagagccgtcggtacgtcaggaacgctaagcgtagtaaaagatctcggtctccgcgatttatttacaggccaggttgagatcgtttccggagaaatcggcgaggattttacttattatctcgtgtcctctgaacaggttccttcttcggtgggtgtaggggtgctcgtcaaccccgacaatacgattttagctgcaggcggatttatcctgcagctgctgccgggaacggacgacgaaaccatcacgaagcttgaaacaaacctttcacaagtggagccaatttcaaagctgattcagaaaggtttgacacctgaggaagtgctggctgcggtattgggagaagaaccggaagtactggaaaccgttcctgtccgatttacatgcaattgttcaaaagaacgtttcgcaagaggcatcatcggtcttggcaaggatgaaattcaacagatgattgatgaagatggccaagccgaggctcaatgccatttttgcaatgaaacgtatctgtttacaaaggaagagcttgaagcgcttcgagatgaaatataa

SEQ ID NO: 80 - DNA, 891 bp, Bacillus licheniformis
ttgaaatcgagaacactttggccgattattttaggtgcgatcttcgtcaattgcattgtgatcgcgtatgttctgacgaaagcgcagaccgcttcttcatcgtcagctcaagaagtcattgcccatatcggaaaaaacggcatcacgcgtgaagaatggctgagcgaaatggaagagcgctacggaaaatcaacccttgaagatatgatcaacgaccgcgtagttacccaaatggccgaaaaaaacaagatcaaagtgtctgatgatgacattgaaagagaatttctgctgattaaagctgtatacaattccttctacgaagacgaaaacacaacagaaaaagaatggaaagagcagatcaagcataatattcttcttgaagagctcctgacaaaagacattgtcatttctgacagcgaattgaagtcattctataacaaaaataaggacttatataaattcgatgattcttatcgcctcaagcatatcgttgtcaaagataaagatgaagcagaacaagttcttaaagaactgaaggaagggtccagttttgaagcggccgcagccgaacactcgactgaccggtatacggctccttacggcggcgacctcggtttcgtcaatgatcagcatgaaaacgttccggccgaatatttggagaaagctgaacaactaaaggaaaatcaatgggtggatgaaccgattaaaacaagccagggctatgcgattatccagctcaaagaaaagctcccggggcaagctttcacttacagcgaagtgaaaaatcaaatcagaaggcagatcgcgatggatcaattaggcgataaagcttctgtcaagacgctctggaaagatgcgaaagtgtcttggttttatgacgataaaaaataa
